United States Patent Application Publication US 2026/0337666 A1 - sequence listing, part 16

SEQ ID NO: 22825 - DNA, 13440 bp, Homo sapiens
  misc_feature 1..13440: note = ENST00000272845
  source 1..13440: mol_type = unassigned DNA; mol_type = unassigned DNA
gggtcctgcagtaggactcccgggagccaccattatggtgaagaggaagagctccgagggccaggagcaggacggcggccgcggcatccccctgcccatccagaccttcctgtggcggcaaaccagtgcatttttgaggcccaaactggggaagcaatatgaagcttcttgtgtgtcctttgagcgagtgttggtagaaaacaagctgcatggcctctctccagctctctctgaagccatccagagcatttccagatgggaactggtgcaagctgctttgcctcatgtcctccactgcactgcaaccctgctttcaaaccgaaacaagctaggccaccaggataaattgggtgttgctgagacaaagctccttcacactctacactggatgcttctggaggccccccaggactgcaacaatgagcggtttgggggtacagaccgaggctccagctggggtggaagcagcagtgctttcatccaccaggttgaaaaccagggttctccagggcagccttgccaaagcagctctaatgacgaagaagagaacaaccgaagaaagatcttccagaactccatggctactgtggagctcttcgtgtttctgtttgctcccctggtacacaggatcaaggaatctgacctcaccttccgtctggccagtgggcttgttatatggcagcccatgtgggaacacagacagcccggagtctctggctttaccgcactggtgaagcccatcaggaacatcattacagctaagagaagttctcctatcaacagtcaaagccggacctgtgaatcaccaaatcaagatgcaagacacttagagggactccaggtggtttgtgaaacattccagtctgattccatctcacccaaggccaccatttcaggctgtcaccgaggaaactcctttgatggaagtctgtcctcccaaacttcccaggaaagaggcccatcacattccagggcctctcttgtgatacctccgtgccaaaggtcccgctatgccacctactttgacgttgctgttctgcgctgcctacttcagccccattggtctgaggaaggcactcagtggtctctgatgtactatctacaaaggctgcgacacatgttggaagagaagccagaaaagcctccggagccagatattcctctcctgcccagacccaggagtagctccatggtggcagcagctccctcactagtgaacacccacaaaacccaagatctcaccatgaagtgtaacgaggaggaaaaatctcttagctctgaggccttttccaaggtttcactgaccaatctgcgtagatctgcagtcccagatctttcttcagacctgggcatgaatatttttaaaaagttcaagagccgcaaagaagaccgagagaggaaaggctccattccattccaccacacaggcaagaggaggccacggagaatgggagtgcccttcctgcttcacgaggaccacctggatgtgtcccccacgcgcagcacattctcctttggaagtttctctgggctgggagaagacaggcgaggaattgagaaaggaggctggcaaaccaccattttagggaaattgacccggcgaggcagttcagatgcagccactgagatggagagtctgagcgccaggcattcccactcccatcacaccctggtaagcgacctgccggacccctccaacagccatggagaaaacaccgtcaaggaagtgcgatctcagatctccaccatcacagttgcgaccttcaataccactttggcgtcattcaacgtaggctatgcagactttttcaatgagcatatgaggaaactctgcaaccaggtgcctatcccggagatgccacatgaacctctggcatgtgctaacctacctcgaagcctcacagactcctgcataaactacagctacctagaggacacagaacatattgacgggaccaataactttgtccacaagaatggaatgcttgatctttctgtagttctgaaggctgtttatcttgtccttaatcatgacatcagctctcgtatctgtgacgtggcgctaaacattgtggaatgcttgcttcaacttggtgtggtgccctgtgtagaaaagaatagaaagaagagtgaaaacaaggaaaatgagaccttggaaaagaggccaagtgagggagctttccaattcaaaggagtatctggaagttccacctgtggattcggaggccctgctgttagtggagctggagatggtggaggagaagaaggaggaggtggagatggaggaggtggaggaggtgatggaggaggaggtggaggaggtggaggcggcccttatgagaagaatgataagaaccaagagaaggatgaaagtacacctgtaagcaaccataggcttgctctaacaatgctcatcaaaatagtgaagtctttgggatgtgcctatggttgtggtgaaggacaccgagggctctctggagatcgtctgagacaccaggcccagaactgcctcactaagctatacaagctagataagatgcagttccgacaaaccatgagggactatgtgaacaaggactctctcaataatgtagtggacttcttgcatgctttgctaggattttgtatggagccggtcactgacaacaaggctgggtttggaaataacttcaccacagtggacaacaaatccacagcccaaaatgtggaaggcattatcgtcagcgccatgtttaaatccctcatcacacgctgcgcttcaaccacacatgaattgcacagccctgagaatctgggactgtattgtgacattcgtcagctggtccagtttatcaaagaggctcatgggaatgtcttcaggagagtggccctcagcgctctgcttgacagtgccgagaagttagcaccagggaaaaaggtggaggagaatgaacaggaatctaagcctgcaggcagtaaaaggtcagaggcgggaagcattgtggataaaggccaggtatcctctgcacctgaggaatgtcgcagcttcatgtctggtcgcccctcacagactccagagcacgatgaacaaatgcaaggagccaacttggggcggaaagatttctggcgtaagatgttcaagtcccagagtgcagcaagtgacaccagcagccagtctgaacaggacacttcagaatgcacgactgcccactcagggaccacctctgaccgacgtgcccgctcacgatcccgcagaatttccctccgaaagaagcttaaactccccataggtaaaaggaactggctgaagagatcatccctctcaggcctggcagatggtgtggaggacctcctggacattagctctgtggaccgactctctttcatcaggcaaagctccaaggtcaaattcactagtgctgtgaagctttctgaaggtgggccaggaagtggcatggaaaatggaagagatgaagaggagaatttcttcaagcgtcttggttgccacagttttgatgatcatctctctcccaaccaagatggtggaaaaagcaaaaacgtggtgaatcttggagcaatccgacaaggcatgaaacgcttccaatttctgttaaactgctgtgagccagggacaattcctgatgcctccatcctagcagctgccttggatctagaagcccctgtggtggccagagcagccttgttcctggaatgtgctcgttttgttcaccgctgcaaccgtggcaactggccagagtggatgaaagggcaccacgtgaacatcaccaagaaaggactttcccggggacgctctcccattgtgggcaacaagcgaaaccagaagctgcagtggaatgcagccaagctcttctaccaatggggagacgcaattggcgtccgattgaatgagctgtgccacggggaaagtgagagcccagccaacctgctgggtctcatttacgatgaagagaccaagaggagacttagaaaggaggatgaggaggaagactttttagatgacagtactgtgaacccctctaaatgcggttgcccctttgccttgaagatggcagcatgtcagcttcttctggagattaccaccttcctgcgagagaccttttcttgcctgcccagacctcgcactgagcctctggtggacttggagagctgcagacttcgtttggatcccgagttggaccggcacagatatgagaggaagatcagctttgctggggtcctggacgaaaatgaagactcaaaagattctctccacagcagcagccacactctcaaatcagatgcaggagtcgaggagaagaaagaagggagtccttggagtgcaagcgagcccagcattgagccagagggaatgagtaatgccggcgcggaggagaattaccacagaaacatgtcgtggcttcatgtgatgatcttgctgtgcaatcagcagagtttcatctgcactcacgttgactactgccatccccactgctacctgcaccacagccgctcctgtgcccgactggtcagagccatcaagctactctatggagacagtgtggactccctgagggaaagcagcaacatcagcagtgtggctctccggggcaagaaacagaaagaatgctcagataagtcatgcctgaggacaccttctctaaagaagagagtttcagatgccaatctggaaggaaaaaaagattccggaatgctgaagtacatcagacttcaggtgatgagcttgtcgcctgctcccttatctctgttaatcaaggcagcaccaattctgacagaggagatgtacggagacatccagccagctgcctgggagctcctgctcagcatggatgagcacatggcaggggcagcagctgccatgttcctgctgtgtgcagtgaaggtgcctgaggccgtgtccgacatgctgatgtcagagttccaccacccggagactgtgcagaggctgaacgctgtcctcaagttccacacgctctggaggtttcgctatcaggtctggccccggatggaggaaggggcacagcagatttttaagattccgcctcccagtatcaatttcacccttccctcgccggtgcttggaatgccatccgtcccaatgtttgacccaccgtgggttcctcagtgcagcgggagtgtccaggaccccattaatgaagaccagtctaaatccttttcagcccgggctgtgtcccgctcccatcaaagggcagaacacatcttaaagaacttgcagcaggaggaagaaaagaaacgacttggtagagaagccagcctcatcactgccatccccatcacccaggaggcttgctatgagcccacatgcacgcccaactcagaaccggaagaagaagtagaagaagtcaccaatctggcatcccgtcgactgtctgtgagtccatcctgcacctccagcacttcccacaggaattattccttccgccgcgggtcagtctggtcagtgcgttcagccgtcagtgctgaagatgaggaacataccactgaacacacgccgaaccaccatgtgcctcagcccccacaagcagtgttcccagcatgcatctgtgcagcagtacttcccattgttcatctgatggaggatggtgaggtgcgggaagatggagtagcagtgagtgctgtggctcaacaagtcttatggaactgtctaattgaagatccatcaacggttcttcgacattttctggaaaaactgaccatcagcaatagacaagatgagttaatgtacatgctgcgcaaacttctcttgaatattggagactttcctgctcagacatctcacatcctattcaactatttggtaggattaatcatgtactttgtgcggaccccctgcgagtgggggatggatgccatttcagccaccctgacattcctgtgggaggtggtgggttacgtggagggcctcttcttcaaggatctcaagcagacgatgaagaaggagcagtgtgaggtgaagctcctggtgaccgcttcaatgccaggtactaaaaccttggtagttcatggacagaatgagtgcgatatcccaacccagttaccagtccatgaagacactcaatttgaagccctgttgaaggagtgtctggagttttttaatatcccagaatcccagtcaacacattattttcttatggataaacgatggaaccttatccactacaataagacctatgttcgagatatttatcctttccggaggtcagtatctccccagctgaatcttgtacatatgcatccagagaagggacaggagctcattcagaaacaggtgttcacccgaaagctggaagaagtagggcgggtgttgtttctcatctccctaacccagaagatccccacagcccacaaacagtcccacgtctccatgcttcaggaagacctcctccgcctgccctcattccctcgtagtgctattgatgctgagttttcactcttcagtgatcctcaagctggaaaggaactgtttggcctcgacactcttcagaaaagcttgtggatccagctgctggaggaaatgttcctgggcatgccgagcgagtttccatggggagacgaaatcatgcttttcctcaacgtttttaacggggctctgatcctccacccggaagacagtgccctgctcaggcagtatgctgccaccgtcatcaacaccgcggtgcacttcaaccacctcttctctctcagcggctaccagtggattctccccaccatgctgcaggtgtactccgactatgaaagcaatccccagctgcgtcaagccatcgaatttgcctgtcaccagttctatattctacaccggaagccctttgtgctccagctgtttgctagtgtggcccctctcctggaatttcctgatgctgccaataatgggcccagcaaaggtgtgtcagctcagtgcctgtttgacttgctgcagtccctagagggagagaccaccgacatattagacatcttagagctggtcaaagctgagaagcctctcaagtcattagatttctgctatggaaacgaagatctgacattttctatcagtgaagccattaagctctgtgtcactgtggtggcgtatgctcccgaatcattcagaagtcttcagatgctgatggtcttagaagccttagttccatgttacctacaaaagctaaagaggcagacatcacaggtggagacagtacctgctgcccgagaggagattgcggccactgctgctcttgcgacgtccctacaggcccttttgtacagtgtagaggtcctcaccaggcccatgacagccccacagatgagcaggtgtgaccaaggtcataagggaaccaccacagccaatcacaccatgtcgtctggggtgaacaccaggtaccaggaacaaggagccaaactgcactttatcagggaaaaccttcatttactggaggaagggcaaggcattcccagagaggaactggatgaacgaattgctcgggaagagttcagaagaccccgggagtccttactgaatatttgcactgagttctataagcactgtgggccacggctgaagatcttgcaaaatctggctggggagcctcgggtcattgccttggaactgctggatgtgaagtctcacatgaggttggcagaaattgcacactcccttctgaagctggcaccatatgacactcagacaatggagagtcgtgggcttcggcgctacatcatggagatgctacccattactgactggacagctgaggcagtgaggccggccctcatcctcattttaaaaagattggatagaatgttcaacaaaattcataagatgcctactttgaggcgacaggttgagtgggagcctgccagcaatttgattgaaggggtttgtttgacacttcagaggcagccaatcatatccttcctgcctcaccttaggtcactgatcaatgtctgtgtcaatctggtgatgggagtggtaggaccttccagtgttgctgatggattaccccttcttcatctcagcccttatctctcaccacctctgcccttcagcacagctgttgtccggcttgtagcattgcagatacaggctttaaaagaagattttcctttaagccatgtgatctccccattcaccaatcaagagcgaagggaggggatgcttttaaatctgctcatcccatttgtgctcacagtaggatctggaagcaaagatagcccatggctggagcagcctgaggtgcagctgctgctgcagacagtcatcaatgtactcctcccaccgcggatcatcagcacatccaggagcaagaacttcatgttagagagctccccagcccactgctccacccctggggatgcggggaaagacttgcgcagggaagggctggctgagtccaccagccaagcagcatacttggcgctgaaggtgattctcgtctgctttgagaggcagctcggaagccagtggtactggctgagcctccaggtgaaggagatggctctgcggaaggtgggaggcctggccctttgggatttcctcgacttcatcgtgcggacccgaatacccatctttgtgcttttgcgccctttcatccagtgcaagctgctggcccaaccagcagagaatcatgaagagctttccgcccggcaacatattgccgaccagctggagcggcgcttcataccacgccctttgtgtaagagctcgctcattgctgagttcaacagtgaactaaaaattctaaaagaggcagttcatagtggatcagcctaccaaggcaagacatccatcagtaccgtgggcacctccacctctgcttaccgcctgagcttggccaccatgtcccgctctaacacgggcacgggcactgtctgggagcaggacagtgagccatcccagcaggcttcgcaggacaccctgagtcggactgatgaggaagatgaggaaaatgactctataagcatgcccagcgtggtaagtgaacaagaagcttacctcctgagtgccattggaaggaggcgattctccagccatgtctccagcatgtctgtacctcaggctgaggtgggcatgctacccagccagagggtggcaagtatacagagtgaacctggtcaacagaacctccttgttcagcagccgctggggaggaagaggggcctgaggcagctaagacgtcctctactatcacgtcagaaaactcagactgaacccagaaatcgccaaggggctcggctgtcaaccactcgcaggagcattcaacctaaaacgaagccgtctgcggatcagaaacgatctgtgaccttcattgaggctcagccagagccagcagctgccccaacagatgcgcttcctgcaacaggccaactacagggctgtagcccagccccttctaggaaaccagaagcaatggacgaaccagtcctcacatcttctcccgccatagttgttgcggatctccacagcgtgtctcccaagcagagtgagaacttccccactgaagaaggagaaaaggaggaggacacagaagcacaaggtgctactgcacacagtccactctctgcccaactctctgaccctgatgacttcacaggcctcgagacatccagcctcctacagcatggagacactgtccttcatatcagtgaggaaaatggcatggagaacccgctactatctagtcagttcacctttactcccactgagctggggaaaacggatgcagtattagatgagtctcatgtttaattctgtatcttgtaagctctgcaggtatagagaagacatgaaagtgatctctctactacaagttcaatacttttgcttgaaaaagattaattacaaaatagcactttacttctaatgggtggcacaaatctgaataggttttgctgccaatacacatgatgtttcataaacatcttaaaagtcaatggctaaaaggatttagttgtgtgaaaatcacaaaaccagggaggaataaggggaaagagccatttcactgcacattgtttatgattcaagaagccttcagcagttaaaaatatatactattcattgctgctttcatagaaatattaacaaatgatatgatctaaaaatagaatgcaattttttgagattactcacattatacatctcatgcaaatatttatttttatagtttaaaaaatatcaattcaggttggctatacaagtagcaatttacataaaaaaataattaataggaaaaatattactttggggagactaaataacaagcctgcagccatttttgttttgagtaacaatacagccatttagaagaagaaaaaaatactatatagagagctgtggacttttagatatttatttttcaactatcattttcattgcatgttgtaaatcaaaatgcagatggcataagatcatcccatttcataatctatcacattagaatattacagaatattctagaaatcatcagaaataattctgaattaagaacctaaacagcctatacaattataaaaactaaatgtatatataatcacttaaaagagatggtattcctattcctagccctgactacatcaataccaagattagaagctattggaaaatgtgattagtaatacttttccttatagtatcctgtgcctgccctggagggcatattttcagatattaaggttagtgttgttagaatcggtttaataaaataacattttcctaatagaaacaatattcttatgatacttggaacatctaagtttataaggaaaaatgtataaagtaagcaatttcttcatagacacctccagtttatatattttgcaaataggcctttaacttgaagttcaattacttcaagaaaagtgtaacacttagaaggcttgtgaggccaacacctagtgtgttactgatcctatggtagggctgtgcatcacgtggttcacaattgaatttcaaaattttaacagtttacattagaaaactgttacctaacaaccaagcatatacaaactcatatacatacttaaattggtacggtggtgtatgtgtgcgtgcgtgtgtgtgtgtatgtgttgtagtcctcaagatgaagttaaatatagactttaattaccctgcaatgaatttaaaacacattctgtatgcttaaactttgagtgcgttggctgtgaaatgtatacatatataaagaggatacctactaaacccaccttaatcataaaggaaaattattttttgttagaattgcttattaaataggcatactttatactgtggtttataatttcaaatataacttggggttatggtcctattcactaagagaatgaaagatatccatgagttaaaagaacaaaactaaaaatttcagatctaacaattgaaagaaaattgaggcagtaaatgacctcttttactcttttatgttttacaatattatcatgttatttacagttaatgctgaaataattctcaagtgcaggaatataaatgttaagtggttttatgattccaagctgatatatttcacctgttaaaaattatgctgctaaattagcattagaggccttatgtttggtaattacaagtgtctgggctattggcgcgtctctatatatgtgtgtgctttgttccagtttcttcaaattatctatgtataattgtatgaaatatttaaatagcaaagaagtcaaagaagattgttaaatattcaacaagaatcataaatacctttatatgtattttaaaagtattgggctgttctgaacatgattatgctggtctgtctgtcttttagcctgactccttcactcttgtgtgtgaagtctattagcaactttcaataagctaagcaatgttgtaacttgcaaaaaagcctccactctgagaaacagggccttatagagtaggaatgttttcatactgggactactgaaattttgcagatgtgtgcatctgttccatttaaggtgcccttaaatgtgttgaatgtaatgtgttgaatgtttatgtgtaatggctaaagtatctatatgtatgtgcataaaactgtcacaagatgtattctcaggaatactgttacctggagtttgaaaggaataactattaaaaaaaaaagttggggaagattagaaaaaagctcaagataaatgttcaaaatattattaagtacatgactaaaagctaattactacatatgataaatgcagtgttggtaatagtagatcatttcttaagccatgatacttaatgatatttatcttattcagaggaaaaacaaaaaaggtacccacttcccatgtagaaaaaattagactcagcaaagaggttgcttcttctgaaattagcttttgagagaccttggaataaaccatgtgttatccatgatagtatgactcagatccaattaaaacagtttaaattctggatataggatctcctatagcaaaacattttactttcatttttcagtatttgctgctttctagaattctattagataagctatgtcatttttctgaaaaagaaactgagttattgagtgtattaagacaaggcactgagaactacagtgtcaaaatcaaagggcataaatgggcatggcagtgctggtggaaaaatctgtggtactggtgatctggttagggcctgttgcacaggctgggagtaactggtttgctgtttcaagcctccaagagtaccttaaacaaggtgatagctcctctcttctttagcattatattcctttagtcaacaaagaactttctccactctgctgcccagctctgagagtatctgagatgagaataggatgtgtgtggaggggcttttagggaagaaagggtcataaatgaatagaagtacagtctgaaacatgaattaaatatccttcctcaagttataaaggatactttaatagaacacagtctccagaattcgctgctatcacaccaagtcatgctgttgccctgtgacctcacacttcccattccatggccttgtcttggcagggagtaaaaaatcccacttctttttactttagtgggtctcaactgcagcatttcagaaacaaattttgatttgacactcaggagaataaaaacaagttgagggcagaatgtatttggaaaagcttaagacaaatttactgatattattttatgatcatttaggattacagatcaatttacctccataaatctttgaattgtcactgtgaccacaggatgaaaatcctttattagccattttataggttaaaacaaaaaattgactacacagccgacttccctcagataactatgaagtctattatgagtactgaatgaccaaagaacatggaaaaaatgcatatgaataaatactgaaatgtttatgaaagatatttatgaaagatattaagacttctgtgtttaggtatgcacatatgataaaataaatctaaaaacattaaa

SEQ ID NO: 22826 - DNA, 8010 bp, Homo sapiens
  misc_feature 1..8010: note = ENST00000489023
  source 1..8010: mol_type = unassigned DNA; mol_type = unassigned DNA
caggcccagaactgcctcactaagctatacaagctagataagatgcagttccgacaaaccatgagggactatgtgaacaaggactctctcaataatgtagtggacttcttgcatgctttgctaggattttgtatggagccggtcactgacaacaaggctgggtttggaaataacttcaccacagtggacaacaaatccacagcccaaaatgtggaaggcattatcgtcagcgccatgtttaaatccctcatcacacgctgcgcttcaaccacacatgaattgcacagccctgagaatctgggactgtattgtgacattcgtcagctggtccagtttatcaaagaggctcatgggaatgtcttcaggagagtggccctcagcgctctgcttgacagtgccgagaagttagcaccagggaaaaaggtggaggagaatgaacaggaatctaagcctgcaggcagtaaaaggtcagaggcgggaagcattgtggataaaggccaggtatcctctgcacctgaggaatgtcgcagcttcatgtctggtcgcccctcacagactccagagcacgatgaacaaatgcaaggagccaacttggggcggaaagatttctggcgtaagatgttcaagtcccagagtgcagcaagtgacaccagcagccagtctgaacaggacacttcagaatgcacgactgcccactcagggaccacctctgaccgacgtgcccgctcacgatcccgcagaatttccctccgaaagaagcttaaactccccataggtaaaaggaactggctgaagagatcatccctctcaggcctggcagatggtgtggaggacctcctggacattagctctgtggaccgactctctttcatcaggcaaagctccaaggtcaaattcactagtgctgtgaagctttctgaaggtgggccaggaagtggcatggaaaatggaagagatgaagaggagaatttcttcaagcgtcttggttgccacagttttgatgatcatctctctcccaaccaagatggtggaaaaagcaaaaacgtggtgaatcttggagcaatccgacaaggcatgaaacgcttccaatttctgttaaactgctgtgagccagggacaattcctgatgcctccatcctagcagctgccttggatctagaagcccctgtggtggccagagcagccttgttcctggaatgtgctcgttttgttcaccgctgcaaccgtggcaactggccagagtggatgaaagggcaccacgtgaacatcaccaagaaaggactttcccggggacgctctcccattgtgggcaacaagcgaaaccagaagctgcagtggaatgcagccaagctcttctaccaatggggagacgcaattggcgtccgattgaatgagctgtgccacggggaaagtgagagcccagccaacctgctgggtctcatttacgatgaagagaccaagaggagacttagaaaggaggatgaggaggaagactttttagatgacagtactgtgaacccctctaaatgcggttgcccctttgccttgaagatggcagcatgtcagcttcttctggagattaccaccttcctgcgagagaccttttcttgcctgcccagacctcgcactgagcctctggtggacttggagagctgcagacttcgtttggatcccgagttggaccggcacagatatgagaggaagatcagctttgctggggtcctggacgaaaatgaagactcaaaagattctctccacagcagcagccacactctcaaatcagatgcaggagtcgaggagaagaaagaagggagtccttggagtgcaagcgagcccagcattgagccagagggaatgagtaatgccggcgcggaggagaattaccacagaaacatgtcgtggcttcatgtgatgatcttgctgtgcaatcagcagagtttcatctgcactcacgttgactactgccatccccactgctacctgcaccacagccgctcctgtgcccgactggtcagagccatcaagctactctatggagacagtgtggactccctgagggaaagcagcaacatcagcagtgtggctctccggggcaagaaacagaaagaatgctcagataagtcatgcctgaggacaccttctctaaagaagagagtttcagatgccaatctggaaggaaaaaaagattccggaatgctgaagtacatcagacttcaggtgatgagcttgtcgcctgctcccttatctctgttaatcaaggcagcaccaattctgacagaggagatgtacggagacatccagccagctgcctgggagctcctgctcagcatggatgagcacatggcaggggcagcagctgccatgttcctgctgtgtgcagtgaaggtgcctgaggccgtgtccgacatgctgatgtcagagttccaccacccggagactgtgcagaggctgaacgctgtcctcaagttccacacgctctggaggtttcgctatcaggtctggccccggatggaggaaggggcacagcagatttttaagattccgcctcccagtatcaatttcacccttccctcgccggtgcttggaatgccatccgtcccaatgtttgacccaccgtgggttcctcagtgcagcgggagtgtccaggaccccattaatgaagaccagtctaaatccttttcagcccgggctgtgtcccgctcccatcaaagggcagaacacatcttaaagaacttgcagcaggaggaagaaaagaaacgacttggtagagaagccagcctcatcactgccatccccatcacccaggaggcttgctatgagcccacatgcacgcccaactcagaaccggaagaagaagtagaagaagtcaccaatctggcatcccgtcgactgtctgtgagtccatcctgcacctccagcacttcccacaggaattattccttccgccgcgggtcagtctggtcagtgcgttcagccgtcagtgctgaagatgaggaacataccactgaacacacgccgaaccaccatgtgcctcagcccccacaagcagtgttcccagcatgcatctgtgcagcagtacttcccattgttcatctgatggaggatggtgaggtgcgggaagatggagtagcagtgagtgctgtggctcaacaagtcttatggaactgtctaattgaagatccatcaacggttcttcgacattttctggaaaaactgaccatcagcaatagacaagatgagttaatgtacatgctgcgcaaacttctcttgaatattggagactttcctgctcagacatctcacatcctattcaactatttggtaggattaatcatgtactttgtgcggaccccctgcgagtgggggatggatgccatttcagccaccctgacattcctgtgggaggtggtgggttacgtggagggcctcttcttcaaggatctcaagcagacgatgaagaaggagcagtgtgaggtgaagctcctggtgaccgcttcaatgccaggtactaaaaccttggtagttcatggacagaatgagtgcgatatcccaacccagttaccagtccatgaagacactcaatttgaagccctgttgaaggagtgtctggagttttttaatatcccagaatcccagtcaacacattattttcttatggataaacgatggaaccttatccactacaataagacctatgttcgagatatttatcctttccggaggtcagtatctccccagctgaatcttgtacatatgcatccagagaagggacaggagctcattcagaaacaggtgttcacccgaaagctggaagaagtagggcgggtgttgtttctcatctccctaacccagaagatccccacagcccacaaacagtcccacgtctccatgcttcaggaagacctcctccgcctgccctcattccctcgtagtgctattgatgctgagttttcactcttcagtgatcctcaagctggaaaggaactgtttggcctcgacactcttcagaaaagcttgtggatccagctgctggaggaaatgttcctgggcatgccgagcgagtttccatggggagacgaaatcatgcttttcctcaacgtttttaacggggctctgatcctccacccggaagacagtgccctgctcaggcagtatgctgccaccgtcatcaacaccgcggtgcacttcaaccacctcttctctctcagcggctaccagtggattctccccaccatgctgcaggtgtactccgactatgaaagcaatccccagctgcgtcaagccatcgaatttgcctgtcaccagttctatattctacaccggaagccctttgtgctccagctgtttgctagtgtggcccctctcctggaatttcctgatgctgccaataatgggcccagcaaaggtgtgtcagctcagtgcctgtttgacttgctgcagtccctagagggagagaccaccgacatattagacatcttagagctggtcaaagctgagaagcctctcaagtcattagatttctgctatggaaacgaagatctgacattttctatcagtgaagccattaagctctgtgtcactgtggtggcgtatgctcccgaatcattcagaagtcttcagatgctgatggtcttagaagccttagttccatgttacctacaaaagctaaagaggcagacatcacaggtggagacagtacctgctgcccgagaggagattgcggccactgctgctcttgcgacgtccctacaggcccttttgtacagtgtagaggtcctcaccaggcccatgacagccccacagatgagcaggtgtgaccaaggtcataagggaaccaccacagccaatcacaccatgtcgtctggggtgaacaccaggtaccaggaacaaggagccaaactgcactttatcagggaaaaccttcatttactggaggaagggcaaggcattcccagagaggaactggatgaacgaattgctcgggaagagttcagaagaccccgggagtccttactgaatatttgcactgagttctataagcactgtgggccacggctgaagatcttgcaaaatctggctggggagcctcgggtcattgccttggaactgctggatgtgaagtctcacatgaggttggcagaaattgcacactcccttctgaagctggcaccatatgacactcagacaatggagagtcgtgggcttcggcgctacatcatggagatgctacccattactgactggacagctgaggcagtgaggccggccctcatcctcattttaaaaagattggatagaatgttcaacaaaattcataagatgcctactttgaggtgagaatgcctccgagttagctgttgctatcacaaatgtcaaagttaagatttgtcattttttaagatggtggatcattctggagttgaatggatgacttgaaagttttctttggtatatgtgcatagttaatagggtctatgaatgcctaagtagcaaagcctacattttgagaaaaataacattttctttaaaagtatatgtgctcatcttgaaaaaaatctatccatttcttagctatcatgctcctcatctgacacatataaaaatttcaattagtaccctttaatcccttttaaaataagggagggttggccttataaatgaaacaactaatgagaaaagaaaaggaattttatgttcaaaatactatatttaacatagctagttaacatatttaggtaccagtttagagaaattccaagctttacaataatcgccaagcagaagcttaaaaattcgcaggattgaaaacaaacacctagttttcacttttttacctaattcagtgtggtactaaatgaacactattaatgcttgatctttgttcagtgacctgggaaatattaattggtagcctacatattagcagatgtttttgaaccactctacttagagatgtgagccgagtttggaaactgtagtgatagtgagcagatagttcaacagattaacactggtaaacccacttactcggaaatttcaagtttaggttagtgagaaaattttctgtccttttaaactaaacccaaaaatcagtgtgactccttcccaagaatttatagcacttaatgttcaattcatcagaatttttcaggtattagtccataatctccttcacactaatccagctttcaggagtcattaaaaaaacaaatggaaaagttttattctaataattgattatttgtttttatattcttttataccgtggtgatgactacctatacattatttcaaggttatttatttcaatggcatggaaatgcttgttttaaaacactatttctttagtgatcccaatagaacatttgtgtctatcagcaaatggcttatcaaagatttataactgtctcacaagggtgcgtcaaaataaattcctttcttaaatacttcatatctaaagacgttaaacatctccaaaaatgacccatttatgcttcccgaaagtagatttctggattagtacataggcttggtcagttataggcaattttctcgggagataggctatgaatatggagttggcttggatttaaattcattaggtgatctcagttcaacacaagaaatgttgactgaacctgacctgcatattaccttcagtgtcggagatgtcacatagcctcatttatgaatacatttccatttgtcattgcagattccatttcgctagaaaatataagcttagaaagtattgccaggaaaatataaggaaatactgttaatatcagtaaagcccaagctgtttattttggggccacagggatgaatcagtactagaagaattatgaaatggattgacttttattacagaaaatcccatattcatttaattgggttatgtatacagtaacaccatttatactaccatagaaagtagccaaaaaatacatatcatgtcttgggaggccaagaaagaacattgtttaaataaactattttcttctaatgtgatcttcttggcaggagttaagctatataaatcaaattagtggtagtctggtgtaaaaactgatgggcgtgtgtaatctgataaacaggtttcagaaatgtagctggggtcagattagttctattgggagtaattacccctgtgatcagttttctatgatggtagtcttaggaccctctgtcaaagctaaaaccagggaaattaaaatgcaacccattcatcatctctgttttttcttcaatagatttagtcgagtggggcaggcctgcctctgctacgttttcagtatcttcttcccctcccagtatgctctgtgcttttggaacaatatgggtaaacttcatcccagagacacatcctgtcttagatggcatcagaatcactgtctcattcacttgtttcagactctccagaagggagccaagacgctaatggcgcctatattgtattccaggcgacaggttgagtgggagcctgccagcaatttgattgaaggggtttgtttgacacttcagaggcagccaatcatatccttcctgcctcaccttaggtcactgatcaatgtctgtgtcaatctggtgagtagccaagtggcaatcttatgaaactttgcacaatgtaactctgctattgacttctctgaattgaagatttacaggtcaaccactttgtgcccctatctgcccatgaaaacagacggctcaggtgacactgaaaatagtgaggtacatttcaaggtggtgtgtggggagatccaggaacccatccctacacagaagggattttggtgtgctgcttcccatgcactactttgacaattcacctcttcaagttgcgctgagagttgagggctgccagttggagagtggggtggcggagcctgcacaattggctagaagttgaggtagtctggggtggggaacttaaaatgcaaagaggatatttttctcttatggtgcaaaatgacactatgagttggccagtctaggatttatgtgaag

SEQ ID NO: 22827 - DNA, 550 bp, Homo sapiens
  misc_feature 1..550: note = ENST00000477301
  source 1..550: mol_type = unassigned DNA; mol_type = unassigned DNA
aggagacataaggtctctctgcatgcatacaccaaggaaaagccacatgaggacataaccaggaagagagccatcaccaagaacccgaacatgcggacaccctgatctcagacttccagccttcagaaccgttgccacagttttgatgatcatctctctcccaaccaagatggtggaaaaagcaaaaacgtggtgaatcttggagcaatccgacaaggcatgaaacgcttccaatttctgttaaactgctgtgagccagggacaattcctgatgcctccatcctagcagctgccttggatctactatgcggcattcttctgattcatttttctccatttgtgctgtttttctctgtgatgtgaatccatccctatccattatgtcatgcctccatcttttgctgcttcttcagattgcactgagccataagaggaagcccctgtggtggccagagcagccttgttcctggaatgtgctcgttttgttcaccgctgcaaccgtggcaactggccagagtggatgaaagggcaccacgtgaacatcaccaag

SEQ ID NO: 22828 - DNA, 526 bp, Homo sapiens
  misc_feature 1..526: note = ENST00000481494
  source 1..526: mol_type = unassigned DNA; mol_type = unassigned DNA
tttttatatttttagtagagatgagatttcaccgtattggccaggctggtctcaaactcctgacctcgtgatctgcccgcctcagcctcccaaagtgctgggattacagtcttcagatgctgatggtcttagaagccttagttccatgttacctacaaaagctaaagaggcagacatcacaggtggagacagtacctgctgcccgagaggagattgcggccactgctgctcttgcgacgtccctacaggcccttttgtacagtgtagaggtcctcaccagatacctcctaaactcagccctttatgccttataactgtgaacagttcgcccatgacagccccacagatgagcaggtgtgaccaaggtcataagggaaccaccacagccaatcacaccatgtcgtctggggtgaacaccaggtaccaggaacaaggagccaaactgcactttatcagggaaaaccttcatttactggaggaagggcaaggcattcccagagaggaactggatgaacgaattgctcgg

SEQ ID NO: 22829 - DNA, 2253 bp, Homo sapiens
  misc_feature 1..2253: note = ENST00000333907
  source 1..2253: mol_type = unassigned DNA; mol_type = unassigned DNA
attcccagagaggaactggatgaacgaattgctcgggaagagttcagaagaccccgggagtccttactgaatatttgcactgagttctataagcactgtgggccacggctgaagatcttgcaaaatctggctggggagcctcgggtcattgccttggaactgctggatgtgaagtctcacatgaggttggcagaaattgcacactcccttctgaagctggcaccatatgacactcagacaatggagagtcgtgggcttcggcgctacatcatggagatgctacccattactgactggacagctgaggcagtgaggccggccctcatcctcattttaaaaagattggatagaatgttcaacaaaattcataagatgcctactttgaggcgacaggttgagtgggagcctgccagcaatttgattgaaggggtttgtttgacacttcagaggcagccaatcatatccttcctgcctcaccttaggtcactgatcaatgtctgtgtcaatctggtgatgggagtggtaggaccttccagtgttgctgatggattaccccttcttcatctcagcccttatctctcaccacctctgcccttcagcacagctgttgtccggcttgtagcattgcagatacaggctttaaaagaagattttcctttaagccatgtgatctccccattcaccaatcaagagcgaagggaggggatgcttttaaatctgctcatcccatttgtgctcacagtaggatctggaagcaaagatagcccatggctggagcagcctgaggtgcagctgctgctgcagacagtcatcaatgtactcctcccaccgcggatcatcagcacatccaggagcaagaacttcatgttagagagctccccagcccactgctccacccctggggatgcggggaaagacttgcgcagggaagggctggctgagtccaccagccaagcagcatacttggcgctgaaggtgattctcgtctgctttgagaggcagctcggaagccagtggtactggctgagcctccaggtgaaggagatggctctgcggaaggtgggaggcctggccctttgggatttcctcgacttcatcgtgcggacccgaatacccatctttgtgcttttgcgccctttcatccagtgcaagctgctggcccaaccagcagagaatcatgaagagctttccgcccggcaacatattgccgaccagctggagcggcgcttcataccacgccctttgtgtaagagctcgctcattgctgagttcaacagtgaactaaaaattctaaaagaggcagttcatagtggatcagcctaccaaggcaagacatccatcagtaccgtgggcacctccacctctgcttaccgcctgagcttggccaccatgtcccgctctaacacgggcacgggcactgtctgggagcaggacagtgagccatcccagcaggcttcgcaggacaccctgagtcggactgatgaggaagatgaggaaaatgactctataagcatgcccagcgtggtaagtgaacaagaagcttacctcctgagtgccattggaaggaggcgattctccagccatgtctccagcatgtctgtacctcaggctgaggtgggcatgctacccagccagaggtaaacagctatggttatactgtactctgcatttgggggcaaagttagaaattctgaaaatacactcctgttattctacaaagacagaaagagaagcaagcaatggtaatgtttttagatagatcattccacaaaggatttgtcaactaggttcctgcaggcaacactttgcagttttctaagccaagctagtagaagggatcccaatttccaagtattgtctctccttaaaaattttccatagacacatggtcttctttctgttgtcaaatggcattcttgtatttcagatttatcattagctaagctaatgatgggtacttggcaagagtttggaccatctttatgtttttggtaaagtttaggcttctgatatattattagtattcagttgtaggtagtgacacttaaccaagcagaaaaggatctatgccactgagtgtgaccttgggcaggtcatttaaccgtaatccacagttctccctctgtaaaatgaagaggtttgctaaaatgatctttaagataacttctcatctatagttctatgattccatgacaaaacccctttaaatattttgtgtgttctctgtctcttaagaatataagtaaaaaaaaa

SEQ ID NO: 22830 - DNA, 2686 bp, Homo sapiens
  misc_feature 1..2686: note = ENST00000477924
  source 1..2686: mol_type = unassigned DNA; mol_type = unassigned DNA
tcccgctggtcttctctagctgacctaagcaattctgtgaacagagaaacatcacattcccagagtcagaaaatcattatgaccaatggccattttggcatttggagggaggggacagcaagagtcagagaggcctggcgctccctctagaggccaatacctattaaaggttaaatgaactggaaatgatttagctctgtgcctggcacagatctggacacaatagatactaatgctaatgagaatggttcaaatactatgttaaacactggggatgtaaactaaggtcctggtcttcaagattatcacggttcaatgcaagaggcacataagaaaataactatgatacaaagttgttggcagaaattgcacactcccttctgaagctggcaccatatgacactcagacaatggagagtcgtgggcttcggcgctacatcatggagatgctacccattactgactggacagctgaggcagtgaggccggccctcatcctcattttaaaaagattggatagaatgttcaacaaaattcataagatgcctactttgaggcgacaggttgagtgggagcctgccagcaatttgattgaaggggtttgtttgacacttcagaggcagccaatcatatccttcctgcctcaccttaggtcactgatcaatgtctgtgtcaatctggtgatgggagtggtaggaccttccagtgttgctgatggattaccccttcttcatctcagcccttatctctcaccacctctgcccttcagcacagctgttgtccggcttgtagcattgcagatacaggctttaaaagaagattttcctttaagccatgtgatctccccattcaccaatcaagagcgaagggaggggatgcttttaaatctgctcatcccatttgtgctcacagtaggatctggaagcaaagatagcccatggctggagcagcctgaggtgcagctgctgctgcagacagtcatcaatgtactcctcccaccgcggatcatcagcacatccaggagcaagaacttcatgttagagagctccccagcccactgctccacccctggggatgcggggaaagacttgcgcagggaagggctggctgagtccaccagccaagcagcatacttggcgctgaaggtgattctcgtctgctttgagaggcagctcggaagccagtggtactggctgagcctccaggtgaaggagatggctctgcggaaggtgggaggcctggccctttgggatttcctcgacttcatcgtgcggacccgaatacccatctttgtgcttttgcgccctttcatccagtgcaagctgctggcccaaccagcagagaatcatgaagagctttccgcccggcaacatattgccgaccagctggagcggcgcttcataccacgccctttgtgtaagagctcgctcattgctgagttcaacagtgaactaaaaattctaaaagaggcagttcatagtggatcagcctaccaaggcaagacatccatcagtaccgtgggcacctccacctctgcttaccgcctgagcttggccaccatgtcccgctctaacacgggcacgggcactgtctgggagcaggacagtgagccatcccagcaggcttcgcaggacaccctgagtcggactgatgaggaagatgaggaaaatgactctataagcatgcccagcgtggtaagtgaacaagaagcttacctcctgagtgccattggaaggaggcgattctccagccatgtctccagcatgtctgtacctcaggctgaggtgggcatgctacccagccagagggtggcaagtatacagagtgaacctggtcaacagaacctccttgttcagcagccgctggggaggaagaggggcctgaggcagctaagacgtcctctactatcacgtcagaaaactcagactgaacccagaaatcgccaaggggctcggctgtcaaccactcgcaggagcattcaacctaaaacgaagccgtctgcggatcagaaacgatctgtgaccttcattgaggctcagccagagccagcagctgccccaacagatgcgcttcctgcaacaggccaactacagggctgtagcccagccccttctaggaaaccagaagcaatggacgaaccagtcctcacatcttctcccgccatagttgttgcggatctccacagcgtgtctcccaagcagagtgagaacttccccactgaagaaggagaaaaggaggaggacacagaagcacaaggtgctactgcacacagtccactctctgcccaactctctgaccctgatgacttcacaggcctcgagacatccagcctcctacagcatggagacactgtccttcatatcagtgaggaaaatggcatggagaacccgctactatctagtcagttcacctttactcccactgagctggggaaaacggatgcagtattagatgagtctcatgtttaattctgtatcttgtaagctctgcaggtatagagaagacatgaaagtgatctctctactacaagttcaatacttttgcttgaaaaagattaattacaaaatagcactttacttctaatgggtggcacaaatctgaataggttttgctgccaatacacatgatgtttcataaacatcttaaaagtcaatggctaaaaggatttagttgtgtgaaaatcaca

SEQ ID NO: 22831 - DNA, 13562 bp, Homo sapiens
  misc_feature 1..13562: note = ENST00000439458
  source 1..13562: mol_type = unassigned DNA; mol_type = unassigned DNA
agcagcgggaggaggcggcggcggcggctagcgaggagacagagctgggtcctgcagtaggactcccgggagccaccattatggtgaagaggaagagctccgagggccaggagcaggacggcggccgcggcatccccctgcccatccagaccttcctgtggcggcaaaccagtgcatttttgaggcccaaactggggaagcaatatgaagcttcttgtgtgtcctttgagcgagtgttggtagaaaacaagctgcatggcctctctccagctctctctgaagccatccagagcatttccagatgggaactggtgcaagctgctttgcctcatgtcctccactgcactgcaaccctgctttcaaaccgaaacaagctaggccaccaggataaattgggtgttgctgagacaaagctccttcacactctacactggatgcttctggaggccccccaggactgcaacaatgagcggtttgggggtacagaccgaggctccagctggggtggaagcagcagtgctttcatccaccaggttgaaaaccagggttctccagggcagccttgccaaagcagctctaatgacgaagaagagaacaaccgaagaaagatcttccagaactccatggctactgtggagctcttcgtgtttctgtttgctcccctggtacacaggatcaaggaatctgacctcaccttccgtctggccagtgggcttgttatatggcagcccatgtgggaacacagacagcccggagtctctggctttaccgcactggtgaagcccatcaggaacatcattacagctaagagaagttctcctatcaacagtcaaagccggacctgtgaatcaccaaatcaagatgcaagacacttagagggactccaggtggtttgtgaaacattccagtctgattccatctcacccaaggccaccatttcaggctgtcaccgaggaaactcctttgatggaagtctgtcctcccaaacttcccaggaaagaggcccatcacattccagggcctctcttgtgatacctccgtgccaaaggtcccgctatgccacctactttgacgttgctgttctgcgctgcctacttcagccccattggtctgaggaaggcactcagtggtctctgatgtactatctacaaaggctgcgacacatgttggaagagaagccagaaaagcctccggagccagatattcctctcctgcccagacccaggagtagctccatggtggcagcagctccctcactagtgaacacccacaaaacccaagatctcaccatgaagtgtaacgaggaggaaaaatctcttagctctgaggccttttccaaggtttcactgaccaatctgcgtagatctgcagtcccagatctttcttcagacctgggcatgaatatttttaaaaagttcaagagccgcaaagaagaccgagagaggaaaggctccattccattccaccacacaggcaagaggaggccacggagaatgggagtgcccttcctgcttcacgaggaccacctggatgtgtcccccacgcgcagcacattctcctttggaagtttctctgggctgggagaagacaggcgaggaattgagaaaggaggctggcaaaccaccattttagggaaattgacccggcgaggcagttcagatgcagccactgagatggagagtctgagcgccaggcattcccactcccatcacaccctggtaagcgacctgccggacccctccaacagccatggagaaaacaccgtcaaggaagtgcgatctcagatctccaccatcacagttgcgaccttcaataccactttggcgtcattcaacgtaggctatgcagactttttcaatgagcatatgaggaaactctgcaaccaggtgcctatcccggagatgccacatgaacctctggcatgtgctaacctacctcgaagcctcacagactcctgcataaactacagctacctagaggacacagaacatattgacgggaccaataactttgtccacaagaatggaatgcttgatctttctgtagttctgaaggctgtttatcttgtccttaatcatgacatcagctctcgtatctgtgacgtggcgctaaacattgtggaatgcttgcttcaacttggtgtggtgccctgtgtagaaaagaatagaaagaagagtgaaaacaaggaaaatgagaccttggaaaagaggccaagtgagggagctttccaattcaaaggagtatctggaagttccacctgtggattcggaggccctgctgttagtggagctggagatggtggaggagaagaaggaggaggtggagatggaggaggtggaggaggtgatggaggaggaggtggaggaggtggaggcggcccttatgagaagaatgataagaaccaagagaaggatgaaagtacacctgtaagcaaccataggcttgctctaacaatgctcatcaaaatagtgaagtctttgggatgtgcctatggttgtggtgaaggacaccgagggctctctggagatcgtctgagacaccaggtattccgagagaatgcccagaactgcctcactaagctatacaagctagataagatgcagttccgacaaaccatgagggactatgtgaacaaggactctctcaataatgtagtggacttcttgcatgctttgctaggattttgtatggagccggtcactgacaacaaggctgggtttggaaataacttcaccacagtggacaacaaatccacagcccaaaatgtggaaggcattatcgtcagcgccatgtttaaatccctcatcacacgctgcgcttcaaccacacatgaattgcacagccctgagaatctgggactgtattgtgacattcgtcagctggtccagtttatcaaagaggctcatgggaatgtcttcaggagagtggccctcagcgctctgcttgacagtgccgagaagttagcaccagggaaaaaggtggaggagaatgaacaggaatctaagcctgcaggcagtaaaaggtcagaggcgggaagcattgtggataaaggccaggtatcctctgcacctgaggaatgtcgcagcttcatgtctggtcgcccctcacagactccagagcacgatgaacaaatgcaaggagccaacttggggcggaaagatttctggcgtaagatgttcaagtcccagagtgcagcaagtgacaccagcagccagtctgaacaggacacttcagaatgcacgactgcccactcagggaccacctctgaccgacgtgcccgctcacgatcccgcagaatttccctccgaaagaagcttaaactccccataggtaaaaggaactggctgaagagatcatccctctcaggcctggcagatggtgtggaggacctcctggacattagctctgtggaccgactctctttcatcaggcaaagctccaaggtcaaattcactagtgctgtgaagctttctgaaggtgggccaggaagtggcatggaaaatggaagagatgaagaggagaatttcttcaagcgtcttggttgccacagttttgatgatcatctctctcccaaccaagatggtggaaaaagcaaaaacgtggtgaatcttggagcaatccgacaaggcatgaaacgcttccaatttctgttaaactgctgtgagccagggacaattcctgatgcctccatcctagcagctgccttggatctagaagcccctgtggtggccagagcagccttgttcctggaatgtgctcgttttgttcaccgctgcaaccgtggcaactggccagagtggatgaaagggcaccacgtgaacatcaccaagaaaggactttcccggggacgctctcccattgtgggcaacaagcgaaaccagaagctgcagtggaatgcagccaagctcttctaccaatggggagacgcaattggcgtccgattgaatgagctgtgccacggggaaagtgagagcccagccaacctgctgggtctcatttacgatgaagagaccaagaggagacttagaaaggaggatgaggaggaagactttttagatgacagtactgtgaacccctctaaatgcggttgcccctttgccttgaagatggcagcatgtcagcttcttctggagattaccaccttcctgcgagagaccttttcttgcctgcccagacctcgcactgagcctctggtggacttggagagctgcagacttcgtttggatcccgagttggaccggcacagatatgagaggaagatcagctttgctggggtcctggacgaaaatgaagactcaaaagattctctccacagcagcagccacactctcaaatcagatgcaggagtcgaggagaagaaagaagggagtccttggagtgcaagcgagcccagcattgagccagagggaatgagtaatgccggcgcggaggagaattaccacagaaacatgtcgtggcttcatgtgatgatcttgctgtgcaatcagcagagtttcatctgcactcacgttgactactgccatccccactgctacctgcaccacagccgctcctgtgcccgactggtcagagccatcaagctactctatggagacagtgtggactccctgagggaaagcagcaacatcagcagtgtggctctccggggcaagaaacagaaagaatgctcagataagtcatgcctgaggacaccttctctaaagaagagagtttcagatgccaatctggaaggaaaaaaagattccggaatgctgaagtacatcagacttcaggtgatgagcttgtcgcctgctcccttatctctgttaatcaaggcagcaccaattctgacagaggagatgtacggagacatccagccagctgcctgggagctcctgctcagcatggatgagcacatggcaggggcagcagctgccatgttcctgctgtgtgcagtgaaggtgcctgaggccgtgtccgacatgctgatgtcagagttccaccacccggagactgtgcagaggctgaacgctgtcctcaagttccacacgctctggaggtttcgctatcaggtctggccccggatggaggaaggggcacagcagatttttaagattccgcctcccagtatcaatttcacccttccctcgccggtgcttggaatgccatccgtcccaatgtttgacccaccgtgggttcctcagtgcagcgggagtgtccaggaccccattaatgaagaccagtctaaatccttttcagcccgggctgtgtcccgctcccatcaaagggcagaacacatcttaaagaacttgcagcaggaggaagaaaagaaacgacttggtagagaagccagcctcatcactgccatccccatcacccaggaggcttgctatgagcccacatgcacgcccaactcagaaccggaagaagaagtagaagaagtcaccaatctggcatcccgtcgactgtctgtgagtccatcctgcacctccagcacttcccacaggaattattccttccgccgcgggtcagtctggtcagtgcgttcagccgtcagtgctgaagatgaggaacataccactgaacacacgccgaaccaccatgtgcctcagcccccacaagcagtgttcccagcatgcatctgtgcagcagtacttcccattgttcatctgatggaggatggtgaggtgcgggaagatggagtagcagtgagtgctgtggctcaacaagtcttatggaactgtctaattgaagatccatcaacggttcttcgacattttctggaaaaactgaccatcagcaatagacaagatgagttaatgtacatgctgcgcaaacttctcttgaatattggagactttcctgctcagacatctcacatcctattcaactatttggtaggattaatcatgtactttgtgcggaccccctgcgagtgggggatggatgccatttcagccaccctgacattcctgtgggaggtggtgggttacgtggagggcctcttcttcaaggatctcaagcagacgatgaagaaggagcagtgtgaggtgaagctcctggtgaccgcttcaatgccaggtactaaaaccttggtagttcatggacagaatgagtgcgatatcccaacccagttaccagtccatgaagacactcaatttgaagccctgttgaaggagtgtctggagttttttaatatcccagaatcccagtcaacacattattttcttatggataaacgatggaaccttatccactacaataagacctatgttcgagatatttatcctttccggaggtcagtatctccccagctgaatcttgtacatatgcatccagagaagggacaggagctcattcagaaacaggtgttcacccgaaagctggaagaagtagggcgggtgttgtttctcatctccctaacccagaagatccccacagcccacaaacagtcccacgtctccatgcttcaggaagacctcctccgcctgccctcattccctcgtagtgctattgatgctgagttttcactcttcagtgatcctcaagctggaaaggaactgtttggcctcgacactcttcagaaaagcttgtggatccagctgctggaggaaatgttcctgggcatgccgagcgagtttccatggggagacgaaatcatgcttttcctcaacgtttttaacggggctctgatcctccacccggaagacagtgccctgctcaggcagtatgctgccaccgtcatcaacaccgcggtgcacttcaaccacctcttctctctcagcggctaccagtggattctccccaccatgctgcaggtgtactccgactatgaaagcaatccccagctgcgtcaagccatcgaatttgcctgtcaccagttctatattctacaccggaagccctttgtgctccagctgtttgctagtgtggcccctctcctggaatttcctgatgctgccaataatgggcccagcaaaggtgtgtcagctcagtgcctgtttgacttgctgcagtccctagagggagagaccaccgacatattagacatcttagagctggtcaaagctgagaagcctctcaagtcattagatttctgctatggaaacgaagatctgacattttctatcagtgaagccattaagctctgtgtcactgtggtggcgtatgctcccgaatcattcagaagtcttcagatgctgatggtcttagaagccttagttccatgttacctacaaaagctaaagaggcagacatcacaggtggagacagtacctgctgcccgagaggagattgcggccactgctgctcttgcgacgtccctacaggcccttttgtacagtgtagaggtcctcaccaggcccatgacagccccacagatgagcaggtgtgaccaaggtcataagggaaccaccacagccaatcacaccatgtcgtctggggtgaacaccaggtaccaggaacaaggagccaaactgcactttatcagggaaaaccttcatttactggaggaagggcaaggcattcccagagaggaactggatgaacgaattgctcgggaagagttcagaagaccccgggagtccttactgaatatttgcactgagttctataagcactgtgggccacggctgaagatcttgcaaaatctggctggggagcctcgggtcattgccttggaactgctggatgtgaagtctcacatgaggttggcagaaattgcacactcccttctgaagctggcaccatatgacactcagacaatggagagtcgtgggcttcggcgctacatcatggagatgctacccattactgactggacagctgaggcagtgaggccggccctcatcctcattttaaaaagattggatagaatgttcaacaaaattcataagatgcctactttgaggcgacaggttgagtgggagcctgccagcaatttgattgaaggggtttgtttgacacttcagaggcagccaatcatatccttcctgcctcaccttaggtcactgatcaatgtctgtgtcaatctggtgatgggagtggtaggaccttccagtgttgctgatggattaccccttcttcatctcagcccttatctctcaccacctctgcccttcagcacagctgttgtccggcttgtagcattgcagatacaggctttaaaagaagattttcctttaagccatgtgatctccccattcaccaatcaagagcgaagggaggggatgcttttaaatctgctcatcccatttgtgctcacagtaggatctggaagcaaagatagcccatggctggagcagcctgaggtgcagctgctgctgcagacagtcatcaatgtactcctcccaccgcggatcatcagcacatccaggagcaagaacttcatgttagagagctccccagcccactgctccacccctggggatgcggggaaagacttgcgcagggaagggctggctgagtccaccagccaagcagcatacttggcgctgaaggtgattctcgtctgctttgagaggcagctcggaagccagtggtactggctgagcctccaggtgaaggagatggctctgcggaaggtgggaggcctggccctttgggatttcctcgacttcatcgtgcggacccgaatacccatctttgtgcttttgcgccctttcatccagtgcaagctgctggcccaaccagcagagaatcatgaagagctttccgcccggcaacatattgccgaccagctggagcggcgcttcataccacgccctttgtgtaagagctcgctcattgctgagttcaacagtgaactaaaaattctaaaagaggcagttcatagtggatcagcctaccaaggcaagacatccatcagtaccgtgggcacctccacctctgcttaccgcctgagcttggccaccatgtcccgctctaacacgggcacgggcactgtctgggagcaggacagtgagccatcccagcaggcttcgcaggacaccctgagtcggactgatgaggaagatgaggaaaatgactctataagcatgcccagcgtggtaagtgaacaagaagcttacctcctgagtgccattggaaggaggcgattctccagccatgtctccagcatgtctgtacctcaggctgaggtgggcatgctacccagccagagtgaacctaatgtcctcgatgactcccagggcctggccgccgagggcagcctctctagggtggcaagtatacagagtgaacctggtcaacagaacctccttgttcagcagccgctggggaggaagaggggcctgaggcagctaagacgtcctctactatcacgtcagaaaactcagactgaacccagaaatcgccaaggggctcggctgtcaaccactcgcaggagcattcaacctaaaacgaagccgtctgcggatcagaaacgatctgtgaccttcattgaggctcagccagagccagcagctgccccaacagatgcgcttcctgcaacaggccaactacagggctgtagcccagccccttctaggaaaccagaagcaatggacgaaccagtcctcacatcttctcccgccatagttgttgcggatctccacagcgtgtctcccaagcagagtgagaacttccccactgaagaaggagaaaaggaggaggacacagaagcacaaggtgctactgcacacagtccactctctgcccaactctctgaccctgatgacttcacaggcctcgagacatccagcctcctacagcatggagacactgtccttcatatcagtgaggaaaatggcatggagaacccgctactatctagtcagttcacctttactcccactgagctggggaaaacggatgcagtattagatgagtctcatgtttaattctgtatcttgtaagctctgcaggtatagagaagacatgaaagtgatctctctactacaagttcaatacttttgcttgaaaaagattaattacaaaatagcactttacttctaatgggtggcacaaatctgaataggttttgctgccaatacacatgatgtttcataaacatcttaaaagtcaatggctaaaaggatttagttgtgtgaaaatcacaaaaccagggaggaataaggggaaagagccatttcactgcacattgtttatgattcaagaagccttcagcagttaaaaatatatactattcattgctgctttcatagaaatattaacaaatgatatgatctaaaaatagaatgcaattttttgagattactcacattatacatctcatgcaaatatttatttttatagtttaaaaaatatcaattcaggttggctatacaagtagcaatttacataaaaaaataattaataggaaaaatattactttggggagactaaataacaagcctgcagccatttttgttttgagtaacaatacagccatttagaagaagaaaaaaatactatatagagagctgtggacttttagatatttatttttcaactatcattttcattgcatgttgtaaatcaaaatgcagatggcataagatcatcccatttcataatctatcacattagaatattacagaatattctagaaatcatcagaaataattctgaattaagaacctaaacagcctatacaattataaaaactaaatgtatatataatcacttaaaagagatggtattcctattcctagccctgactacatcaataccaagattagaagctattggaaaatgtgattagtaatacttttccttatagtatcctgtgcctgccctggagggcatattttcagatattaaggttagtgttgttagaatcggtttaataaaataacattttcctaatagaaacaatattcttatgatacttggaacatctaagtttataaggaaaaatgtataaagtaagcaatttcttcatagacacctccagtttatatattttgcaaataggcctttaacttgaagttcaattacttcaagaaaagtgtaacacttagaaggcttgtgaggccaacacctagtgtgttactgatcctatggtagggctgtgcatcacgtggttcacaattgaatttcaaaattttaacagtttacattagaaaactgttacctaacaaccaagcatatacaaactcatatacatacttaaattggtacggtggtgtatgtgtgcgtgcgtgtgtgtgtgtatgtgttgtagtcctcaagatgaagttaaatatagactttaattaccctgcaatgaatttaaaacacattctgtatgcttaaactttgagtgcgttggctgtgaaatgtatacatatataaagaggatacctactaaacccaccttaatcataaaggaaaattattttttgttagaattgcttattaaataggcatactttatactgtggtttataatttcaaatataacttggggttatggtcctattcactaagagaatgaaagatatccatgagttaaaagaacaaaactaaaaatttcagatctaacaattgaaagaaaattgaggcagtaaatgacctcttttactcttttatgttttacaatattatcatgttatttacagttaatgctgaaataattctcaagtgcaggaatataaatgttaagtggttttatgattccaagctgatatatttcacctgttaaaaattatgctgctaaattagcattagaggccttatgtttggtaattacaagtgtctgggctattggcgcgtctctatatatgtgtgtgctttgttccagtttcttcaaattatctatgtataattgtatgaaatatttaaatagcaaagaagtcaaagaagattgttaaatattcaacaagaatcataaatacctttatatgtattttaaaagtattgggctgttctgaacatgattatgctggtctgtctgtcttttagcctgactccttcactcttgtgtgtgaagtctattagcaactttcaataagctaagcaatgttgtaacttgcaaaaaagcctccactctgagaaacagggccttatagagtaggaatgttttcatactgggactactgaaattttgcagatgtgtgcatctgttccatttaaggtgcccttaaatgtgttgaatgtaatgtgttgaatgtttatgtgtaatggctaaagtatctatatgtatgtgcataaaactgtcacaagatgtattctcaggaatactgttacctggagtttgaaaggaataactattaaaaaaaaaagttggggaagattagaaaaaagctcaagataaatgttcaaaatattattaagtacatgactaaaagctaattactacatatgataaatgcagtgttggtaatagtagatcatttcttaagccatgatacttaatgatatttatcttattcagaggaaaaacaaaaaaggtacccacttcccatgtagaaaaaattagactcagcaaagaggttgcttcttctgaaattagcttttgagagaccttggaataaaccatgtgttatccatgatagtatgactcagatccaattaaaacagtttaaattctggatataggatctcctatagcaaaacattttactttcatttttcagtatttgctgctttctagaattctattagataagctatgtcatttttctgaaaaagaaactgagttattgagtgtattaagacaaggcactgagaactacagtgtcaaaatcaaagggcataaatgggcatggcagtgctggtggaaaaatctgtggtactggtgatctggttagggcctgttgcacaggctgggagtaactggtttgctgtttcaagcctccaagagtaccttaaacaaggtgatagctcctctcttctttagcattatattcctttagtcaacaaagaactttctccactctgctgcccagctctgagagtatctgagatgagaataggatgtgtgtggaggggcttttagggaagaaagggtcataaatgaatagaagtacagtctgaaacatgaattaaatatccttcctcaagttataaaggatactttaatagaacacagtctccagaattcgctgctatcacaccaagtcatgctgttgccctgtgacctcacacttcccattccatggccttgtcttggcagggagtaaaaaatcccacttctttttactttagtgggtctcaactgcagcatttcagaaacaaattttgatttgacactcaggagaataaaaacaagttgagggcagaatgtatttggaaaagcttaagacaaatttactgatattattttatgatcatttaggattacagatcaatttacctccataaatctttgaattgtcactgtgaccacaggatgaaaatcctttattagccattttataggttaaaacaaaaaattgactacacagccgacttccctcagataactatgaagtctattatgagtactgaatgaccaaagaacatggaaaaaatgcatatgaataaatactgaaatgtttatgaaagatatttatgaaagatattaagacttctgtgtttaggtatgcacatatgataaaataaatctaaaaacattaaagatg

SEQ ID NO: 22832 - DNA, 2048 bp, Homo sapiens
  misc_feature 1..2048: note = ENST00000316333
  source 1..2048: mol_type = unassigned DNA; mol_type = unassigned DNA
tccgggtccctgtctccgccgccgccgcccgcgcctcccgccgctggcccgccccggccccggcccgcgcccccgcgccccgccaccggccccgccggccccccgcgcgagatgatggacggccgcctcctggaacacccgcatgcccagttcgggggctcgctgggcggcgtggtgggcttcccctacccgctgggccaccaccacgtgtacgagctggccgggcaccagctgcagtcggccgccgccgccgcctcggtgcccttctccatcgacggcctgctcgggggctcgtgcgccgccgccgcctcggtggtcaaccccacgccgctgctgccagccgcctgcggggtcggcggggacggccagcccttcaagctgtcagactcgggggacccggacaaggagagcccgggctgcaagcggcggcgcacccgcaccaacttcaccggctggcagctggaggagctggagaaggcgttcaacgagagccactatcccgacgtgttcatgcgcgaggcgctggcgctgcgcctagacctggtcgagtcccgagttcaggtctggttccaaaaccgccgggccaagtggaggaagaaggagaacacgaaaaagggcccggggcggccggcgcacaactcgcacccgaccacgtgcagcggcgagcccatggacccggaggagatcgcgcgcaaggagctggagaagatggagaagaagaagcgcaagcacgagaagaagctgctgaagagccagggccgccacttgcactcgcccggcggcctgtccctgcacagcgcgcccagctccgacagcgacagcggcggcggcggcctgtctccggagccgcccgagccgccgccgcccgccgccaagggccccggagcgcacgcctcgggcgccgcggggaccgcgcccgcccctcccggcgagccgcctgcacccggcacctgcgaccccgccttctacccgagccaaagaagcggcgccggcccacagccgcgcccaggtcgccctgcggacaaggacgcggcctcgtgcgggccaggggccgctgtggcggcggtggagcgcggcgccgcggggctgcccaaggccagcccattcagcgtggagagcctcctgtccgactcgccgccgcgccggaaagccgcttccaacgccgccgccgccgccgccgcggggctggacttcgcgcccgggctgccgtgcgcgccgcggaccctgatcggcaagggccacttcctcctctaccccatcacgcagccgctcggcttcctggtgccgcaggccgcgctcaagggcggcgcgggcctggagccggcgcccaaggacgcgccgcccgcgcccgccgtgccgcccgcgccgcctgcccaggccagtttcggggccttctcggggcccggcggcgccccggactcggccttcgcgcgtcgcagccccgacgccgtcgcctccccgggggccccagccccggccccggcgcctttccgggacctcgcctcggcagcggctaccgagggcggcggcggggactgcgcggacgcggggaccgccggccccgcgcccccgccgcccgcgccgtcgcccaggcccggccctcggcctcccagccccgccgaggagccggccacctgcggggttcccgagcctggcgcggcggccggacccagcccgccggagggcgaggagctggacatggactgaggccgcggcggccgggagaggcgcgtagccggcccgcggccgctcgctcaggctccgactcacgcaacgaatcaggtgatcggctctagaaacactgctttcccttcttttcttttgttttctttcttttattattttttttaagagtaaacgaaagtgctgtatgaattcggacccaggcagcaaccacaggactgggggtgagaccctcctcctcccaagagagcaaaaaggacccatggcccccaaaaaaccccacaacgagaatcctcagccttgtaaaatgcaaaaatgtctaagaatatttatatatgtaccatttttgataaataaagctggtc

SEQ ID NO: 22833 - DNA, 864 bp, Homo sapiens
  misc_feature 1..864: note = ENST00000416681
  source 1..864: mol_type = unassigned DNA; mol_type = unassigned DNA
ggctttgccccagcaagcgggaactcccaggatcaggaaggtcccagagaaactccccaggggggaagccgaggccgtccagagagatccagggtacacacagtgacagtgccagctccacattcccgaccaccgggccagggctggttccacgctgtcatttctctccgctggccccagccgcggggccaccgccagacagacagaccggggatcctgcctggcggcgtgaccttgggttagtcctagagccgcttctagcccggtttcctccgccccaggttaggaccacgtggggcttggtgaggtgactcgcggtcgcgggtgactcgccggcaggacactgcctggaacgcctggagcgcctcccactgcagacgtctgtccgcctccagccgctctcctctgacgggtcctgcctcagttggcggaatggcggccacgggagccaatgcagagaaagctgaaagtcacaatgattgccccgtcagacttttaaatccaaacatagcaaaaatgaaagaagatattctctatcatttcaatctcaccactagcagacacaatttcccagccttgtttggagatgtgaagtttgtgtgtgttggtggaagcccctcccggatgaaagccttcatcaggtgcgttggtgcagagctgggccttgactgcccaggtagagactatcccaacatctgtgcgggaactgaccgctatgccatgtataaagtaggaccggtgctgtctgtcagtcatggtatgggcattccttctatctcaatcatgttgcatgagctcataaagctgctgtactatgcccggtgctccaacgtcactatcatccgcattggcacttctggtggg

SEQ ID NO: 22834 - DNA, 1932 bp, Homo sapiens
  misc_feature 1..1932: note = ENST00000331803
  source 1..1932: mol_type = unassigned DNA; mol_type = unassigned DNA
gcgggaactcccaggatcaggaaggtcccagagaaactccccaggggggaagccgaggccgtccagagagatccagggtacacacagtgacagtgccagctccacattcccgaccaccgggccagggctggttccacgctgtcatttctctccgctggccccagccgcggggccaccgccagacagacagaccggggatcctgcctggcggcgtgaccttgggttagtcctagagccgcttctagcccggtttcctccgccccaggttaggaccacgtggggcggggccgctcgcagactccatatgagattcacctcgcaggtggttccctcattcgagtgctccggcgcacagacccgcgccccgccgtctgcgagcctcccgagagccgtcccttcgtccggccctggagcattgcgtttgtcgccggtgtcgcagtgcgaggatggcgccgcgggtgtagcggctctctgcgcaggccgagtgggcttggtgaggtgactcgcggtcgcgggtgactcgccggcaggacactgcctggaacgcctggagcgcctcccactgcagacgtctgtccgcctccagccgctctcctctgacgggtcctgcctcagttggcggaatggcggccacgggagccaatgcagagaaagctgaaagtcacaatgattgccccgtcagacttttaaatccaaacatagcaaaaatgaaagaagatattctctatcatttcaatctcaccactagcagacacaatttcccagccttgtttggagatgtgaagtttgtgtgtgttggtggaagcccctcccggatgaaagccttcatcaggtgcgttggtgcagagctgggccttgactgcccaggtagagactatcccaacatctgtgcgggaactgaccgctatgccatgtataaagtaggaccggtgctgtctgtcagtcatggtatgggcattccttctatctcaatcatgttgcatgagctcataaagctgctgtactatgcccggtgctccaacgtcactatcatccgcattggcacttctggtgggataggtctggagcccggcactgtggtcataacagagcaggcagtggatacctgcttcaaggcagagtttgagcagattgtcctggggaagcgggtcatccggaaaacggaccttaacaagaagctggtgcaggagctgttgctgtgttctgcagagctgagcgagttcaccacagtggtggggaacaccatgtgcaccttggacttctatgaagggcaaggccgtctggatggggctctctgctcctacacggagaaggacaagcaggcgtatctggaggcagcctatgcagccggcgtccgcaatatcgagatggagtcctcggtgtttgccgccatgtgcagcgcctgcggcctccaagcggccgtggtgtgtgtcaccctcctgaaccgcctggaaggggaccagatcagcagccctcgcaatgtgctcagcgagtaccagcagaggccgcagcggctggtgagctacttcatcaagaagaaactgagcaaggcctgagcgctgccctgcacctccgcagacctgctgtgatgacttgccattaaaagcattgtccaaaatcccctgttgtgtggactttgagcacactttacacaagaatctagaaaatcagatcgcgattaagagacagagaatcttggattaaccgcatgggagatgttcttccttttgaagtttcattggagcattttcaatgatgttagcctgatttggggtttcttcaagaacattctaccaaatttttgtactatttctagggaaatttttcagactttaaaattctaatggtagtcagatttcatgtcactaaacaagaaatctgacaatagtgccaggaaactaatttcctgatacattaaaaaaattccatgca

SEQ ID NO: 22835 - DNA, 682 bp, Homo sapiens
  misc_feature 1..682: note = ENST00000432131
  source 1..682: mol_type = unassigned DNA; mol_type = unassigned DNA
caggaaggtcccagagaaactccccaggggggaagccgaggccgtccagagagatccagggtacacacagtgacagtgccagctccacattcccgaccaccgggccagggctggttccacgctgtcatttctctccgctggccccagccgcggggccaccgccagacagacagaccggggatcctgcctggcggcgtgaccttgggttagtcctagagccgcttctagcccggtttcctccgccccagtgctccggcgcacagacccgcgccccgccgtctgcgagcctcccgagagccgtcccttcgtccggccctggagcattgcgtttgtcgccggtgtcgcagtgcgaggatggcgccgcgggtgtagcggctctctgcgcaggccgagtgggcccagagaagcgaggaactccgcagctcgtcgacacgtctcgtctcctgtcccaattcagggcttggtgaggtgactcgcggtcgcgggtgactcgccggcaggacactgcctggaacgcctggagcgcctcccactgcagacgtctgtccgcctccagccgctctcctctgacgggtcctgcctcagttggcggaatggcggccacgggagccaatgcagagaaagctgaaagtcacaatgattgccccgtcagacttttaaatccaaacatagcaaaaatgaa

SEQ ID NO: 22836 - DNA, 1013 bp, Homo sapiens
  misc_feature 1..1013: note = ENST00000457596
  source 1..1013: mol_type = unassigned DNA; mol_type = unassigned DNA
acagtgacagtgccagctccacattcccgaccaccgggccagggctggttccacgctgtcatttctctccgctggccccagccgcggggccaccgccagacagacagaccggggatcctgcctggcggcgtgaccttgggttagtcctagagccgcttctagcccggtttcctccgccccagtgctccggcgcacagacccgcgccccgccgtctgcgagcctcccgagagccgtcccttcgtccggccctggagcattgcgtttgtcgccggtgtcgcagtgcgaggatggcgccgcgggtgtagcggctctctgcgcaggccgagtgggcccagagaagcgaggaactccgcagctcgtcgacacgtctcgtctcctgtcccaattcagggcttggtgaggtgactcgcggtcgcgggtgactcgccggcaggacactgcctggaacgcctggagcgcctcccactgcagacgtctgtccgcctccagccgctctcctctgacgggtcctgcctcagttggcggaatggcggccacgggagccaatgcagagaaagctgaaagtcacaagtctggagcccggcactgtggtcataacagagcaggcagtggatacctgcttcaaggcagagtttgagcagattgtcctggggaagcgggtcatccggaaaacggaccttaacaagaagctggtgcaggagctgttgctgtgttctgcagagctgagcgagttcaccacagtggtggggaacaccatgtgcaccttggacttctatgaagggcaaggccgtctggatggggctctctgctcctacacggagaaggacaagcaggcgtatctggaggcagcctatgcagccggcgtccgcaatatcgagatggagtcctcggtgtttgccgccatgtgcagcgcctgcggcctccaagcggccgtggtgtgtgtcaccctcctgaaccgcctggaaggggaccagatcagcagccctcgcaatgtgctcagcgagtaccagca

SEQ ID NO: 22837 - DNA, 974 bp, Homo sapiens
  misc_feature 1..974: note = ENST00000421046
  source 1..974: mol_type = unassigned DNA; mol_type = unassigned DNA
agactccatatgagattcacctcgcaggtggttccctcattcgagtgctccggcgcacagacccgcgccccgccgtctgcgagcctcccgagagccgtcccttcgtccggccctggagcattgcgtttgtcgccggtgtcgcagtgcgaggatggcgccgcgggtgtagcggctctctgcgcaggccgagtgggcttggtgaggtgactcgcggtcgcgggtgactcgccggcaggacactgcctggaacgcctggagcgcctcccactgcagacgtctgtccgcctccagccgctctcctctgacgggtcctgcctcagttggcggaatggcggccacgggagccaatgcagagaaagctgaaagtcacaatgattgccccgtcagacttttaaatccaaacatagcaaaaatgaaagaagatattctctatcatttcaatctcaccactagcagacacaatttcccagccttgtttggagatgtgaagtttgtgtgtgttggtggaagcccctcccggatgaaagccttcatcaggtgcgttggtgcagagctgggccttgactgcccaggtagagactatcccaacatctgtgcgggaactgaccgctatgccatgtataaagtaggaccggtgctgtctgtcagtcatggtatgggcattccttctatctcaatcatgttgcatgagctcataaagctgctgtactatgcccggtgctccaacgtcactatcatccgcattggcacttctggtgggatagggattttgaagcaccttaggagaaaagacacaggaaaatcaaaggggggaagagagaggcgcagtacaaaactcagataagtgtccttaaattagcttaaaatgtccctatcctcaacagggacattttttttttgtttaaaaaacaaagatggttggccgggcgcggtggctcacacctgtaatcccagcacattgggaggccgaggcg

SEQ ID NO: 22838 - DNA, 1375 bp, Homo sapiens
  misc_feature 1..1375: note = ENST00000395564
  source 1..1375: mol_type = unassigned DNA; mol_type = unassigned DNA
tgagattcacctcgcaggtggttccctcattcgagtgctccggcgcacagacccgcgccccgccgtctgcgagcctcccgagagccgtcccttcgtccggccctggagcattgcgtttgtcgccggtgtcgcagtgcgaggatggcgccgcgggtgtagcggctctctgcgcaggccgagtgggcccagagaagcgaggaactccgcagctcgtcgacacgtctcgtctcctgtcccaattcagggcttggtgaggtgactcgcggtcgcgggtgactcgccggcaggacactgcctggaacgcctggagcgcctcccactgcagacgtctgtccgcctccagccgctctcctctgacgggtcctgcctcagttggcggaatggcggccacgggagccaatgcagagaaagctgaaagtcacaatgattgccccgtcagacttttaaatccaaacatagcaaaaatgaaagaagatattctctatcatttcaatctcaccactagcagacacaatttcccagccttgtttggagatgtgaagtttgtgtgtgttggtggaagcccctcccggatgaaagccttcatcaggtgcgttggtgcagagctgggccttgactgcccaggtagagactatcccaacatctgtgcgggaactgaccgctatgccatgtataaagtaggaccggtgctgtctgtcagtcatggtatgggcattccttctatctcaatcatgttgcatgagctcataaagctgctgtactatgcccggtgctccaacgtcactatcatccgcattggcacttctggtgggataggtctggagcccggcactgtggtcataacagagcaggcagtggatacctgcttcaaggcagagtttgagcagattgtcctggggaagcgggtcatccggaaaacggaccttaacaagaagctggtgcaggagctgttgctgtgttctgcagagctgagcgagttcaccacagtggtggggaacaccatgtgcaccttggacttctatgaagggcaaggccgtctggatggggctctctgctcctacacggagaaggacaagcaggcgtatctggaggcagcctatgcagccggcgtccgcaatatcgagatggagtcctcggtgtttgccgccatgtgcagcgcctgcggcctccaagcggccgtggtgtgtgtcaccctcctgaaccgcctggaaggggaccagatcagcagccctcgcaatgtgctcagcgagtaccagcagaggccgcagcggctggtgagctacttcatcaagaagaaactgagcaaggcctgagcgctgccctgcacctccgcagacctgctgtgatgacttgccattaaaagcattgtccaaaa

SEQ ID NO: 22839 - DNA, 918 bp, Homo sapiens
  misc_feature 1..918: note = ENST00000436673
  source 1..918: mol_type = unassigned DNA; mol_type = unassigned DNA
attcgagtgctccggcgcacagacccgcgccccgccgtctgcgagcctcccgagagccgtcccttcgtccggccctggagcattgcgtttgtcgccggtgtcgcagtgcgaggatggcgccgcgggtgtagcggctctctgcgcaggccgagtggggcggtgacggaggctctggtgcaccttggctgtgagctgcagaggagcagagagcggcccggcgcggctgcgcggggaggcgggcgcgcggccgggaggttctggggctggtgtgtgcggagcgagggcccagagaagcgaggaactccgcagctcgtcgacacgtctcgtctcctgtcccaattcagggcttggtgaggtgactcgcggtcgcgggtgactcgccggcaggacactgcctggaacgcctggagcgcctcccactgcagacgtctgtccgcctccagccgctctcctctgacgggtcctgcctcagttggcggaatggcggccacgggagccaatgcagagaaagctgaaagtcacaatgattgccccgtcagacttttaaatccaaacatagcaaaaatgaaagaagatattctctatcatttcaatctcaccactagcagacacaatttcccagccttgtttggagatgtgaagtttgtgtgtgttggtggaagcccctcccggatgaaagccttcatcaggtgcgttggtgcagagctgggccttgactgcccaggtagagactatcccaacatctgtgcgggaactgaccgctatgccatgtataaagtaggaccggtgctgtctgtcagtcatggtatgggcattccttctatctcaatcatgttgcatgagctcataaagctgctgtactatgcccggtgctccaacgtcactatcatccgcattggcacttctggtgggataggt

SEQ ID NO: 22840 - DNA, 955 bp, Homo sapiens
  misc_feature 1..955: note = ENST00000395560
  source 1..955: mol_type = unassigned DNA; mol_type = unassigned DNA
attcgagtgctccggcgcacagacccgcgccccgccgtctgcgagcctcccgagagccgtcccttcgtccggccctggagcattgcgtttgtcgccggtgtcgcagtgcgaggatggcgccgcgggtgtagcggctctctgcgcaggccgagtgggcccagagaagcgaggaactccgcagctcgtcgacacgtctcgtctcctgtcccaattcagggcttggtgaggtgactcgcggtcgcgggtgactcgccggcaggacactgcctggaacgcctggagcgcctcccactgcagacgtctgtccgcctccagccgctctcctctgacgggtcctgcctcagttggcggaatggcggccacgggagccaatgcagagaaagctgaaagtcacaagtctggagcccggcactgtggtcataacagagcaggcagtggatacctgcttcaaggcagagtttgagcagattgtcctggggaagcgggtcatccggaaaacggaccttaacaagaagctggtgcaggagctgttgctgtgttctgcagagctgagcgagttcaccacagtggtggggaacaccatgtgcaccttggacttctatgaagggcaaggccgtctggatggggctctctgctcctacacggagaaggacaagcaggcgtatctggaggcagcctatgcagccggcgtccgcaatatcgagatggagtcctcggtgtttgccgccatgtgcagcgcctgcggcctccaagcggccgtggtgtgtgtcaccctcctgaaccgcctggaaggggaccagatcagcagccctcgcaatgtgctcagcgagtaccagcagaggccgcagcggctggtgagctacttcatcaagaagaaactgagcaaggcctgagcgctgccctgcacctccgcagacctgctgtgatgacttgccattaaaagcattgtccaaaa

SEQ ID NO: 22841 - DNA, 869 bp, Homo sapiens
  misc_feature 1..869: note = ENST00000444999
  source 1..869: mol_type = unassigned DNA; mol_type = unassigned DNA
cacagacccgcgccccgccgtctgcgagcctcccgagagccgtcccttcgtccggccctggagcattgcgtttgtcgccggtgtcgcagtgcgaggatggcgccgcgggtgtagcggctctctgcgcaggccgagtgggcccagagaagcgaggaactccgcagctcgtcgacacgtctcgtctcctgtcccaattcagggcttggtgaggtgactcgcggtcgcgggtgactcgccggcaggacactgcctggaacgcctggagcgcctcccactgcagacgtctgtccgcctccagccgctctcctctgacgggtcctgcctcagttggcggaatggcggccacgggagccaatgcagagaaagctgaaagtcacaatgattgccccgtcagacttttaaatccaaacatagcaaaaatgaaagaagatattctctatcatttcaatctcaccactagcagacacaatttcccagccttgtttggagatgtgaagtttgtgtgtgttggtggaagcccctcccggatgaaagccttcatcagcatggtatgggcattccttctatctcaatcatgttgcatgagctcataaagctgctgtactatgcccggtgctccaacgtcactatcatccgcattggcacttctggtgggataggtctggagcccggcactgtggtcataacagagcaggcagtggatacctgcttcaaggcagagtttgagcagattgtcctggggaagcgggtcatccggaaaacggaccttaacaagaagctggtgcaggagctgttgctgtgttctgcagagctgagcgagttcaccacagtggtggggaacaccatgtgcaccttggacttctatgaag

SEQ ID NO: 22842 - DNA, 861 bp, Homo sapiens
  misc_feature 1..861: note = ENST00000482015
  source 1..861: mol_type = unassigned DNA; mol_type = unassigned DNA
gcattgcgtttgtcgccggtgtcgcagtgcgaggatggcgccgcgggtgtagcggctctctgcgcaggccgagtgggcttggtgaggtgactcgcggtcgcgggtgactcgccggcaggacactgcctggaacgcctggagcgcctcccactgcagacgtctgtccgcctccagccgctctcctctgacgggtcctgcctcagttggcggaatggcggccacgggagccaatgcagagaaagctgaaagtcacaatttgtgtgtgttggtggaagcccctcccggatgaaagccttcatcaggtctggagcccggcactgtggtcataacagagcaggcagtggatacctgcttcaaggcagagtttgagcagattgtcctggggaagcgggtcatccggaaaacggaccttaacaagaagctggtgcaggagctgttgctgtgttctgcagagctgagcgagttcaccacagtggtggggaacaccatgtgcaccttggacttctatgaagggcaaggccgtctggatggggctctctgctcctacacggagaaggacaagcaggcgtatctggaggcagcctatgcagccggcgtccgcaatatcgagatggagtcctcggtgtttgccgccatgtgcagcgcctgcggcctccaagcggccgtggtgtgtgtcaccctcctgaaccgcctggaaggggaccagatcagcagccctcgcaatgtgctcagcgagtaccagcagaggccgcagcggctggtgagctacttcatcaagaagaaactgagcaaggcctgagcgctgccctgcacctccgcagacctgctgtgatgacttgccattaaaagcattgtccaaaa

SEQ ID NO: 22843 - DNA, 782 bp, Homo sapiens
  misc_feature 1..782: note = ENST00000417464
  source 1..782: mol_type = unassigned DNA; mol_type = unassigned DNA
ggatggcgccgcgggtgtagcggctctctgcgcaggccgagtgggcttggtgaggtgactcgcggtcgcgggtgactcgccggcaggacactgcctggaacgcctggagcgcctcccactgcagacgtctgtccgcctccagccgctctcctctgacgggtcctgcctcagttggcggaatggcggccacgggagccaatgcagagaaagctgaaagtcacaagtctggagcccggcactgtggtcataacagagcaggcagtggatacctgcttcaaggcagagtttgagcagattgtcctggggaagcgggtcatccggaaaacggaccttaacaagaagctggtgcaggagctgttgctgtgttctgcagagctgagcgagttcaccacagtggtggggaacaccatgtgcaccttggacttctatgaagggcaaggccgtctggatggggctctctgctcctacacggagaaggacaagcaggcgtatctggaggcagcctatgcagccggcgtccgcaatatcgagatggagtcctcggtgtttgccgccatgtgcagcgcctgcggcctccaagcggccgtggtgtgtgtcaccctcctgaaccgcctggaaggggaccagatcagcagccctcgcaatgtgctcagcgagtaccagcagaggccgcagcggctggtgagctacttcatcaagaagaaactgagcaaggcctgagcgctgccctgcacctccgcagacctgctgtgatgacttgccattaaaagcattgtccaaaa

SEQ ID NO: 22844 - DNA, 2782 bp, Homo sapiens
  misc_feature 1..2782: note = ENST00000495446
  source 1..2782: mol_type = unassigned DNA; mol_type = unassigned DNA
tttttgttatatagagagattgatgcataaaatctgtgtttgtatgactgtaattccaagtttagcgaaattgtccctaggacaacacaccaacggccatgagctgtctcggtcctgcaagcttagtctccgatgctgcccacctgacacagctgtgcatagcatgctggcctctgccaggaactctagtgaatggttcttgagttcttgctctggagtgatttttaaaacaatgatcagataattctggagggagtagtatagattttgaattttcctcaattgctctgtaaaaatggaaagagcaactagggagcaaaaccaaaaaccactggacacagttgataataaaaggtgatgtgctatcctcacaaaccccaaagtatgaatgggtggagacaaaaagcctcaggatctggttgtgttggcagctgctcagggggaagctcaaggcgatggacagacctgagaacaagagtcccaggcactcctaggaaggtgcagggggacatggtgaagatggcagctgacactggagggggcctgtgcgtcccaatgtgagtgatgctggaattccaaggggcttgaccactccaggccctgtgggttcaccaaggcatcagccaagctctcctctagctccagccccagtgctgggagaagctgctgaaatgagactctgaattgcccagaacagccgcaggagtagcaatggaaagaggagttcagatacatgtggggagcgaagcaaaggtctttgcaatcggccatgttttttaatgtttcatgaaaacaactgacttgggagctctggaaaagatctgacttcttgttccctcccacatgtttaggaaaaccaattttgcattaaaataagtatcagaaatggatcatagttatcttagtccctgcaggttgatagacaagatgccattgactgagtggcttataaacaataggaatttatcgcgtagtctggaggctgcgaagtccaaggtcaaggagtcagcaaacttggtgtctggtgagggctaactttcggattcatagagctctgttttctccctgtgtgctcacatggcagaaggggcaggcagctctccggggtccctcttataagggcactaatcccactcatgcaggctccaccctcatgacctaatcacctcccaaaggccctgctgcctgaaaccatcacatttagggttaggatttcagcctatgaattttgagggggaaaccagcattcagtccaggtccataacaatggtcaaatcccatctaaaattattataacacaaagaataaggggcagagtaatgtccctacaaacaggaaactactccaggaaggcacgcccagaacatagaaactggaccctaataatgcatcaatctgagaggaaggccaggtaggtcaggagttggtcatagctcacctgggtttagggtgtgggacttcattatactgttctagtctgccttttgctggtttacttttcaagtatttgcctgaaatcttaaatattaacaaggtatgaaacagggatcaatgaaacacatcatggtatatggttcagtgacagacaacagtgggaaatcgccgtgaatggaagcaagaaatatgggacaaagtacttgaaggttcctggccatttttattttattcttttttttttctttcgaaatggagtttgctctttttgcccatgctggagtgcagtggcgtgatcttggctcactgcaacctctgcctcctgggttcaagtgattctcccgcctcagtctcccaagtagctgggattacagacacccggcacaatgcctggctaatttttgtatttttagtagagatggggtctcaccatgttggccaggctggtcttgaactcctgacctcaggtgatctgctcgtcttggcctcccaaagtgcttgggattacaggcgtgggccactgcacccagccctctactttgttttttgtgcctttctcttccatagtgtccataatgatcatgcattaattactttcatagcttaaaaaaaagttgaatgggaaaaatgggtcactgtgtatttgagaacagtactggatgcttcgtgtttggatgtgtgggtggatctgcttctttcttccatatgctctgctgtgtgctccctggctgccctgctttaattttattttgttttacaccctgcatatcttgatgtctgcttttttcctcaggtctggagcccggcactgtggtcataacagagcaggcagtggatacctgcttcaaggcagagtttgagcagattgtcctggggaagcgggtcatccggaaaacggaccttaacaagaagctggtgcaggagctgttgctgtgttctgcagagctgagcgagttcaccacagtggtggggaacaccatgtgcaccttggacttctatgaagggcaaggccgtctggatggggctctctgctcctacacggagaaggacaagcaggcgtatctggaggcagcctatgcagccggcgtccgcaatatcgagatggagtcctcggtgtttgccgccatgtgcagcgcctgcggcctccaagcggccgtggtgtgtgtcaccctcctgaaccgcctggaaggggaccagatcagcagccctcgcaatgtgctcagcgagtaccagcagaggccgcagcggctggtgagctacttcatcaagaagaaactgagcaaggcctgagcgctgccctgcacctccgcagacctgctgtgatgacttgccattaaaagcattgtcc

SEQ ID NO: 22845 - DNA, 3515 bp, Homo sapiens
  misc_feature 1..3515: note = ENST00000377107
  source 1..3515: mol_type = unassigned DNA; mol_type = unassigned DNA
gatggtacaatgaagggcattctgatcaggctaacaaaaacactgctcccagggtaggagtcctagcccacctcgggaacctcagcctccactttccatgccacctgtgccctaagtctacagggcgttaggaccccacaaggcacttttgtctttcttggttcccactgaagattttaccccacctagcccttcgacgcgtctgtgcacggggccatttccaatatggcagtagccccgcgactgtttggggggctctgcttccgtttccgggaccagaatccggaagtggctgttgaggggcgtcttccaatctcgcacagctgcgttggctgtagaagagaacggacggcgatggcgacggtcgcagcaaatccagctgctgctgcggcggctgtggcggcggcagcggcggtgactgaggatagagagccacagcacgaggagctgccaggcctggacagccagtggcgccagatagaaaacggcgagagtgggcgagaacgtccactgcgggccggcgaaagctggttccttgtggagaagcactggtataagcagtgggaggcatacgtgcagggaggggaccaggactccagcaccttccctggctgcatcaacaatgccacactctttcaagatgagataaactggcgcctcaaggagggactggtggaaggcgaggattatgtgctgctcccagcagctgcttggcattacctggtcagctggtatggtctagagcatggccagccacccattgaacgcaaggtcatagagctgcccaacatccagaaggtcgaagtgtacccagtagaactgctgcttgtccggcacaatgatttgggcaaatctcacactgttcagttcagccataccgattctattggcctagtattgcgcacagctcgggagcggtttctggtggagccccaggaagacactcggctttgggccaagaactcagaaggctctttggataggttgtatgacacacacatcacggttctcgatgcggcccttgagactgggcagttgatcatcatggagacccgcaagaaagatggcacttggcccagcgcacagctgcatgtcatgaacaacaacatgtcggaagaggatgaggacttcaagggtcagccaggcatctgtggcctcaccaatctgggcaacacgtgcttcatgaactcggccctgcagtgcctcagcaatgtgccacagctcaccgagtacttcctcaacaactgctacctggaggagctcaacttccgcaacccactgggcatgaagggtgagatcgcagaggcctatgcagacctggtgaagcaggcgtggtctggccaccaccgctccattgtgccacatgtgttcaagaacaaggttggccattttgcatcccaatttctgggctaccagcagcatgactctcaggagctgctgtcattcctcctggacgggctgcatgaggaccttaatcgggtgaagaagaaggagtatgtggagctgtgcgatgctgctgggcgaccggatcaggaggtggcacaggaggcatggcaaaaccacaaacggcggaacgattctgtgatcgtggacactttccacggcctcttcaagtccacgctggtgtgccccgattgtggcaatgtatctgtgaccttcgaccccttctgctacctcagtgttccactgcctatcagccacaagagggtcttggaggtcttctttatccccatggatccgcgccgcaagccagagcagcaccggctcgtggtccccaagaaaggcaagatctcggatctatgtgtggctctgtccaaacacacgggcatctcgccagagaggatgatggtggctgatgtcttcagtcaccgcttctataagctctatcagctagaggagcctctgagcagcatcttggaccgtgatgatatcttcgtctatgaggtgtcaggtcgcattgaggccattgagggctcaagagaggacatcgtggttcctgtctacctgcgggagcgcacccctgcccgtgactacaacaactcctactacggcctgatgctttttggacaccccctcctggtatcagtgccccgggaccgcttcacctgggagggcctgtataacgtcctgatgtaccggctctcacgctacgtgaccaaacccaactcagatgatgaggacgatggggatgagaaagaagatgacgaggaggataaagatgacgtccctgggccctcaactgggggcagcctccgagaccctgagccagagcaggctgggcccagctctggagtcacgaacaggtgcccgttcctcctggacaattgccttggcacatctcagtggcccccaaggcgacgacgcaagcagctgttcaccctgcagacggtgaactccaatgggaccagcgaccgcacaacctcccctgaagaagtccatgcccagccgtacattgctatcgactgggagccagagatgaagaagcgttactatgacgaggtagaggctgagggctacgtgaagcatgactgcgtcgggtacgtgatgaagaaggctcccgtgcggctgcaggagtgcattgagctcttcaccactgtggagaccctggagaaggaaaacccctggtactgcccttcctgcaagcagcaccagctggcaaccaagaagctggacctgtggatgctgccggagattctcatcatccacctgaaacgcttttcctacaccaagttctcccgagagaagctggacaccctcgtggagtttcctatccgggacctggacttctctgagtttgtcatccagccacagaatgagtcgaatccggagctgtacaaatatgacctcatcgcggtttccaaccattatgggggcatgcgtgatggacactacacaacatttgcctgcaacaaggacagcggccagtggcactactttgatgacaacagcgtctcccctgtcaatgagaatcagatcgagtccaaggcagcctatgtcctcttctaccaacgccaggacgtggcgcgacgcctgctgtccccggccggctcatctggcgccccagcctcccctgcctgcagctccccacccagctctgagttcatggatgttaattgagagccctgggtcctgccacagaaaaaaaaaaaaaaaagccctctctgcaatctcgcttctcgtgtccgccccgcttctcttattcgtgttaggtgcccccgccaggcattgcaggcttagtcgtggctactgttctcctgtgccgctgcatcgctctctcccgggaaagaacaggtcgtgtctcctcctagcagtgcgcgccccgcctgtgtttgcccttccagcagtgaccctcccttctagtctttatttatggtcgtgcccttccctctcctcagcccagagtgttctgcgtgggtggtgatgggggttcacctgaacacagagtgtattttcttattgaggccctgtaccttctgctgtgtgtgtgtatatataaagcaccagtctgctcccca

SEQ ID NO: 22846 - DNA, 970 bp, Homo sapiens
  misc_feature 1..970: note = ENST00000478596
  source 1..970: mol_type = unassigned DNA; mol_type = unassigned DNA
gttgaggggcgtcttccaatctcgcacagctgcgttggctgtagaagagaacggacggcgatggcgacggtcgcagcaaatccagctgctgctgcggcggctgtggcggcggcagcggcggtgactgaggatagagagccacagcacgaggagctgccaggcctggacagccagtggcgccagatagaaaacggcgagagtgggcgagaacgtccactgcgggccggcgaaagctggttccttgtggagaagcactggtataagcagtgggaggcatacgtgcagggaggggaccaggactccagcaccttccctggctgcatcaacaatgccacactctttcaagatgagataaactggcgcctcaaggagggactggtggaaggcgaggattatgtgctgctcccagcagctgcttggcattacctggtcagctggtatggtctagagcatggccagccacccattgaacgcaaggtataatggatggggagggtgcatggcggggagtgcgtagtaagaaagccttgtaggcccagcatgggtacagatccatgtatgctgggtaggtacacatatgtctgctctcttccccctcctagctcatcatacaggtatctttgtctgctgtgtgtgttcccctgtgtggctctctttacagaccattgtatatgtgtgtttgtatgctatgtttgtaaggcagagtgtgtgctcctctcatttgagaggtcacagcgctgtgtctgtgtgagtacacctgtgtctgcacccctctactcttacaggtcatagagctgcccaacatccagaaggtcgaagtgtacccagtagaactgctgcttgtccggcacaatgatttgggcaaatctcacactgttcagttcagccataccgattctattggcctagtattgcgcacagctcgggagcggtttctggtggagccccaggaagacactcggctttgggc

SEQ ID NO: 22847 - DNA, 3467 bp, Homo sapiens
  misc_feature 1..3467: note = ENST00000469080
  source 1..3467: mol_type = unassigned DNA; mol_type = unassigned DNA
gagaacggacggcgatggcgacggtcgcagcaaatccagctgctgctgcggcggctgtggcggcggcagcggcggtgactgaggatagagagccacagcacgaggagctgccaggcctggacagccagtggcgccagatagaaaacggcgagagtgggcgagaacgtccactgcgggccggcgaaagctggtgaggctgggctgcggtggagcctcggcagagggaacggttccttgtggagaagcactggtataagcagtgggaggcatacgtgcagggaggggaccaggactccagcaccttccctggctgcatcaacaatgccacactctttcaagatgagataaactggcgcctcaaggagggactggtggaaggcgaggattatgtgctgctcccagcagctgcttggcattacctggtcagctggtatggtctagagcatggccagccacccattgaacgcaaggtcatagagctgcccaacatccagaaggtcgaagtgtacccagtagaactgctgcttgtccggcacaatgatttgggcaaatctcacactgttcagttcagccataccgattctattggcctagtattgcgcacagctcgggagcggtttctggtggagccccaggaagacactcggctttgggccaagaactcagaaggctctttggataggttgtatgacacacacatcacggttctcgatgcggcccttgagactgggcagttgatcatcatggagacccgcaagaaagatggcacttggcccagcgcacagctgcatgtcatgaacaacaacatgtcggaagaggatgaggacttcaagggtcagccaggcatctgtggcctcaccaatctgggcaacacgtgcttcatgaactcggccctgcagtgcctcagcaatgtgccacagctcaccgagtacttcctcaacaactgctacctggaggagctcaacttccgcaacccactgggcatgaagggtgagatcgcagaggcctatgcagacctggtgaagcaggcgtggtctggccaccaccgctccattgtgccacatgtgttcaagaacaaggttggccattttgcatcccaatttctgggctaccagcagcatgactctcaggagctgctgtcattcctcctggacgggctgcatgaggaccttaatcgggtgaagaagaaggagtatgtggagctgtgcgatgctgctgggcgaccggatcaggaggtggcacaggaggcatggcaaaaccacaaacggcggaacgattctgtgatcgtggacactttccacggcctcttcaagtccacgctggtgtgccccgattgtggcaatgtatctgtgaccttcgaccccttctgctacctcagtgttccactgcctatcagccacaagagggtcttggaggtcttctttatccccatggatccgcgccgcaagccagagcagcaccggctcgtggtccccaagaaaggcaagatctcggatctatgtgtggctctgtccaaacacacgggcatctcgccagagaggatgatggtggctgatgtcttcagtcaccgcttctataagctctatcagctagaggagcctctgagcagcatcttggaccgtgatgatatcttcgtctatgaggtgtcaggtcgcattgaggccattgagggctcaagagaggacatcgtggttcctgtctacctgcgggagcgcacccctgcccgtgactacaacaactcctactacggcctgatgctttttggacaccccctcctggtatcagtgccccgggaccgcttcacctgggagggcctgtataacgtcctgatgtaccggctctcacgctacgtgaccaaacccaactcagatgatgaggacgatggggatgagaaagaagatgacgaggaggataaagatgacgtccctgggccctcaactgggggcagcctccgagaccctgagccagagcaggctgggcccagctctggagtcacgaacaggtgcccgttcctcctggacaattgccttggcacatctcagtggcccccaaggcgacgacgcaagcagctgttcaccctgcagacggtgaactccaatgggaccagcgaccgcacaacctcccctgaagaagtccatgcccagccgtacattgctatcgactgggagccagagatgaagaagcgttactatgacgaggtagaggctgagggctacgtgaagcatgactgcgtcgggtacgtgatgaagaaggctcccgtgcggctgcaggagtgcattgagctcttcaccactgtggagaccctggagaaggaaaacccctggtactgcccttcctgcaagcagcaccagctggcaaccaagaagctggacctgtggatgctgccggagattctcatcatccacctgaaacgcttttcctacaccaagttctcccgagagaagctggacaccctcgtggagtttcctatccggtcaggggccagggagaggatggctgggggaaggcagggaaaggagggggtgtaccagtattaaccctctccccacccacagggacctggacttctctgagtttgtcatccagccacagaatgagtcgaatccggagctgtacaaatatgacctcatcgcggtttccaaccattatgggggcatgcgtgatggacactgtatgtgccaggctgtgggtggggcctgccctgggggttctgggcaggggggcgatcaggaccttcccagtgagtgactagggatgtgagccagtggtgaggttatcgtggtgggaggagtgacaagagtgaatctggacacttctgagaggcaggaagggtaggcgaggataactctccttccctttcagacacaacatttgcctgcaacaaggacagcggccagtggcactactttgatgacaacagcgtctcccctgtcaatgagaatcagatcgagtccaaggcagcctatgtcctcttctaccaacgccaggacgtggcgcgacgcctgctgtccccggccggctcatctggcgccccagcctcccctgcctgcagctccccacccagctctgagttcatggatgttaattgagagccctgggtcctgccacagaaaaaaaaaaaaaaaagccctctctgcaatctcgcttctcgtgtccgccccgcttctcttattcgtgttaggtgcccccgccaggcattgcaggcttagtcgtggctactgttctcctgtgccgctgcatcgctctctcccgggaaagaacaggtcgtgtctcctcctagcagtgcgcgccccgcctgtgtttgcccttccagcagtgaccctcccttctagtctttatttatggtcgtgcccttccctctcctcagcccagagtgttctgcgtgggtggtgatgggggttcacctgaacacagagtgtattttcttattgaggccctgtaccttctgctgtgtgtgtgtatatata

SEQ ID NO: 22848 - DNA, 804 bp, Homo sapiens
  misc_feature 1..804: note = ENST00000377080
  source 1..804: mol_type = unassigned DNA; mol_type = unassigned DNA
aacgtctggaaaaggggcggggcctgtgtggtgcagtctgacgcctgagaacaaaatggggtttgttgtgatgagaccagtttcggtcctggaggtggggccgggcctgcgtagtgaaactgcgtaggaacctgggaagaaggttccttgtggagaagcactggtataagcagtgggaggcatacgtgcagggaggggaccaggactccagcaccttccctggctgcatcaacaatgccacactctttcaagatgagataaactggcgcctcaaggagggactggtggaaggcgaggattatgtgctgctcccagcagctgcttggcattacctggtcagctggtatggtctagagcatggccagccacccattgaacgcaaggtcatagagctgcccaacatccagaaggtcgaagtgtacccagtagaactgctgcttgtccggcacaatgatttgggcaaatctcacactgttcagttcagccataccgattctattggcctagtattgcgcacagctcgggagcggtttctggtggagccccaggaagacactcggctttgggccaagaactcagaaggctctttggataggttgtatgacacacacatcacggttctcgatgcggcccttgagactgggcagttgatcatcatggagacccgcaagaaagatggcacttggcccagcgcacagctgcatgtcatgaacaacaacatgtcggaagaggatgaggacttcaagggtcagccaggcatctgtggcctcaccaatctgggcaacacgtgcttcatgaactcgg

SEQ ID NO: 22849 - DNA, 1077 bp, Homo sapiens
  misc_feature 1..1077: note = ENST00000377078
  source 1..1077: mol_type = unassigned DNA; mol_type = unassigned DNA
gtgctctgaggccgagggacgacagtggaggggaggtggtgcctatgaggcagaaaatggcgcctgcgaataagcaaagtttatgacgcgccgtggtttttgattctggcggaagccttcccgagtcgagagaacgtgcaggttccttgtggagaagcactggtataagcagtgggaggcatacgtgcagggaggggaccaggactccagcaccttccctggctgcatcaacaatgccacactctttcaagatgagataaactggcgcctcaaggagggactggtggaaggcgaggattatgtgctgctcccagcagctgcttggcattacctggtcagctggtatggtctagagcatggccagccacccattgaacgcaaggtcatagagctgcccaacatccagaaggtcgaagtgtacccagtagaactgctgcttgtccggcacaatgatttgggcaaatctcacactgttcagttcagccataccgattctattggcctagtattgcgcacagctcgggagcggtttctggtggagccccaggaagacactcggctttgggccaagaactcagaaggctctttggataggttgtatgacacacacatcacggttctcgatgcggcccttgagactgggcagttgatcatcatggagacccgcaagaaagatggcacttggcccagcgcacagctgcatgtcatgaacaacaacatgtcggaagaggatgaggacttcaagggtcagccaggcatctgtggcctcaccaatctgggcaacacgtgcttcatgaactcggccctgcagtgcctcagcaatgtgccacagctcaccgagtacttcctcaacaactgctacctggaggagctcaacttccgcaacccactgggcatgaagggtgagatcgcagaggcctatgcagacctggtgaagcaggcgtggtctggccaccaccgctccattgtgccacatgtgttcaagaacaaggttggccattttgcatcccaatttctgggctaccagcagcatgactctcaggagctgctgtcattcctcctggacgggctgcatga

SEQ ID NO: 22850 - DNA, 516 bp, Homo sapiens
  misc_feature 1..516: note = ENST00000489111
  source 1..516: mol_type = unassigned DNA; mol_type = unassigned DNA
gtatgacacacacatcacggttctcgatgcggcccttgagactgggcagttgatcatcatggagacccgcaagaaagatggcacttggcccagcgcacagctgcatgtcatgaacaacaacatgtcggaagaggatgaggacttcaagggtcagccaggcatctgtggcctcaccaatctgggcaacacgtgcttcatgaactcggccctgcaggttgggccattatagttgtgtctggcacagccacgtggttgggcttcaagagctgaggattggggacagagctggggtcctgaggggactacagggcaaggggtcaggatgaaagctgaggccccacaagtctgaagtggcacgcccacgttcattcctgaactatcagcctcttctctcagcttgccctcattttccctcttctcttccctgttcccacgttcttccttctcgtgaaatcctaatgccttctctcccctactctcctgctcctctctctcctcccttccccttctctcttg

SEQ ID NO: 22851 - DNA, 340 bp, Homo sapiens
  misc_feature 1..340: note = ENST00000489030
  source 1..340: mol_type = unassigned DNA; mol_type = unassigned DNA
tgactcaaccctgggcacccccgaccccctacgtctcttggctctcctaactccctctctctctgatgaccctgcccatcttcttagaacaaggttggccattttgcatcccaatttctgggctaccagcagcatgactctcaggagctgctgtcattcctcctggacgggctgcatgaggaccttaatcgggtgaagaagaaggagtatgtggagctgtgcgatgctgctgggcgaccggatcaggaggtggcacaggaggcatggcaaaaccacaaacggcggaacgattctgtgatcgtggacactttccacggcctcttcaagtccacgctggtgt

SEQ ID NO: 22852 - DNA, 697 bp, Homo sapiens
  misc_feature 1..697: note = ENST00000480104
  source 1..697: mol_type = unassigned DNA; mol_type = unassigned DNA
cttcaagtccacgctggtgtgccccgattgtggcaatgtatctgtgaccttcgaccccttctgctacctcagtgttccactgcctatcagccacaagagggtcttggaggtcttctttatccccatggatccgcgccgcaagccagagcaggtgtggggcagtgggggcctggggagatgatgatggacacatagagtttgattagctgccatagctcaaggcttcttgcattaactcaccacaagcccttttggtcttttgtggataccgtttttcccttagcaccggctcgtggtccccaagaaaggcaagatctcggatctatgtgtggctctgtccaaacacacgggcatctcgccagagaggatgatggtggctgatgtcttcagtcaccgcttctataagctctatcagctagaggagcctctgagcagcatcttggaccgtgatgatatcttcgtctatgaggtgtcaggtcgcattgaggccattgagggctcaagagaggacatcgtggttcctgtctacctgcgggagcgcacccctgcccgtgactacaacaactcctactacggcctgatgctttttggacaccccctcctggtatcagtgccccgggaccgcttcacctgggagggcctgtataacgtcctgatgtaccggctctcacgctacgtgaccaaacccaactcagat

SEQ ID NO: 22853 - DNA, 904 bp, Homo sapiens
  misc_feature 1..904: note = ENST00000488848
  source 1..904: mol_type = unassigned DNA; mol_type = unassigned DNA
ctatgaggtgtcaggtcgcattgaggccattgagggctcaagagaggacatcgtggttcctgtctacctgcgggagcgcacccctgcccgtgactacaacaactcctactacggcctgatgctttttggacaccccctcctggtatcagtgccccgggaccgcttcacctgggagggcctgtataacgtcctgatgtaccggctctcacgctacgtgaccaaacccaactcagatgatgaggacgatggggatgagaaagaagatgacgaggaggataaagatgacgtccctgggccctcaactgggggcagcctccgagaccctgagccagagcaggctgggcccagctctggagtcacgaacaggtgcccgttcctcctggacaattgccttggcacatctcagtggcccccaaggcgacgacgcaagcagctgttcaccctgcagacggtgaactccaatgggaccagcgaccgcacaacctcccctgaagaagtccatggtatttcctttggctatcagcgagggctggggaggctggaggggagatttcctggcagcaggatccatgaccacctctccctcacccccagcccagccgtacattgctatcgactgggagccagagatgaagaagcgttactatgacgaggtagaggctgaggtaaatgagatcccagggatggggggtacttccagctcttgcccctcaactcttcgtacatcctccccacaactcctctagctgggaacagagccaagagatccaggtcaagcttggccttggggcctgaacacctactgagagctccagggcctgaggttcctagcttcaaagtcggtgctctgacccactcagtgtgtgtctcccccgctgggcccccactccccatttctccatct

SEQ ID NO: 22854 - DNA, 900 bp, Homo sapiens
  misc_feature 1..900: note = ENST00000497179
  source 1..900: mol_type = unassigned DNA; mol_type = unassigned DNA
acccaactcagatgatgaggacgatggggatgagaaagaagatgacgaggaggataaagatgacgtccctgggccctcaactgggggcagcctccgagaccctgagccagagcaggctgggcccagctctggagtcacgaacaggtgcccgttcctcctggacaattgccttggcacatctcagtggcccccaaggcgacgacgcaagcagctgttcaccctgcagacggtgaactccaatgggaccagcgaccgcacaacctcccctgaagaagtccatgcccagccgtacattgctatcgactgggagccagagatgaagaagcgttactatgacgaggtagaggctgagggctacgtgaagcatgactgcgtcgggtacgtgatgaagaaggctcccgtgcggctgcaggagtgcattgagctcttcaccactgtggagaccctggagaaggaaaacccctggtactgcccttcctgcaagcagcaccagctggcaaccaagaagctggacctgtggatgctgccggagattctcatcatccacctgaaacgcttttcctacaccaagttctcccgagagaagctggacaccctcgtggagtttcctatccggtcaggggccagggagaggatggctgggggaaggcagggaaaggagggggtgtaccagtattaaccctctccccacccacagggacctggacttctctgagtttgtcatccagccacagaatgagtcgaatccggagctgtacaaatatgacctcatcgcggtttccaaccattatgggggcatgcgtgatggacactacacaacatttgcctgcaacaaggacagcggccagtggcactactttgatgacaacagcgtctcccctgtcaatgagaatcagatcg

SEQ ID NO: 22855 - DNA, 696 bp, Homo sapiens
  misc_feature 1..696: note = ENST00000467378
  source 1..696: mol_type = unassigned DNA; mol_type = unassigned DNA
tcctgcaagcagcaccagctggcaaccaagaagctggacctgtggatgctgccggagattctcatcatccacctgaaacgcttttcctacaccaagttctcccgagagaagctggacaccctcgtggagtttcctatccgggacctggacttctctgagtttgtcatccagccacagaatgagtcgaatccggagctgtacaaatatgacctcatcgcggtttccaaccattatgggggcatgcgtgatggacactgtatgtgccaggctgtgggtggggcctgccctgggggttctgggcaggggggcgatcaggaccttcccagtgagtgactagggatgtgagccagtggtgaggttatcgtggtgggaggagtgacaagagtgaatctggacacttctgagaggcaggaagggtaggcgaggataactctccttccctttcagacacaacatttgcctgcaacaaggacagcggccagtggcactactttgatgacaacagcgtctcccctgtcaatgagaatcagatcgagtccaaggcagcctatgtcctcttctaccaacgccaggacgtggcgcgacgcctgctgtccccggccggctcatctggcgccccagcctcccctgcctgcagctccccacccagctctgagttcatggatgttaattgagagccctgggtcctgccacaga

SEQ ID NO: 22856 - DNA, 3338 bp, Homo sapiens
  misc_feature 1..3338: note = ENST00000218348
  source 1..3338: mol_type = unassigned DNA; mol_type = unassigned DNA
ttaccccacctagcccttcgacgcgtctgtgcacggggccatttccaatatggcagtagccccgcgactgtttggggggctctgcttccgtttccgggaccagaatccggaagtggctgttgaggggcgtcttccaatctcgcacagctgcgttggctgtagaagagaacggacggcgatggcgacggtcgcagcaaatccagctgctgctgcggcggctgtggcggcggcagcggcggtgactgaggatagagagccacagcacgaggagctgccaggcctggacagccagtggcgccagatagaaaacggcgagagtgggcgagaacgtccactgcgggccggcgaaagctggttccttgtggagaagcactggtataagcagtgggaggcatacgtgcagggaggggaccaggactccagcaccttccctggctgcatcaacaatgccacactctttcaagatgagataaactggcgcctcaaggagggactggtggaaggcgaggattatgtgctgctcccagcagctgcttggcattacctggtcagctggtatggtctagagcatggccagccacccattgaacgcaaggtcatagagctgcccaacatccagaaggtcgaagtgtacccagtagaactgctgcttgtccggcacaatgatttgggcaaatctcacactgttcagttcagccataccgattctattggcctagtattgcgcacagctcgggagcggtttctggtggagccccaggaagacactcggctttgggccaagaactcagaaggctctttggataggttgtatgacacacacatcacggttctcgatgcggcccttgagactgggcagttgatcatcatggagacccgcaagaaagatggcacttggcccagcgcacagctgcatgtcatgaacaacaacatgtcggaagaggatgaggacttcaagggtcagccaggcatctgtggcctcaccaatctgggcaacacgtgcttcatgaactcggccctgcagtgcctcagcaatgtgccacagctcaccgagtacttcctcaacaactgctacctggaggagctcaacttccgcaacccactgggcatgaagggtgagatcgcagaggcctatgcagacctggtgaagcaggcgtggtctggccaccaccgctccattgtgccacatgtgttcaagaacaaggttggccattttgcatcccaatttctgggctaccagcagcatgactctcaggagctgctgtcattcctcctggacgggctgcatgaggaccttaatcgggtgaagaagaaggagtatgtggagctgtgcgatgctgctgggcgaccggatcaggaggtggcacaggaggcatggcaaaaccacaaacggcggaacgattctgtgatcgtggacactttccacggcctcttcaagtccacgctggtgtgccccgattgtggcaatgtatctgtgaccttcgaccccttctgctacctcagtgttccactgcctatcagccacaagagggtcttggaggtcttctttatccccatggatccgcgccgcaagccagagcagcaccggctcgtggtccccaagaaaggcaagatctcggatctatgtgtggctctgtccaaacacacgggcatctcgccagagaggatgatggtggctgatgtcttcagtcaccgcttctataagctctatcagctagaggagcctctgagcagcatcttggaccgtgatgatatcttcgtctatgaggtgtcaggtcgcattgaggccattgagggctcaagagaggacatcgtggttcctgtctacctgcgggagcgcacccctgcccgtgactacaacaactcctactacggcctgatgctttttggacaccccctcctggtatcagtgccccgggaccgcttcacctgggagggcctgtataacgtcctgatgtaccggctctcacgctacgtgaccaaacccaactcagatgatgaggacgatggggatgagaaagaagatgacgaggaggataaagatgacgtccctgggccctcaactgggggcagcctccgagaccctgagccagagcaggctgggcccagctctggagtcacgaacaggtgcccgttcctcctggacaattgccttggcacatctcagtggcccccaaggcgacgacgcaagcagctgttcaccctgcagacggtgaactccaatgggaccagcgaccgcacaacctcccctgaagaagtccatgcccagccgtacattgctatcgactgggagccagagatgaagaagcgttactatgacgaggtagaggctgagggctacgtgaagcatgactgcgtcgggtacgtgatgaagaaggctcccgtgcggctgcaggagtgcattgagctcttcaccactgtggagaccctggagaaggaaaacccctggtactgcccttcctgcaagcagcaccagctggcaaccaagaagctggacctgtggatgctgccggagattctcatcatccacctgaaacgcttttcctacaccaagttctcccgagagaagctggacaccctcgtggagtttcctatccgggacctggacttctctgagtttgtcatccagccacagaatgagtcgaatccggagctgtacaaatatgacctcatcgcggtttccaaccattatgggggcatgcgtgatggacactacacaacatttgcctgcaacaaggacagcggccagtggcactactttgatgacaacagcgtctcccctgtcaatgagaatcagatcgagtccaaggcagcctatgtcctcttctaccaacgccaggacgtggcgcgacgcctgctgtccccggccggctcatctggcgccccagcctcccctgcctgcagctccccacccagctctgagttcatggatgttaattgagagccctgggtcctgccacagaaaaaaaaaaaaaaaagccctctctgcaatctcgcttctcgtgtccgccccgcttctcttattcgtgttaggtgcccccgccaggcattgcaggcttagtcgtggctactgttctcctgtgccgctgcatcgctctctcccgggaaagaacaggtcgtgtctcctcctagcagtgcgcgccccgcctgtgtttgcccttccagcagtgaccctcccttctagtctttatttatggtcgtgcccttccctctcctcagcccagagtgttctgcgtgggtggtgatgggggttcacctgaacacagagtgtattttcttattgaggccctgtaccttctgctgtgtgtgtgtatatataaagcaccagtctgctcccc

SEQ ID NO: 22857 - DNA, 4669 bp, Homo sapiens
  misc_feature 1..4669: note = ENST00000003302
  source 1..4669: mol_type = unassigned DNA; mol_type = unassigned DNA
agtcctgagaggctgggccggcggcggctgcggcgggagaccggtgacccgcggctgggcgcctcggccatgactgcggagctgcagcaggacgacgcggccggcgcggcagacggccacggctcgagctgccaaatgctgttaaatcaactgagagaaatcacaggcattcaggacccttcctttctccatgaagctctgaaggccagtaatggtgacattactcaggcagtcagccttctcactgatgagagagttaaggagcccagtcaagacactgttgctacagaaccatctgaagtagaggggagtgctgccaacaaggaagtattagcaaaagttatagaccttactcatgataacaaagatgatcttcaggctgccattgctttgagtctactggagtctcccaaaattcaagctgatggaagagatcttaacaggatgcatgaagcaacctctgcagaaactaaacgctcaaagagaaaacgctgtgaagtctggggagaaaaccccaatcccaatgactggaggagagttgatggttggccagttgggctgaaaaatgttggcaatacatgttggtttagtgctgttattcagtctctctttcaattgcctgaatttcgaagacttgttctcagttatagtctgccacaaaatgtacttgaaaattgtcgaagtcatacagaaaagagaaatatcatgtttatgcaagagcttcagtatttgtttgctctaatgatgggatcaaatagaaaatttgtagacccgtctgcagccctggatctattaaagggagcattccgatcatctgaggaacagcagcaagatgtgagtgaattcacacacaagctcctggattggctagaggacgcattccagctagctgttaatgttaacagtcccaggaacaaatctgaaaatccaatggtgcagctgttctatggtactttcctgactgaaggggttcgtgaaggaaaacccttttgtaacaatgagaccttcggccagtatcctcttcaggtaaacggttatcgcaacttagacgagtgtttggaaggggccatggtggagggtgatgttgagcttcttccctccgatcactcggtgaagtatggacaagagcgttggtttacaaagctacctccagtgttgacctttgaactctcaagatttgagtttaatcagtcccttgggcagccagagaaaattcacaataagctggaatttcctcagattatttatatggacaggtacatgtacaggagcaaggagcttattcgaaataagagagagtgtattcgaaagttgaaggaggaaataaaaattctgcagcaaaaattggaaaggtatgtgaaatatggctcaggcccagctcggttcccgctcccggacatgctgaaatatgttattgaatttgctagtacaaaacctgcctcagaaagctgtccacctgaaagtgacacacatatgacattaccactttcttcagtgcactgctcggtttctgaccagacatccaaggaaagtacaagtacagaaagctcttctcaggatgttgaaagtaccttttcttctcctgaagattctttacccaagtctaaaccactgacatcttctcggtcttccatggaaatgccttcacagccagctccacgaacagtcacagatgaggagataaattttgttaagacctgtcttcagagatggaggagtgagattgaacaagatatacaagatttaaagacttgtattgcaagtactactcagactattgaacagatgtactgcgatcctctccttcgtcaggtgccttatcgcttgcatgcagttcttgttcatgaaggacaagcaaatgctggacactattgggcctatatctataatcaaccccgacagagctggctcaagtacaatgacatctctgttactgaatcttcctgggaagaagttgaaagagattcctatggaggcctgagaaatgttagtgcttactgtctgatgtacattaatgacaaactaccctacttcaatgcagaggcagccccaactgaatcagatcaaatgtcagaagtggaagccctatctgtggaactcaagcattacattcaggaggataactggcggtttgagcaggaagtagaggagtgggaagaagagcagtcttgcaaaatccctcaaatggagtcctccaccaactcctcatcacaggactactctacatcacaagagccttcagtagcctcttctcatggggttcgctgcttgtcgtctgagcatgctgtgattgtaaaggagcaaactgcccaggctattgcaaacacagcccgtgcctatgagaagagcggtgtagaagcggcactgagtgaggtgatgctgagccctgccatgcaaggggtcatcctggccatagctaaagcccgtcagacctttgaccgagatgggtctgaagcagggctgattaaggcattccatgaagaatactccaggctctatcagcttgccaaagagacccccacctctcacagtgatcctcgacttcagcatgtccttgtctactttttccaaaatgaagcacccaaaagggtagtagaacgaacccttctggaacagtttgcagataaaaatcttagctatgatgaaagatcaatcagcattatgaaggtggctcaagcgaaactgaaggaaattggtccagatgacatgaatatggaagagtacaagaagtggcatgaagattatagtttgttccgaaaagtgtctgtgtatctcctaacaggcctagaactctatcaaaaaggaaagtaccaagaggcactttcctacctggtatatgcctaccagagcaatgctgccctgctgatgaaggggccccgccggggggtcaaagaatccgtgattgctttataccgaagaaaatgccttctggagctgaatgccaaagcagcttctctttttgaaacaaatgatgatcactccgtaactgagggcattaatgtgatgaatgaactgatcatcccctgcattcaccttatcattaataatgacatttccaaggatgatctggatgccattgaggtcatgagaaaccattggtgctcttaccttgggcaagatattgcagaaaatctgcagctgtgcctaggggagtttctacccagacttctagatccttctgcagaaatcatcgtcttgaaagagcctccaactattcgacccaattctccctatgacctatgtagccgatttgcagctgtcatggagtcaattcagggagtttcaactgtgacagtgaaataagctcccacatgttcaaggcccattctggttcctggctgcctgcctcttgcacagaagttcgttgtcatagtgctcaccttgggaaaaggattaggtgggcacataagattccgatcagaccccaaccatgctgcatgtgtaaagaaggattgaaaataaaattgcactttttaggtacaaaatcataaaagctgtttcactagaaaaggcagaaagcagtgtattaaggtgttgaattacgccagaagacctgaaatgccttgtacctacaacaatgcttaggcttttctaagcctcttgccacttttaaaattatccttcaggcataaatatttttgacagcagaatagaagaatgattcatgagaacctgaaccagatgaacagctactagttattttatcaaatacagatgacatttaaaaattcttaactacaagagattagaaatataaaccttgcctggctcttgccaggagataacaaaatgggttgctgatgaactgcacccttttacatgtgggtagaatataagctcacatggcagtgagatgttgaaaagtcaaaagagacctgtctctctcctttcttttctatctttaaaccagaaaacctcatactcagtcctcagtgaaagaaagtaaagtattaaggactttagacagaagagcattgtgtaacttgactgaagatcatccattaatagttattaggcatttaggtaaaattttctaatacctaaaaattgtcaaaaacagtcaatagggctactgctggcccaaagaccatttaggtccacctcctcttttttgctctttttttttttctgtgacagtttcactgtgtcgcccaggctggcgttcagtggtgcaatctcagctcactgcaaactctgtctcctgggctcaagtgattctcgtgcctcagcctcccgaatagctggaattacgggcatgcaccaccacacctggctaatttttgtatttttaatagagatggggtttcaccatattggccaggctgatctctaactcctggcctcaagtgatctatctgcctccctcagcctcccaaagtctgggattgcagacaagtcatcgtacccggccttcttttttgcccttaaaagtaagggatgtgggtttgtacaaaaaaaaaaaaaaaaaaaaaaaaaccagcatacatatgcaaaactatatatatatgtatatgtagagaaaaatacttcccattgatcatttttaaaaggcttctgattggatattgtgttttaaccaaattttaaagattaatggaatcatgaaagggaaaaaaattgatacaactatgcagattttataaatgtgcaataaaagtatttgttttac

SEQ ID NO: 22858 - DNA, 3498 bp, Homo sapiens
  misc_feature 1..3498: note = ENST00000544967
  source 1..3498: mol_type = unassigned DNA; mol_type = unassigned DNA
gtgcatttctaaccagctatcaggaagttgctgaatttaaaatgttgtctctgtggagccagaagataggctttagatagtcatagtgatgtcttttttaaaaagtctctctctttgcctaggaaaacccttttgtaacaatgagaccttcggccagtatcctcttcaggtaaacggttatcgcaacttagacgagtgtttggaaggggccatggtggagggtgatgttgagcttcttccctccgatcactcggtgaagtatggacaagagcgttggtttacaaagctacctccagtgttgacctttgaactctcaagatttgagtttaatcagtcccttgggcagccagagaaaattcacaataagctggaatttcctcagattatttatatggacaggtacatgtacaggagcaaggagcttattcgaaataagagagagtgtattcgaaagttgaaggaggaaataaaaattctgcagcaaaaattggaaaggtatgtgaaatatggctcaggcccagctcggttcccgctcccggacatgctgaaatatgttattgaatttgctagtacaaaacctgcctcagaaagctgtccacctgaaagtgacacacatatgacattaccactttcttcagtgcactgctcggtttctgaccagacatccaaggaaagtacaagtacagaaagctcttctcaggatgttgaaagtaccttttcttctcctgaagattctttacccaagtctaaaccactgacatcttctcggtcttccatggaaatgccttcacagccagctccacgaacagtcacagatgaggagataaattttgttaagacctgtcttcagagatggaggagtgagattgaacaagatatacaagatttaaagacttgtattgcaagtactactcagactattgaacagatgtactgcgatcctctccttcgtcaggtgccttatcgcttgcatgcagttcttgttcatgaaggacaagcaaatgctggacactattgggcctatatctataatcaaccccgacagagctggctcaagtacaatgacatctctgttactgaatcttcctgggaagaagttgaaagagattcctatggaggcctgagaaatgttagtgcttactgtctgatgtacattaatgacaaactaccctacttcaatgcagaggcagccccaactgaatcagatcaaatgtcagaagtggaagccctatctgtggaactcaagcattacattcaggaggataactggcggtttgagcaggaagtagaggagtgggaagaagagcagtcttgcaaaatccctcaaatggagtcctccaccaactcctcatcacaggactactctacatcacaagagccttcagtagcctcttctcatggggttcgctgcttgtcgtctgagcatgctgtgattgtaaaggagcaaactgcccaggctattgcaaacacagcccgtgcctatgagaagagcggtgtagaagcggcactgagtgaggcattccatgaagaatactccaggctctatcagcttgccaaagagacccccacctctcacagtgatcctcgacttcagcatgtccttgtctactttttccaaaatgaagcacccaaaagggtagtagaacgaacccttctggaacagtttgcagataaaaatcttagctatgatgaaagatcaatcagcattatgaaggtggctcaagcgaaactgaaggaaattggtccagatgacatgaatatggaagagtacaagaagtggcatgaagattatagtttgttccgaaaagtgtctgtgtatctcctaacaggcctagaactctatcaaaaaggaaagtaccaagaggcactttcctacctggtatatgcctaccagagcaatgctgccctgctgatgaaggggccccgccggggggtcaaagaatccgtgattgctttataccgaagaaaatgccttctggagctgaatgccaaagcagcttctctttttgaaacaaatgatgatcactccgtaactgagggcattaatgtgatgaatgaactgatcatcccctgcattcaccttatcattaataatgacatttccaaggatgatctggatgccattgaggtcatgagaaaccattggtgctcttaccttgggcaagatattgcagaaaatctgcagctgtgcctaggggagtttctacccagacttctagatccttctgcagaaatcatcgtcttgaaagagcctccaactattcgacccaattctccctatgacctatgtagccgatttgcagctgtcatggagtcaattcagggagtttcaactgtgacagtgaaataagctcccacatgttcaaggcccattctggttcctggctgcctgcctcttgcacagaagttcgttgtcatagtgctcaccttgggaaaaggattaggtgggcacataagattccgatcagaccccaaccatgctgcatgtgtaaagaaggattgaaaataaaattgcactttttaggtacaaaatcataaaagctgtttcactagaaaaggcagaaagcagtgtattaaggtgttgaattacgccagaagacctgaaatgccttgtacctacaacaatgcttaggcttttctaagcctcttgccacttttaaaattatccttcaggcataaatatttttgacagcagaatagaagaatgattcatgagaacctgaaccagatgaacagctactagttattttatcaaatacagatgacatttaaaaattcttaactacaagagattagaaatataaaccttgcctggctcttgccaggagataacaaaatgggttgctgatgaactgcacccttttacatgtgggtagaatataagctcacatggcagtgagatgttgaaaagtcaaaagagacctgtctctctcctttcttttctatctttaaaccagaaaacctcatactcagtcctcagtgaaagaaagtaaagtattaaggactttagacagaagagcattgtgtaacttgactgaagatcatccattaatagttattaggcatttaggtaaaattttctaatacctaaaaattgtcaaaaacagtcaatagggctactgctggcccaaagaccatttaggtccacctcctcttttttgctctttttttttttctgtgacagtttcactgtgtcgcccaggctggcgttcagtggtgcaatctcagctcactgcaaactctgtctcctgggctcaagtgattctcgtgcctcagcctcccgaatagctggaattacgggcatgcaccaccacacctggctaatttttgtatttttaatagagatggggtttcaccatattggccaggctgatctctaactcctggcctcaagtgatctatctgcctccctcagcctcccaaagtctgggattgcagacaagtcatcgtacccggccttcttttttgcccttaaaagtaagggatgtgggtttgtac

SEQ ID NO: 22859 - DNA, 3431 bp, Homo sapiens
  misc_feature 1..3431: note = ENST00000545540
  source 1..3431: mol_type = unassigned DNA; mol_type = unassigned DNA
agtcctgagaggctgggccggcggcggctgcggcgggagaccggtgacccgcggctgggcgcctcggccatgactgcggagctgcagcaggacgacgcggccggcgcggcagacggccacggctcgaagttatagaccttactcatgataacaaagatgatcttcaggctgccattgctttgagtctactggagtctcccaaaattcaagctgatggaagagatcttaacaggatgcatgaagcaacctctgcagaaactaaacgctcaaagagaaaacgctgtgaagtctggggagaaaaccccaatcccaatgactggaggagagttgatggttggccagttgggctgaaaaatgttggcaatacatgttggtttagtgctgttattcagtctctctttcaattgcctgaatttcgaagacttgttctcagttatagtctgccacaaaatgtacttgaaaattgtcgaagtcatacagaaaagagaaatatcatgtttatgcaagagcttcagtatttgtttgctctaatgatgggatcaaatagaaaatttgtagacccgtctgcagccctggatctattaaagggagcattccgatcatctgaggaacagcagcaagatgtgagtgaattcacacacaagctcctggattggctagaggacgcattccagctagctgttaatgttaacagtcccaggaacaaatctgaaaatccaatggtgcagctgttctatggtactttcctgactgaaggggttcgtgaaggaaaacccttttgtaacaatgagaccttcggccagtatcctcttcaggtaaacggttatcgcaacttagacgagtgtttggaaggggccatggtggagggtgatgttgagcttcttccctccgatcactcggtgaagtatggacaagagcgttggtttacaaagctacctccagtgttgacctttgaactctcaagatttgagtttaatcagtcccttgggcagccagagaaaattcacaataagctggaatttcctcagattatttatatggacaggtacatgtacaggagcaaggagcttattcgaaataagagagagtgtattcgaaagttgaaggaggaaataaaaattctgcagcaaaaattggaaaggtatgtgaaatatggctcaggcccagctcggttcccgctcccggacatgctgaaatatgttattgaatttgctagtacaaaacctgcctcagaaagctgtccacctgaaagtgacacacatatgacattaccactttcttcagtgcactgctcggtttctgaccagacatccaaggaaagtacaagtacagaaagctcttctcaggatgttgaaagtaccttttcttctcctgaagattctttacccaagtctaaaccactgacatcttctcggtcttccatggaaatgccttcacagccagctccacgaacagtcacagatgaggagataaattttgttaagacctgtcttcagagatggaggagtgagattgaacaagatatacaagatttaaagacttgtattgcaagtactactcagactattgaacagatgtactgcgatcctctccttcgtcaggtgccttatcgcttgcatgcagttcttgttcatgaaggacaagcaaatgctggacactattgggcctatatctataatcaaccccgacagagctggctcaagtacaatgacatctctgttactgaatcttcctgggaagaagttgaaagagattcctatggaggcctgagaaatgttagtgcttactgtctgatgtacattaatgacaaactaccctacttcaatgcagaggcagccccaactgaatcagatcaaatgtcagaagtggaagccctatctgtggaactcaagcattacattcaggaggataactggcggtttgagcaggaagtagaggagtgggaagaagagcagtcttgcaaaatccctcaaatggagtcctccaccaactcctcatcacaggactactctacatcacaagagccttcagtagcctcttctcatggggttcgctgcttgtcgtctgagcatgctgtgattgtaaaggagcaaactgcccaggctattgcaaacacagcccgtgcctatgagaagagcggtgtagaagcggcactgagtgaggcattccatgaagaatactccaggctctatcagcttgccaaagagacccccacctctcacagtgatcctcgacttcagcatgtccttgtctactttttccaaaatgaagcacccaaaagggtagtagaacgaacccttctggaacagtttgcagataaaaatcttagctatgatgaaagatcaatcagcattatgaaggtggctcaagcgaaactgaaggaaattggtccagatgacatgaatatggaagagtacaagaagtggcatgaagattatagtttgttccgaaaagtgtctgtgtatctcctaacaggcctagaactctatcaaaaaggaaagtaccaagaggcactttcctacctggtatatgcctaccagagcaatgctgccctgctgatgaaggggccccgccggggggtcaaagaatccgtgattgctttataccgaagaaaatgccttctggagctgaatgccaaagcagcttctctttttgaaacaaatgatgatcactccgtaactgagggcattaatgtgatgaatgaactgatcatcccctgcattcaccttatcattaataatgacatttccaaggatgatctggatgccattgaggtcatgagaaaccattggtgctcttaccttgggcaagatattgcagaaaatctgcagctgtgcctaggggagtttctacccagacttctagatccttctgcagaaatcatcgtcttgaaagagcctccaactattcgacccaattctccctatgacctatgtagccgatttgcagctgtcatggagtcaattcagggagtttcaactgtgacagtgaaataagctcccacatgttcaaggcccattctggttcctggctgcctgcctcttgcacagaagttcgttgtcatagtgctcaccttgggaaaaggattaggtgggcacataagattccgatcagaccccaaccatgctgcatgtgtaaagaaggattgaaaataaaattgcactttttaggtacaaaatcataaaagctgtttcactagaaaaggcagaaagcagtgtattaaggtgttgaattacgccagaagacctgaaatgccttgtacctacaacaatgcttaggcttttctaagcctcttgccacttttaaaattatccttcaggcataaatatttttgacagcagaatagaagaatgattcatgagaacctgaaccagatgaacagctactagttattttatcaaatacagatgacatttaaaaattcttaacta

SEQ ID NO: 22860 - DNA, 656 bp, Homo sapiens
  misc_feature 1..656: note = ENST00000544272
  source 1..656: mol_type = unassigned DNA; mol_type = unassigned DNA
ctaattctaccttttatctgtaggagctgaatgccaaagcagcttctctttttgaaacaaatgatgatcactccgtaactgagggcattaatgtgatgaatgaactgatcatcccctgcattcaccttatcattaataatgacatttccaaggatgatctggatgccattgaggtcatgagaaaccattggtgctcttaccttgggcaagatattgcagaaaatctgcagctgtgcctaggggagtttctacccagacttctagatccttctgcagaaatcatcgtcttgaaagagcctccaactattcgacccaattctccctatgacctatgtagccgatttgcagctgtcatggagtcaattcagggagtttcaactgtgacagtgaaataagctcccacatgttcaaggcccattctggttcctggctgcctgcctcttgcacagaagttcgttgtcatagtgctcaccttgggaaaaggattaggtgggcacataagattccgatcagaccccaaccatgctgcatgtgtaaagaaggattgaaaataaaattgcactttttaggtacaaaatcataaaagctgtttcactagaaaaggcagaaagcagtgtattaaggtgttgaattacgccagaagacctgaaatgcct

SEQ ID NO: 22861 - DNA, 3015 bp, Homo sapiens
  misc_feature 1..3015: note = ENST00000540438
  source 1..3015: mol_type = unassigned DNA; mol_type = unassigned DNA
ctgagaggctgggccggcggcggctgcggcgggagaccggtgacccgcggctgggcgcctcggccatgactgcggagctgcagcaggacgacgcggccggcgcggcagacggccacggctcgagctgccaaatgctgttaaatcaactgagagaaatcacaggcattcaggacccttcctttctccatgaagctctgaaggccagtaatggtgacattactcaggcagtcagccttctcactgatgagagagttaaggagcccagtcaagacactgttgctacagaaccatctgaagtagaggggagtgctgccaacaaggaagtattagcaaaagttatagaccttactcatgataacaaagatgatcttcaggctgccattgctttgagtctactggagtctcccaaaattcaagctgatggaagagatcttaacaggatgcatgaagcaacctctgcagaaactaaacgctcaaagagaaaacgctgtgaagtctggggagaaaaccccaatcccaatgactggaggagagttgatggttggccagttgggctgaaaaatgttggcaatacatgttggtttagtgctgttattcaggatgcttcttcaggagttccaccgtgcaggcctgagagggttttcatttgaggagcatgttgggatgaggagttgtatattcatacaggagatatttttaaagaaaattaacttatgaaagtctctctttcaattgcctgaatttcgaagacttgttctcagttatagtctgccacaaaatgtacttgaaaattgtcgaagtcatacagaaaagagaaatatcatgtttatgcaagagcttcagtatttgtttgctctaatgatgggatcaaatagaaaatttgtagacccgtctgcagccctggatctattaaagggagcattccgatcatctgaggaacagcagatgtgagtgaattcacacacaagctcctggattggctagaggacgcattccagctagctgttaatgttaacagtcccaggaacaaatctgaaaatccaatggtgcagctgttctatggtactttcctgactgaaggggttcgtgaaggaaaacccttttgtaacaatgagaccttcggccagtatcctcttcaggtaaacggttatcgcaacttagacgagtgtttggaaggggccatggtggagggtgatgttgagcttcttccctccgatcactcggtgaagtatggacaagagcgttggtttacaaagctacctccagtgttgacctttgaactctcaagatttgagtttaatcagtcccttgggcagccagagaaaattcacaataagctggaatttcctcagattatttatatggacaggtacatgtacaggagcaaggagcttattcgaaataagagagagtgtattcgaaagttgaaggaggaaataaaaattctgcagcaaaaattggaaagtctgcatctagcctgtttcaggacattgctcattcttcctacttgactgccagaggtgccattgcagagctggctcaagtacaatgacatctctgttactgaatcttcctgggaagaagttgaaagagattcctatggaggcctgagaaatgttagtgcttactgtctgatgtacattaatgacaaactaccctacttcaatgcagaggcagccccaactgaatcagatcaaatgtcagaagtggaagccctatctgtggaactcaagcattacattcaggaggataactggcggtttgagcaggaagtagaggagtgggaagaagagcagtcttgcaaaatccctcaaatggagtcctccaccaactcctcatcacaggactactctacatcacaagagccttcagtagcctcttctcatggggttcgctgcttgtcgtctgagcatgctgtgattgtaaaggagcaaactgcccaggctattgcaaacacagcccgtgcctatgagaagagcggtgtagaagcggcactgagtgaggcattccatgaagaatactccaggctctatcagcttgccaaagagacccccacctctcacagtgatcctcgacttcagcatgtccttgtctactttttccaaaatgaagcacccaaaagggtagtagaacgaacccttctggaacagtttgcagataaaaatcttagctatgatgaaagatcaatcagcattatgaaggtggctcaagcgaaactgaaggaaattggtccagatgacatgaatatggaagagtacaagaagtggcatgaagattatagtttgttccgaaaagtgtctgtgtatctcctaacaggcctagaactctatcaaaaaggaaagtaccaagaggcactttcctacctggtatatgcctaccagagcaatgctgccctgctgatgaaggggccccgccggggggtcaaagaatccgtgattgctttataccgaagaaaatgccttctggagctgaatgccaaagcagcttctctttttgaaacaaatgatgatcactccgtaactgagggcattaatgtgatgaatgaactgatcatcccctgcattcaccttatcattaataatgacatttccaaggatgatctggatgccattgaggtcatgagaaaccattggtgctcttaccttgggcaagatattgcagaaaatctgcagctgtgcctaggggagtttctacccagacttctagatccttctgcagaaatcatcgtcttgaaagagcctccaactattcgacccaattctccctatgacctatgtagccgatttgcagctgtcatggagtcaattcagggagtttcaactgtgacagtgaaataagctcccacatgttcaaggcccattctggttcctggctgcctgcctcttgcacagaagttcgttgtcatagtgctcaccttgggaaaaggattaggtgggcacataagattccgatcagaccccaaccatgctgcatgtgtaaagaaggattgaaaataaaattgcactttttaggtac

SEQ ID NO: 22862 - DNA, 582 bp, Homo sapiens
  misc_feature 1..582: note = ENST00000538224
  source 1..582: mol_type = unassigned DNA; mol_type = unassigned DNA
taactggcggtttgagcaggaagtagaggagtgggaagaagagcagtcttgcaaaatccctcaaatggagtcctccaccaactcctcatcacaggactactctacatcacaagagccttcagtagcctcttctcatggggttcgctgcttgtcgtctgagcatgctgtgattgtaaaggagcaaactgcccaggctattgcaaacacagcccgtgcctatgagaagagcggtgtagaagcggcactgagtgagcttaaagaagctgaacccaagaagcccatgccccaggaaacaaaccttgcagagcagtcagaacagcccccaaaggctaatgatgcagagtctactgcccagcctaattctgaggtgatgctgagccctgccatgcaaggggtcatcctggccatagctaaagcccgtcagacctttgaccgagatgggtctgaagcagggctgattaaggcattccatgaagaatactccaggctctatcagcttgccaaagagacccccacctctcacagtgatcctcgacttcagcatgtccttgtctactttttccaaaatgaagcacccaaaag

SEQ ID NO: 22863 - DNA, 1081 bp, Homo sapiens
  misc_feature 1..1081: note = ENST00000538475
  source 1..1081: mol_type = unassigned DNA; mol_type = unassigned DNA
gcagccctggatctattaaagggagcattccgatcatctgaggaacagcagcaagatgtgagtgaattcacacacaagctcctggattggctagaggacgcattccagctagctgttaatgttaacagtcccaggaacaaatctgaaaatccaatggtgcagctgttctatggtactttcctgactgaaggggttcgtgaaggaaaacccttttgtaacaatgagaccttcggccagtatcctcttcaggtaaacggttatcgcaacttagacgagtgtttggaaggggccatggtggagggtgatgttgagcttcttccctccgatcactcggtgaagtatggacaagagcgttggtttacaaagctacctccagtgttgacctttgaactctcaagatttgagtttaatcagtcccttgggcagccagagaaaattcacaataagctggaatttcctcagattatttatatggacaggtacatgtacaggagcaaggagcttattcgaaataagagagagtgtattcgaaagttgaaggaggaaataaaaattctgcagcaaaaattggaaagtacaagtacagaaagctcttctcaggatgttgaaagtaccttttcttctcctgaagattctttacccaagtctaaaccactgacatcttctcggtcttccatggaaatgccttcacagccagctccacgaacagtcacagatgaggagataaattttgttaagacctgtcttcagagatggaggagtgagattgaacaagatatacaagatttaaagacttgtattgcaagtactactcagactattgaacagatgtactgcgatcctctccttcgtcaggtgccttatcgcttgcatgcagttcttgttcatgaaggacaagcaaatgctggacactattgggcctatatctataatcaaccccgacagagctggctcaagtacaatgacatctctgttactgaatcttcctgggaagaagttgaaagagattcctatggaggcctgagaaatgttagtgcttactgtctgatgtacattaatgacaaactaccctacttcaatg

SEQ ID NO: 22864 - DNA, 1900 bp, Homo sapiens
  misc_feature 1..1900: note = ENST00000537706
  source 1..1900: mol_type = unassigned DNA; mol_type = unassigned DNA
ggtgacccgcggctgggcgcctcggccatgactgcggagctgcagcaggacgacgcggccggcgcggcagacggccacggctcgagctgccaaatgctgttaaatcaactgagagaaatcacaggcattcaggacccttcctttctccatgaagctctgaaggccagtaatggtgacattactcaggcagtcagccttctcactgatgagagagttaaggagcccagtcaagacactgttgctacagaaccatctgaagtagaggggagtgctgccaacaaggaagtattagcaaaagttatagaccttactcatgataacaaagatgatcttcaggctgccattgctttgagtctactggagtctcccaaaattcaagctgatggaagagatcttaacaggatgcatgaagcaacctctgcagaaactaaacgctcaaagagaaaacgctgtgaagtctggggagaaaaccccaatcccaatgactggaggagagttgatggttggccagttgggctgaaaaatgttggcaatacatgttggtttagtgctgttattcagtctctctttcaattgcctgaatttcgaagacttgttctcagttatagtctgccacaaaatgtacttgaaaattgtcgaagtcatacagaaaagagaaatatcatgtttatgcaagagcttcagtatttgtttgctctaatgatgggatcaaatagaaaatttgtagacccgtctgcagccctggatctattaaagggagcattccgatcatctgaggaacagcagcaagatgtgagtgaattcacacacaagctcctggattggctagaggacgcattccagctagctgttaatgttaacagtcccaggaacaaatctgaaaatccaatggtgcagctgttctatggtactttcctgactgaaggggttcgtgaaggaaaacccttttgtaacaatgagaccttcggccagtatcctcttcaggtaaacggttatcgcaacttagacgagtgtttggaaggggccatggtggagggtgatgttgagcttcttccctccgatcactcggtgaagtatggacaagagcgttggtttacaaagctacctccagtgttgacctttgaactctcaagatttgagtttaatcagtcccttgggcagccagagaaaattcacaataagctggaatttcctcagattatttatatggacaggtacatgtacaggagcaaggagcttattcgaaataagagagagtgtattcgaaagttgaaggaggaaataaaaattctgcagcaaaaattggaaaggtatgtgaaatatggctcaggcccagctcggttcccgctcccggacatgctgaaatatgttattgaatttgctagtacaaaacctgcctcagaaagctgtccacctgaaagtgacacacatatgacattaccactttcttcagtgcactgctcggtttctgaccagacatccaaggaaagtacaagtacagaaagctcttctcaggatgttgaaagtaccttttcttctcctgaagattctttacccaagtctaaaccactgacatcttctcggtcttccatggaaatgccttcacagccagctccacgaacagtcacagatgaggagataaattttgttaagacctgtcttcagagatggaggagtgagattgaacaagatatacaagatttaaagacttgtattgcaagtactactcagactattgaacagatgtactgcgatcctctccttcgtcaggtagaatgaaaattgatgggaaagtagtcaaggcatgtgctaatggtagatacaaaaatcaaatttgatagttttcttttaaacccaatgggaatccccctaagataaaagaataaacttaagatataaa

SEQ ID NO: 22865 - DNA, 733 bp, Homo sapiens
  misc_feature 1..733: note = ENST00000545608
  source 1..733: mol_type = unassigned DNA; mol_type = unassigned DNA
gagaaatatcatgtttatgcaagagcttcagtatttgtttgctctaatgatgggatcaaatagaaaatttgtagacccgtctgcagccctggatctattaaagggagcattccgatcatctgaggaacagcagcagtcccaggaacaaatctgaaaatccaatggtgcagctgttctatggtactttcctgactgaaggggttcgtgaaggaaaacccttttgtaacaatgagaccttcggccagtatcctcttcaggtaaacggttatcgcaacttagacgagtgtttggaaggggccatggtggagggtgatgttgagcttcttccctccgatcactcggtgaagtatggacaagagcgttggtttacaaagctacctccagtgttgacctttgaactctcaagatttgagtttaatcagtcccttgggcagccagagaaaattcacaataagctggaatttcctcagattatttatatggacaggtacatgtacaggagcaaggagcttattcgaaataagagagagtgtattcgaaagttgaaggaggaaataaaaattctgcagcaaaaattggaaagtgcactgctcggtttctgaccagacatccaaggaaagtacagaaagctcttctcaggatgttgaaagtaccttttcttctcctgaagattctttacccaagtctaaaccactgacatcttctcggtcttccatggaaatgccttcacagc

SEQ ID NO: 22866 - DNA, 683 bp, Homo sapiens
  misc_feature 1..683: note = ENST00000535607
  source 1..683: mol_type = unassigned DNA; mol_type = unassigned DNA
tgtttgctctaatgatgggatcaaatagaaaatttgtagacccgtctgcagccctggatctattaaagggagcattccgatcatctgaggaacagcagcagcagtcccaggaacaaatctgaaaatccaatggtgcagctgttctatggtactttcctgactgaaggggttcgtgaaggaaaacccttttgtaacaatgagaccttcggccagtatcctcttcaggtaaacggttatcgcaacttagacgagtgtttggaaggggccatggtggagggtgatgttgagcttcttccctccgatcactcggtgaagtatggacaagagcgttggtttacaaagctacctccagtgttgacctttgaactctcaagatttgagtttaatcagtcccttgggcagccagagaaaattcacaataagctggaatttcctcagattatttatatggacaggtacatgtacaggagcaaggagcttattcgaaataagagagagtgtattcgaaagttgaaggaggaaataaaaattctgcagcaaaaattggaaaggtatgtgaaatatggctcaggcccagctcggttcccgctcccggacatgctgaaatatgttattgaatttgctagtacaaaacctgcctcagaaagctgtccacctgaaagtgacacacatatgacattacc

SEQ ID NO: 22867 - DNA, 567 bp, Homo sapiens
  misc_feature 1..567: note = ENST00000537490
  source 1..567: mol_type = unassigned DNA; mol_type = unassigned DNA
caatccagaattgtctccttttcctaaaagcagcagtcccaggaacaaatctgaaaatccaatggtgcagctgttctatggtactttcctgactgaaggggttcgtgaaggaaaacccttttgtaacaatgagaccttcggccagtatcctcttcaggtaaacggttatcgcaacttagacgagtgtttggaaggggccatggtggagggtgatgttgagcttcttccctccgatcactcggtgaagtatggacaagagcctacctgtacctgagtagggagaacccactgcctccatattttcggagggtaaaagtacagtgattaactcctatgcgttggtttacaaagctacctccagtgttgacctttgaactctcaagatttgagtttaatcagtcccttgggcagccagagaaaattcacaataagctggaatttcctcagattatttatatggacaggtacatgtacaggagcaaggagcttattcgaaataagagagagtgtattcgaaagttgaaggaggaaataaaaattctgcagcaaaaattggaaaggtatgtg

SEQ ID NO: 22868 - DNA, 732 bp, Homo sapiens
  misc_feature 1..732: note = ENST00000537642
  source 1..732: mol_type = unassigned DNA; mol_type = unassigned DNA
tgcggagctgcagcaggacgacgcggccggcgcggcagacggccacggctcgaagttatagaccttactcatgataacaaagatgatcttcaggctgccattgctttgagtctactggagtctcccaaaattcaagctgatggaagagatcttaacaggatgcatgaagcaacctctgcagaaactaaacgctcaaagagaaaacgctgtgaagtctggggagaaaaccccaatcccaatgactggaggagagttgatggttggccagttgggctgaaaaatgttggcaatacatgttggtttagtgctgttattcaggaaaagagaaatatcatgtttatgcaagagcttcagtatttgtttgctctaatgatgggatcaaatagaaaatttgtagacccgtctgcagccctggatctattaaagggagcattccgatcatctgaggaacagcagcaagatgtgagtgaattcacacacaagctcctggattggctagaggacgcattccagctagctgttaatgttaacagtcccaggaacaaatctgaaaatccaatggtgcagctgttctatggtactttcctgactgaaggggttcgtgaaggaaaacccttttgtaacaatgagaccttcggccagtatcctcttcaggtaaacggttatcgcaacttagacgagtgtttggaaggggccatggtggagggtgatgttgagcttcttccctccgat

SEQ ID NO: 22869 - DNA, 852 bp, Homo sapiens
  misc_feature 1..852: note = ENST00000542033
  source 1..852: mol_type = unassigned DNA; mol_type = unassigned DNA
agaccggtgacccgcggctgggcgcctcggccatgactgcggagctgcagcaggacgacgcggccggcgcggcagacggccacggctcgagctgccaaatgctgttaaatcaactgagagaaatcacaggcattcaggacccttcctttctccatgaagctctgaaggccagtaatggtgacattactcaggcagtcagccttctcactgatgagagagttaaggagcccagtcaagacactgttgctacagaaccatctgaagtagaggggagtgctgccaacaaggaagtattagcaaaagttatagaccttactcatgataacaaagatgatcttcaggctgccattgctttgagtctactggagtctcccaaaattcaagctgatggaagagatcttaacaggatgcatgaagcaacctctgcagaaactaaacgctcaaagagaaaacgctgtgaagtctggggagaaaaccccaatcccaatgactggaggagagttgatggttggccagttgggctgaaaaatgttggcaatacatgttggtttagtgctgttattcagtctctctttcaattgcctgaatttcgaagacttgttctcagttatagtctgccacaaaatgtacttgaaaattgtcgaagtcatacagaaaagagaaatatcatgtttatgcaagagcttcagtatttgtttgctctaatgatgggatcaaatagaaaatttgtagacccgtctgcagccctggatctattaaagggagcattccgatcatctgaggaacagcagcagtcccaggaacaaatctgaaaatccaatggtgcagctgttctatggtactttcctgact

SEQ ID NO: 22870 - DNA, 561 bp, Homo sapiens
  misc_feature 1..561: note = ENST00000540925
  source 1..561: mol_type = unassigned DNA; mol_type = unassigned DNA
gggagaccggtgacccgcggctgggcgcctcggccatgactgcggagctgcagcaggacgacgcggccggcgcggcagacggccacggctcgattgaaatcaatataaggacttctgatctaagaatctggtgagagtgaaagaaccctggtttgagagaaaagctaatgtctgtatgaagaaacttgggaagagggcaatttgagcatgtcttctagtgttacttcggaatgttataacttaacaccacctcctcacccctcaagtactgcactttttcaagagaaaacgggaaatctgtgccagttgttcaaatacgagtttggagatgagaaactatatttgtcgtacaaagctggcagacagataccctcagagctgccaaatgctgttaaatcaactgagagaaatcacaggcattcaggacccttcctttctccatgaagctctgaaggccagtaatggtgacattactcaggcagtcagccttctcactgatgagagagttaaggagcccagtcaagacactgttgctacagaaccatctgaagtagaggggag

SEQ ID NO: 22871 - DNA, 542 bp, Homo sapiens
  misc_feature 1..542: note = ENST00000544750
  source 1..542: mol_type = unassigned DNA; mol_type = unassigned DNA
agaccggtgacccgcggctgggcgcctcggccatgactgcggagctgcagcaggacgacgcggccggcgcggcagacggccacggctcgatttttaaggagggggaggagctgcgtgatgaatagaaagtctactgatgatgatctcctgttcccaatgtctaagaagattgaaatcaatataaggacttctgatctaagaatctggtgagagtgaaagaaccctggtttgagagaaaagctaatgtctgtatgaagaaacttgggaagagggcaatttgagcatgtcttctagtgttacttcggaatgttataacttaacaccacctcctcacccctcaagtactgcactttttcaagagaaaacgggaaatctgtgccagttgttcaaatacgagtttggagatgagaaactatatttgtcgtacaaagctggcagacagataccctcagagctgccaaatgctgttaaatcaactgagagaaatcacaggcattcaggacccttcctttctccatgaagctctgaaggccagtaatggt

SEQ ID NO: 22872 - DNA, 8032 bp, Homo sapiens
  misc_feature 1..8032: note = ENST00000258399
  source 1..8032: mol_type = unassigned DNA; mol_type = unassigned DNA
gtgcgtgcgtgtttgcgtgtggtcacagttcccgccatcagccgctctccctgactaggggtagctagcggcctccctcctttgggttcggtatccctacttccattaccctcggctcctcccactcctcgcgggctccgtgctttccgcgggtctgtccgggggctccggaccctcggcgcagctgagttgatggcttccggagaactggcatagctgcagaatatgagtagtgtcccaagaagagtgctttgcctttggcacaaggatcagaataaaggtgaattgctattacatagggtttttcggtaaaagtcactgaaaattatttgccatacagtaaccagagacctccaactaggggcccccaaactgtatcctgcctgtagccagaagcaatttttaaagaaaatatgtctcctctgaagatacatggtcctatcagaattcgaagtatgcagactgggattacaaagtggaaagaaggatcctttgaaattgtagaaaaagagaataaagtcagcctagtagttcactacaatactggaggaattccaaggatatttcagctaagtcataacattaaaaatgtggtgcttcgacccagtggagcgaaacaaagccgcctaatgttaactctgcaagataacagcttcttgtctattgacaaagtaccaagtaaggatgcagaggaaatgaggttgtttctagatgcagtccatcaaaacagacttcctgcagccatgaaaccgtctcaggggtctggtagttttggagccattctgggcagcaggacctcacagaaggaaaccagcaggcagctttcttactcagacaatcaggcttctgcaaaaagaggaagtttggaaactaaagatgatattccatttcgaaaagttcttggtaatccgggtagaggatcgattaagactgtagcaggaagtggaatagctcggacgattccttctttgacatctacttcaacacctcttagatcagggttgctagaaaatcgtactgaaaagaggaaaagaatgatatcaactggctcagaattgaatgaagattaccctaaggaaaatgattcatcatcgaacaacaaggccatgacagatccctccagaaagtatttaaccagcagtagagaaaagcagctgagtttgaaacagtcagaagagaataggacatcagggcttttacctttacagtcatcatccttttatggtagcagagctggatccaaggaacactcttctggtggcactaacttagacaggactaatgtttcaagccagactccctctgccaaaagaagtttgggatttcttcctcagccagttcctctttctgttaaaaaactgaggtgtaaccaggattacactggctggaataaaccaagagtgcccctttcctctcaccaacagcagcaactgcagggcttctccaatttgggaaatacctgctatatgaatgctattctacaatctctattttcactccagtcatttgcaaatgacttgcttaaacaaggtatcccatggaagaaaattccactcaatgcacttatcagacgctttgcacacttgcttgttaaaaaagatatctgtaattcagagaccaaaaaggatttactcaagaaggttaaaaatgccatttcagctacagcagagagattctctggttatatgcagaatgatgctcatgaatttttaagtcagtgtttggaccagctgaaagaagatatggaaaaattaaataaaacttggaagactgaacctgtttctggagaagaaaattcaccagatatttcagctaccagagcatacacttgccctgttattactaatttggagtttgaggttcagcactccatcatttgtaaagcatgtggagagattatccccaaaagagaacagtttaatgacctctctattgaccttcctcgtaggaaaaaaccactccctcctcgttcaattcaagattctcttgatcttttctttagggccgaagaactggagtattcttgtgagaagtgtggtgggaagtgtgctcttgtcaggcacaaatttaacaggcttcctagggtcctcattctccatttgaaacgatatagcttcaatgtggctctctcgcttaacaataagattgggcagcaagtcatcattccaagatacctgaccctgtcatctcattgcactgaaaatacaaaaccaccttttacccttggttggagtgcacatatggcaatttctagaccattgaaagcctctcaaatggtgaattcctgcatcaccagcccttctacaccttcaaagaaattcaccttcaaatccaagagctccttggctttatgccttgattcagacagtgaggatgagctaaaacgttctgtggccctcagccagagactttgtgaaatgttaggcaacgaacagcagcaggaagacctggaaaaagattcaaaattatgcccaatagagcctgacaagtctgaattggaaaactcaggatttgacagaatgagcgaagaagagcttctagcagctgtcttggagataagtaagagagatgcttcaccatctctgagtcatgaagatgatgataagccaactagcagcccagataccggatttgcagaagatgatattcaagaaatgccagaaaatccagacactatggaaactgagaagcccaaaacaatcacagagctggatcctgccagttttactgagataactaaagactgtgatgagaataaagaaaacaaaactccagaaggatctcagggagaagttgattggctccagcagtatgatatggagcgtgaaagggaagagcaagagcttcagcaggcactggctcagagccttcaagagcaagaggcttgggaacagaaagaagatgatgacctcaaaagagctaccgagttaagtcttcaagagtttaacaactcctttgtggatgcattgggttctgatgaggactctggaaatgaggatgtttttgatatggagtacacagaagctgaagctgaggaactgaaaagaaatgctgagacaggaaatctgcctcattcgtaccggctcatcagtgttgtcagtcacattggtagcacttcttcttcaggtcattacattagtgatgtatatgacattaagaagcaagcgtggtttacttacaatgacctggaggtatcaaaaatccaagaggctgccgtgcagagtgatcgagatcggagtggctacatcttcttttatatgcacaaggagatctttgatgagctgctggaaacagaaaagaactctcagtcacttagcacggaagtggggaagactacccgtcaggccttgtgaggaacaaactcctgggttggcagcatgcactgcatatttgttactgctgcccacctcacctttcctctgctgaaggagaatttggaattctacttgatgcgggagcaacaaacagctcagggccaaaccaaaagacaaaaattggagtaacgtagaatgctccatgctattttatggaaactttggtctcacatccgtagctgattatcctctttttctcctatgagtggcacttcttttgtcttaggaatacatgttgtaaatatatatctgtgtatgtgtgtatacacacacacagacacacacacacacacacgggatgaatggagccttaaagagttaggatgagccaccagaatatgcctgctcaaaattaatagcacagcagtttggagaagaaatgaaggtgtcaaagagtccattcacctgagaaatgtgtgaagacatacttatcagttggcttttagcttttatgttccttgagtagtttcactcaagtctgtaaccttttgtgtttccttattagtaaaattcactggaaagccagctcttcatgttacactaatgacagtttgttctctttgcaagagaggggcattactgtcacctgacttgaggagctgttttgttgttgttgttgtctgcaaatttcatgaatttgtgatgtctttgctgtttacatgcagtcccaagaaatggattgttggtgctttggaatatgttacagtcccacatttgatatttcttatatactttgttttctctaaggagatttcttcacacagtatgttcatcatatatcatcatcattattatggtggtaaagatagaatcttttttcttttttgtcattctgccatggagcagcattaccctaatggattgcaaccaaaactttaaacaagtagaaagataatatttctccaattgggactccccagcaggaatacttagggataaggaagaatgctagcatctctgtctctcaaacatagggaggataagaagagtgttcttctggtaaagctaaaattctggaccactgaagctaaaagccctattgcaagtatgaaattaagtacttgagctgtaggacaaaccttgggcatttaaccatttactgtctggctttgcccttaaaatagggttgcaattaaaatgtgattggcttaggtaatcccaaaaactaacaaataacaaaggtgcataatttatttatctactttttaggtgctctgagttgaggcaaagtagagcggcaacattaagtgctatgctagtcacttagctgacgtaaccagcttggttaagcagcttatgaaaccatataaagaattcttttgaggatggaattctgtccacaaaataattttgtgagcccagatatcattaggatcacacagagttaaatatagaaaaatgaaaccatcattatattctttcgtgttttttcttttattataaacaaggggattattctttagttctcagaggtagggacaaaaccacatcaggttttcagaaggaaaaaacatttaaaaacccaccatcacatgagagaatcacttgaacccaggaggcagaggttgcagtgagctgagatcgcatcattgcactgcagtctgagtgacagagtgagactccatctcattaaaaaaaacgaaaacaaaaacaaaaaaaacacaaaccatcatcacagaagatgcaacatcttttctgaaagattgccttaagagagctccagtcctactcttggaacttggatgtattctaatgtagtaaactattctaagttttcattctttgaattataaatggcctcagcagttttgctcaactactgataaatgctttgcctcctaccatctacctatataccttattgtaatgaatgttccaaaatggtagagtggtagaaaacgccagagtagtttagagcagaggaaaatatttgttttaaaactagctttaaagttttgtttcatttctaccaggagcctctttggtttggtttgattttgcttggaaataattggttttcttataaatgagtgaagcggtgataaaattctttggctagttattaattcttttacgtgtctttgcatttgagaggcactgttaaaaattattgggaaagatttaaagtgcaggctgcaattaaaacatggagaaaagtagaaataatgccataagtctagattgcctcatgaagcagcctcatttgaattgctttcatagctttcatgtgtgtatggtttagaagtacacttacctcagaaacctgatttgatcttcatgtcttgggcaggagttgttgaaaataggttattggaatatataagttatctcactgctcatgtacttgcatgtttgggactcaaattttacttgatgtctgtccattcttgtggccctatcagccttctccttcctttactcctttaatctacttctttgactaccagtggagatttcagctggactatgttgatggggtttgttgttgtttttgagctggctgtatatattttaaaattataaatagataatatattattttttgcacattgtgatcagtttgcccagaattggggatggggcagttagcatgttggggccaggaagggacaagttagataaggactgagtgcttccgttgcaggcagtttgcacaatacctaattaaccttcctattgaaaataccaaatgtgtggttacattactttaaatgacattgaattggaacttgatggcaattagttctagatacaaccttttgatctttgttggaattttaagggaaaaatgaactaaacttcatatttgttgattttaatcacctaatagtactgaaggttggaaagttgcatgtggctggatgctgttaatttctttaatagccatgactataatttaagcctatgagaagatagactgtttcgtagggatatattcacatgtgtgtgcacactcatgagttttgtctcagcaggatagaataagcaaatccatgaactggtcttctattaatactttgattctaaaaattatttgtttacttgctatggtctgttcattctgggcctaaccttaaaggctcaataacaaatacaacaaatgtaaatatgtttacattttaagacatatgcagtggttcttacagatcagttaattaactccagaaagcaaatgttagactacacatttatttttctccttgatcaagtataaaattctgaaacagaggctttaaaatttaaaacctcagcaaaataatccatgaatttactgattcttctgtatcgtgtgtagttaccattatgtaactatacacacatacagctacggatataatgaaaattatctgcaaacacctaaattaaagagaaaaaaaagtagtttgtaaactcatttgtgatctactgaaaagaggttatattaaagcaaattaaaatattttccttctctgtcctctgaaatgactgcagtagatactcttagttatcccatttagggtggttggagggcctttttaatttaattgaccccccgaggtggtcttttgttttaaacagggggcaacagctggatctccaagtacatatggattttgtatatataggagatttttagaaaaatcaacaacctaacaccagattcaagtcacataaaagtgttccaataaaatggatggatgtctttttcctccccattttgctttatactgagtaatgcactcttgcaagtgtatacaaaaactaaatagacttctgccctccaacatctttttattgcattacttcaaaatcctaattttgtctctactgatatgtcttattaacatctgaaaaaatatatattttttattggaaaattctaatttgttaggccttgaaagttttgtgacaattattttgctgtgtttaaccacaatcattcaccttatggcatgctttgattactagacttcaggcagtctcattcattgtatcatacttacacacaattagtaagttgtctccatgtgtgctatatgtctgaggtgtatggagtttttatttaaaaagtgtgccagtctgaatataagcatttgattttgtaacattggacttttcttaaaagtacagaggttcaaagtataggtatgtccattggcataagaatagagtgggtgagggtctggaccaggttccaggttggtccagtcagatgccagaacaaagaagaacagtcaactaaactggtctacttcaaaaatagtgggcctgtgtgaagagtgagaccacatgtgggtgtgcacacctcttgtccccaggtttccctccctttgagcttttctttccctccctaacttctctggcctattgtcattgttgtttctttaaacttaaggagagaaaaacaaaaatgagattcctacactttgcctaattgagccactaccaggttttctggcagctgtggccacattatttgtgagatgattttttttctttatgttcagagtgacttttgattctgattctttatgttttgtatggagcggcacttttatctgtgttttagcagaactgttcctctgtatcctttacggtttttctttgtttttgtttcctttttaaattatgcatagagtttttttgtgtgtatgaaattaaagcctttattaaccttc

SEQ ID NO: 22873 - DNA, 5019 bp, Homo sapiens
  misc_feature 1..5019: note = ENST00000454775
  source 1..5019: mol_type = unassigned DNA; mol_type = unassigned DNA
atcagccgctctccctgactaggggtagctagcggcctccctcctttgggttcggtatccctacttccattaccctcggctcctcccactcctcgcgggctccgtgctttccgcgggtctgtccgggggctccggaccctcggcgcagctgagttgatggcttccggagaactggcatagctgcagaatatgagtagtgtcccaagaagagtgctttgcctttggcacaaggatcagaataaaggtgaattgctattacatagggtttttcggtaaaagtcactgaaaattatttgccatacagtaaccagagacctccaactaggggcccccaaactgtatcctgcctgtagaacctgccaggtaaaggtatatttttgctttttaatttagccagaagcaatttttaaagaaaatatgtctcctctgaagatacatggtcctatcagaattcgaagtatgcagactgggattacaaagtggaaagaaggatcctttgaaattgtagaaaaagagaataaagtcagcctagtagttcactacaatactggaggaattccaaggatatttcagctaagtcataacattaaaaatgtggtgcttcgacccagtggagcgaaacaaagccgcctaatgttaactctgcaagataacagcttcttgtctattgacaaagtaccaagtaaggatgcagaggaaatgaggttgtttctagatgcagtccatcaaaacagacttcctgcagccatgaaaccgtctcaggggtctggtagttttggagccattctgggcagcaggacctcacagaaggaaaccagcaggcagctttcttactcagacaatcaggcttctgcaaaaagaggaagtttggaaactaaagatgatattccatttcgaaaagttcttggtaatccgggtagaggatcgattaagactgtagcaggaagtggaatagctcggacgattccttctttgacatctacttcaacacctcttagatcagggttgctagaaaatcgtactgaaaagaggaaaagaatgatatcaactggctcagaattgaatgaagattaccctaaggaaaatgattcatcatcgaacaacaaggccatgacagatccctccagaaagtatttaaccagcagtagagaaaagcagctgagtttgaaacagtcagaagagaataggacatcagggcttttacctttacagtcatcatccttttatggtagcagagctggatccaaggaacactcttctggtggcactaacttagacaggactaatgtttcaagccagactccctctgccaaaagaagtttgggatttcttcctcagccagttcctctttctgttaaaaaactgaggtgtaaccaggattacactggctggaataaaccaagagtgcccctttcctctcaccaacagcagcaactgcagggcttctccaatttgggaaatacctgctatatgaatgctattctacaatctctattttcactccagtcatttgcaaatgacttgcttaaacaaggtatcccatggaagaaaattccactcaatgcacttatcagacgctttgcacacttgcttgttaaaaaagatatctgtaattcagagaccaaaaaggatttactcaagaaggttaaaaatgccatttcagctacagcagagagattctctggttatatgcagaatgatgctcatgaatttttaagtcagtgtttggaccagctgaaagaagatatggaaaaattaaataaaacttggaagactgaacctgtttctggagaagaaaattcaccagatatttcagctaccagagcatacacttgccctgttattactaatttggagtttgaggttcagcactccatcatttgtaaagcatgtggagagattatccccaaaagagaacagtttaatgacctctctattgaccttcctcgtaggaaaaaaccactccctcctcgttcaattcaagattctcttgatcttttctttagggccgaagaactggagtattcttgtgagaagtgtggtgggaagtgtgctcttgtcaggcacaaatttaacaggcttcctagggtcctcattctccatttgaaacgatatagcttcaatgtggctctctcgcttaacaataagattgggcagcaagtcatcattccaagatacctgaccctgtcatctcattgcactgaaaatacaaaaccaccttttacccttggttggagtgcacatatggcaatttctagaccattgaaagcctctcaaatggtgaattcctgcatcaccagcccttctacaccttcaaagaaattcaccttcaaatccaagagctccttggctttatgccttgattcagacagtgaggatgagctaaaacgttctgtggccctcagccagagactttgtgaaatgttaggcaacgaacagcagcaggaagacctggaaaaagattcaaaattatgcccaatagagcctgacaagtctgaattggaaaactcaggatttgacagaatgagcgaagaagagcttctagcagctgtcttggagataagtaagagagatgcttcaccatctctgagtcatgaagatgatgataagccaactagcagcccagataccggatttgcagaagatgatattcaagaaatgccagaaaatccagacactatggaaactgagaagcccaaaacaatcacagagctggatcctgccagttttactgagataactaaagactgtgatgagaataaagaaaacaaaactccagaaggatctcagggagaagttgattggctccagcagtatgatatggagcgtgaaagggaagagcaagagcttcagcaggcactggctcagagccttcaagagcaagaggcttgggaacagaaagaagatgatgacctcaaaagagctaccgagttaagtcttcaagagtttaacaactcctttgtggatgcattgggttctgatgaggactctggaaatgaggatgtttttgatatggagtacacagaagctgaagctgaggaactgaaaagaaatgctgagacaggaaatctgcctcattcgtaccggctcatcagtgttgtcagtcacattggtagcacttcttcttcaggtcattacattagtgatgtatatgacattaagaagcaagcgtggtttacttacaatgacctggaggtatcaaaaatccaagaggctgccgtgcagagtgatcgagatcggagtggctacatcttcttttatatgcacaaggagatctttgatgagctgctggaaacagaaaagaactctcagtcacttagcacggaagtggggaagactacccgtcaggccttgtgaggaacaaactcctgggttggcagcatgcactgcatatttgttactgctgcccacctcacctttcctctgctgaaggagaatttggaattctacttgatgcgggagcaacaaacagctcagggccaaaccaaaagacaaaaattggagtaacgtagaatgctccatgctattttatggaaactttggtctcacatccgtagctgattatcctctttttctcctatgagtggcacttcttttgtcttaggaatacatgttgtaaatatatatctgtgtatgtgtgtatacacacacacagacacacacacacacacacgggatgaatggagccttaaagagttaggatgagccaccagaatatgcctgctcaaaattaatagcacagcagtttggagaagaaatgaaggtgtcaaagagtccattcacctgagaaatgtgtgaagacatacttatcagttggcttttagcttttatgttccttgagtagtttcactcaagtctgtaaccttttgtgtttccttattagtaaaattcactggaaagccagctcttcatgttacactaatgacagtttgttctctttgcaagagaggggcattactgtcacctgacttgaggagctgttttgttgttgttgttgtctgcaaatttcatgaatttgtgatgtctttgctgtttacatgcagtcccaagaaatggattgttggtgctttggaatatgttacagtcccacatttgatatttcttatatactttgttttctctaaggagatttcttcacacagtatgttcatcatatatcatcatcattattatggtggtaaagatagaatcttttttcttttttgtcattctgccatggagcagcattaccctaatggattgcaaccaaaactttaaacaagtagaaagataatatttctccaattgggactccccagcaggaatacttagggataaggaagaatgctagcatctctgtctctcaaacatagggaggataagaagagtgttcttctggtaaagctaaaattctggaccactgaagctaaaagccctattgcaagtatgaaattaagtacttgagctgtaggacaaaccttgggcatttaaccatttactgtctggctttgcccttaaaatagggttgcaattaaaatgtgattggcttaggtaatcccaaaaactaacaaataacaaaggtgcataatttatttatctactttttaggtgctctgagttgaggcaaagtagagcggcaacattaagtgctatgctagtcacttagctgacgtaaccagcttggttaagcagcttatgaaaccatataaagaattcttttgaggatggaattctgtccacaaaataattttgtgagcccagatatcattaggatcacacagagttaaatatagaaaaatgaaaccatcattatattctttcgtgttttttcttttattataaacaaggggattattctttagttctcagaggtagggacaaaaccacatcaggttttcagaaggaaaaaacatttaaaaacccaccatcacatgagagaatcacttgaacccaggaggcagaggttgcagtgagctgagatcgcatcattgcactgcagtctgagtgacagagtgagactccatctcattaaaaaaaacg

SEQ ID NO: 22874 - DNA, 4516 bp, Homo sapiens
  misc_feature 1..4516: note = ENST00000415516
  source 1..4516: mol_type = unassigned DNA; mol_type = unassigned DNA
ggtcacagttcccgccatcagccgctctccctgactaggggtagctagcggcctccctcctttgggttcggtatccctacttccattaccctcggctcctcccactcctcgcgggctccgtgctttccgcgggtctgtccgggggctccggaccctcggcgcagctgagttgatggcttccggagaactggcatagctgcagaatatgagtagtgtcccaagaagagtgctttgcctttggcacaaggatcagaataaaggtgaattgctattacatagggtttttcggtaaaagtcactgaaaattatttgccatacagtaaccagagacctccaactaggggcccccaaactgtatcctgcctgtagctaagtcataacattaaaaatgtggtgcttcgacccagtggagcgaaacaaagccgcctaatgttaactctgcaagataacagcttcttgtctattgacaaagtaccaagtaaggatgcagaggaaatgaggttgtttctagatgcagtccatcaaaacagacttcctgcagccatgaaaccgtctcaggggtctggtagttttggagccattctgggcagcaggacctcacagaaggaaaccagcaggcagctttcttactcagacaatcaggcttctgcaaaaagaggaagtttggaaactaaagatgatattccatttcgaaaagttcttggtaatccgggtagaggatcgattaagactgtagcaggaagtggaatagctcggacgattccttctttgacatctacttcaacacctcttagatcagggttgctagaaaatcgtactgaaaagaggaaaagaatgatatcaactggctcagaattgaatgaagattaccctaaggaaaatgattcatcatcgaacaacaaggccatgacagatccctccagaaagtatttaaccagcagtagagaaaagcagctgagtttgaaacagtcagaagagaataggacatcagggcttttacctttacagtcatcatccttttatggtagcagagctggatccaaggaacactcttctggtggcactaacttagacaggactaatgtttcaagccagactccctctgccaaaagaagtttgggatttcttcctcagccagttcctctttctgttaaaaaactgaggtgtaaccaggattacactggctggaataaaccaagagtgcccctttcctctcaccaacagcagcaactgcagggcttctccaatttgggaaatacctgctatatgaatgctattctacaatctctattttcactccagtcatttgcaaatgacttgcttaaacaaggtatcccatggaagaaaattccactcaatgcacttatcagacgctttgcacacttgcttgttaaaaaagatatctgtaattcagagaccaaaaaggatttactcaagaaggttaaaaatgccatttcagctacagcagagagattctctggttatatgcagaatgatgctcatgaatttttaagtcagtgtttggaccagctgaaagaagatatggaaaaattaaataaaacttggaagactgaacctgtttctggagaagaaaattcaccagatatttcagctaccagagcatacacttgccctgttattactaatttggagtttgaggttcagcactccatcatttgtaaagcatgtggagagattatccccaaaagagaacagtttaatgacctctctattgaccttcctcgtaggaaaaaaccactccctcctcgttcaattcaagattctcttgatcttttctttagggccgaagaactggagtattcttgtgagaagtgtggtgggaagtgtgctcttgtcaggcacaaatttaacaggcttcctagggtcctcattctccatttgaaacgatatagcttcaatgtggctctctcgcttaacaataagattgggcagcaagtcatcattccaagatacctgaccctgtcatctcattgcactgaaaatacaaaaccaccttttacccttggttggagtgcacatatggcaatgaaattcaccttcaaatccaagagctccttggctttatgccttgattcagacagtgaggatgagctaaaacgttctgtggccctcagccagagactttgtgaaatgttaggcaacgaacagcagcaggaagacctggaaaaagattcaaaattatgcccaatagagcctgacaagtctgaattggaaaactcaggatttgacagaatgagcgaagaagagcttctagcagctgtcttggagataagtaagagagatgcttcaccatctctgagtcatgaagatgatgataagccaactagcagcccagataccggatttgcagaagatgatattcaagaaatgccagaaaatccagacactatggaaactgagaagcccaaaacaatcacagagctggatcctgccagttttactgagataactaaagactgtgatgagaataaagaaaacaaaactccagaaggatctcagggagaagttgattggctccagcagtatgatatggagcgtgaaagggaagagcaagagcttcagcaggcactggctcagagccttcaagagcaagaggcttgggaacagaaagaagatgatgacctcaaaagagctaccgagttaagtcttcaagagtttaacaactcctttgtggatgcattgggttctgatgaggactctggaaatgaggatgtttttgatatggagtacacagaagctgaagctgaggaactgaaaagaaatgctgagacaggaaatctgcctcattcgtaccggctcatcagtgttgtcagtcacattggtagcacttcttcttcaggtcattacattagtgatgtatatgacattaagaagcaagcgtggtttacttacaatgacctggaggtatcaaaaatccaagaggctgccgtgcagagtgatcgagatcggagtggctacatcttcttttatatgcacaaggagatctttgatgagctgctggaaacagaaaagaactctcagtcacttagcacggaagtggggaagactacccgtcaggccttgtgaggaacaaactcctgggttggcagcatgcactgcatatttgttactgctgcccacctcacctttcctctgctgaaggagaatttggaattctacttgatgcgggagcaacaaacagctcagggccaaaccaaaagacaaaaattggagtaacgtagaatgctccatgctattttatggaaactttggtctcacatccgtagctgattatcctctttttctcctatgagtggcacttcttttgtcttaggaatacatgttgtaaatatatatctgtgtatgtgtgtatacacacacacagacacacacacacacacacgggatgaatggagccttaaagagttaggatgagccaccagaatatgcctgctcaaaattaatagcacagcagtttggagaagaaatgaaggtgtcaaagagtccattcacctgagaaatgtgtgaagacatacttatcagttggcttttagcttttatgttccttgagtagtttcactcaagtctgtaaccttttgtgtttccttattagtaaaattcactggaaagccagctcttcatgttacactaatgacagtttgttctctttgcaagagaggggcattactgtcacctgacttgaggagctgttttgttgttgttgttgtctgcaaatttcatgaatttgtgatgtctttgctgtttacatgcagtcccaagaaatggattgttggtgctttggaatatgttacagtcccacatttgatatttcttatatactttgttttctctaaggagatttcttcacacagtatgttcatcatatatcatcatcattattatggtggtaaagatagaatcttttttcttttttgtcattctgccatggagcagcattaccctaatggattgcaaccaaaactttaaacaagtagaaagataatatttctccaattgggactccccagcaggaatacttagggataaggaagaatgctagcatctctgtctctcaaacatagggaggataagaagagtgttcttctggtaaagctaaaattctggaccactgaagctaaaagccctattgcaagtatgaaattaagtacttgagctgtaggacaaaccttgggcatttaaccatttactgtctggctttgcccttaaaatagggttgcaattaaaatgtgattggcttaggtaatcccaaaaactaacaaataacaaaggtgcataatttatttatctactttttaggtgctctgagttgaggcaaagtagagcggcaacattaagtgctatgctagtcacttagctgacgtaaccagcttggttaagcagcttatgaaaccatataaagaattcttttgaggatggaattctgtccacaaaataattttgtgagcccagatatcattaggatcacacagagttaaatatagaaaaatgaaaccat

SEQ ID NO: 22875 - DNA, 3353 bp, Homo sapiens
  misc_feature 1..3353: note = ENST00000418019
  source 1..3353: mol_type = unassigned DNA; mol_type = unassigned DNA
gcctccctcctttgggttcggtatccctacttccattaccctcggctcctcccactcctcgcgggctccgtgctttccgcgggtctgtccgggggctccggaccctcggcgcagctgagttgatggcttccggagaactggcatagctgcagaatatgagtagtgtcccaagaagagtgctttgcctttggcacaaggatcagaataaagttatttgccatacagtaaccagagacctccaactaggggcccccaaactgtatcctgcctgtagccagaagcaatttttaaagaaaatatgtctcctctgaagatacatggtcctatcagaattcgaagtatgcagactgggattacaaagtggaaagaaggatcctttgaaattgtagaaaaagagaataaagtcagcctagtagttcactacaatactggaggaattccaaggatatttcagctaagtcataacattaaaaatgtggtgcttcgacccagtggagcgaaacaaagccgcctaatgttaactctgcaagataacagcttcttgtctattgacaaagtaccaagtaaggatgcagaggaaatgaggttgtttctagatgcagtccatcaaaacagacttcctgcagccatgaaaccgtctcaggggtctggtagttttggagccattctgggcagcaggacctcacagaaggaaaccagcaggcagctttcttactcagacaatcaggcttctgcaaaaagaggaagtttggaaactaaagatgatattccatttcgaaaagttcttggtaatccgggtagaggatcgattaagactgtagcaggaagtggaatagctcggacgattccttctttgacatctacttcaacacctcttagatcagggttgctagaaaatcgtactgaaaagaggaaaagaatgatatcaactggctcagaattgaatgaagattaccctaaggaaaatgattcatcatcgaacaacaaggccatgacagatccctccagaaagtatttaaccagcagtagagaaaagcagctgagtttgaaacagtcagaagagaataggacatcagggcttttacctttacagtcatcatccttttatggtagcagagctggatccaaggaacactcttctggtggcactaacttagacaggactaatgtttcaagccagactccctctgccaaaagaagtttgggatttcttcctcagccagttcctctttctgttaaaaaactgaggtgtaaccaggattacactggctggaataaaccaagagtgcccctttcctctcaccaacagcagcaactgcagggcttctccaatttgggaaatacctgctatatgaatgctattctacaatctctattttcactccagtcatttgcaaatgacttgcttaaacaaggtatcccatggaagaaaattccactcaatgcacttatcagacgctttgcacacttgcttgttaaaaaagatatctgtaattcagagaccaaaaaggatttactcaagaaggttaaaaatgccatttcagctacagcagagagattctctggttatatgcagaatgatgctcatgaatttttaagtcagtgtttggaccagctgaaagaagatatggaaaaattaaataaaacttggaagactgaacctgtttctggagaagaaaattcaccagatatttcagctaccagagcatacacttgccctgttattactaatttggagtttgaggttcagcactccatcatttgtaaagcatgtggagagattatccccaaaagagaacagtttaatgacctctctattgaccttcctcgtaggaaaaaaccactccctcctcgttcaattcaagattctcttgatcttttctttagggccgaagaactggagtattcttgtgagaagtgtggtgggaagtgtgctcttgtcaggcacaaatttaacaggcttcctagggtcctcattctccatttgaaacgatatagcttcaatgtggctctctcgcttaacaataagattgggcagcaagtcatcattccaagatacctgaccctgtcatctcattgcactgaaaatacaaaaccaccttttacccttggttggagtgcacatatggcaatttctagaccattgaaagcctctcaaatggtgaattcctgcatcaccagcccttctacaccttcaaagaaattcaccttcaaatccaagagctccttggctttatgccttgattcagacagtgaggatgagctaaaacgttctgtggccctcagccagagactttgtgaaatgttaggcaacgaacagcagcaggaagacctggaaaaagattcaaaattatgcccaatagagcctgacaagtctgaattggaaaactcaggatttgacagaatgagcgaagaagagcttctagcagctgtcttggagataagtaagagagatgcttcaccatctctgagtcatgaagatgatgataagccaactagcagcccagataccggatttgcagaagatgatattcaagaaatgccagaaaatccagacactatggaaactgagaagcccaaaacaatcacagagctggatcctgccagttttactgagataactaaagactgtgatgagaataaagaaaacaaaactccagaaggatctcagggagaagttgattggctccagcagtatgatatggagcgtgaaagggaagagcaagagcttcagcaggcactggctcagagccttcaagagcaagaggcttgggaacagaaagaagatgatgacctcaaaagagctaccgagttaagtcttcaagagtttaacaactcctttgtggatgcattgggttctgatgaggactctggaaatgaggatgtttttgatatggagtacacagaagctgaagctgaggaactgaaaagaaatgctgagacaggaaatctgcctcattcgtaccggctcatcagtgttgtcagtcacattggtagcacttcttcttcaggtcattacattagtgatgtatatgacattaagaagcaagcgtggtttacttacaatgacctggaggtatcaaaaatccaagaggctgccgtgcagagtgatcgagatcggagtggctacatcttcttttatatgcacaaggagatctttgatgagctgctggaaacagaaaagaactctcagtcacttagcacggaagtggggaagactacccgtcaggccttgtgaggaacaaactcctgggttggcagcatgcactgcatatttgttactgctgcccacctcacctttcctctgctgaaggagaatttggaattctacttgatgcgggagcaacaaacag

SEQ ID NO: 22876 - DNA, 565 bp, Homo sapiens
  misc_feature 1..565: note = ENST00000473554
  source 1..565: mol_type = unassigned DNA; mol_type = unassigned DNA
ttctagaccattgaaagcctctcaaatggtgaattcctgcatcaccagcccttctacaccttcaaagaaattcaccttcaaatccaagagctccttggctttatgccttgattcagacagtgaggatgagctaaaacgttctgtggccctcagccagagactttgtgaaatgttaggcaacgaacagcagcaggaagacctggaaaaagattcaaaattatgcccaatagagcctgacaagtctgaattggaaaactcaggatttgacagaatgagcgaagaagagcttctagcagctgtcttggagataagtaagagagatgcttcaccatctctgagtcatgaagatgatgataagccaactagcagcccagataccggatttgcagaagatgatattcaagaaatgccagaaaatccagacactatggaaactgagaagcccaaaacaatcacagagctggttctttgcccagtcctataacttcctaaaattaacaaagggacagctacaggaagagatcctgccagttttactgagataactaaagactgtgatgagaat

SEQ ID NO: 22877 - DNA, 293 bp, Homo sapiens
  misc_feature 1..293: note = ENST00000484018
  source 1..293: mol_type = unassigned DNA; mol_type = unassigned DNA
gctccttggctttatgccttgattcagacagtgaggatgagctaaaacgttctgtggccctcagccagagactttgtgaaatgttaggcaacgaacagcagcaggaagacctggaaaaagtattctggtttcttctaaaagtaactctcttcttcaggattcaaaattatgcccaatagagcctgacaagtctgaattggaaaactcaggatttgacagaatgagcgaagaagagcttctagcagctgtcttggagataagtaagagagatgcttcaccatctctgagtcatg

SEQ ID NO: 22878 - DNA, 613 bp, Homo sapiens
  misc_feature 1..613: note = ENST00000475553
  source 1..613: mol_type = unassigned DNA; mol_type = unassigned DNA
aaagataaatactctgcttttcttttagtcatttttaaactattcttgttattatcatagactttgaagattttcctatgtatttttacccccattttttaaggatttcttgtttcagtgttctctaggtaatggtattcaccccaacttttcatccttttaaagcagttgttcttagtgggctgtcacgagaagattgagttccattatgcgaaaggggtagcgttacacctaacagacaagaaattctacctaacctaaaggccgaagaactggagtattcttgtgagaagtgtggtgggaagtgtgctcttgtcaggcacaaatttaacaggcttcctagggtcctcattctccatttgaaacgatatagcttcaatgtggctctctcgcttaacaataagattgggcagcaagtcatcattccaagatacctgaccctgtcatctcattgcactgaaaatacaaaaccaccttttacccttggttggagtgcacatatggcaatttctagaccattgaaagcctctcaaatggtgaattcctgcatcaccagcccttctacaccttcaaagaaattcaccttcaaatccaagagctccttggctttatg

SEQ ID NO: 22879 - DNA, 593 bp, Homo sapiens
  misc_feature 1..593: note = ENST00000466523
  source 1..593: mol_type = unassigned DNA; mol_type = unassigned DNA
aaagtagagtccccagaccagcagcatcaacgtgatctagtaacttgttagaaatggacatttttgtgccttctttttttggacacatttgtgtccaaacctactgaatcagaaaccttggggttagggtgtagtaatatgtagtttaacaagccctccagcttctccaatttgggaaatacctgctatatgaatgctattctacaatctctattttcactccagtcatttgcaaatgacttgcttaaacaaggtatcccatggaagaaaattccactcaatgcacttatcagacgctttgcacacttgcttgttaaaaaagatatctgtaattcagagaccaaaaaggatttactcaagaaggttaaaaatgccatttcagctacagcagagagattctctggttatatgcagaatgatgctcatgaatttttaagtcagtgtttggaccagctgaaagaagatatggaaaaattaaataaaacttggaagactgaacctgtttctggagaagaaaattcaccagatatttcagctaccagagcatacacttgccctgttattactaatttggagtttgaggttcagcactc

SEQ ID NO: 22880 - DNA, 552 bp, Homo sapiens
  misc_feature 1..552: note = ENST00000486242
  source 1..552: mol_type = unassigned DNA; mol_type = unassigned DNA
aaataaagtaaaatacctgaccattactcttcaaaattgtcaaagccattaaaaaaagaagaaattgaggattgtacgagtaaagaaacatgacaactacttgcactgtgggatcctgggccagaaaaaggactttagtgaaaatactgatgaaatttgaataatatgtgactaatgtttcaagccagactccctctgccaaaagaagtttgggatttcttcctcagccagttcctctttctgttaaaaaactgaggtgtaaccaggattacactggctggaataaaccaagagtgcccctttcctctcaccaacagcagcaactgcagggcttctccaatttgggaaatacctgctatatgaatgctattctacaatctctattttcactccagtcatttgcaaatgacttgcttaaacaaggtatcccatggaagaaaattccactcaatgcacttatcagacgctttgcacacttgcttgttaaaaaagatatctgtaattcagagaccaaaaaggatttactcaagaaggttaaaaatgccatttcag

SEQ ID NO: 22881 - DNA, 486 bp, Homo sapiens
  misc_feature 1..486: note = ENST00000478329
  source 1..486: mol_type = unassigned DNA; mol_type = unassigned DNA
ttactcagacaatcaggcttctgcaaaaagaggaagtttggaaactaaagatgatattccatttcgaaaagttcttggtaatccgggtagaggatcgattaagactgtagcaggaagtggaatagctcggacgattccttctttgacatctacttcaacacctcttagatcagggttgctagaaaatcgtactgaaaagaggaaaagaatgatatcaactggctcagaattgaatgaagattaccctaaggaaaatgattcatcatcggcttttacctttacagtcatcatccttttatggtagcagagctggatccaaggaacactcttctggtggcactaacttagacaggactaatgtttcaagccagactccctctgccaaaagaagtttgggatttcttcctcagccagttcctctttctgttaaaaaactgaggtgtaaccaggattacactggctggaataaaccaagagtgccccttt

SEQ ID NO: 22882 - DNA, 1771 bp, Homo sapiens
  misc_feature 1..1771: note = ENST00000338465
  source 1..1771: mol_type = unassigned DNA; mol_type = unassigned DNA
catcagccgctctccctgactaggggtagctagcggcctccctcctttgggttcggtatccctacttccattaccctcggctcctcccactcctcgcgggctccgtgctttccgcgggtctgtccgggggctccggaccctcggcgcagctgagttgatggcttccggagaactggcatagctgcagaatatgagtagtgtcccaagaagagtgctttgcctttggcacaaggatcagaataaaggtgaattgctattacatagggtttttcggtaaaagtcactgaaaattatttgccatacagtaaccagagacctccaactaggggcccccaaactgtatcctgcctgtagccagaagcaatttttaaagaaaatatgtctcctctgaagatacatggtcctatcagaattcgaagtatgcagactgggattacaaagtggaaagaaggatcctttgaaattgtagaaaaagagaataaagtcagcctagtagttcactacaatactggaggaattccaaggatatttcagctaagtcataacattaaaaatgtggtgcttcgacccagtggagcgaaacaaagccgcctaatgttaactctgcaagataacagcttcttgtctattgacaaagtaccaagtaaggatgcagaggaaatgaggttgtttctagatgcagtccatcaaaacagacttcctgcagccatgaaaccgtctcaggggtctggtagttttggagccattctgggcagcaggacctcacagaaggaaaccagcaggcagctttcttactcagacaatcaggcttctgcaaaaagaggaagtttggaaactaaagatgatattccatttcgaaaagttcttggtaatccgggtagaggatcgattaagactgtagcaggaagtggaatagctcggacgattccttctttgacatctacttcaacacctcttagatcagggttgctagaaaatcgtactgaaaagaggaaaagaatgatatcaactggctcagaattgaatgaagattaccctaaggaaaatgattcatcatcgaacaacaaggccatgacagatccctccagaaagtatttaaccagcagtagagaaaagcagctgagtttgaaacagtcagaagagaataggacatcagggcttttacctttacagtcatcatccttttatggtagcagagctggatccaaggaacactcttctggtggcactaacttagacagatttattgggtataaatacataagatacctgctaagcacttgttgagaacatgtgatcatgcagtgcagcacagaagggttgatggttttaaatgtaaaaagtgagggtaatggcaaatgcccatcaatgatagacaggataaagaaaatgtggcatatatataccatggaatactatgcagccataaaaatggatgagttcatgtcctttgcagagacatggatgaagctgaaaaccatcattctcagcaaactgacacaggaacataaaaccaaacaccacatattcttactcataagtggatgttgaacaatgagaacacatggacacagggaggggaacatcactcaccggggtctgtcgtggggtggggggctaggggagggatagcattaagagaaatacctaatgtagatgatgggttgatgggtgcagcaaaccatgatggcatgtgtatacctatgtaacaaacctgcacattgtacacatgtatcccagaacttaaaatataattaaaaaaaaaaagtga

SEQ ID NO: 22883 - DNA, 3222 bp, Homo sapiens
  misc_feature 1..3222: note = ENST00000351842
  source 1..3222: mol_type = unassigned DNA; mol_type = unassigned DNA
gcggaggagatggcggaaggtggaggctgccgtgagcgaccggatgcggagactcagaagtccgagcttggacccttaatgaggaccacactccaacgcggggcgcagtggtatcttattgacagccggtggttcaagcagtggaagaagtatgtgggctttgacagctgggacatgtacaatgtgggtgaacataacctatttcctggcccaatagacaactctgggctattttcagatcctgagagtcagaccttgaaagaacacttaattgatgaattggactatgtattggtccctaccgaggcgtggaataaactactaaactggtacggctgtgtagaaggccagcaacccatcgtcagaaaagttgtggagcatggcctgtttgtcaagcactgcaaagtcgaggtgtatttgctggaactgaagctctgtgagaacagtgaccccaccaatgtgctgagttgccatttcagcaaggcagacaccattgcaaccatcgagaaagagatgcggaagctattcaacatccctgcggagcgtgaaacacggctctggaacaaatacatgagcaacacctacgagcagttgagcaagctagacaacactgtccaggatgctgggctataccagggtcaggtgctagtaattgagcctcaaaatgaagatggcacatggcccaggcagaccttgcagtcaaatggatctggcttttctgcttcgtataattgtcaggagccaccatcctctcatatacaacctgggctctgtggacttggaaacctgggaaacacctgcttcatgaactccgctttgcagtgtttgagcaacactgcaccactgactgactactttctcaaagatgagtatgaagccgaaatcaacagagacaaccctctggggatgaaaggggaaattgcagaagcctatgctgaactcattaagcagatgtggtctggaagggacgcccatgtggcacctcgcatgttcaaaactcaagtaggacgttttgctcctcaattttctggctaccagcaacaagattctcaggagctgctggcctttcttctagatggattgcatgaagatctgaaccgggtaaagaaaaagccctacttggagctgaaggatgccaatgggcggccagatgcggtggtggcaaaggaagcctgggagaatcacaggttgaggaatgattctgtgattgtggatactttccatggcctcttcaaatctactttggtttgcccagaatgtgctaaggtttctgtgacctttgacccattttgctatctaacgctgccactgcccttgaagaaagatcgagttatggaggttttcctggttcctgctgaccctcactgcagacctactcagtaccgtgtgactgtgccgctgatgggggctgtgtccgacctgtgcgaggctctctccaggctgtctggcattgctgcagaaaatatggtggtcgcagatgtgtataatcaccgattccacaaaattttccaaatggatgaaggtttaaaccacatcatgcctcgggatgacattttcgtgtacgaggtctgcagcacttccgtggatggctcggaatgtgtcacgcttccagtctacttcagggagaggaagtccaggccatcaagcacttcctccgcatcagcgctatatgggcagccactattgctttctgtccccaagcacaagttaacccttgagtctttgtaccaggctgtttgtgatcgtatcagccgctatgtgaaacagcctttacctgatgagtttggcagctcacccttggagccaggggcctgcaatggctccaggaacagctgtgaaggagaagatgaggaagaaatggagcatcaggaagaaggcaaagagcagctttcagaaacagaaggcagtggggaagatgagccaggaaatgaccccagtgagaccacccaaaagaagatcaaaggccagccctgcccaaaaaggctttttaccttcagtcttgtgaactcctatggaacagctgacataaattcacttgcagctgatggaaaactacttaaactcaactctcgatctacactggccatggattgggacagtgaaactcggagactttactatgatgagcaagaatctgaggcctacgagaagcatgtgagcatgttgcagcctcagaagaagaagaagaccacagtggccctgagagactgcatcgagctcttcaccaccatggagacccttggggagcatgacccctggtactgtcccaactgtaagaagcatcaacaggccacaaaaaagtttgacctatggtccttgcccaagatcctggtggtccacctcaaacgtttctcctacaacagatactggagggataagctcgacacagtcgtagaattcccaatcagagggctgaacatgtccgagtttgtctgtaacctgtcagcaaggccttatgtgtacgacctcattgccgtgtccaatcattatggagccatgggggttggccactacactgcatatgcgaagaacaaactgaatggtaaatggtattactttgatgatagcaacgtgtccctggcctctgaggatcagatagtgactaaagcagcttatgtgctattttaccaacgtcgagatgatgaattttataagacaccttcacttagcagttctggttcctctgatggagggacacgaccaagcagctctcagcagggctttggggatgatgaggcttgcagcatggacaccaactaatgctgactccacgatcctgccaccctgtagcgccagtgtaatcccccaggagaacatctttgacactctgcagactgctagtgttctgtctaaaaaccagacaaggaaatacccttcttttatgagcagaaggaaacaaaaaaaaaaaaagaagaccgtttacctagaagaagctatgtcaagaggctgaattatttttatttttaaacaggtggtgagaaatttctgtgaaacctgtgaagctgaaaagggggtgggatgggggtactcaatggagtatgtctgatggatcccgaagaatggagaggaacacaggcgctgagtatggagcagcctggagacccaccccacctgcagggctgccctgagcgcctggatttctggttctgatgccaatactagtcaccccaagtagtctgctcacagtaacccaaacctcaagtaaactcccctttccctcgc

SEQ ID NO: 22884 - DNA, 3126 bp, Homo sapiens
  misc_feature 1..3126: note = ENST00000265560
  source 1..3126: mol_type = unassigned DNA; mol_type = unassigned DNA
cgcgcggggcggatgtccgggccggctgggccggggccgcggaggagatggcggaaggtggaggctgccgtgagcgaccggatgcggagactcagaagtccgagcttggacccttaatgaggaccacactccaacgcggggcgcagtggtatcttattgacagccggtggttcaagcagtggaagaagtatgtgggctttgacagctgggacatgtacaatgtgggtgaacataacctatttcctggcccaatagacaactctgggctattttcagatcctgagagtcagaccttgaaagaacacttaattgatgaattggactatgtattggtccctaccgaggcgtggaataaactactaaactggtacggctgtgtagaaggccagcaacccatcgtcagaaaagttgtggagcatggcctgtttgtcaagcactgcaaagtcgaggtgtatttgctggaactgaagctctgtgagaacagtgaccccaccaatgtgctgagttgccatttcagcaaggcagacaccattgcaaccatcgagaaagagatgcggaagctattcaacatccctgcggagcgtgaaacacggctctggaacaaatacatgagcaacacctacgagcagttgagcaagctagacaacactgtccaggatgctgggctataccagggtcaggtgctagtaattgagcctcaaaatgaagatggcacatggcccaggcagaccttgcagtcaaaatcaagcactgcgcctagcagaaattttactacctctccaaaatcatcagcaagtccctattcctcagtgtctgcctctctcattgcaaatggtgatagcactagcacctgtgggatgcacagttccggtgtcagcaggggtggatctggcttttctgcttcgtataattgtcaggagccaccatcctctcatatacaacctgggctctgtggacttggaaacctgggaaacacctgcttcatgaactccgctttgcagtgtttgagcaacactgcaccactgactgactactttctcaaagatgagtatgaagccgaaatcaacagagacaaccctctggggatgaaaggggaaattgcagaagcctatgctgaactcattaagcagatgtggtctggaagggacgcccatgtggcacctcgcatgttcaaaactcaagtaggacgttttgctcctcaattttctggctaccagcaacaagattctcaggagctgctggcctttcttctagatggattgcatgaagatctgaaccgggtaaagaaaaagccctacttggagctgaaggatgccaatgggcggccagatgcggtggtggcaaaggaagcctgggagaatcacaggttgaggaatgattctgtgattgtggatactttccatggcctcttcaaatctactttggtttgcccagaatgtgctaaggtttctgtgacctttgacccattttgctatctaacgctgccactgcccttgaagaaagatcgagttatggaggttttcctggttcctgctgaccctcactgcagacctactcagtaccgtgtgactgtgccgctgatgggggctgtgtccgacctgtgcgaggctctctccaggctgtctggcattgctgcagaaaatatggtggtcgcagatgtgtataatcaccgattccacaaaattttccaaatggatgaaggtttaaaccacatcatgcctcgggatgacattttcgtgtacgaggtctgcagcacttccgtggatggctcggaatgtgtcacgcttccagtctacttcagggagaggaagtccaggccatcaagcacttcctccgcatcagcgctatatgggcagccactattgctttctgtccccaagcacaagttaacccttgagtctttgtaccaggctgtttgtgatcgtatcagccgctatgtgaaacagcctttacctgatgagtttggcagctcacccttggagccaggggcctgcaatggctccaggaacagctgtgaaggagaagatgaggaagaaatggagcatcaggaagaaggcaaagagcagctttcagaaacagaaggcagtggggaagatgagccaggaaatgaccccagtgagaccacccaaaagaagatcaaaggccagccctgcccaaaaaggctttttaccttcagtcttgtgaactcctatggaacagctgacataaattcacttgcagctgatggaaaactacttaaactcaactctcgatctacactggccatggattgggacagtgaaactcggagactttactatgatgagcaagaatctgaggcctacgagaagcatgtgagcatgttgcagcctcagaagaagaagaagaccacagtggccctgagagactgcatcgagctcttcaccaccatggagacccttggggagcatgacccctggtactgtcccaactgtaagaagcatcaacaggccacaaaaaagtttgacctatggtccttgcccaagatcctggtggtccacctcaaacgtttctcctacaacagatactggagggataagctcgacacagtcgtagaattcccaatcagagggctgaacatgtccgagtttgtctgtaacctgtcagcaaggccttatgtgtacgacctcattgccgtgtccaatcattatggagccatgggggttggccactacactgcatatgcgaagaacaaactgaatggtaaatggtattactttgatgatagcaacgtgtccctggcctctgaggatcagatagtgactaaagcagcttatgtgctattttaccaacgtcgagatgatgaattttataagacaccttcacttagcagttctggttcctctgatggagggacacgaccaagcagctctcagcagggctttggggatgatgaggcttgcagcatggacaccaactaatgctgactccacgatcctgccaccctgtagcgccagtgtaatcccccaggagaacatctttgacactctgcagactgctagtgttctgtctaaaaaccagacaaggaaatacccttcttttatgagcagaaggaaacaaaaaaaaaaaaagaagaccgtttacctagaagaagctatgtcaagaggc

SEQ ID NO: 22885 - DNA, 727 bp, Homo sapiens
  misc_feature 1..727: note = ENST00000483212
  source 1..727: mol_type = unassigned DNA; mol_type = unassigned DNA
ttatgggttccctggttttggattattgcacatagccatcctgaagattggcactgaatagctctgttttttctattagtttcccaaaattatagtttaaaatcttggtccctgacagctccatttttagccttttgatcctttttgagaaggaacagattagaaaagaaggtgagttgttttttggttgttaagacacacactgtaaacttttttaatttcaggggttttgttttggggatttttgtgtttatttagtgcaagcctaataagctagccagattaattctctggagaccgctagagtattttctttgttgacttggcagacactgcatatgcgaagaacaaactgaatggtaaatggtattactttgatgatagcaacgtgtccctggcctctgaggatcagatagtgactaaagcagcttatgtgctattttaccaacgtcgagatgatgaattttataagacaccttcacttagcagttctggttcctctgatggagggacacgaccaagcagctctcagcagggctttggggatgatgaggcttgcagcatggacaccaactaatgctgactccacgatcctgccaccctgtagcgccagtgtaatcccccaggagaacatctttgacactctgcagactgctagtgttctgtctaaaaaccagacaaggaaatacccttcttttatgagcagaaggaaacaaaaaaaaaaaaa

SEQ ID NO: 22886 - DNA, 3541 bp, Homo sapiens
  misc_feature 1..3541: note = ENST00000485450
  source 1..3541: mol_type = unassigned DNA; mol_type = unassigned DNA
atgatttgtaaatcaaaccaggatgcttgaagatgaaccttgtggggttttttttgttgtttttttttaagagacagagtctcactctgtcacctaggctggagtgcagtggcacgatctcggctcactgcaacctccgcctcccggtttcacgcaattctcctgcccctcagcctccccagtagctgggactacaggcacatgctgccatgcctggctaatttctttattttctttttttttgagacagagtttcgttctttttgcccaggctggagtgcaatggcgcgatcttggctcactgcaacttctgcctcccgggttcaagcaattctcctgcctcagcttcccgagtagcgccatcacatctggctaatttttttttttttgagatggagtctcactctgtcaccaagctggagtgcggtggtgcagtctcggcttactcccgggttcaagtgatgcttctgccccagcctcccgagtggctgggatgacaggcgcccgccaccatgtccagataatttttgtatttttagtagagatgtggtttcactgtgtcttgaactcctgacctcatggccaggctggtcttgaattcctgaccttgtgatcgtgacctcatgatccgccagcctcggcctcccaaagtgctgggattacaagggtgagccacctcacccagcctaattttgtatttttagtagtgacggggtttctccatgttggtcaggctggtctcaaactcctgacctcaggtgatccgtctgcctcggcctcccaaagtgctgagattacaggcatgagccaccacgcgcgacctggctaatttcttttgcattttagtagagacagggtttcactgtgttgcccaggctggtctcgaactcctgagctcaggcaatctgcctgcctcagcctcccaaagtactaggattacaggcacgagccactgcgcctggtcagccttgtggtttttcacactgaaagggtatgtggtggtgtggactgatgtgacaggaagaccagttaatttgtggactctcacttaaataaagtttaccttgaagtagtatgaatacaggctttttgtaatttattttaacttaatatgaagaatatttattccttgagaagcaacctaaggcattaaatagggcttgctctttgcaaaaagtcagtagcattgtttctgcttctctctcccagatcaagcactgcgcctagcagaaattttactacctctccaaaatcatcagcaagtccctattcctcagtgtctgcctctctcattgcaaatggtgatagcactagcacctgtgggatgcacagttccggtgtcagcaggggtggatctggcttttctgcttcgtataattgtcaggagccaccatcctctcatatacaacctgggctctgtggacttggaaacctgggaaacacctgcttcatgaactccgctttgcagtgtttgagcaacactgcaccactgactgactactttctcaaagatgagtatgaagccgaaatcaacagagacaaccctctggggatgaaaggggaaattgcagaagcctatgctgaactcattaagcagatgtggtctggaagggacgcccatgtggcacctcgcatgttcaaaactcaagtaggacgttttgctcctcaattttctggctaccagcaacaagattctcaggagctgctggcctttcttctagatggattgcatgaagatctgaaccgggtaaagaaaaagccctacttggagctgaaggatgccaatgggcggccagatgcggtggtggcaaaggaagcctgggagaatcacaggttgaggaatgattctgtgattgtggatactttccatggcctcttcaaatctactttggtttgcccagaatgtgctaaggtttctgtgacctttgacccattttgctatctaacgctgccactgcccttgaagaaagatcgagttatggaggttttcctggttcctgctgaccctcactgcagacctactcagtaccgtgtgactgtgccgctgatgggggctgtgtccgacctgtgcgaggctctctccaggctgtctggcattgctgcagaaaatatggtggtcgcagatgtgtataatcaccgattccacaaaattttccaaatggatgaaggtttaaaccacatcatgcctcgggatgacattttcgtgtacgaggtctgcagcacttccgtggatggctcggaatgtgtcacgcttccagtctacttcagggagaggaagtccaggccatcaagcacttcctccgcatcagcgctatatgggcagccactattgctttctgtccccaagcacaagttaacccttgagtctttgtaccaggctgtttgtgatcgtatcagccgctatgtgaaacagcctttacctgatgagtttggcagctcacccttggagccaggggcctgcaatggctccaggaacagctgtgaaggagaagatgaggaagaaatggagcatcaggaagaaggcaaagagcagctttcagaaacagaaggcagtggggaagatgagccaggaaatgaccccagtgagaccacccaaaagaagatcaaaggccagccctgcccaaaaaggctttttaccttcagtcttgtgaactcctatggaacagctgacataaattcacttgcagctgatggaaaactacttaaactcaactctcgatctacactggccatggattgggacagtgaaactcggagactttactatgatgagcaagaatctgaggcctacgagaagcatgtgagcatgttgcagcctcagaagaagaagaagaccacagtggccctgagagactgcatcgagctcttcaccaccatggagacccttggggagcatgacccctggtactgtcccaactgtaagaagcatcaacaggccacaaaaaagtttgacctatggtccttgcccaagatcctggtggtccacctcaaacgtttctcctacaacagatactggagggataagctcgacacagtcgtagaattcccaatcagagggctgaacatgtccgagtttgtctgtaacctgtcagcaaggccttatgtgtacgacctcattgccgtgtccaatcattatggagccatgggggttggccactacactgcatatgcgaagaacaaactgaatggtaaatggtattactttgatgatagcaacgtgtccctggcctctgaggatcagatagtgactaaagcagcttatgtgctattttaccaacgtcgagatgatgaattttataagacaccttcacttagcagttctggttcctctgatggagggacacgaccaagcagctctcagcagggctttggggatgatgaggcttgcagcatggacaccaactaatgctgactccacgatcctgccaccctgtagcgccagtgtaatcccccaggagaacatctttgacactctgcagactgctagtgttctgtctaaaaaccagacaaggaaatacccttcttttatgagcagaaggaa

SEQ ID NO: 22887 - DNA, 2141 bp, Homo sapiens
  misc_feature 1..2141: note = ENST00000431357
  source 1..2141: mol_type = unassigned DNA; mol_type = unassigned DNA
tccaaaatcatcagcaagtccctattcctcagtgtctgcctctctcattgcaaatggtgatagcactagcacctgtgggatgcacagttccggtgtcagcaggggtggatctggcttttctgcttcgtataattgtcaggagccaccatcctctcatatacaacctgggctctgtggacttggaaacctgggaaacacctgcttcatgaactccgctttgcagtgtttgagcaacactgcaccactgactgactactttctcaaagatgagtatgaagccgaaatcaacagagacaaccctctggggatgaaaggggaaattgcagaagcctatgctgaactcattaagcagatgtggtctggaagggacgcccatgtggcacctcgcatgttcaaaactcaagtaggacgttttgctcctcaattttctggctaccagcaacaagattctcaggagctgctggcctttcttctagatggattgcatgaagatctgaaccgggtggtggcaaaggaagcctgggagaatcacaggttgaggaatgattctgtgattgtggatactttccatggcctcttcaaatctactttggtttgcccagaatgtgctaaggtttctgtgacctttgacccattttgctatctaacgctgccactgcccttgaagaaagatcgagttatggaggttttcctggttcctgctgaccctcactgcagacctactcagtaccgtgtgactgtgccgctgatgggggctgtgtccgacctgtgcgaggctctctccaggctgtctggcattgctgcagaaaatatggtggtcgcagatgtgtataatcaccgattccacaaaattttccaaatggatgaaggtttaaaccacatcatgcctcgggatgacattttcgtgtacgaggtctgcagcacttccgtggatggctcggaatgtgtcacgcttccagtctacttcagggagaggaagtccaggccatcaagcacttcctccgcatcagcgctatatgggcagccactattgctttctgtccccaagcacaagttaacccttgagtctttgtaccaggctgtttgtgatcgtatcagccgctatgtgaaacagcctttacctgatgagtttggcagctcacccttggagccaggggcctgcaatggctccaggaacagctgtgaaggagaagatgaggaagaaatggagcatcaggaagaaggcaaagagcagctttcagaaacagaaggcagtggggaagatgagccaggaaatgaccccagtgagaccacccaaaagaagatcaaaggccagccctgcccaaaaaggctttttaccttcagtcttgtgaactcctatggaacagctgacataaattcacttgcagctgatggaaaactacttaaactcaactctcgatctacactggccatggattgggacagtgaaactcggagactttactatgatgagcaagaatctgaggcctacgagaagcatgtgagcatgttgcagcctcagaagaagaagaagaccacagtggccctgagagactgcatcgagctcttcaccaccatggagacccttggggagcatgacccctggtactgtcccaactgtaagaagcatcaacaggccacaaaaaagtttgacctatggtccttgcccaagatcctggtggtccacctcaaacgtttctcctacaacagatactggagggataagctcgacacagtcgtagaattcccaatcagagggctgaacatgtccgagtttgtctgtaacctgtcagcaaggccttatgtgtacgacctcattgccgtgtccaatcattatggagccatgggggttggccactactaaagcagcttatgtgctattttaccaacgtcgagatgatgaattttataagacaccttcacttagcagttctggttcctctgatggagggacacgaccaagcagctctcagcagggctttggggatgatgaggcttgcagcatggacaccaactaatgctgactccacgatcctgccaccctgtagcgccagtgtaatcccccaggagaacatctttgacactctgcagactgctagtgttctgtctaaaaaccagacaaggaaatacccttcttttat

SEQ ID NO: 22888 - DNA, 536 bp, Homo sapiens
  misc_feature 1..536: note = ENST00000475873
  source 1..536: mol_type = unassigned DNA; mol_type = unassigned DNA
ggctggaatgcagtggcacgatctcggctcactgcaccctctacctcccaggttcaagtgattctgctgcctcagcctcccaagtagctgggattacagccgctatgtgaaacagcctttacctgatgagtttggcagctcacccttggagccaggggcctgcaatggctccaggaacagctgtgaaggagaagatgaggaagaaatggagcatcaggaagaaggcaaagagcagctttcagaaacagaaggcagtggggaagatgagccaggaaatgaccccagtgagaccacccaaaagaagatcaaaggccagccctgcccaaaaaggctttttaccttcagtcttgtgaactcctatggaacagctgacataaattcacttgcagctgatggaaaactacttaaactcaactctcgatctacactggccatggattgggacagtgaaactcggagactttactatgatgagcaagaatctgaggcctacgagaagcatgtgagcatgttgcagcctcagaagaagaagaaga

SEQ ID NO: 22889 - DNA, 749 bp, Homo sapiens
  misc_feature 1..749: note = ENST00000486549
  source 1..749: mol_type = unassigned DNA; mol_type = unassigned DNA
aggagatggcggaaggtggaggctgccgtgagcgaccggatgcggagactcagaagtccgagcttggacccttaatgaggaccacactccaacgcggggcgcagtgatcctgagagtcagaccttgaaagaacacttaattgatgaattggactatgtattggtccctaccgaggcgtggaataaactactaaactggtacggctgtgtagaaggccagcaacccatcgtcagaaaatgtttgagcaacactgcaccactgactgactactttctcaaagatgagtatgaagccgaaatcaacagagacaaccctctggggatgaaaggggaaattgcagaagcctatgctgaactcattaagcagatgtggtctggaagggacgcccatgtggcacctcgcatgttcaaaactcaagtaggacgttttgctcctcaattttctggctaccagcaacaagattctcaggagctgctggcctttcttctagatggattgcatgaagatctgaaccgggtaaagaaaaagccctacttggagctgaaggatgccaatgggcggccagatgcgtaccgtgtgactgtgccgctgatgggggctgtgtccgacctgtgcgaggctctctccaggctgtctggcattgctgcagaaaatatggtggtcgcagatgtgtataatcaccgattccacaaaattttccaaatggatgaaggtttaaaccacatcatgcctcgggatgacattttcgt

SEQ ID NO: 22890 - DNA, 1155 bp, Homo sapiens
  misc_feature 1..1155: note = ENST00000488520
  source 1..1155: mol_type = unassigned DNA; mol_type = unassigned DNA
ccacgcccggctaattttttgtatttttagtagagatgggatttcaccacgttggccaggctggtctcgaactcctggcctcaggtgatccacccgccttggcgtcccagagtgctgggattacaggcgtgagccaccacacctggccggttgtttatatttaattgtctttttttcactaatgaggaccaccttgtaaattctgggcattttcagagttttctcttccatgtgaattgctccagctaacttaatattagtttctcaagggtttgtgtagacctggctttgtctctttccatctgtttctctctttccctttaacgtcacttgcctgaggtctataaggccctttaaggttgccagcccagagccagaagagattggtgtccctgaagttaagaaagccacctttgcctacagatggtgttcacagtgttggtgtggagtcacagcttgacttttgatcaagcactgcgcctagcagaaattttactacctctccaaaatcatcagcaagtccctattcctcagtgtctgcctctctcattgcaaatggtgatagcactagcacctgtgggatgcacagttccggtgtcagcaggggtggatctggcttttctgcttcgtataattgtcaggagccaccatcctctcatatacaacctgggctctgtggacttggaaacctgggaaacacctgcttcatgaactccgctttgcagtgtttgagcaacactgcaccactgactgactactttctcaaagatgagtatgaagccgaaatcaacagagacaaccctctggggatgaaaggggaaattgcagaagcctatgctgaactcattaagcagatgtggtctggaagggacgcccatgtggcacctcgcatgttcaaaactcaagtaggacgttttgctcctcaattttctggctaccagcaacaagattctcaggagctgctggcctttcttctagatggattgcatgaagatctgaaccgggtaaagaaaaagccctacttggagctgaaggatgccaatgggcggccagatgcggtggtggcaaaggaagcctgggagaatcacaggttgaggaatgattctgtgattgtggatactttccatggcctcttcaaatctactttggtttgcc

SEQ ID NO: 22891 - DNA, 544 bp, Homo sapiens
  misc_feature 1..544: note = ENST00000461553
  source 1..544: mol_type = unassigned DNA; mol_type = unassigned DNA
atatttgaaacaatggaggaggattcactttcttctttggctgagcgcagtggctcatgtatgtaatcccagccctttgggaggctgaggcaggagggttgcttgagtccaggagtttgagaccagcctgggcaacataaggagactgttgctatggattaccaaaaaaaaaagatcaagcactgcgcctagcagaaattttactacctctccaaaatcatcagcaagtccctattcctcagtgtctgcctctctcattgcaaatggtgatagcactagcacctgtgggatgcacagttccggtgtcagcaggggtggatctggcttttctgcttcgtataattgtcaggagccaccatcctctcatatacaacctgggctctgtggacttggaaacctgggaaacacctgcttcatgaactccgctttgcagtgtttgagcaacactgcaccactgactgactactttctcaaagatgagtatgaagccgaaatcaacagagacaaccctctggggatgaaaggggaaattgcagaagcctat

SEQ ID NO: 22892 - DNA, 1536 bp, Homo sapiens
  misc_feature 1..1536: note = ENST00000416417
  source 1..1536: mol_type = unassigned DNA; mol_type = unassigned DNA
gccgcggaggagatggcggaaggtggaggctgccgtgagcgaccggatgcggagactcagaagtccgagcttggacccttaatgaggaccacactccaacgcggggcgcagtggtatcttattgacagccggtggttcaagcagtggaagaagtatgtgggctttgacagctgggacatgtacaatgtgggtgaacataacctatttcctggcccaatagacaactctgggctattttcagatcctgagagtcagaccttgaaagaacacttaattgatgaattggactatgtattggtccctaccgaggcgtggaataaactactaaactggtacggctgtgtagaaggccagcaacccatcgtcagaaaagttgtggagcatggcctgtttgtcaagcactgcaaagtcgaggtgtatttgctggaactgaagctctgtgagaacagtgaccccaccaatgtgctgagttgccatttcagcaaggcagacaccattgcaaccatcgagaaagagatgcggaagctattcaacatccctgcggagcgtgaaacacggctctggaacaaatacatgagcaacacctacgagcagttgagcaagctagacaacactgtccaggatgctgggctataccagggtcaggtgctagtaattgagcctcaaaatgaagatggcacatggcccaggcagaccttgcagtcaaaagtttcgttctttttgcccaggctggagtgcaatggcgcgatcttggctcactgcaacttctgcctcccgggttcaagcaattctcctgcctcagcttcccgagtagcgccatcacatctggctaatttttttttttttgagatggagtctcactctgtcaccaagctggagtgcggtggtgcagtctcggcttactcccgggttcaagtgatgcttctgccccagcctcccgagtggctgggatgacaggcgcccgccaccatgtccagataatttttgtatttttagtagagatgtggtttcactgtgtcttgaactcctgacctcatggccaggctggtcttgaattcctgaccttgtgatcgtgacctcatgatccgccagcctcggcctcccaaagtgctgggattacaagggtgagccacctcacccagcctaattttgtatttttagtagtgacggggtttctccatgttggtcaggctggtctcaaactcctgacctcaggtgatccgtctgcctcggcctcccaaagtgctgagattacaggcatgagccaccacgcgcgacctggctaatttcttttgcattttagtagagacagggtttcactgtgttgcccaggctggtctcgaactcctgagctcaggcaatctgcctgcctcagcctcccaaagtactaggattacaggcacgagccactgcgcctggtcagccttgtggtttttcacactgaaagggtatgtggtggtgtggactgatgtgacaggaagaccagttaatttgtggactctcacttaaataaagtttaccttgaagtagtatgaa

SEQ ID NO: 22893 - DNA, 1454 bp, Homo sapiens
  misc_feature 1..1454: note = ENST00000415188
  source 1..1454: mol_type = unassigned DNA; mol_type = unassigned DNA
gccgcggaggagatggcggaaggtggaggctgccgtgagcgaccggatgcggagactcagaagtccgagcttggacccttaatgaggaccacactccaacgcggggcgcagtggtatcttattgacagccggtggttcaagcagtggaagaagtatgtgggctttgacagctgggacatgtacaatgtgggtgaacataacctatttcctggcccaatagacaactctgggctattttcagatcctgagagtcagaccttgaaagaacacttaattgatgaattggactatgtattggtccctaccgaggcgtggaataaactactaaactggtacggctgtgtagaaggccagcaacccatcgtcagaaaagttgtggagcatggcctgtttgtcaagcactgcaaagtcgaggtgtatttgctggaactgaagctctgtgagaacagtgaccccaccaatgtgctgagttgccatttcagcaaggcagacaccattgcaaccatcgagaaagagatgcggaagctattcaacatccctgcggagcgtgaaacacggctctggaacaaatacatgagcaacacctacgagcagttgagcaagctagacaacactgtccaggatgctgggctataccagggtcaggtgctagtaattgagcctcaaaatgaagatggcacatggcccaggcagaccttgcagtcaaaggggccccaggagatgttgacccagcagggcatggcgctgcagaactacgacaacaagctggtcaaatgcatagaggagctatgccagaagcaggaggagctgtgctggcagatccagcaggaggaggacaagaaacagcggctgcagaatgaggtgaggcagctgacagagaagctggcctgcgtcaacgagaagctggcccgcgtcaacgagaacctggcacgcaagattgcctcttgcagtaagttctaccagaccatcgcggagacggaggccacctacctcaagatgctggagagctcccagactttgctcagtgtcctgaagagggaagctgggaacctgaccaaggctacagcctcagaccagaaaagtagtggtggcagggacagctgaccagaccatgggcagggcctgcctctgtgcgcccctcaactcagccccagcaagtctgtccacagagcgtcttcttcatggcagcagctgccttctttcactgtctcaggtgctaagaggggcagctgccaacctccactggcatcagtgacaagcccggggcacagcctgtgggtcctggctttgtgctcacacaggctatggggagggtgggctctaggtcagctctgcaaggggcctgtctctgcggcacccacactcctgggctgccagggaggtcctggttgtagtctgagcaccatggaggtcccctcagccagcagaggcccagggcagggggcaggggttct

SEQ ID NO: 22894 - DNA, 709 bp, Homo sapiens
  misc_feature 1..709: note = ENST00000462673
  source 1..709: mol_type = unassigned DNA; mol_type = unassigned DNA
ggattacaggcgtgagccaccacacctggccggttgtttatatttaattgtctttttttcactaatgaggaccaccttgtaaattctgggcattttcagagttttctcttccatgtgaattgctccagctaacttaatattagtttctcaagggtttgtgtagacctggctttgtctctttccatctgtttctctctttccctttaacgtcacttgcctgaggtctataaggccctttaaggttgccagcccagagccagaagagattggtgtccctgaagttaagaaagccacctttgcctacagatggtgttcacagtgttggtgtggagtcacagcttgacttttgggggccccaggagatgttgacccagcagggcatggcgctgcagaactacgacaacaagctggtcaaatgcatagaggagctatgccagaagcaggaggagctgtgctggcagatccagcaggaggaggacaagaaacagcggctgcagaatgaggtgaggcagctgacagagaagctggcctgcgtcaacgagaagctggcccgcgtcaacgagaacctggcacgcaagattgcctcttgcagtaagttctaccagaccatcgcggagacggaggccacctacctcaagatgctggagagctcccagactttgctcagtgtcctgaagagggaagctgggaacctgaccaaggctacagc

SEQ ID NO: 22895 - DNA, 601 bp, Homo sapiens
  misc_feature 1..601: note = ENST00000464168
  source 1..601: mol_type = unassigned DNA; mol_type = unassigned DNA
gggccggctgggccggggccgcggaggagatggcggaaggtggaggctgccgtgagcgaccggatgcggagactcagaagtccgagcttggacccttaatgaggaccacactccaacgcggggcgcagtgatcctgagagtcagaccttgaaagaacacttaattgatgaattggactatgtattggtccctaccgaggcgtggaataaactactaaactggtacggctgtgtagaaggccagcaacccatcgtcagaaaagttgtggagcatggcctgtttgtcaagcactgcaaagtcgaggtgtatttgctggaactgaagctctgtgagaacagtgaccccaccaatgtgctgagttgccatttcagcaaggcagacaccattgcaaccatcgagaaagagatgcggaagctattcaacatccctgcggagcgtgaaacacggctctggaacaaatacatgagcaacacctacgagcagttgagcaagctagacaacactgtccaggatgctgggctataccagggtcaggtgctagtaattgagcctcaaaatgaagatggcacatggcccaggcagaccttgcagtcaaagtaag

SEQ ID NO: 22896 - DNA, 821 bp, Homo sapiens
  misc_feature 1..821: note = ENST00000491791
  source 1..821: mol_type = unassigned DNA; mol_type = unassigned DNA
agctcagtatgaagagctgacggaattctgcggtgggccaggtggctctggcgtcgactgtttaaggcgactgttaatgactacaacacaccattgagtcttggtcccaaggcgctggtgcacatggtacttcccgaaatccctgtagggccgctggagcaggagccccgatcccacgtttgggcagctgactcgcctaaggcctccagctgaaagcggaattgcaggggtatcttattgacagccggtggttcaagcagtggaagaagtatgtgggctttgacagctgggacatgtacaatgtgggtgaacataacctatttcctggcccaatagacaactctgggctattttcagatcctgagagtcagaccttgaaagaacacttaattgatgaattggactatgtattggtccctaccgaggcgtggaataaactactaaactggtacggctgtgtagaaggccagcaacccatcgtcagaaaagttgtggagcatggcctgtttgtcaagcactgcaaagtcgaggtgtatttgctggaactgaagctctgtgagaacagtgaccccaccaatgtgctgagttgccatttcagcaaggcagacaccattgcaaccatcgagaaagagatgcggaagctattcaacatccctgcggagcgtgaaacacggctctggaacaaatacatgagcaacacctacgagcagttgagcaagctagacaacactgtccaggatgctgggctataccagggtcaggtgctagtaattgagcctcaaaatgaagatggcacatggcccaggcagaccttgcagtca

SEQ ID NO: 22897 - DNA, 3624 bp, Homo sapiens
  misc_feature 1..3624: note = ENST00000570827
  source 1..3624: mol_type = unassigned DNA; mol_type = unassigned DNA
aaaccgcgtagggggcgcgcctgagagcctgaaaacttcctggttagcaaatactgaggctggaaagggcctgaacttggcagtccatagatccaggtcgagttccggtttccctgcttacggatcgggcggcctccctacgttgcgataacctctctgagcccccttccttgccgattaaagcaagggtgatcaagtcttgcaagtttttggaaaatgattctaacccaatctgtggtgtaaaaaagcaaaccacaaccactcgggggcttttttcacagggcaacacgtggctcccagttcaggtcccgggttggcgggtgcaggcacagactctgcctccccccaaggggcagacggtctggaaggaggtggcgacacctgtccgcacacacctgagcctgcggaggaaccagcggtgcacaaaagcgctccccacccccacacagcgcccagcgcgcgcctctcaccacgcccgaggctgtgctctggagatgcctgccttgcccttttcttcctgcagtagccaggcctttaccatttactaggcgctttcagaatgttcatttctccgtaatttccactgcttgaaggctgctcgaggaacaggagcagcggcgaaacccaggtctgtcggtttacgagaatgcagtttccaagtacggctctcagttccaaggcaattcccagcacgacgccctggaattcctgctctggttgctggatcgtgtacatgaggacctggagggttcatcccgagggccggtgtcggagaagcttccgcctgaagccactaaaacctctgagaactgcctgtcaccatcagctcagcttcctctaggtcaaagctttgtgcaaagccactttcaagcacaatatagatcttccttgacttgtccccactgcctgaaacagagcaacacctttgatcctttcctgtgtgtgtccctacctatccccttgcgccagacgaggttcttgagtgtcaccttggtcttcccctctaagagccagcggttcctgcgggttggcctggccgtgccgatcctcagcacagtggcagccctgaggaagatggttgcagaggaaggaggcgtccctgcagatgaggtgatcttggttgaactgtatcccagtggattccagcggtctttctttgatgaagaggacctgaataccatcgcagagggagataatgtgtatgcctttcaagttcctccctcacccagccaggggactctctcagctcatccactgggtctgtcggcctccccacgcctggcagcccgtgagggccagcgattctccctctctctccacagtgagagcaaggtgctaatcctcttctgtaacttggtggggtcagggcagcaggctagcaggtttgggccacccttcctgataagggaagacagagctgtttcctgggcccagctccagcagtctatcctcagcaaggtccgccatcttatgaagagtgaggcccctgtacagaacctggggtctctgttctccatccgtgttgtgggactctctgtggcctgcagctatttgtctccgaaggacagtcggcccctctgtcactgggcagttgacagggttttgcatctcaggaggccaggaggccctccacatgtcaagctggcggtggagtgggatagctctgtcaaggagcgcctgttcgggagcctccaggaggagcgagcgcaggatgccgacagtgtgtggcagcagcagcaggcgcatcagcagcacagctgtaccttggatgaatgttttcagttctacaccaaggaggagcagctggcccaggatgacgcctggaagtgtcctcactgccaagtcctgcagcaggggatggtgaagctgagtttgtggacgctgcctgacatcctcatcatccacctcaaaaggttctgccaggtgggcgagagaagaaacaagctctccacgctggtgaagtttccgctctctggactcaacatggctccccatgtggcccagagaagcaccagccctgaggcaggactgggcccctggccttcctggaagcagccggactgcctgcccaccagttacccgctggacttcctgtacgacctgtatgccgtctgcaaccaccatggcaacctgcaaggtgggcattacacagcctactgccggaactctctggatggccagtggtacagttatgatgacagcacggtggaaccgcttcgagaagatgaggtcaacaccagaggggcttatatcctgttctatcagaagcggaacagcatccctccctggtcagccagcagctccatgagaggctctaccagctcctccctgtctgatcactggctcttacggctcgggagccacgctggcagcacaaggggaagcctgctgtcctggagctctgccccctgcccctccctgccccaggttcctgactctcccatcttcaccaacagcctctgcaatcaggaaaagggagggttggagcccaggcgtttggtacggggcgtgaaaggcagaagcattagcatgaaggcacccaccacttcccgagccaagcagggaccattcaagaccatgcctctgcggtggtcctttggatccaaggagaaaccaccaggtgcctccgtcgagttggtggagtacttggaatccagacgaagacctcggtccacgagccagtccattgtgtcgctgttgacgggcactgcgggtgaggatgagaagtcagcatcgccgaggtccaacgtcgcccttcctgctaacagcgaagatggtgggcgggccattgaaagaggtccagccggggtgccctgtccctcggctcaacccaaccactgtctggcccctggaaactcagatggtccaaacacagcaaggaaactcaaggaaaatgcagggcaggacatcaagcttcccagaaagtttgacctgcctctcactgtgatgccttcagtggagcatgagaaaccagctcgaccggagggccagaaggccatgaactggaaggagagcttccagatgggaagcaaaagcagcccaccctccccctatatgggattctctggaaacagcaaagacagtcgccgaggcacctctgagctagacagacccctgcaggggacactcacccttctgaggtccgtgtttcggaagaaggagaacaggaggaatgagagggcagaggtctctccacaggtgccccccgtctccctggtgagtggcgggctgagccctgccatggacgggcaggctccaggctcacctcctgccctcaggatcccagagggcctggccaggggcctgggcagccggctcgagagggatgtctggtcagcccccagctctctccgcctccctcgtaaagccagcagggccccgagaggcagtgcactgggcatgtcacaaaggactgttccaggggagcaggcttcttatggcacctttcagagagtcaaatatcacactctttctttaggtcgaaagaaaaccttaccggagtccagcttttgatggagcgtgtcagtattgtgtgacgctggcattcttgggactttgccaagcaactgtaggcagctcatgttgagaatgggtttccaggaaacccgttgtcttgtaatctct

SEQ ID NO: 22898 - DNA, 3500 bp, Homo sapiens
  misc_feature 1..3500: note = ENST00000570475
  source 1..3500: mol_type = unassigned DNA; mol_type = unassigned DNA
cggcaccaggagccttagagaagctgtagggcctgctggccgctcgtccgcctcgcgcccgggggctccgcgcctggagctgcgccggcggcagccatggacctgggccccggggacgcggcaggagggggaccgctcgcgccccggccccgccgccgccgctccctgcgccgcctgttcagccgcttcctgctggcgctgggcagccgctcacgccccggggactcaccgccccggccccagccgggacactgtgatggcgacggtgaggggggcttcgcctgcgccccgggcccagttccagcggcccccgggagccccggggaggaacgcccgcccggaccccagccccagctccagctccccgccggcgatggggcgcggccgccgggcgctcagggcttgaagaaccacggcaacacctgtttcatgaacgcggtggtgcagtgtctcagcaacaccgacctgctggccgagttcctggcgctggggcgctaccgggcggctccgggccgcgccgaggtcaccgagcagctggcggcgctggtgcgcgcgctctggactcgcgaatacacgccccaactttccgcggagttcaagaatgcagtttccaagtacggctctcagttccaaggcaattcccagcacgacgccctggaattcctgctctggttgctggatcgtgtacatgaggacctggagggttcatcccgagggccggtgtcggagaagcttccgcctgaagccactaaaacctctgagaactgcctgtcaccatcagctcagcttcctctaggtcaaagctttgtgcaaagccactttcaagcacaatatagatcttccttgacttgtccccactgcctgaaacagagcaacacctttgatcctttcctgtgtgtgtccctacctatccccttgcgccagacgaggttcttgagtgtcaccttggtcttcccctctaagagccagcggttcctgcgggttggcctggccgtgccgatcctcagcacagtggcagccctgaggaagatggttgcagaggaaggaggcgtccctgcagatgaggtgatcttggttgaactgtatcccagtggattccagcggtctttctttgatgaagaggacctgaataccatcgcagagggagataatgtgtatgcctttcaagttcctccctcacccagccaggggactctctcagctcatccactgggtctgtcggcctccccacgcctggcagcccgtgagggccagcgattctccctctctctccacagtgagagcaaggtgctaatcctcttctgtaacttggtggggtcagggcagcaggctagcaggtttgggccacccttcctgataagggaagacagagctgtttcctgggcccagctccagcagtctatcctcagcaaggtccgccatcttatgaagagtgaggcccctgtacagaacctggggtctctgttctccatccgtgttgtgggactctctgtggcctgcagctatttgtctccgaaggacagtcggcccctctgtcactgggcagttgacagggttttgcatctcaggaggccaggaggccctccacatgtcaagctggcggtggagtgggatagctctgtcaaggagcgcctgttcgggagcctccaggaggagcgagcgcaggatgccgacagtgtgtggcagcagcagcaggcgcatcagcagcacagctgtaccttggatgaatgttttcagttctacaccaaggaggagcagctggcccaggatgacgcctggaagtgtcctcactgccaagtcctgcagcaggggatggtgaagctgagtttgtggacgctgcctgacatcctcatcatccacctcaaaaggttctgccaggtgggcgagagaagaaacaagctctccacgctggtgaagtttccgctctctggactcaacatggctccccatgtggcccagagaagcaccagccctgaggcaggactgggcccctggccttcctggaagcagccggactgcctgcccaccagttacccgctggacttcctgtacgacctgtatgccgtctgcaaccaccatggcaacctgcaagcctactgccggaactctctggatggccagtggtacagttatgatgacagcacggtggaaccgcttcgagaagatgaggtcaacaccagaggggcttatatcctgttctatcagaagcggaacagcatccctccctggtcagccagcagctccatgagaggctctaccagctcctccctgtctgatcactggctcttacggctcgggagccacgctggcagcacaaggggaagcctgctgtcctggagctctgccccctgcccctccctgccccaggttcctgactctcccatcttcaccaacagcctctgcaatcaggaaaagggagggttggagcccaggcgtttggtacggggcgtgaaaggcagaagcattagcatgaaggcacccaccacttcccgagccaagcagggaccattcaagaccatgcctctgcggtggtcctttggatccaaggagaaaccaccaggtgcctccgtcgagttggtggagtacttggaatccagacgaagacctcggtccacgagccagtccattgtgtcgctgttgacgggcactgcgggtgaggatgagaagtcagcatcgccgaggtccaacgtcgcccttcctgctaacagcgaagatggtgggcgggccattgaaagaggtccagccggggtgccctgtccctcggctcaacccaaccactgtctggcccctggaaactcagatggtccaaacacagcaaggaaactcaaggaaaatgcagggcaggacatcaagcttcccagaaagtttgacctgcctctcactgtgatgccttcagtggagcatgagaaaccagctcgaccggagggccagaaggccatgaactggaaggagagcttccagatgggaagcaaaagcagcccaccctccccctatatgggattctctggaaacagcaaagacagtcgccgaggcacctctgagctagacagacccctgcaggggacactcacccttctgaggtccgtgtttcggaagaaggagaacaggaggaatgagagggcagaggtctctccacaggtgccccccgtctccctggtgagtggcgggctgagccctgccatggacgggcaggctccaggctcacctcctgccctcaggatcccagagggcctggccaggggcctgggcagccggctcgagagggatgtctggtcagcccccagctctctccgcctccctcgtaaagccagcagggccccgagaggcagtgcactgggcatgtcacaaaggactgttccaggggagcaggcttcttatggcacctttcagagagtcaaatatcacactctttctttaggtcgaaagaaaaccttaccggagtccagcttttgatggagcgtgtcagtattgtgtgacgctggcattcttgggactttgcc

SEQ ID NO: 22899 - DNA, 4169 bp, Homo sapiens
  misc_feature 1..4169: note = ENST00000285199
  source 1..4169: mol_type = unassigned DNA; mol_type = unassigned DNA
cggcaccaggagccttagagaagctgtagggcctgctggccgctcgtccgcctcgcgcccgggggctccgcgcctggagctgcgccggcggcagccatggacctgggccccggggacgcggcaggagggggaccgctcgcgccccggccccgccgccgccgctccctgcgccgcctgttcagccgcttcctgctggcgctgggcagccgctcacgccccggggactcaccgccccggccccagccgggacactgtgatggcgacggtgaggggggcttcgcctgcgccccgggcccagttccagcggcccccgggagccccggggaggaacgcccgcccggaccccagccccagctccagctccccgccggcgatggggcgcggccgccgggcgctcagggcttgaagaaccacggcaacacctgtttcatgaacgcggtggtgcagtgtctcagcaacaccgacctgctggccgagttcctggcgctggggcgctaccgggcggctccgggccgcgccgaggtcaccgagcagctggcggcgctggtgcgcgcgctctggactcgcgaatacacgccccaactttccgcggagttcaagaatgcagtttccaagtacggctctcagttccaaggcaattcccagcacgacgccctggaattcctgctctggttgctggatcgtgtacatgaggacctggagggttcatcccgagggccggtgtcggagaagcttccgcctgaagccactaaaacctctgagaactgcctgtcaccatcagctcagcttcctctaggtcaaagctttgtgcaaagccactttcaagcacaatatagatcttccttgacttgtccccactgcctgaaacagagcaacacctttgatcctttcctgtgtgtgtccctacctatccccttgcgccagacgaggttcttgagtgtcaccttggtcttcccctctaagagccagcggttcctgcgggttggcctggccgtgccgatcctcagcacagtggcagccctgaggaagatggttgcagaggaaggaggcgtccctgcagatgaggtgatcttggttgaactgtatcccagtggattccagcggtctttctttgatgaagaggacctgaataccatcgcagagggagataatgtgtatgcctttcaagttcctccctcacccagccaggggactctctcagctcatccactgggtctgtcggcctccccacgcctggcagcccgtgagggccagcgattctccctctctctccacagtgagagcaaggtgctaatcctcttctgtaacttggtggggtcagggcagcaggctagcaggtttgggccacccttcctgataagggaagacagagctgtttcctgggcccagctccagcagtctatcctcagcaaggtccgccatcttatgaagagtgaggcccctgtacagaacctggggtctctgttctccatccgtgttgtgggactctctgtggcctgcagctatttgtctccgaaggacagtcggcccctctgtcactgggcagttgacagggttttgcatctcaggaggccaggaggccctccacatgtcaagctggcggtggagtgggatagctctgtcaaggagcgcctgttcgggagcctccaggaggagcgagcgcaggatgccgacagtgtgtggcagcagcagcaggcgcatcagcagcacagctgtaccttggatgaatgttttcagttctacaccaaggaggagcagctggcccaggatgacgcctggaagtgtcctcactgccaagtcctgcagcaggggatggtgaagctgagtttgtggacgctgcctgacatcctcatcatccacctcaaaaggttctgccaggtgggcgagagaagaaacaagctctccacgctggtgaagtttccgctctctggactcaacatggctccccatgtggcccagagaagcaccagccctgaggcaggactgggcccctggccttcctggaagcagccggactgcctgcccaccagttacccgctggacttcctgtacgacctgtatgccgtctgcaaccaccatggcaacctgcaaggtgggcattacacagcctactgccggaactctctggatggccagtggtacagttatgatgacagcacggtggaaccgcttcgagaagatgaggtcaacaccagaggggcttatatcctgttctatcagaagcggaacagcatccctccctggtcagccagcagctccatgagaggctctaccagctcctccctgtctgatcactggctcttacggctcgggagccacgctggcagcacaaggggaagcctgctgtcctggagctctgccccctgcccctccctgccccaggttcctgactctcccatcttcaccaacagcctctgcaatcaggaaaagggagggttggagcccaggcgtttggtacggggcgtgaaaggcagaagcattagcatgaaggcacccaccacttcccgagccaagcagggaccattcaagaccatgcctctgcggtggtcctttggatccaaggagaaaccaccaggtgcctccgtcgagttggtggagtacttggaatccagacgaagacctcggtccacgagccagtccattgtgtcgctgttgacgggcactgcgggtgaggatgagaagtcagcatcgccgaggtccaacgtcgcccttcctgctaacagcgaagatggtgggcgggccattgaaagaggtccagccggggtgccctgtccctcggctcaacccaaccactgtctggcccctggaaactcagatggtccaaacacagcaaggaaactcaaggaaaatgcagggcaggacatcaagcttcccagaaagtttgacctgcctctcactgtgatgccttcagtggagcatgagaaaccagctcgaccggagggccagaaggccatgaactggaaggagagcttccagatgggaagcaaaagcagcccaccctccccctatatgggattctctggaaacagcaaagacagtcgccgaggcacctctgagctagacagacccctgcaggggacactcacccttctgaggtccgtgtttcggaagaaggagaacaggaggaatgagagggcagaggtctctccacaggtgccccccgtctccctggtgagtggcgggctgagccctgccatggacgggcaggctccaggctcacctcctgccctcaggatcccagagggcctggccaggggcctgggcagccggctcgagagggatgtctggtcagcccccagctctctccgcctccctcgtaaagccagcagggccccgagaggcagtgcactgggcatgtcacaaaggactgttccaggggagcaggcttcttatggcacctttcagagagtcaaatatcacactctttctttaggtcgaaagaaaaccttaccggagtccagcttttgatggagcgtgtcagtattgtgtgacgctggcattcttgggactttgccaagcaactgtaggcagctcatgttgagaatgggtttccaggaaacccgttgtcttgtaatctctaaaaaaaaatttttttttttttgtggtggggggtctccatatctagacttccaacacccaaggtccatataacccaaggtcgaaaaccttcctgcatcattgggtgctttgctacagtttggccactagaggatgctattgggtcagtattaccagtttcagggcaagaactgatatttactaaagagttttggatgtgggcaaacaagatgaggctggtttaataagaatcttcaatgtcatgtcaaatactgtcaatggcttttcctttttctttcttttttttttttaaattgtggacttaaagaaaaatattttatttttaatgcttttctgggataagcattaaagatgccaaaaagaaaaaaaaaacaaaagaatgatagtgatggtaaggcaagattctagcaaagagagatgggagataaatggctgagagttcaggtgaatatttaatatattaaaaattgtattaaagtttttcaaggtattttaaaaataactattttgatactagaaaaaaagtccattttttaatttaaatatgagatctatgtacaattttaataaaatcctgtccatgaaacacg

SEQ ID NO: 22900 - DNA, 3425 bp, Homo sapiens
  misc_feature 1..3425: note = ENST00000574408
  source 1..3425: mol_type = unassigned DNA; mol_type = unassigned DNA
ggcaattcccagcacgacgccctggaattcctgctctggttgctggatcgtgtacatgaggacctggagggttcatcccgagggccggtgtcggagaagatcttccttgacttgtccccactgcctgaaacagagcaacacctttgatcctttcctgtgtgtgtccctacctatccccttgcgccagacgaggttcttgagtgtcaccttggtcttcccctctaagagccagcggttcctgcgggttggcctggccgtgccgatcctcagcacagtggcagccctgaggaagatggttgcagaggaaggaggcgtccctgcagatgaggtgatcttggttgaactgtatcccagtggattccagcggtctttctttgatgaagaggacctgaataccatcgcagagggagataatgtgtatgcctttcaagttcctccctcacccagccaggggactctctcagctcatccactgggtctgtcggcctccccacgcctggcagcccgtgagggccagcgattctccctctctctccacagtgagagcaaggtgctaatcctcttctgtaacttggtggggtcagggcagcaggctagcaggtttgggccacccttcctgataagggaagacagagctgtttcctgggcccagctccagcagtctatcctcagcaaggtccgccatcttatgaagagtgaggcccctgtacagaacctggggtctctgttctccatccgtgttgtgggactctctgtggcctgcagctatttgtctccgaaggacagtcggcccctctgtcactgggcagttgacagggttttgcatctcaggaggccaggaggccctccacatgtcaagctggcggtggagtgggatagctctgtcaaggagcgcctgttcgggagcctccaggaggagcgagcgcaggatgccgacagtgtgtggcagcagcagcaggcgcatcagcagcacagctgtaccttggatgaatgttttcagttctacaccaaggaggagcagctggcccaggatgacgcctggaagtgtcctcactgccaagtcctgcagcaggggatggtgaagctgagtttgtggacgctgcctgacatcctcatcatccacctcaaaaggttctgccaggtgggcgagagaagaaacaagctctccacgctggtgaagtttccgctctctggactcaacatggctccccatgtggcccagagaagcaccagccctgaggcaggactgggcccctggccttcctggaagcagccggactgcctgcccaccagttacccgctggacttcctgtacgacctgtatgccgtctgcaaccaccatggcaacctgcaaggtgggcattacacagcctactgccggaactctctggatggccagtggtacagttatgatgacagcacggtggaaccgcttcgagaagatgaggtcaacaccagaggggcttatatcctgttctatcagaagcggaacagcatccctccctggtcagccagcagctccatgagaggctctaccagctcctccctgtctgatcactggctcttacggctcgggagccacgctggcagcacaaggggaagcctgctgtcctggagctctgccccctgcccctccctgccccaggttcctgactctcccatcttcaccaacagcctctgcaatcaggaaaagggagggttggagcccaggcgtttggtacggggcgtgaaaggcagaagcattagcatgaaggcacccaccacttcccgagccaagcagggaccattcaagaccatgcctctgcggtggtcctttggatccaaggagaaaccaccaggtgcctccgtcgagttggtggagtacttggaatccagacgaagacctcggtccacgagccagtccattgtgtcgctgttgacgggcactgcgggtgaggatgagaagtcagcatcgccgaggtccaacgtcgcccttcctgctaacagcgaagatggtgggcgggccattgaaagaggtccagccggggtgccctgtccctcggctcaacccaaccactgtctggcccctggaaactcagatggtccaaacacagcaaggaaactcaaggaaaatgcagggcaggacatcaagcttcccagaaagtttgacctgcctctcactgtgatgccttcagtggagcatgagaaaccagctcgaccggagggccagaaggccatgaactggaaggagagcttccagatgggaagcaaaagcagcccaccctccccctatatgggattctctggaaacagcaaagacagtcgccgaggcacctctgagctagacagacccctgcaggggacactcacccttctgaggtccgtgtttcggaagaaggagaacaggaggaatgagagggcagaggtctctccacaggtgccccccgtctccctggtgagtggcgggctgagccctgccatggacgggcaggctccaggctcacctcctgccctcaggatcccagagggcctggccaggggcctgggcagccggctcgagagggatgtctggtcagcccccagctctctccgcctccctcgtaaagccagcagggccccgagaggcagtgcactgggcatgtcacaaaggactgttccaggggagcaggcttcttatggcacctttcagagagtcaaatatcacactctttctttaggtcgaaagaaaaccttaccggagtccagcttttgatggagcgtgtcagtattgtgtgacgctggcattcttgggactttgccaagcaactgtaggcagctcatgttgagaatgggtttccaggaaacccgttgtcttgtaatctctaaaaaaaaatttttttttttttgtggtggggggtctccatatctagacttccaacacccaaggtccatataacccaaggtcgaaaaccttcctgcatcattgggtgctttgctacagtttggccactagaggatgctattgggtcagtattaccagtttcagggcaagaactgatatttactaaagagttttggatgtgggcaaacaagatgaggctggtttaataagaatcttcaatgtcatgtcaaatactgtcaatggcttttcctttttctttcttttttttttttaaattgtggacttaaagaaaaatattttatttttaatgcttttctgggataagcattaaagatgccaaaaagaaaaaaaaaacaaaagaatgatagtgatggtaaggcaagattctagcaaagagagatgggagataaatggctgagagttcaggtgaatatttaatatattaaaaattgtattaaagtttttcaaggtattttaaaaataactattttgatactagaaaaaaagtccattttttaatttaaatatgagatctatgtacaattttaataaaatcctgtccatg

SEQ ID NO: 22901 - DNA, 711 bp, Homo sapiens
  misc_feature 1..711: note = ENST00000575346
  source 1..711: mol_type = unassigned DNA; mol_type = unassigned DNA
ttcttttcggagctgaaaacagagtgacaaggagtctgccattttaataactgggcacagagtattccaggcagaggacacagcacaggcaaagggccagaagtgggaataatcctggcaagttcaaggaatggaaagcccaagatcttccttgacttgtccccactgcctgaaacagagcaacacctttgatcctttcctgtgtgtgtccctacctatccccttgcgccagacgaggttcttgagtgtcaccttggtcttcccctctaagagccagcggttcctgcgggttggcctggccgtgccgatcctcagcacagtggcagccctgaggaagatggttgcagaggaaggaggcgtccctgcagatgaggtgatcttggttgaactgtatcccagtggattccagcggtctttctttgatgaagaggacctgaataccatcgcagagggagataatgtgtatgcctttcaagttcctccctcacccagccaggggactctctcagctcatccactgggtctgtcggcctccccacgcctggcagcccgtgagggccagcgattctccctctctctccacagtgagagcaaggtgctaatcctcttctgtaacttggtggggtcagggcagcaggctagcaggtttgggccacccttcctgataagggaagacagagctgtttcctgggcccagctccagcagtctat

SEQ ID NO: 22902 - DNA, 2641 bp, Homo sapiens
  misc_feature 1..2641: note = ENST00000573955
  source 1..2641: mol_type = unassigned DNA; mol_type = unassigned DNA
gcagcctgttcgggagcctccaggaggagcgagcgcaggatgccgacagtgtgtggcagcagcagcaggcgcatcagcagcacagctgtaccttggatgaatgttttcagttctacaccaaggaggagcaggtcccgccctgggggtccatgccccggccgggaagggggctggctgcctttggtgggttggccacgtgctgcgggggcctcacagtccgggtggtttgctttccagctggcccaggatgacgcctggaagtgtcctcactgccaagtcctgcagcaggggatggtgaagctgagtttgtggacgctgcctgacatcctcatcatccacctcaaaaggttctgccaggtgggcgagagaagaaacaagctctccacgctggtgaagtttccgctctctggactcaacatggctccccatgtggcccagagaagcaccagccctgaggcaggactgggcccctggccttcctggaagcagccggactgcctgcccaccagttacccgctggacttcctgtacgacctgtatgccgtctgcaaccaccatggcaacctgcaaggtgggcattacacagcctactgccggaactctctggatggccagtggtacagttatgatgacagcacggtggaaccgcttcgagaagatgaggtcaacaccagaggggcttatatcctgttctatcagaagcggaacagcatccctccctggtcagccagcagctccatgagaggctctaccagctcctccctgtctgatcactggctcttacggctcgggagccacgctggcagcacaaggggaagcctgctgtcctggagctctgccccctgcccctccctgccccaggttcctgactctcccatcttcaccaacagcctctgcaatcaggaaaagggagggttggagcccaggcgtttggtacggggcgtgaaaggcagaagcattagcatgaaggcacccaccacttcccgagccaagcagggaccattcaagaccatgcctctgcggtggtcctttggatccaaggagaaaccaccaggtgcctccgtcgagttggtggagtacttggaatccagacgaagacctcggtccacgagccagtccattgtgtcgctgttgacgggcactgcgggtgaggatgagaagtcagcatcgccgaggtccaacgtcgcccttcctgctaacagcgaagatggtgggcgggccattgaaagaggtccagccggggtgccctgtccctcggctcaacccaaccactgtctggcccctggaaactcagatggtccaaacacagcaaggaaactcaaggaaaatgcagggcaggacatcaagcttcccagaaagtttgacctgcctctcactgtgatgccttcagtggagcatgagaaaccagctcgaccggagggccagaaggccatgaactggaaggagagcttccagatgggaagcaaaagcagcccaccctccccctatatgggattctctggaaacagcaaagacagtcgccgaggcacctctgagctagacagacccctgcaggggacactcacccttctgaggtccgtgtttcggaagaaggagaacaggaggaatgagagggcagaggtctctccacaggtgccccccgtctccctggtgagtggcgggctgagccctgccatggacgggcaggctccaggctcacctcctgccctcaggatcccagagggcctggccaggggcctgggcagccggctcgagagggatgtctggtcagcccccagctctctccgcctccctcgtaaagccagcagggccccgagaggcagtgcactgggcatgtcacaaaggactgttccaggggagcaggcttcttatggcacctttcagagagtcaaatatcacactctttctttaggtcgaaagaaaaccttaccggagtccagcttttgatggagcgtgtcagtattgtgtgacgctggcattcttgggactttgccaagcaactgtaggcagctcatgttgagaatgggtttccaggaaacccgttgtcttgtaatctctaaaaaaaaatttttttttttttgtggtggggggtctccatatctagacttccaacacccaaggtccatataacccaaggtcgaaaaccttcctgcatcattgggtgctttgctacagtttggccactagaggatgctattgggtcagtattaccagtttcagggcaagaactgatatttactaaagagttttggatgtgggcaaacaagatgaggctggtttaataagaatcttcaatgtcatgtcaaatactgtcaatggcttttcctttttctttcttttttttttttaaattgtggacttaaagaaaaatattttatttttaatgcttttctgggataagcattaaagatgccaaaaagaaaaaaaaaacaaaagaatgatagtgatggtaaggcaagattctagcaaagagagatgggagataaatggctgagagttcaggtgaatatttaatatattaaaaattgtattaaagtttttcaaggtattttaaaaataactattttgatactagaaaaaaagtccattttttaatttaaatatgagatctatgtacaattttaataaaatcctgtccatg

SEQ ID NO: 22903 - DNA, 10036 bp, Homo sapiens
  misc_feature 1..10036: note = ENST00000338981
  source 1..10036: mol_type = unassigned DNA; mol_type = unassigned DNA
tgaataattgaactttgtttatttctccatatttttgcagtggtaattccattataaaacctaatgaaacaatgtttttatagatggtgtggaaagacttttctgggctcagaggtgaaactgacccttgtgtatcagcagcatttctgactgactgagagagtgtagtgattaacagagttgtgatgttagttaagaaacttagatttgccattgtagcttttctaccaattagcagattgtttaactcactgaaattgtaaagtggtagacgtggacttagtcattactgggcagcttatgaattgtattcatttactcatgatgtaaaaatggttagtctccacttttaaggctctagttctagtggctaaataggtacttatttatacagtatgataactgctgtattaaaatacatgtctcaaatgtggaatagtagaagaggtgaagaaaatcatagtttgaggtagaatactgtttgctggtcttaaaaactgtggtattttggtgattccataaattaggtcagatacttccactggagggaaacagtttaaaggatatatgtgatactattaatagaatgaggaagacacaccagatatttaggagggaattagcgagcttgaaactaagagctggtttgaatgagactgggtcataagtgatttcaagtaccagattaaggcactgagattttatttttaagcactgaagtcagattttttccttttaaaagaaaggattcatgatgaaatctgctttttgttttgcagagagcttggagataattctggtggctgtgtggagtatgtgttggaggtattaaattttcacagtatatataaggcagcaattgataggcctttcacagattcttctgataactacataaagagacaaaaaaaagaaaaaagagcaaagatctgtgctgtgtcaagtatgacagccatcactcatggctctccagtaggagggaacgacagccagggccaggttcttgatggccagtctcagcatctcttccaacagaaccagacttcatcacctgattcttccaatgagaattccgtagcaactcctcctccagaggaacaagggcaaggtgatgccccaccacagcatgaagatgaagagcctgcatttccacatactgagctggcaaacctggatgacatgatcaacaggcctcgatgggtggttcctgttttgccaaaaggggaattagaagtgcttttagaagctgctattgatcttagtgtaaaaggccttgatgttaaaagtgaagcatgccaacgtttttttcgagatggactaacaatatctttcactaaaattcttatggatgaggctgtgagtggctggaagtttgaaattcatagatgtattattaacaatactcatcgcctagtggagctttgtgtggccaagttgtcccaagattggtttccacttctagaacttctcgccatggccttaaatcctcactgcaagtttcatatctacaatggtacacgtccgtgtgaattaatttcctcaaatgctcagttgcctgaagatgaattatttgctcgttcttcagatcctcgatcaccaaaaggttggctagtggatctcatcaataaatttggcacattaaatgggttccagattttgcatgatcgtttttttaatggatcagcattaaatattcaaataattgcagctcttattaaaccatttggacaatgctatgagtttctcagtcaacatacactgaaaaagtacttcattccagttatagaaatagttccacatttattggaaaacttaactgatgaagaactgaaaaaggaggcaaagaatgaagccaaaaatgatgccctttcaatgattattaaatctttgaagaacttagcttcaagaatttcaggacaagatgagactataaaaaatttggaaatttttaggttaaagatgatactcagattgttgcaaatttcctcttttaatggaaagatgaatgcactgaatgaaataaataaggttatatctagtgtatcatattatactcatcggcatagtaatcctgaggaggaagaatggctgacagctgagcgaatggcagaatggatacagcaaaataatatcttatccatagtcttgcaagacagtcttcatcaaccacaatatgtagaaaagctagagaaaattcttcgttttgtgattaaagaaaaggctcttacattacaggaccttgataatatctgggcagcacaggcaggaaaacatgaagccattgtgaagaatgtacatgatctgctagcaaagttggcttgggatttttctcctggacaacttgatcatctttttgattgctttaaggcaagttggacaaatgcaagtaaaaagcaacgtgaaaagctccttgagttgatacgccgtcttgcagaagatgataaagatggtgtgatggcacacaaagtgttgaaccttctttggaacctggctcagagtgatgatgtgcctgtagacatcatggaccttgctcttagtgcccacataaaaatactagattatagttgttcccaggatcgagatgcacagaagatccagtggatagatcactttatagaagaacttcgcacaaatgacaagtgggtaattcctgctctgaaacaaataagagaaatttgtagtttgtttggtgaagcatctcaaaatttgagtcaaactcagcgaagtccccacatattttatcgccatgatttaatcaaccagcttcaacaaaatcatgctttagttactttggtagcagaaaaccttgcaacctacatgaatagcatcagattgtatgctggagatcatgaagactatgatccacaaacagtgaggcttggaagtcgatacagtcatgttcaagaagttcaagaacgactaaacttccttagatttttactgaaggatggccaactgtggctctgtgctcctcaggcaaaacaaatatggaagtgcttagcagaaaatgcagtttatctttgtgatcgtgaagcctgttttaagtggtattccaagttaatgggggatgaaccagacttggatcctgatattaataaggacttctttgaaagtaatgtacttcagcttgatccttcccttttaactgaaaatggaatgaaatgctttgaaagatttttcaaagctgtcaattgtcgagaaaggaaactaatagcaaaaagaagatcctatatgatggatgatttggaattaattggactagactacctttggagggttgtgattcagagtagtgacgagattgctaacagagctatagatcttcttaaagagatatacacaaaccttggcccaagattaaaagccaatcaggtggttatccatgaagacttcattcagtcttgctttgatcgtttaaaagcatcatatgatacactgtgtgtttttgatggtgacaaaaacagcattaattgtgcaagacaagaagccattcgaatggttagagtattaactgttataaaagagtacattaatgaatgtgacagtgattatcacaaggaaagaatgattctacctatgtcgagagcatttcgtggcaaacacctctctcttatagttcggtttccaaaccagggcagacaggttgatgagttggatatatggtctcatacgaatgacacaattggttcagtacggcgatgtattgttaatcgtattaaagccaatgtagcccacaaaaaaattgaactttttgtgggtggtgagctgatagattctgaagatgacagaaagctaattggacaattaaacttaaaagataaatctctaattacagccaaacttacacaaataaatttcaatatgccatcaagtcctgatagctcttccgattcctcaactgcatctcctggaaaccaccgtaatcattacaatgatggtcccaatctagaggtggaaagttgtttgcctggggtgataatgtcagtgcatcccagatacatctctttcctttggcaagttgcagacttaggtagcaacctgaatatgccacctcttagagatggagcaagagtacttatgaaacttatgccaccagatagaacagctgtagaaaaattacgagctgtttgtttggaccatgcaaaacttggagaaggcaaacttagtccaccccttgactctcttttctttggtccttctgcctcccaagttctatacctaacagaggtagtttatgccttgttaatgcctgctggtgtgcctctaactgatgggtcctctgactttcaagttcacttcttgaaaagtggtggcttacctcttgtactgagtatgctaataagaaataacttcttgccaaatacagatatggaaactcgaaggggtgcttatttaaatgctcttaaaatagccaaactgttgttaactgcgattggctatggccatgttcgagctgtagcagaagcttgtcagccagttgtagatggtacagaccccataacacagattaaccaagttactcatgatcaagcagtggtgctacaaagtgcccttcagagcattcctaatccctcatccgagtgcgtacttagaaatgagtccatacttcttgctcaggaaatatctaatgaggcttcaagatatatgcctgatatttgtgtaattagggctatacagaaaattatctgggcatcagcatgtggggcattaggactagtttttagcccaaatgaagaaataactaaaatttatcagatgaccaccaatggaagcaataagctggaggtggaagatgaacaagtttgctgtgaagcactggaagtgatgaccttatgttttgctttacttccaacagcgttggatgcacttagtaaagaaaaagcctggcagaccttcatcattgacttattattgcactgtccaagcaaaactgttcgtcagttggcacaggagcagttctttttaatgtgcaccagatgttgcatgggacacaggcctctgcttttcttcattactttactctttaccatactggggagcacagcaagagagaagggtaaatattcaggtgattatttcacacttttacggcaccttctcaattatgcttacaatggcaatattaacatacccaatgctgaagttcttcttgtcagtgaaattgattggctcaaaaggattagggataatgttaaaaacacaggtgaaacaggtgtcgaagagccaatactggaaggccaccttggggtaacaaaagagttattggcctttcaaacttctgagaaaaagtatcactttggttgtgaaaaaggaggtgctaatctcattaaagaattaattgatgatttcatctttcccgcatccaaagtttacctgcagtatttaagaagtggagaactaccagctgagcaggctattccagtctgtagttcacccgttaccatcaatgccggttttgagctacttgtagcattagctattggctgtgtgaggaatctcaaacagatagtagactgtttgactgaaatgtattacatgggcacagcaattactacttgtgaagcacttactgagtgggaatatctgccccctgttggaccccgcccaccaaaaggatttgtgggactcaaaaatgctggtgctacgtgttacatgaactctgtgatccagcagctatacatgattccttctatcaggaacagtattcttgcaattgaaggcacaggtagtgatttacacgatgatatgttcggggatgagaagcaggacagtgagagtaatgttgatccccgagatgatgtatttggatatcctcatcaatttgaagacaagccagcattaagtaagacagaagataggaaagagtataatattggtgtcctaagacaccttcaggtcatctttggtcatttagctgcttcccaactacaatactatgtacccagaggattttggaaacagttcaggctttggggtgaacctgttaatctccgtgaacaacatgatgccttagagttttttaattctttggtggatagtttagatgaagctttaaaagctttaggacacccggctatactaagtaaagtcctaggaggctcctttgctgatcagaagatctgccaaggctgcccacataggtatgaatgtgaagaatcttttacaactttgaatgtggatattagaaatcatcaaaatcttcttgactctttggaacagtatatcaaaggagatttattggaaggtgcaaatgcatatcattgtgaaaaatgtgataaaaaggttgacacagtaaagcgcctgctaattaaaaaattgcctcgggttcttgctatccaactcaaacgatttgactatgactgggaaagagaatgtgcaattaaattcaatgattattttgaatttcctcgagagctggatatgggaccttacacagtagcaggtgttgcaaacctggaaagggataatgtaaactcagaaaatgagttgattgaacagaaagagcagtctgacaatgaaactgcaggaggcacaaagtacagacttgtaggagtgcttgtacacagtggtcaagcaagcggtgggcattattattcttacatcattcaaaggaatggtaaagatgatcagacagatcactggtataaatttgatgatggagatgtaacagaatgcaaaatggatgatgatgaagaaatgaaaaatcagtgttttggtggagagtacatgggagaagtatttgatcacatgatgaagcgcatgtcatataggcgacagaagaggtggtggaatgcttacatacttttttatgaacaaatggatatgatagatgaagatgatgagatgataagatacatatcagagctaactattgcaagaccccatcagatcattatgtcaccagccattgagagaagtgtacggaaacaaaatgtgaaatttatgcataaccgattgcaatatagtttagagtattttcagtttgtgaaaaaactgcttacatgtaatggtgtttatttaaaccctgctccagggcaggattatttgttgcctgaagcagaagaaattactatgattagtattcagcttgctgctagattcctctttaccactggatttcacaccaagaaaatagttcgtggtcctgccagtgactggtatgatgcactgtgcgttcttctccgtcacagcaaaaatgtacgtttttggtttactcataatgtcctttttaatgtatcaaatcgcttctctgaataccttctggagtgccctagtgcagaagtgaggggtgcatttgcaaaacttatagtgtttattgcacacttttccttgcaagatgggtcttgtccttctccttttgcatctccaggaccttctagtcaggcatgtgataacttgagcttgagtgaccacttactaagagccacactaaatctcttgagaagggaagtttcagagcatggacatcatttacagcaatattttaatttgtttgtaatgtatgccaatttaggtgtggcagaaaaaacacagcttctgaaattgaatgtacctgctacctttatgcttgtgtctttagacgaaggaccaggtcctccaatcaaatatcagtatgctgaattaggcaagttatattcagtagtgtctcagctgattcgttgttgcaatgtgtcatcaacaatgcagtcttcaatcaatggtaatccccctctccccaatcctttcggtgaccttaatttatcacagcctataatgccaattcagcagaatgtgttagacattttatttgtgagaacaagttatgtgaagaaaattattgaagactgcagtaactcagaggataccatcaaattacttcgcttttgctcttgggagaatcctcagttctcatctactgtcctcagcgaacttctctggcaggttgcatattcatatacctatgaacttcggccatatttagatctacttttccaaattttactgattgaggactcctggcagactcacagaattcataatgcacttaaaggaattccagatgacagagatgggctgttcgatacaatacagcgctcgaagaatcactatcaaaaacgagcatatcagtgcataaaatgtatggtagctctatttagcagttgtcctgttgcttaccagatcttacagggtaacggagatcttaaaagaaaatggacctgggcagtggaatggctaggagatgaacttgaaagaagaccatatactggcaatcctcagtatagttacaacaattggtctcctccagtacaaagcaatgaaacagcaaatggttatttcttagaaagatcacatagtgctaggatgacacttgcaaaagcttgtgaactctgtccagaagaggagccagatgaccaggatgccccagatgagcatgagccctctccatcagaagatgccccattatatcctcattcacctgcctctcagtatcaacagaataatcatgtacatggacagccatatacaggaccagcagcacatcacttgaacaaccctcagaaaacaggccaacgaacacaagaaaattatgaaggcaatgaagaagtatcctcacctcagatgaaggatcagtgaaaagcaataattaactgcttcctttatgactatgcactaaggtcttatagtccaaactttctctgtgtctggctagtattgaaaactagataaactgctccaaaccaacatggagtaaagagcatattcactggtttatttgcagtaatttgcaatttgtcagtgtataagacacatgcagggtgaagtgtacagagttttgtaacaaatgactggtcctaatctgtaaatgagaaaggtatatatactatgttaatgtctgactgttaattcttaagcaagaaactttttttgatgaaaacaagtcagatctacacagtcacacaattattttttgttgtgttcactacattgtgcaattgatattgcctgctttgagcagtttggtcaacttaccaacttccccccaaaaaagggaacataaaagagcccatctttgtcagtttacaccaatagtttcttgttaatccttctttcctggatatataaggctggtggtaacttttgaattatatggttgatgtggaaaattggcagtgtaacatttctagatacttttcattacctttttattctggtatataggctaaccactttaaagctattcttatgctgtaacagttagcatggcttcacactgtttgtgtagccaagaggacagaattacatgaatgacagtgcccagagtgacagctgtatattgctcagagcttttatttcttatacctagaataaatataaaatgggggaaaaatgtgacagacaagcagtttttcattgcacacatattcttcacatttaatgtttgatagttcaatttcttgagctgaagaatatcaaagtatcgataatacgaattttaaaatattaaaaccaatacacaaaattttcctatgtcagaatgtggtggagcataatagattgtatttggtgtgcttgcgattttttttttccatagaatttattaagtgaagtttctaaaactttgcttctcctgatcccggtgaagtgtacatcataagaatccatagtactttgaagtaccattgcaccaagatgtctgactgaattcatagtcacacttttatttgaaagaaagaattgttgtagttttttttcattattctaaaactcttgttgttagatacaagatttaattaagatctaagctcctgcttatttaatgtaattctaaggtaccattttagaaaaaacatttgttttaagattccaagaaacctgtgagttaatactatatttaaaagagaattggtaaattttgaatgtgtgtaatattttggaacctgtttaaaaaccaaatatacctgcaaatagatacagcctatcctatactatttaaatgtttggctgttttgttttatagaaattattttgctgaattcacaaataaaatttaagaaga

SEQ ID NO: 22904 - DNA, 787 bp, Homo sapiens
  misc_feature 1..787: note = ENST00000493168
  source 1..787: mol_type = unassigned DNA; mol_type = unassigned DNA
ggagtatgtgttggaggataactacataaagagacaaaaaaaagaaaaaagagcaaagatctgtgctgtgtcaagtatgacagccatcactcatggctctccagtaggagggaacgacagccagggccaggttcttgatggccagtctcagcatctcttccaacagaaccagacttcatcacctgattcttccaatgagaattccgtagcaactcctcctccagaggaacaagggcaaggtgatgccccaccacagcatgaagatgaagagcctgcatttccacatactgagctggcaaacctggatgacatgatcaacaggtgcatttgtttggatttgttttattaatggatgcagtaaactagaaaagcaaaactacttccagcattgcaactagtagtaaatgagaaaaagaaaagagtagattgtagtgtctcaagtcttactattttaatagcctgaacattttagtcctagctgaacactttgcagctcattgtacttaatgcaggcatttcttatggattttaaatattggaaggtaatgacaatatgaatacagtttcagattaatgatgctttatgaacccttcctgtgtttctagcctagacaaataggtaggtattttgttttgaatgtttacaaacatttctctttgataagaactttataccagagttctggagaacttttctcacttgtggaatgtccatttgctacagcagagaccttattgcagaaggttgtattgcttctttctctgttttgtttagcggttgctgatt

SEQ ID NO: 22905 - DNA, 9118 bp, Homo sapiens
  misc_feature 1..9118: note = ENST00000426564
  source 1..9118: mol_type = unassigned DNA; mol_type = unassigned DNA
gctgtgtcaagtatgacagccatcactcatggctctccagtaggagggaacgacagccagggccaggttcttgatggccagtctcagcatctcttccaacagaaccagacttcatcacctgattcttccaatgagaattccgtagcaactcctcctccagaggaacaagggcaaggtgatgccccaccacagcatgaagatgaagagcctgcatttccacatactgagctggcaaacctggatgacatgatcaacaggcctcgatgggtggttcctgttttgccaaaaggggaattagaagtgcttttagaagctgctattgatcttagtgtaaaaggccttgatgttaaaagtgaagcatgccaacgtttttttcgagatggactaacaatatctttcactaaaattcttatggatgaggctgtgagtggctggaagtttgaaattcatagatgtattattaacaatactcatcgcctagtggagctttgtgtggccaagttgtcccaagattggtttccacttctagaacttctcgccatggccttaaatcctcactgcaagtttcatatctacaatggtacacgtccgtgtgaattaatttcctcaaatgctcagttgcctgaagatgaattatttgctcgttcttcagatcctcgatcaccaaaaggttggctagtggatctcatcaataaatttggcacattaaatgggttccagattttgcatgatcgtttttttaatggatcagcattaaatattcaaataattgcagctcttattaaaccatttggacaatgctatgagtttctcagtcaacatacactgaaaaagtacttcattccagttatagaaatagttccacatttattggaaaacttaactgatgaagaactgaaaaaggaggcaaagaatgaagccaaaaatgatgccctttcaatgattattaaatctttgaagaacttagcttcaagaatttcaggacaagatgagactataaaaaatttggaaatttttaggttaaagatgatactcagattgttgcaaatttcctcttttaatggaaagatgaatgcactgaatgaaataaataaggttatatctagtgtatcatattatactcatcggcatagtaatcctgaggaggaagaatggctgacagctgagcgaatggcagaatggatacagcaaaataatatcttatccatagtcttgcaagacagtcttcatcaaccacaatatgtagaaaagctagagaaaattcttcgttttgtgattaaagaaaaggctcttacattacaggaccttgataatatctgggcagcacaggcaggaaaacatgaagccattgtgaagaatgtacatgatctgctagcaaagttggcttgggatttttctcctggacaacttgatcatctttttgattgctttaaggcaagttggacaaatgcaagtaaaaagcaacgtgaaaagctccttgagttgatacgccgtcttgcagaagatgataaagatggtgtgatggcacacaaagtgttgaaccttctttggaacctggctcagagtgatgatgtgcctgtagacatcatggaccttgctcttagtgcccacataaaaatactagattatagttgttcccaggatcgagatgcacagaagatccagtggatagatcactttatagaagaacttcgcacaaatgacaagtgggtaattcctgctctgaaacaaataagagaaatttgtagtttgtttggtgaagcatctcaaaatttgagtcaaactcagcgaagtccccacatattttatcgccatgatttaatcaaccagcttcaacaaaatcatgctttagttactttggtagcagaaaaccttgcaacctacatgaatagcatcagattgtatgctggagatcatgaagactatgatccacaaacagtgaggcttggaagtcgatacagtcatgttcaagaagttcaagaacgactaaacttccttagatttttactgaaggatggccaactgtggctctgtgctcctcaggcaaaacaaatatggaagtgcttagcagaaaatgcagtttatctttgtgatcgtgaagcctgttttaagtggtattccaagttaatgggggatgaaccagacttggatcctgatattaataaggacttctttgaaagtaatgtacttcagcttgatccttcccttttaactgaaaatggaatgaaatgctttgaaagatttttcaaagctgtcaattgtcgagaaaggaaactaatagcaaaaagaagatcctatatgatggatgatttggaattaattggactagactacctttggagggttgtgattcagagtagtgacgagattgctaacagagctatagatcttcttaaagagatatacacaaaccttggcccaagattaaaagccaatcaggtggttatccatgaagacttcattcagtcttgctttgatcgtttaaaagcatcatatgatacactgtgtgtttttgatggtgacaaaaacagcattaattgtgcaagacaagaagccattcgaatggttagagtattaactgttataaaagagtacattaatgaatgtgacagtgattatcacaaggaaagaatgattctacctatgtcgagagcatttcgtggcaaacacctctctcttatagttcggtttccaaaccagggcagacaggttgatgagttggatatatggtctcatacgaatgacacaattggttcagtacggcgatgtattgttaatcgtattaaagccaatgtagcccacaaaaaaattgaactttttgtgggtggtgagctgatagattctgaagatgacagaaagctaattggacaattaaacttaaaagataaatctctaattacagccaaacttacacaaataaatttcaatatgccatcaagtcctgatagctcttccgattcctcaactgcatctcctggaaaccaccgtaatcattacaatgatggtcccaatctagaggtggaaagttgtttgcctggggtgataatgtcagtgcatcccagatacatctctttcctttggcaagttgcagacttaggtagcaacctgaatatgccacctcttagagatggagcaagagtacttatgaaacttatgccaccagatagaacagctgtagaaaaattacgagctgtttgtttggaccatgcaaaacttggagaaggcaaacttagtccaccccttgactctcttttctttggtccttctgcctcccaagttctatacctaacagaggtagtttatgccttgttaatgcctgctggtgtgcctctaactgatgggtcctctgactttcaagttcacttcttgaaaagtggtggcttacctcttgtactgagtatgctaataagaaataacttcttgccaaatacagatatggaaactcgaaggggtgcttatttaaatgctcttaaaatagccaaactgttgttaactgcgattggctatggccatgttcgagctgtagcagaagcttgtcagccagttgtagatggtacagaccccataacacagattaaccaagttactcatgatcaagcagtggtgctacaaagtgcccttcagagcattcctaatccctcatccgagtgcgtacttagaaatgagtccatacttcttgctcaggaaatatctaatgaggcttcaagatatatgcctgatatttgtgtaattagggctatacagaaaattatctgggcatcagcatgtggggcattaggactagtttttagcccaaatgaagaaataactaaaatttatcagatgaccaccaatggaagcaataagctggaggtggaagatgaacaagtttgctgtgaagcactggaagtgatgaccttatgttttgctttacttccaacagcgttggatgcacttagtaaagaaaaagcctggcagaccttcatcattgacttattattgcactgtccaagcaaaactgttcgtcagttggcacaggagcagttctttttaatgtgcaccagatgttgcatgggacacaggcctctgcttttcttcattactttactctttaccatactggggagcacagcaagagagaagggtaaatattcaggtgattatttcacacttttacggcaccttctcaattatgcttacaatggcaatattaacatacccaatgctgaagttcttcttgtcagtgaaattgattggctcaaaaggattagggataatgttaaaaacacaggtgaaacaggtgtcgaagagccaatactggaaggccaccttggggtaacaaaagagttattggcctttcaaacttctgagaaaaagtatcactttggttgtgaaaaaggaggtgctaatctcattaaagaattaattgatgatttcatctttcccgcatccaaagtttacctgcagtatttaagaagtggagaactaccagctgagcaggctattccagtctgtagttcacccgttaccatcaatgccggttttgagctacttgtagcattagctattggctgtgtgaggaatctcaaacagatagtagactgtttgactgaaatgtattacatgggcacagcaattactacttgtgaagcacttactgagtgggaatatctgccccctgttggaccccgcccaccaaaaggatttgtgggactcaaaaatgctggtgctacgtgttacatgaactctgtgatccagcagctatacatgattccttctatcaggaacagtattcttgcaattgaaggcacaggtagtgatttacacgatgatatgttcggggatgagaagcaggacagtgagagtaatgttgatccccgagatgatgtatttggatatcctcatcaatttgaagacaagccagcattaagtaagacagaagataggaaagagtataatattggtgtcctaagacaccttcaggtcatctttggtcatttagctgcttcccaactacaatactatgtacccagaggattttggaaacagttcaggctttggggtgaacctgttaatctccgtgaacaacatgatgccttagagttttttaattctttggtggatagtttagatgaagctttaaaagctttaggacacccggctatactaagtaaagtcctaggaggctcctttgctgatcagaagatctgccaaggctgcccacataggtatgaatgtgaagaatcttttacaactttgaatgtggatattagaaatcatcaaaatcttcttgactctttggaacagtatatcaaaggagatttattggaaggtgcaaatgcatatcattgtgaaaaatgtgataaaaaggttgacacagtaaagcgcctgctaattaaaaaattgcctcgggttcttgctatccaactcaaacgatttgactatgactgggaaagagaatgtgcaattaaattcaatgattattttgaatttcctcgagagctggatatgggaccttacacagtagcaggtgttgcaaacctggaaagggataatgtaaactcagaaaatgagttgattgaacagaaagagcagtctgacaatgaaactgcaggaggcacaaagtacagacttgtaggagtgcttgtacacagtggtcaagcaagcggtgggcattattattcttacatcattcaaaggaatggtaaagatgatcagacagatcactggtataaatttgatgatggagatgtaacagaatgcaaaatggatgatgatgaagaaatgaaaaatcagtgttttggtggagagtacatgggagaagtatttgatcacatgatgaagcgcatgtcatataggcgacagaagaggtggtggaatgcttacatacttttttatgaacaaatggatatgatagatgaagatgatgagatgataagatacatatcagagctaactattgcaagaccccatcagatcattatgtcaccagccattgagagaagtgtacggaaacaaaatgtgaaatttatgcataaccgattgcaatatagtttagagtattttcagtttgtgaaaaaactgcttacatgtaatggtgtttatttaaaccctgctccagggcaggattatttgttgcctgaagcagaagaaattactatgattagtattcagcttgctgctagattcctctttaccactggatttcacaccaagaaaatagttcgtggtcctgccagtgactgatgtttctgttttaggtatgatgcactgtgcgttcttctccgtcacagcaaaaatgtacgtttttggtttactcataatgtcctttttaatgtatcaaatcgcttctctgaataccttctggagtgccctagtgcagaagtgaggggtgcatttgcaaaacttatagtgtttattgcacacttttccttgcaagatgggtcttgtccttctccttttgcatctccaggaccttctagtcaggcatgtgataacttgagcttgagtgaccacttactaagagccacactaaatctcttgagaagggaagtttcagagcatggacatcatttacagcaatattttaatttgtttgtaatgtatgccaatttaggtgtggcagaaaaaacacagcttctgaaattgaatgtacctgctacctttatgcttgtgtctttagacgaaggaccaggtcctccaatcaaatatcagtatgctgaattaggcaagttatattcagtagtgtctcagctgattcgttgttgcaatgtgtcatcaacaatgcagtcttcaatcaatggtaatccccctctccccaatcctttcggtgaccttaatttatcacagcctataatgccaattcagcagaatgtgttagacattttatttgtgagaacaagttatgtgaagaaaattattgaagactgcagtaactcagaggataccatcaaattacttcgcttttgctcttgggagaatcctcagttctcatctactgtcctcagcgaacttctctggcaggttgcatattcatatacctatgaacttcggccatatttagatctacttttccaaattttactgattgaggactcctggcagactcacagaattcataatgcacttaaaggaattccagatgacagagatgggctgttcgatacaatacagcgctcgaagaatcactatcaaaaacgagcatatcagtgcataaaatgtatggtagctctatttagcagttgtcctgttgcttaccagatcttacagggtaacggagatcttaaaagaaaatggacctgggcagtggaatggctaggagatgaacttgaaagaagaccatatactggcaatcctcagtatagttacaacaattggtctcctccagtacaaagcaatgaaacagcaaatggttatttcttagaaagatcacatagtgctaggatgacacttgcaaaagcttgtgaactctgtccagaagaggagccagatgaccaggatgccccagatgagcatgagccctctccatcagaagatgccccattatatcctcattcacctgcctctcagtatcaacagaataatcatgtacatggacagccatatacaggaccagcagcacatcacttgaacaaccctcagaaaacaggccaacgaacacaagaaaattatgaaggcaatgaagaagtatcctcacctcagatgaaggatcagtgaaaagcaataattaactgcttcctttatgactatgcactaaggtcttatagtccaaactttctctgtgtctggctagtattgaaaactagataaactgctccaaaccaacatggagtaaagagcatattcactggtttatttgcagtaatttgcaatttgtcagtgtataagacacatgcagggtgaagtgtacagagttttgtaacaaatgactggtcctaatctgtaaatgagaaaggtatatatactatgttaatgtctgactgttaattcttaagcaagaaactttttttgatgaaaacaagtcagatctacacagtcacacaattattttttgttgtgttcactacattgtgcaattgatattgcctgctttgagcagtttggtcaacttaccaacttccccccaaaaaagggaacataaaagagcccatctttgtcagtttacaccaatagtttcttgttaatccttctttcctggatatataaggctggtggtaacttttgaattatatggttgatgtggaaaattggcagtgtaacatttctagatacttttcattacctttttattctggtatataggctaaccactttaaagctattcttatgctgtaacagttagcatggcttcacactgtttgtgtagccaagaggacagaattacatgaatgacagtgcccagagtgacagctgtatattgctcagagcttttatttcttatacctagaataaatataaaatgggggaaaaatgtgacagacaagcagtttttcattgcacacatattcttcacatttaatgtttgatagttcaatttcttgagctgaagaatatcaaagtatcgataatacgaattttaaaatattaaaaccaatacacaaaattttcctatgtcagaatgtggtggagcataatagattgtatttggtgtgcttgcgattttttttttccatagaatttattaagtgaagtttctaaaactttgcttctcctgatcccggtgaagtgtacatcataagaatccatagtactttgaagtaccattgcaccaagatgtctgactgaattcatagtcacacttttatttgaaagaaagaattgttgtagttttttttcattattctaaaactcttgttgttagatacaagatttaattaagatctaagctcctgcttatttaatgtaattctaaggtaccattttagaaaaaacatttgttttaagattccaagaaacctgtgagttaatactatatttaaaagagaattggtaaattttgaatgtgtgtaatattttggaacctgtttaaaaaccaaatatacctgcaaatagatacagcctatcctatactatttaaatgtttggctgttttgttttatagaaattattttgctgaattcacaaataaaatttaagaaga

SEQ ID NO: 22906 - DNA, 909 bp, Homo sapiens
  misc_feature 1..909: note = ENST00000453031
  source 1..909: mol_type = unassigned DNA; mol_type = unassigned DNA
aattattgaagactgcagtaactcagaggataccatcaaattacttcgcttttgctcttgggagaatcctcagttctcatctactgtcctcagcgaacttctctggcagaattcataatgcacttaaaggaattccagatgacagagatgggctgttcgatacaatacagcgctcgaagaatcactatcaaaaacgagcatatcagtgcataaaatgtatggtagctctatttagcagttgtcctgttgcttaccagatcttacagggtaacggagatcttaaaagaaaatggacctgggcagtggaatggctaggagatgaacttgaaagaagaccatatactggcaatcctcagtatagttacaacaattggtctcctccagtacaaagcaatgaaacagcaaatggttatttcttagaaagatcacatagtgctaggatgacacttgcaaaagcttgtgaactctgtccagaagaggagccagatgaccaggatgccccagatgagcatgagccctctccatcagaagatgccccattatatcctcattcacctgcctctcagtatcaacagaataatcatgtacatggacagccatatacaggaccagcagcacatcacttgaacaaccctcagaaaacaggccaacgaacacaagaaaattatgaaggcaatgaagaagtatcctcacctcagatgaaggatcagtgaaaagcaataattaactgcttcctttatgactatgcactaaggtcttatagtccaaactttctctgtgtctggctagtattgaaaactagataaactgctccaaaccaacatggagtaaagagcatattcactggtttatttgcagtaatttgcaatttgtcagtgtataagacacatgcagggtgaagtgtacaga

SEQ ID NO: 22907 - DNA, 2410 bp, Homo sapiens
  misc_feature 1..2410: note = ENST00000471409
  source 1..2410: mol_type = unassigned DNA; mol_type = unassigned DNA
cttgcaaaagcttgtgaactctgtccagaagaggtaaaaaaaaaaaaggctaccaatggacagcagatggaaatgggaaaaagaaaagtatttttttaatgtgtaggcccatgtttattaatattgtgcttaaaaaaatcatgtgcagttttgtttgctttagtggttagcttgatttgtttgatcttaagttaacaaaggagtttccttttggaaaaaatttctgtgaaattgtctaaaaatcacatacctgagagaattcagatattcttttgtttgttttttgtctttgtttgcttttgctttttctttttttttttgagtctcaccctattgcccaggctgctgcagcagcgtgatctcggctcactgcaacccccacctctcaggttcaagaaattcttctgcctcagcctcccgagtagctgggattacaggcagccaccaccatgcctggctaatttttgtatttttaatagagacaggatttcaccatgttggccaggctggtctcaaatcttgaccttaagtgatccacctgcctggcctcccaaagtgctgagattataagcatgagccactgcacccggcctgttttcttatattttaaattatttgcagtaaatgcaaagatgttaaagaggccagctttgtgcattttttaaaagtttattctaaatgaaggaaattaaatataaatttgaagttacttttataatctaatgcttaatctctttaaatatttaaaattaggagccagatgaccaggatgccccagatgagcatgagccctctccatcagaagatgccccattatatcctcattcacctgcctctcagtatcaacagaataatcatgtacatggacagccatatacaggaccagcagcacatcacttgaacaaccctcagaaaacaggccaacgaacacaagaaaattatgaaggcaatgaagaagtatcctcacctcagatgaaggatcagtgaaaagcaataattaactgcttcctttatgactatgcactaaggtcttatagtccaaactttctctgtgtctggctagtattgaaaactagataaactgctccaaaccaacatggagtaaagagcatattcactggtttatttgcagtaatttgcaatttgtcagtgtataagacacatgcagggtgaagtgtacagagttttgtaacaaatgactggtcctaatctgtaaatgagaaaggtatatatactatgttaatgtctgactgttaattcttaagcaagaaactttttttgatgaaaacaagtcagatctacacagtcacacaattattttttgttgtgttcactacattgtgcaattgatattgcctgctttgagcagtttggtcaacttaccaacttccccccaaaaaagggaacataaaagagcccatctttgtcagtttacaccaatagtttcttgttaatccttctttcctggatatataaggctggtggtaacttttgaattatatggttgatgtggaaaattggcagtgtaacatttctagatacttttcattacctttttattctggtatataggctaaccactttaaagctattcttatgctgtaacagttagcatggcttcacactgtttgtgtagccaagaggacagaattacatgaatgacagtgcccagagtgacagctgtatattgctcagagcttttatttcttatacctagaataaatataaaatgggggaaaaatgtgacagacaagcagtttttcattgcacacatattcttcacatttaatgtttgatagttcaatttcttgagctgaagaatatcaaagtatcgataatacgaattttaaaatattaaaaccaatacacaaaattttcctatgtcagaatgtggtggagcataatagattgtatttggtgtgcttgcgattttttttttccatagaatttattaagtgaagtttctaaaactttgcttctcctgatcccggtgaagtgtacatcataagaatccatagtactttgaagtaccattgcaccaagatgtctgactgaattcatagtcacacttttatttgaaagaaagaattgttgtagttttttttcattattctaaaactcttgttgttagatacaagatttaattaagatctaagctcctgcttatttaatgtaattctaaggtaccattttagaaaaaacatttgttttaagattccaagaaacctgtgagttaatactatatttaaaagagaattggtaaattttgaatgtgtgtaatattttggaacctgtttaaaaaccaaatatacctgcaaatagatacagcctatcctatactatttaaatgtttggctgttttgttttatagaaattattttgctgaattcacaaataaaatttaagaaga

SEQ ID NO: 22908 - DNA, 1133 bp, Homo sapiens
  misc_feature 1..1133: note = ENST00000465952
  source 1..1133: mol_type = unassigned DNA; mol_type = unassigned DNA
cccaaacccagccactcacacatggcgggctcagcagccaccggccccgcccctcctcgtcgccgcagtcgcaactgcgtctgcggccacagggcggacagccacgcctctgcggagggcgaccggaagtgctcacgtcttcaccttccccgccacgccaccgtcctttcaggcccagcgtgcagcaggaaggaggactcttttgccgcggactcaagccggaagccgccttcctagtggagacgcgagtgggggaggagcagtccgaggggaacgtgggttgaacgttgcaactagggtggagatcaagctggaacaggagttccgatcgacccggtaccaagaaggggagtgcccgcggcagaattttgattcagctaaagttccatcagatgagtattgccctgcttgtagagagaagggaaagttaaaagccttaaagacttaccgaattagttttcaagaatctatctttttgtgtgaggatctgcagtgcatctatcctttgggctctaaatcacttaataacctaatttctcctgatttggaagaatgtcacactccacataagcctcagaaaaggaagagcttagaaagcagctataaggattcacttcttttagcaaattccaaaaagactagaaattatattgctattgacggtggaaaagttttgaacagcaaacataatggagaagtatatgacgaaacctcgtcaaacttacctgatagtagtggtcaacagaatccaattaggacagctgattccttggagcggaatgagattttggaagctgatactgttgacatggctactacaaaagatcctgctacagttgatgtctctggaactggcagaccttcccctcaaaatgaaggatgtacatctaaactggaaatgccactggagagcaaatgtacatcatttccccaggctttatgtgtccagtggaaaaatgcttatgctctctgttggttagactgtatcctgtcagctttggtgcactcggaagagttaaagaacaccgtgactggactgtgctcgaaggaggaatctatattctggcggttgcttacaaaatataatcaagcaaatacacttctatataccagtcaattgagtggtgttaaag

SEQ ID NO: 22909 - DNA, 3814 bp, Homo sapiens
  misc_feature 1..3814: note = ENST00000255304
  source 1..3814: mol_type = unassigned DNA; mol_type = unassigned DNA
agggcggacagccacgcctctgcggagggcgaccggaagtgctcacgtcttcaccttccccgccacgccaccgtcctttcaggcccagcgtgcagcaggaaggaggactcttttgccgcggactcaagccggaagccgccttcctagtggagacgcgagtgggggaggagcagtccgaggggaacgtgggttgaacgttgcaactagggtggagatcaagctggaacaggagttccgatcgacccggtaccaagaaggggagtgcccgcggcagggttcattgaaaaaatccttagtgatattgacatgtctcaagtgacataaattagccaatgactcggaatgatggattctccgaagattggaaatggtttgccagtgattggaccagggactgatatagggatatcttcactccacatggtggggtatttgggaaaaaattttgattcagctaaagttccatcagatgagtattgccctgcttgtagagagaagggaaagttaaaagccttaaagacttaccgaattagttttcaagaatctatctttttgtgtgaggatctgcagtgcatctatcctttgggctctaaatcacttaataacctaatttctcctgatttggaagaatgtcacactccacataagcctcagaaaaggaagagcttagaaagcagctataaggattcacttcttttagcaaattccaaaaagactagaaattatattgctattgacggtggaaaagttttgaacagcaaacataatggagaagtatatgacgaaacctcgtcaaacttacctgatagtagtggtcaacagaatccaattaggacagctgattccttggagcggaatgagattttggaagctgatactgttgacatggctactacaaaagatcctgctacagttgatgtctctggaactggcagaccttcccctcaaaatgaaggatgtacatctaaactggaaatgccactggagagcaaatgtacatcatttccccaggctttatgtgtccagtggaaaaatgcttatgctctctgttggttagactgtatcctgtcagctttggtgcactcggaagagttaaagaacaccgtgactggactgtgctcgaaggaggaatctatattctggcggttgcttacaaaatataatcaagcaaatacacttctatataccagtcaattgagtggtgttaaagatggagattgtaaaaaacttacctcagaaatatttgcagagatagagacctgtctgaatgaagttagagatgaaatttttattagccttcagccccagcttagatgcacattaggtgatatggaaagccctgtgtttgcatttcccctgctcttaaaactagaaacccacattgaaaagctcttcctatattctttttcttgggactttgaatgttcgcagtgtggacaccaatatcaaaacaggcatatgaagagtctggtcacctttacaaatgtcatccctgagtggcacccacttaatgctgcccattttggtccatgtaacaattgcaacagtaaatcacaaataagaaaaatggtattagaaaaagtatctcccatattcatgttgcactttgtagaaggcttaccacagaatgacttgcagcactatgcatttcattttgaaggctgtctttatcagataacttctgtaattcagtatcgagcaaataatcattttataacatggattttagatgctgatggaagttggctggaatgtgatgacttaaaaggcccatgttctgaaaggcacaagaaatttgaagttcctgcttcagagatacatattgttatttgggaaagaaaaatatcccaagtgacagataaagaagctgcctgccttccacttaaaaagactaatgaccaacacgctctcagtaatgagaaaccagtatctttaacatcgtgttctgtgggtgatgctgcctcagctgaaacagcctcagtaactcaccctaaagatatatcagttgcccctcgtactctttcacaggacacagctgtaactcatggagatcatttactttcaggtccaaaaggtttggttgacaatattttacctctgacacttgaagaaactatccagaaaacagcctcagtttcacagttaaattctgaagctttcctgttagaaaataaacctgtagcagaaaatacaggaattctcaaaaccaatactttgctatcacaagaatcactaatggcttcttcagtatcagctccatgtaatgaaaagcttattcaagaccaatttgtggacataagttttccatcccaagttgtaaatacaaacatgcagtcagtacagctgaatacagaagatactgtaaatactaaatctgtgaataatactgatgctactggtcttatacagggagtgaagtcagtagaaattgagaaggacgctcagttaaaacaattccttacaccaaaaactgaacaattaaaaccagaacgtgtcacatctcaggtatctaatttgaagaaaaaagaaactacagcagattctcaaaccacaacatctaagtcattacagaatcagtctctgaaagaaaatcagaagaagccatttgtgggaagttgggttaaaggcttaataagcaggggtgcttcttttatgccactctgtgtttcagctcataatagaaacactataactgatttacaaccttcagttaaaggggtaaataattttggtggctttaaaactaaaggtataaaccagaaggccagccacgtatccaagaaagctcgtaagagtgcaagtaagcctcctcccatcagtaagccaccagcaggccctccatcgtctaatggcacagctgcccacccacatgctcatgctgcttcagaagttttggaaaagtctggaagcacctcatgtggagctcaactcaaccacagttcttatgggaatggtatttcttcagcaaaccatgaagacttggtggaaggtcagattcataaacttcgtctaaaacttcgtaaaaagctaaaggcagaaaagaagaaattagctgctcttatgtcttccccgcaaagcagaacagttcgaagtgaaaatctagaacaggtgccccaggatgggtctccaaatgattgtgaatcaatagaggacttgttaaatgagctaccatatccaattgatattgccagtgagtctgcatgcaccactgttcctggtgtttccctgtacagtagtcaaactcatgaagaaattttagcggaattattgtctcctacacctgtttcaacagagctgtcagaaaatggggaaggtgactttaggtatttgggaatgggagatagtcatatcccaccaccagtaccaagtgaattcaatgatgtttcccagaacacacatctgagacaggaccataattattgtagccccaccaagaaaaatccatgtgaagttcagccagactctctgacaaataatgcctgcgttagaacattaaacttggagagtccgatgaagactgatattttcgatgagtttttttcctcctcagcattaaatgctttagcaaatgacacattagacctacctcatttcgatgaatatctgtttgagaattattgaattaatgcttgttaacttttttcatataatatttattattattagaagaacttacaatgtgttcaggtagtgtttatacactggacttgtgtaattacttgtgtaataaccatgaacaaaatgcaaggtttaacctttggttctgcccatgaagcatgtaatctttcttacacattaaaatcactgaatgtgt

SEQ ID NO: 22910 - DNA, 4074 bp, Homo sapiens
  misc_feature 1..4074: note = ENST00000614860
  source 1..4074: mol_type = unassigned DNA; mol_type = unassigned DNA
gcgagtgggggaggagcagtccgaggggaacgtgggttgaacgttgcaactagggtggagatcaagctggaacaggagttccgatcgacccggtaccaagaaggggagtgcccgcggcagaattttgattcagctaaagttccatcagatgagtattgccctgcttgtagagagaagggaaagttaaaagccttaaagacttaccgaattagttttcaagaatctatctttttgtgtgaggatctgcagatggagattgtaaaaaacttacctcagaaatatttgcagagatagagacctgtctgaatgaagttagagatgaaatttttattagccttcagccccagcttagatgcacattaggtgatatggaaagccctgtgtttgcatttcccctgctcttaaaactagaaacccacattgaaaagctcttcctatattctttttcttgggactttgaatgttcgcagtgtggacaccaatatcaaaacaggcatatgaagagtctggtcacctttacaaatgtcatccctgagtggcacccacttaatgctgcccattttggtccatgtaacaattgcaacagtaaatcacaaataagaaaaatggtattagaaaaagtatctcccatattcatgttgcactttgtagaaggcttaccacagaatgacttgcagcactatgcatttcattttgaaggctgtctttatcagataacttctgtaattcagtatcgagcaaataatcattttataacatggattttagatgctgatggaagttggctggaatgtgatgacttaaaaggcccatgttctgaaaggcacaagaaatttgaagttcctgcttcagagatacatattgttatttgggaaagaaaaatatcccaagtgacagataaagaagctgcctgccttccacttaaaaagactaatgaccaacacgctctcagtaatgagaaaccagtatctttaacatcgtgttctgtgggtgatgctgcctcagctgaaacagcctcagtaactcaccctaaagatatatcagttgcccctcgtactctttcacaggacacagctgtaactcatggagatcatttactttcaggtccaaaaggtttggttgacaatattttacctctgacacttgaagaaactatccagaaaacagcctcagtttcacagttaaattctgaagctttcctgttagaaaataaacctgtagcagaaaatacaggaattctcaaaaccaatactttgctatcacaagaatcactaatggcttcttcagtatcagctccatgtaatgaaaagcttattcaagaccaatttgtggacataagttttccatcccaagttgtaaatacaaacatgcagtcagtacagctgaatacagaagatactgtaaatactaaatctgtgaataatactgatgctactggtcttatacagggagtgaagtcagtagaaattgagaaggacgctcagttaaaacaattccttacaccaaaaactgaacaattaaaaccagaacgtgtcacatctcaggtatctaatttgaagaaaaaagaaactacagcagattctcaaaccacaacatctaagtcattacagaatcagtctctgaaagaaaatcagaagaagccatttgtgggaagttgggttaaaggcttaataagcaggggtgcttcttttatgccactctgtgtttcagctcataatagaaacactataactgatttacaaccttcagttaaaggggtaaataattttggtggctttaaaactaaaggtataaaccagaaggccagccacgtatccaagaaagctcgtaagagtgcaagtaagcctcctcccatcagtaagccaccagcaggccctccatcgtctaatggcacagctgcccacccacatgctcatgctgcttcagaagttttggaaaagtctggaagcacctcatgtggagctcaactcaaccacagttcttatgggaatggtatttcttcagcaaaccatgaagacttggtggaaggtcagattcataaacttcgtctaaaacttcgtaaaaagctaaaggcagaaaagaagaaattagctgctcttatgtcttccccgcaaagcagaacagttcgaagtgaaaatctagaacaggtgccccaggatgggtctccaaatgattgtgaatcaatagaggacttgttaaatgagctaccatatccaattgatattgccagtgagtctgcatgcaccactgttcctggtgtttccctgtacagtagtcaaactcatgaagaaattttagcggaattattgtctcctacacctgtttcaacagagctgtcagaaaatggggaaggtgactttaggtatttgggaatgggagatagtcatatcccaccaccagtaccaagtgaattcaatgatgtttcccagaacacacatctgagacaggaccataattattgtagccccaccaagaaaaatccatgtgaagttcagccagactctctgacaaataatgcctgcgttagaacattaaacttggagagtccgatgaagactgatattttcgatgagtttttttcctcctcagcattaaatgctttagcaaatgacacattagacctacctcatttcgatgaatatctgtttgagaattattgaattaatgcttgttaacttttttcatataatatttattattattagaagaacttacaatgtgttcaggtagtgtttatacactggacttgtgtaattacttgtgtaataaccatgaacaaaatgcaaggtttaacctttggttctgcccatgaagcatgtaatctttcttacacattaaaatcactgaatgtgttctcctttttggtttcattttgttcttgtgagagtatgaggatttcaaaatgttaaagatgaaaagtggcgtctagtttctgacagtttgtacagttggatgcattacatttttagatttgaagttttggttatgttagtgttatgagtgatctttgtggtggttttcttcccctggaaacctgttgctcgtggcgctttgcccacggtgcccgagttcttgtcctgtgtccagatatgcagacaaatgaagggtgaagaagaagaagaggagctttatttagtgttagaacagctcagaaggagacccacagtgagcagctcccctgtgtcggcgggcaggtcgtccctcaagtgttcagctctcagcagagaaaaggccctggagagggtgactcctctcagctctcagcagagaagcagccctggagaaggtagcttctgttcgcaggcagattgtccagaggtcctgctgctctcagacggggccctggagaggatagcttctatccataggcaggttgttctgccgtctctacaggtctctgaagctcttagcagagagggtagctcctccctgttgctggtcgtcccaccctctgctcagttctggctgagcctggggcattttacgggcctcgggggaggaagtgcatacttactggcctggaaaaggcaccagttcccactcctacaggtgggactggcagcctggccctcagccttcaggccctccctgttcatggcttccaggcttacccccctgctttgatctgagagctggtgccaatagcagggagaagccaagctgcagaggcaagcacttccgagcctgcaaaagcaggcccccaaaagtgcagggatgcctgagtctgcacccgcacccaggagggtggagatcttgcctgctccaaggctgcagccggaatgatagcaggctgactggagcacctgccaccatcattagttcaagagtttatgcagatttaagttgtatacggtatatgaatgtgtgacagttttccttatggttgtgtggccttctgtaagagcctacgcctgtttgttacaccggtagagtgctgtggaatgtaaactttccctatgtcacttatctcctttatctctccatacagaggagggcaagaaaccttgttacttgaactttagtaatgttaagtgatcaataaatctataaataaatgatagcagaaaaaagtta

SEQ ID NO: 22911 - DNA, 6529 bp, Homo sapiens
  misc_feature 1..6529: note = ENST00000331397
  source 1..6529: mol_type = unassigned DNA; mol_type = unassigned DNA
tttgctcatcgtttgttgtttagataatatcatgaactgataaatgcagttgccacgttgattccctagggcctggcttaccgactgaggtcataagatattatgccttctctttagacttggtcagtggagaggaaatgggcaaagaaccagcctatggaggtgacaaggccttagggccaaaagtcttgagggtgaaggtttagggcctgcgcagcttccctgccatgccccgcaaggtctcgcattcgcaaggcttgtgacagtgggagcctcattacggactctcctaaagtccatggtgtcctcttttcgcatttgcgccccgtgggtgatgcccgatgccgcccttcccatcgctctcttccccttcaagcgtatcgcaactgcaaaaacacccagcacagacactccattttctatcttaatgcatttaactagcacaacctacaggttgttccatcccagagactacccttttctccatagacgtgaccatcaaccaaccagcggtcagaatcagtcagcctctgtcatgttcctaggtccttggcgaactggctgggcggggtcccagcagcctaggagtacagtggagcaatgcctgacgtaagtcaacaaagatcacgtgagacgaatcagtcgcctagattggctacaactaagtggttgggagcggggaggtcgcggcggctgcgtggggttcgcccgtgacacaattacaactttgtgctggtgctggcaaagtttgtgattttaagaaattctgctgtgctctccagcactgcgagcttctgccttccctgtagtttcccagatgtgatccaggtagccgagttccgctgcccgtgcttcggtagcttaagtctttgcctcagcttttttccttgcagccgctgaggaggcgataaaattggcgtcacagtctcaagcagcgattgaaggcgtcttttcaactactcgattaaggttgggtatcgtcgtgggacttggaaatttgttgtttccatgaaatcctgcgcagtgtcgctcactaccgccgctgttgccttcggtgatgaggcaaagaaaatggcggaaggaaaagcgagccgcgagagtgaagaggagtctgttagcctgacagtcgaggaaagggaggcgcttggtggcatggacagccgtctcttcgggttcgtgaggcttcatgaagatggcgccagaacgaagaccctactaggcaaggctgttcgctgctacgaatctttaatcttaaaagctgaaggaaaagtggagtctgacttcttttgccaattaggtcacttcaacctcttgttggaagattattcaaaagcattatctgcatatcagagatattacagtttacaggctgactactggaagaatgctgcgtttttatatggccttggtttggtctacttctactacaatgcatttcattgggcaattaaagcatttcaagatgtcctttatgttgaccccagcttttgtcgagccaaggaaattcatttacgacttgggctcatgttcaaagtgaacacagactacaagtctagtttaaagcattttcagttagccttgattgactgtaatccatgtactttgtccaatgctgaaattcaatttcatattgcccatttgtatgaaacccagaggaagtatcattctgcaaaggaggcatatgaacaacttttgcagacagaaaaccttcctgcacaagtaaaagcaactgtattgcaacagttaggttggatgcatcataatatggatctagtaggagacaaagccacaaaggaaagctatgctattcagtatctccaaaagtctttggaggcagatcctaattctggccaatcgtggtattttcttggaaggtgttattcaagtattgggaaagttcaggatgcctttatatcttacaggcaatctattgataaatcagaagcaagtgcagatacatggtgttcaataggtgtgttgtatcagcagcaaaatcagcctatggatgctttacaggcatatatttgtgctgtacaattggaccatgggcatgccgcagcctggatggacctaggtactctctatgaatcctgcaatcaacctcaagatgccattaaatgctacctaaatgcagctagaagcaaacgttgtagtaatacctctacgcttgctgcaagaattaaatttctacagaatggttctgataactggaatggtggccagagtctttcacatcatccagtacagcaagtttattcgttgtgtttgacaccacagaaattacagcacttggaacaactgcgagcaaatagagataatttaaatccagcacagaagcatcagctggaacagttagaaagtcagtttgtcttaatgcagcaaatgagacacaaagaagttgctcaggtacgaactactggaattcataacggggccataactgattcatcactgcctacaaactctgtctctaatcgacaaccacatggtgctctgaccagagtatctagcgtctctcagcctggagttcgccctgcttgtgttgaaaaacttttgtccagtggagctttttctgcaggctgtattccttgtggcacatcaaaaattctaggaagtacagacactatcttgctaggcagtaattgtatagcaggaagtgaaagtaatggaaatgtgccttacctgcagcaaaatacacacactctacctcataatcatacagacctgaacagcagcacagaagagccatggagaaaacagctatctaactccgctcaggggcttcataaaagtcagagttcatgtttgtcaggacctaatgaagaacaacctctgttttccactgggtcagcccagtatcaccaggcaactagcactggtattaagaaggcgaatgaacatctcactctgcctagtaattcagtaccacagggggatgctgacagtcacctctcctgtcatactgctacctcaggtggacaacaaggcattatgtttaccaaagagagcaagccttcaaaaaatagatccttggtgcctgaaacaagcaggcatactggagacacatctaatggctgtgctgatgtcaagggactttctaatcatgttcatcagttgatagcagatgctgtttccagtcctaaccatggagattcaccaaatttattaattgcagacaatcctcagctctctgctttgttgattggaaaagccaatggcaatgtgggtactggaacctgtgacaaagtgaataatattcacccagctgttcatacaaagactgatcattctgttgcctcttcaccctcttcagccatttccacagcaacaccttctcctaaatccactgagcagagaagcataaacagtgttaccagccttaacagtcctcacagtggattacacacagtcaatggagaggggctggggaagtcacagagctctacaaaagtagacctgcctttagctagccacagatctacttctcagatcttaccatcaatgtcagtgtctatatgccccagttcaacagaagttctgaaagcatgcaggaatccaggtaaaaatggcttgtctaatagctgcattttgttagataaatgtccacctccaagaccaccaacttcaccatacccacccttgccaaaggacaagttgaatccacccacacctagtatttacttggaaaataaacgtgatgctttctttcctccattacatcaattttgtacaaatccaaaaaaccctgttacagtaatacgtggccttgctggagctcttaaattagatcttggacttttctctaccaaaactttggtagaagctaacaatgaacatatggtagaagtgaggacacagttgctgcaaccagcagatgaaaactgggatcccactggaacaaagaaaatctggcgttgtgaaagcaatagatctcatactacaattgccaaatacgcacaataccaggcttcctccttccaggaatcattgagagaagaaaatgagaaaagaacacaacacaaagatcattcagataacgaatccacatcttcagagaattctggaaggagaaggaaaggaccttttaaaaccataaaatttgggaccaacattgacctctctgataacaaaaagtggaagttgcagttacatgaactgactaaacttcctgcttttgcgcgtgtggtgtcagcaggaaatcttctaacccatgttgggcataccattctgggcatgaatacagtacaactgtatatgaaagttccagggagtcggacaccaggtcaccaagaaaataacaacttctgctctgttaacataaatattggtccaggagattgtgaatggtttgttgtacctgaagattattggggtgttctgaatgacttctgtgaaaaaaataatttgaattttttaatgagttcttggtggcccaaccttgaagatctttatgaagcaaatgtccctgtgtatagatttattcagcgacctggagatttggtctggataaatgcaggcactgtgcattgggttcaagctgttggctggtgcaataacattgcctggaatgttggtccacttacagcctgccagtataaattggcagtggaacggtatgaatggaacaaattgaaaagtgtgaagtcaccagtacccatggtgcatctttcctggaatatggcacgaaatatcaaagtctcagatccaaagctttttgaaatgattaagtattgtcttttgaaaattctgaagcaatatcagacattgagagaagctcttgttgcagcaggaaaagaggttatatggcatgggcggacaaatgatgaaccagctcattactgtagcatttgtgaggtggaggtttttaatctgctttttgtcactaatgaaagcaatactcaaaaaacctacatagtacattgccatgattgtgcacgaaaaacaagcaaaagtttggaaaattttgtggtgctcgaacagtacaaaatggaggacctaatccaagtttatgatcaatttacactagctctttcattatcatcctcatcttgatatagttccatgaatattaaatgagattatttctgctcttcaggaaatttctgcaccactggttttgtagctgtttcataaaactgttgactaaaagctatgtctatgcaaccttccaagaatagtatgtcaagcaactggacacagtgctgcctctgcttcaggacttaacatgctgatccagctgtacttcagaaaaataatattaatcatatgttttgtgtacgtatgacaaactgtcaaagtgacacagaatactgatttgaagatagccttttttatgtttctctatttctgggctgatgaattaatattcatttgtattttaaccctgcagaattttccttagttaaaaacactttcctagctggtcatttcttcataagatagcaaatttaaatctctcctcgatcagcttttaaaaaatgtgtactattatctgaggaagttttttactgctttatgtttttgtgtgttttgaggccatgatgattacatttgtggttccaaaataatttttttaaatattaatagcccatatacaaagataatggattgcacatagacaaagaaataaacttcagatttgtgatttttgtttctaaacttgatacagatttacactatttataaatacgtatttattgcctgaaaatatttgtgaatggaatgttgtttttttccagacgtaactgccattaaatactaaggagttctgtagttttaaacactactcctattacattttatatgtgtagataaaactgcttagtattatacagaaatttttattaaaattgttaaatgtttaaagggtttcccaatgtttgagtttaaaaaagactttctgaaaaaatccactttttgttcattttcaaacctaatgattatatgtattttatatgtgtgtgtatgtgtacacacatgtataatatatacagaaacctcgatatataattgtatagattttaaaagttttattttttacatctatggtagtttttgaggtgcctattataaagtattacggaagtttgctgtttttaaagtaaatgtcttttagtgtgatttattaagttgtagtcaccatagtgatagcccataaataattgctggaaaattgtattttataacagtagaaaacatatagtcagtgaagtaaatattttaaaggaaacattatatagatttgataaatgttgtttataattaagagtttcttatggaaaagagattcagaatgataacctcttttagagaacaaataagtgacttatttttttaaagctagatgactttgaaatgctatactgtcctgcttgtacaacatggtttggggtgaaggggaggaaagtattaaaaaatctatatcgctagtaaattgtaataagttctattaaaacttgtatttcatatgaaaaatttgctaatttaatattaactcatttgataataatacttgtcttttctacctctc

SEQ ID NO: 22912 - DNA, 3636 bp, Homo sapiens
  misc_feature 1..3636: note = ENST00000624098
  source 1..3636: mol_type = unassigned DNA; mol_type = unassigned DNA
atgaaatcctgcgcagtgtcgctcactaccgccgctgttgccttcggtgatgaggcaaagaaaatggcggaaggaaaagcgagccgcgagagtgaagaggagtctgttagcctgacagtcgaggaaagggaggcgcttggtggcatggacagccgtctcttcgggttcgtgaggcttcatgaagatggcgccagaacgaagaccctactaggcaaggctgttcgctgctacgaatctttaatcttaaaagctgaaggaaaagtggagtctgacttcttttgccaattaggtcacttcaacctcttgttggaagattattcaaaagcattatctgcatatcagagatattacagtttacaggctgactactggaagaatgctgcgtttttatatggccttggtttggtctacttctactacaatgcatttcattgggcaattaaagcatttcaagatgtcctttatgttgaccccagcttttgtcgagccaaggaaattcatttacgacttgggctcatgttcaaagtgaacacagactacaagtctagtttaaagcattttcagttagccttgattgactgtaatccatgtactttgtccaatgctgaaattcaatttcatattgcccatttgtatgaaacccagaggaagtatcattctgcaaaggaggcatatgaacaacttttgcagacagaaaaccttcctgcacaagtaaaagcaactgtattgcaacagttaggttggatgcatcataatatggatctagtaggagacaaagccacaaaggaaagctatgctattcagtatctccaaaagtctttggaggcagatcctaattctggccaatcgtggtattttcttggaaggtgttattcaagtattgggaaagttcaggatgcctttatatcttacaggcaatctattgataaatcagaagcaagtgcagatacatggtgttcaataggtgtgttgtatcagcagcaaaatcagcctatggatgctttacaggcatatatttgtgctgtacaattggaccatgggcatgccgcagcctggatggacctaggtactctctatgaatcctgcaatcaacctcaagatgccattaaatgctacctaaatgcagctagaagcaaacgttgtagtaatacctctacgcttgctgcaagaattaaatttctacaggctcagttgtgtaaccttccacaaagtagtctacagaataaaactaaattacttcctagtattgaggaggcatggagcctaccaatccccgcagagcttacctccaggcagggtgccatgaacacagcacagcagaatggttctgataactggaatggtggccagagtctttcacatcatccagtacagcaagtttattcgttgtgtttgacaccacagaaattacagcacttggaacaactgcgagcaaatagagataatttaaatccagcacagaagcatcagctggaacagttagaaagtcagtttgtcttaatgcagcaaatgagacacaaagaagttgctcaggggcttcataaaagtcagagttcatgtttgtcaggacctaatgaagaacaacctctgttttccactgggtcagcccagtatcaccaggcaactagcactggtattaagaaggcgaatgaacatctcactctgcctagtaattcagtaccacagggggatgctgacagtcacctctcctgtcatactgctacctcaggtggacaacaaggcattatgtttaccaaagagagcaagccttcaaaaaatagatccttggtgcctgaaacaagcaggcatactggagacacatctaatggctgtgctgatgtcaagggactttctaatcatgttcatcagttgatagcagatgctgtttccagtcctaaccatggagattcaccaaatttattaattgcagacaatcctcagctctctgctttgttgattggaaaagccaatggcaatgtgggtactggaacctgtgacaaagtgaataatattcacccagctgttcatacaaagactgatcattctgttgcctcttcaccctcttcagccatttccacagcaacaccttctcctaaatccactgagcagagaagcataaacagtgttaccagccttaacagtcctcacagtggattacacacagtcaatggagaggggctggggaagtcacagagctctacaaaagtagacctgcctttagctagccacagatctacttctcagatcttaccatcaatgtcagtgtctatatgccccagttcaacagaagttctgaaagcatgcaggaatccaggtaaaaatggcttgtctaatagctgcattttgttagataaatgtccacctccaagaccaccaacttcaccatacccacccttgccaaaggacaagttgaatccacccacacctagtatttacttggaaaataaacgtgatgctttctttcctccattacatcaattttgtacaaatccaaaaaaccctgttacagtaatacgtggccttgctggagctcttaaattagatcttggacttttctctaccaaaactttggtagaagctaacaatgaacatatggtagaagtgaggacacagttgctgcaaccagcagatgaaaactgggatcccactggaacaaagaaaatctggcgttgtgaaagcaatagatctcatactacaattgccaaatacgcacaataccaggcttcctccttccaggaatcattgagagaagaaaatgagaaaagaacacaacacaaagatcattcagataacgaatccacatcttcagagaattctggaaggagaaggaaaggaccttttaaaaccataaaatttgggaccaacattgacctctctgataacaaaaagtggaagttgcagttacatgaactgactaaacttcctgcttttgcgcgtgtggtgtcagcaggaaatcttctaacccatgttgggcataccattctgggcatgaatacagtacaactgtatatgaaagttccagggagtcggacaccaggtcaccaagaaaataacaacttctgctctgttaacataaatattggtccaggagattgtgaatggtttgttgtacctgaagattattggggtgttctgaatgacttctgtgaaaaaaataatttgaattttttaatgagttcttggtggcccaaccttgaagatctttatgaagcaaatgtccctgtgtatagatttattcagcgacctggagatttggtctggataaatgcaggcactgtgcattgggttcaagctgttggctggtgcaataacattgcctggaatgttggtccacttacagcctgccagtataaattggcagtggaacggtatgaatggaacaaattgaaaagtgtgaagtcaccagtacccatggtgcatctttcctggaatatggcacgaaatatcaaagtctcagatccaaagctttttgaaatgattaagtattgtcttttgaaaattctgaagcaatatcagacattgagagaagctcttgttgcagcaggaaaagaggttatatggcatgggcggacaaatgatgaaccagctcattactgtagcatttgtgaggctctttcattatcatcctcatcttga

SEQ ID NO: 22913 - DNA, 4990 bp, Homo sapiens
  misc_feature 1..4990: note = ENST00000362096
  source 1..4990: mol_type = unassigned DNA; mol_type = unassigned DNA
gctcatcgtttgttgtttagataatatcatgaactgataaatgcagttgccacgttgattccctagggcctggcttaccgactgaggtcataagatattatgccttctctttagacttggtcagtggagaggaaatgggcaaagaaccagcctatggaggtgacaaggccttagggccaaaagtcttgagggtgaaggtttagggcctgcgcagcttccctgccatgccccgcaaggtctcgcattcgcaaggcttgtgacagtgggagcctcattacggactctcctaaagtccatggtgtcctcttttcgcatttgcgccccgtgggtgatgcccgatgccgcccttcccatcgctctcttccccttcaagcgtatcgcaactgcaaaaacacccagcacagacactccattttctatcttaatgcatttaactagcacaacctacaggttgttccatcccagagactacccttttctccatagacgtgaccatcaaccaaccagcggtcagaatcagtcagcctctgtcatgttcctaggtccttggcgaactggctgggcggggtcccagcagcctaggagtacagtggagcaatgcctgacgtaagtcaacaaagatcacgtgagacgaatcagtcgcctagattggctacaactaagtggttgggagcggggaggtcgcggcggctgcgtggggttcgcccgtgacacaattacaactttgtgctggtgctggcaaagtttgtgattttaagaaattctgctgtgctctccagcactgcgagcttctgccttccctgtagtttcccagatgtgatccaggtagccgagttccgctgcccgtgcttcggtagcttaagtctttgcctcagcttttttccttgcagccgctgaggaggcgataaaattggcgtcacagtctcaagcagcgattgaaggcgtcttttcaactactcgattaaggttgggtatcgtcgtgggacttggaaatttgttgtttccatgaaatcctgcgcagtgtcgctcactaccgccgctgttgccttcggtgatgaggcaaagaaaatggcggaaggaaaagcgagccgcgagagtgaagaggagtctgttagcctgacagtcgaggaaagggaggcgcttggtggcatggacagccgtctcttcgggttcgtgaggcttcatgaagatggcgccagaacgaagaccctactaggcaaggctgttcgctgctacgaatctttaatcttaaaagctgaaggaaaagtggagtctgacttcttttgccaattaggtcacttcaacctcttgttggaagattattcaaaagcattatctgcatatcagagatattacagtttacaggctgactactggaagaatgctgcgtttttatatggccttggtttggtctacttctactacaatgcatttcattgggcaattaaagcatttcaagatgtcctttatgttgaccccagcttttgtcgagccaaggaaattcatttacgacttgggctcatgttcaaagtgaacacagactacaagtctagtttaaagcattttcagttagccttgattgactgtaatccatgtactttgtccaatgctgaaattcaatttcatattgcccatttgtatgaaacccagaggaagtatcattctgcaaaggaggcatatgaacaacttttgcagacagaaaaccttcctgcacaagtaaaagcaactgtattgcaacagttaggttggatgcatcataatatggatctagtaggagacaaagccacaaaggaaagctatgctattcagtatctccaaaagtctttggaggcagatcctaattctggccaatcgtggtattttcttggaaggtgttattcaagtattgggaaagttcaggatgcctttatatcttacaggcaatctattgataaatcagaagcaagtgcagatacatggtgttcaataggtgtgttgtatcagcagcaaaatcagcctatggatgctttacaggcatatatttgtgctgtacaattggaccatgggcatgccgcagcctggatggacctaggtactctctatgaatcctgcaatcaacctcaagatgccattaaatgctacctaaatgcagctagaagcaaacgttgtagtaatacctctacgcttgctgcaagaattaaatttctacagaatggttctgataactggaatggtggccagagtctttcacatcatccagtacagcaagtttattcgttgtgtttgacaccacagaaattacagcacttggaacaactgcgagcaaatagagataatttaaatccagcacagaagcatcagctggaacagttagaaagtcagtttgtcttaatgcagcaaatgagacacaaagaagttgctcaggtacgaactactggaattcataacggggccataactgattcatcactgcctacaaactctgtctctaatcgacaaccacatggtgctctgaccagagtatctagcgtctctcagcctggagttcgccctgcttgtgttgaaaaacttttgtccagtggagctttttctgcaggctgtattccttgtggcacatcaaaaattctaggaagtacagacactatcttgctaggcagtaattgtatagcaggaagtgaaagtaatggaaatgtgccttacctgcagcaaaatacacacactctacctcataatcatacagacctgaacagcagcacagaagagccatggagaaaacagctatctaactccgctcaggggcttcataaaagtcagagttcatgtttgtcaggacctaatgaagaacaacctctgttttccactgggtcagcccagtatcaccaggcaactagcactggtattaagaaggcgaatgaacatctcactctgcctagtaattcagtaccacagggggatgctgacagtcacctctcctgtcatactgctacctcaggtggacaacaaggcattatgtttaccaaagagagcaagccttcaaaaaatagatccttggtgcctgaaacaagcaggcatactggagacacatctaatggctgtgctgatgtcaagggactttctaatcatgttcatcagttgatagcagatgctgtttccagtcctaaccatggagattcaccaaatttattaattgcagacaatcctcagctctctgctttgttgattggaaaagccaatggcaatgtgggtactggaacctgtgacaaagtgaataatattcacccagctgttcatacaaagactgatcattctgttgcctcttcaccctcttcagccatttccacagcaacaccttctcctaaatccactgagcagagaagcataaacagtgttaccagccttaacagtcctcacagtggattacacacagtcaatggagaggggctggggaagtcacagagctctacaaaagtagacctgcctttagctagccacagatctacttctcagatcttaccatcaatgtcagtgtctatatgccccagttcaacagaagttctgaaagcatgcaggaatccaggtaaaaatggcttgtctaatagctgcattttgttagataaatgtccacctccaagaccaccaacttcaccatacccacccttgccaaaggacaagttgaatccacccacacctagtatttacttggaaaataaacgtgatgctttctttcctccattacatcaattttgtacaaatccaaaaaaccctgttacagtaatacgtggccttgctggagctcttaaattagatcttggacttttctctaccaaaactttggtagaagctaacaatgaacatatggtagaagtgaggacacagttgctgcaaccagcagatgaaaactgggatcccactggaacaaagaaaatctggcgttgtgaaagcaatagatctcatactacaattgccaaatacgcacaataccaggcttcctccttccaggaatcattgagagaagaaaatgagaaaagaacacaacacaaagatcattcagataacgaatccacatcttcagagaattctggaaggagaaggaaaggaccttttaaaaccataaaatttgggaccaacattgacctctctgataacaaaaagtggaagttgcagttacatgaactgactaaacttcctgcttttgcgcgtgtggtgtcagcaggaaatcttctaacccatgttgggcataccattctgggcatgaatacagtacaactgtatatgaaagttccagggagtcggacaccaggtcaccaagaaaataacaacttctgctctgttaacataaatattggtccaggagattgtgaatggtttgttgtacctgaagattattggggtgttctgaatgacttctgtgaaaaaaataatttgaattttttaatgagttcttggtggcccaaccttgaagatctttatgaagcaaatgtccctgtgtatagatttattcagcgacctggagatttggtctggataaatgcaggcactgtgcattgggttcaagctgttggctggtgcaataacattgcctggaatgttggtccacttacagcctgccagtataaattggcagtggaacggtatgaatggaacaaattgaaaagtgtgaagtcaccagtacccatggtgcatctttcctggaatatggcacgaaatatcaaagtctcagatccaaagctttttgaaatgattaagtaagtgccttctgaaactgctgcagtttctctttgggggtattggtagccattcagtatttttttcaaaagaattctgttgacattaaatgatatcagcagtccagaagtcttggcaaaatgtaataagatgtaaataatcttatatattcataagtgttataaaatctcataagattaaaatattgccttcccttacagatagtcacttgtgtttattacaatttagagaggaataaagatgtacatgaatatacactggtaaa

SEQ ID NO: 22914 - DNA, 4325 bp, Homo sapiens
  misc_feature 1..4325: note = ENST00000329134
  source 1..4325: mol_type = unassigned DNA; mol_type = unassigned DNA
gctcatcgtttgttgtttagataatatcatgaactgataaatgcagttgccacgttgattccctagggcctggcttaccgactgaggtcataagatattatgccttctctttagacttggtcagtggagaggaaatgggcaaagaaccagcctatggaggtgacaaggccttagggccaaaagtcttgagggtgaaggtttagggcctgcgcagcttccctgccatgccccgcaaggtctcgcattcgcaaggcttgtgacagtgggagcctcattacggactctcctaaagtccatggtgtcctcttttcgcatttgcgccccgtgggtgatgcccgatgccgcccttcccatcgctctcttccccttcaagcgtatcgcaactgcaaaaacacccagcacagacactccattttctatcttaatgcatttaactagcacaacctacaggttgttccatcccagagactacccttttctccatagacgtgaccatcaaccaaccagcggtcagaatcagtcagcctctgtcatgttcctaggtccttggcgaactggctgggcggggtcccagcagcctaggagtacagtggagcaatgcctgacgtaagtcaacaaagatcacgtgagacgaatcagtcgcctagattggctacaactaagtggttgggagcggggaggtcgcggcggctgcgtggggttcgcccgtgacacaattacaactttgtgctggtgctggcaaagtttgtgattttaagaaattctgctgtgctctccagcactgcgagcttctgccttccctgtagtttcccagatgtgatccaggtagccgagttccgctgcccgtgcttcggtagcttaagtctttgcctcagcttttttccttgcagccgctgaggaggcgataaaattggcgtcacagtctcaagcagcgattgaaggcgtcttttcaactactcgattaaggttgggtatcgtcgtgggacttggaaatttgttgtttccatgaaatcctgcgcagtgtcgctcactaccgccgctgttgccttcggtgatgaggcaaagaaaatggcggaaggaaaagcgagccgcgagagtgaagaggagtctgttagcctgacagtcgaggaaagggaggcgcttggtggcatggacagccgtctcttcgggttcgtgaggcttcatgaagatggcgccagaacgaagaccctactaggcaaggctgttcgctgctacgaatctttaatcttaaaagctgaaggaaaagtggagtctgacttcttttgccaattaggtcacttcaacctcttgttggaagattattcaaaagcattatctgcatatcagagatattacagtttacaggctgactactggaagaatgctgcgtttttatatggccttggtttggtctacttctactacaatgcatttcattgggcaattaaagcatttcaagatgtcctttatgttgaccccagcttttgtcgagccaaggaaattcatttacgacttgggctcatgttcaaagtgaacacagactacaagtctagtttaaagcattttcagttagccttgattgactgtaatccatgtactttgtccaatgctgaaattcaatttcatattgcccatttgtatgaaacccagaggaagtatcattctgcaaaggaggcatatgaacaacttttgcagacagaaaaccttcctgcacaagtaaaagcaactgtattgcaacagttaggttggatgcatcataatatggatctagtaggagacaaagccacaaaggaaagctatgctattcagtatctccaaaagtctttggaggcagatcctaattctggccaatcgtggtattttcttggaaggtgttattcaagtattgggaaagttcaggatgcctttatatcttacaggcaatctattgataaatcagaagcaagtgcagatacatggtgttcaataggtgtgttgtatcagcagcaaaatcagcctatggatgctttacaggcatatatttgtgctgtacaattggaccatgggcatgccgcagcctggatggacctaggtactctctatgaatcctgcaatcaacctcaagatgccattaaatgctacctaaatgcagctagaagcaaacgttgtagtaatacctctacgcttgctgcaagaattaaatttctacagaatggttctgataactggaatggtggccagagtctttcacatcatccagtacagcaagtttattcgttgtgtttgacaccacagaaattacagcacttggaacaactgcgagcaaatagagataatttaaatccagcacagaagcatcagctggaacagttagaaagtcagtttgtcttaatgcagcaaatgagacacaaagaagttgctcaggtacgaactactggaattcataacggggccataactgattcatcactgcctacaaactctgtctctaatcgacaaccacatggtgctctgaccagagtatctagcgtctctcagcctggagttcgccctgcttgtgttgaaaaacttttgtccagtggagctttttctgcaggctgtattccttgtggcacatcaaaaattctaggaagtacagacactatcttgctaggcagtaattgtatagcaggaagtgaaagtaatggaaatgtgccttacctgcagcaaaatacacacactctacctcataatcatacagacctgaacagcagcacagaagagccatggagaaaacagctatctaactccgctcaggggcttcataaaagtcagagttcatgtttgtcaggacctaatgaagaacaacctctgttttccactgggtcagcccagtatcaccaggcaactagcactggtattaagaaggcgaatgaacatctcactctgcctagtaattcagtaccacagggggatgctgacagtcacctctcctgtcatactgctacctcaggtggacaacaaggcattatgtttaccaaagagagcaagccttcaaaaaatagatccttggtgcctgaaacaagcaggcatactggagacacatctaatggctgtgctgatgtcaagggactttctaatcatgttcatcagttgatagcagatgctgtttccagtcctaaccatggagattcaccaaatttattaattgcagacaatcctcagctctctgctttgttgattggaaaagccaatggcaatgtgggtactggaacctgtgacaaagtgaataatattcacccagctgttcatacaaagactgatcattctgttgcctcttcaccctcttcagccatttccacagcaacaccttctcctaaatccactgagcagagaagcataaacagtgttaccagccttaacagtcctcacagtggattacacacagtcaatggagaggggctggggaagtcacagagctctacaaaagtagacctgcctttagctagccacagatctacttctcagatcttaccatcaatgtcagtgtctatatgccccagttcaacagaagttctgaaagcatgcaggaatccaggtaaaaatggcttgtctaatagctgcattttgttagataaatgtccacctccaagaccaccaacttcaccatacccacccttgccaaaggacaagttgaatccacccacacctagtatttacttggaaaataaacgtgatgctttctttcctccattacatcaattttgtacaaatccaaaaaaccctgttacagtaatacgtggccttgctggagctcttaaattagatcttggacttttctctaccaaaactttggtagaagctaacaatgaacatatggtagaagtgaggacacagttgctgcaaccagcagatgaaaactgggatcccactggaacaaagaaaatctggcgttgtgaaagcaatagatctcatactacaattgccaaatacgcacaataccaggcttcctccttccaggaatcattgagagctggaatgcaatggtgtgatctcagctcactgcagcctccgcctcctgggttcaagcgattctcccacctcagcctcccgaatagctggaattacaggcacctgccatcatgcccaactaatttttgtatttttgtagagacagggtttcaccatgttggccaggcttgtcttgaactcctgacctcaggtggtctgcttgcctcagcatcccaaagtgctgggattacaggtgtgagccaccatgcccggtaaacttttaaaaatgtaagcaaaattacagtatgtaaaacacacattgctaatggagaaataaagttcctactttacatcta

SEQ ID NO: 22915 - DNA, 747 bp, Homo sapiens
  misc_feature 1..747: note = ENST00000478900
  source 1..747: mol_type = unassigned DNA; mol_type = unassigned DNA
aagggaggcgcttggtggcatggacagccgtctcttcgggttcgtgaggcttcatgaagatggcgccagaacgaagaccctactaggcaaggctgttcgctgctacgaatctttaatcttaaaagctgaaggaaaagtggagtctgacttcttttgccaattaggtcacttcaacctcttgttggaagattattcaaaagcattatctgcatatcagagatattacagtttacaggctgactactggaagaatgctgcgtttttatatggccttggtttggtctacttctactacaatgcatttcattgggcaattaaagcatttcaagatgtcctttatgttgaccccagcttttgtcgagccaaggaaattcatttacgacttgggctcatgttcaaagtgaacacagactacaagtctagtttaaagcattttcagttagccttgattgactgtaatccatgtactttgtccaatgctgaaaaggaagtatcattctgcaaaggaggcatatgaacaacttttgcagacagaaaaccttcctgcacaagtaaaagcaactgtattgcaacagttaggttggatgcatcataatatggatctagtaggagacaaagccacaaaggaaagctatgctattcagtatctccaaaagtctttggaggcagatcctaattctggccaatcgtggtattttcttggaaggtgttattcaagtattgggaaagttcaggatgcctttatat

SEQ ID NO: 22916 - DNA, 1387 bp, Homo sapiens
  misc_feature 1..1387: note = ENST00000474365
  source 1..1387: mol_type = unassigned DNA; mol_type = unassigned DNA
tccatcacccgcctggttggctggcgatactctccgggaaggcctggacgcagcttgcccacgttgatgacggggtcatcctcagcttggcactcaccaatctgtcgctgtcgctcttggactcgggaaggagcaagtcactggctttctcagaccattaacaagctctgtgtctctctctctacagccgtctcttcgggttcgtgaggcttcatgaagatggcgccagaacgaagaccctactaggcaaggctgttcgctgctacgaatctttaatcttaaaagctgaaggaaaagtggagtctgacttcttttgccaattaggtcacttcaacctcttgttggaagattattcaaaagcattatctgcatatcagagatattacagtttacaggctgactactggaagaatgctgcgtttttatatggccttggtttggtctacttctactacaatgcatttcattgggcaattaaagcatttcaagatgtcctttatgttgaccccagcttttgtcgagccaaggaaattcatttacgacttgggctcatgttcaaagtgaacacagactacaagtctagtttaaagcattttcagttagccttgattgactgtaatccatgtactttgtccaatgctgaaattcaatttcatattgcccatttgtatgaaacccaggtaagtgttttaacttaagaacaagaatgaaacagtcacctatgctttagatgaaatgaaatgtacttgaaaatatcaggctttaaatgaaataaatatattagacgatttgagttgtgggtattatactcttgcatgtattttgtattctactcctcattaaatgtgtttgaaatttttagtgaacaaattgttaaagacaaatgaaggcatttgagatttgtacttaatatatatatatatagcagtttgtgtaactaccttaaactgtgtattttatttcctaaatacaatacttgctatgtatgcagtgctttgacttaatgtaatttgcctctatacctttatttagaagctttcatgtaaccctgcatgtaatgtctacttttcttttaaaattttcatgaatgattgtaataagtcactgttattgaagttttctgtttttctttaagactgaggtatcttttaagcatcataccatttcaaatgatagttaccattagttcaaggctgtttgtttttaaagttatttcagctttttaaaaaaatattttgctttgtatagcagattttattataatatttaaactgtaacatacagatttacagtttgtggtggagttggtagacttaaaaaaatgggtagcattttttcatattatgagtagctgaacattttgaatttaaattgtgaaataaagaga

SEQ ID NO: 22917 - DNA, 1539 bp, Homo sapiens
  misc_feature 1..1539: note = ENST00000382893
  source 1..1539: mol_type = unassigned DNA; mol_type = unassigned DNA
gcgtggggttcgcccgtgacacaattacaactttgtgctggtgctggcaaagtttgtgattttaagaaattctgctgtgctctccagcactgcgagcttctgccttccctgtagtttcccagatgtgatccaggtagccgagttccgctgcccgtgcttcggtagcttaagtctttgcctcagcttttttccttgcagccgctgaggaggcgataaaattggcgtcacagtctcaagcagcgattgaaggcgtcttttcaactactcgattaaggttgggtatcgtcgtgggacttggaaatttgttgtttccatgaaatcctgcgcagtgtcgctcactaccgccgctgttgccttcggtgatgaggcaaagaaaatggcggaaggaaaagcgagccgcgagagtgaagaggagtctgttagcctgacagtcgaggaaagggaggcgcttggtggcatggacagccgtctcttcgggttcgtgaggcttcatgaagatggcgccagaacgaagaccctactaggcaaggctgttcgctgctacgaatctttaatcttaaaagctgaaggaaaagtggagtctgacttcttttgccaattaggtcacttcaacctcttgttggaagattattcaaaagcattatctgcatatcagagatattacagtttacaggctgactactggaagaatgctgcgtttttatatggccttggtttggtctacttctactacaatgcatttcattgggcaattaaagcatttcaagatgtcctttatgttgaccccagcttttgtcgagccaaggaaattcatttacgacttgggctcatgttcaaagtgaacacagactacaagtctagtttaaagcattttcagttagccttgattgactgtaatccatgtactttgtccaatgctgaaagtaagtatttttaaatgaaatacttttgagtaaagaatattaatgatacctttttttctactgatacctttgtttctgttcattcttgagaagagaagtgagaaggcatgtgcctgattcagagagtttaaatcactggagttgagttgatttgggtactatttttcttgctcaaagacagtcagtattattatttgataactgtagaaatgattggtatgtcacagagcactaacaaatagtgattacctactttagtagtttttctccctttatggtgtctatgttttcatattaatgaattacttcaccttttaatattttaggatttgcacataccgtaagcttgactattttttgaaacttttttgtgtacttggtgatgttgcaaaaatcaaaagttttcaaagccaattttaaacaaaacctgaataagttaaaaatgtgtagtttaaaaaataaatactgttttttgaactctttcagatgaatgactacagttaatattttgggaaaaaaacatgtttaaaaagaatatgaaactttaaattatgtgattttcctttgtgataaaaatgttagaatattaaagaccttttatgtcaattttttacct

SEQ ID NO: 22918 - DNA, 686 bp, Homo sapiens
  misc_feature 1..686: note = ENST00000479713
  source 1..686: mol_type = unassigned DNA; mol_type = unassigned DNA
gtgattttaagaaattctgctgtgctctccagcactgcgagcttctgccttccctgtagtttcccagatgtgatccaggtagccgagttccgctgcccgtgcttcggtagcttaagtctttgcctcagcttttttccttgcagccgctgaggaggcgataaaattggcgtcacagtctcaagcagcgattgaaggcgtcttttcaactactcgattaaggttgggtatcgtcgtgggacttggaaatttgttgtttccatgaaatcctgcgcagtgtcgctcactaccgccgctgttgccttcggtgatgaggcaaagaaaatggcggaaggaaaagcgagccgcgagagtgaagaggagtctgttagcctgacagtcgaggaaagggaggcgcttggtggcatggacagccgtctcttcgggttcgtgaggcttcatgaagatggcgccagaacgaagaccctactaggcaaggtaaaagcaaccagacgcaaagtctttggtccgcactttgctctaccaaggccccgcgttccttaccgcccagccagtatttattttggctctgctccatggccaaggggtcggaaaagtgtttcttgcctttgctgtccccgtactctggaatacttcgccccttgctccagactcccttctactctgaggaaaaaaaaaatcggacgctt

SEQ ID NO: 22919 - DNA, 6574 bp, Homo sapiens
  misc_feature 1..6574: note = ENST00000538878
  source 1..6574: mol_type = unassigned DNA; mol_type = unassigned DNA
gctcatcgtttgttgtttagataatatcatgaactgataaatgcagttgccacgttgattccctagggcctggcttaccgactgaggtcataagatattatgccttctctttagacttggtcagtggagaggaaatgggcaaagaaccagcctatggaggtgacaaggccttagggccaaaagtcttgagggtgaaggtttagggcctgcgcagcttccctgccatgccccgcaaggtctcgcattcgcaaggcttgtgacagtgggagcctcattacggactctcctaaagtccatggtgtcctcttttcgcatttgcgccccgtgggtgatgcccgatgccgcccttcccatcgctctcttccccttcaagcgtatcgcaactgcaaaaacacccagcacagacactccattttctatcttaatgcatttaactagcacaacctacaggttgttccatcccagagactacccttttctccatagacgtgaccatcaaccaaccagcggtcagaatcagtcagcctctgtcatgttcctaggtccttggcgaactggctgggcggggtcccagcagcctaggagtacagtggagcaatgcctgacgtaagtcaacaaagatcacgtgagacgaatcagtcgcctagattggctacaactaagtggttgggagcggggaggtcgcggcggctgcgtggggttcgcccgtgacacaattacaactttgtgctggtgctggcaaagtttgtgattttaagaaattctgctgtgctctccagcactgcgagcttctgccttccctgtagtttcccagatgtgatccaggtagccgagttccgctgcccgtgcttcggtagcttaagtctttgcctcagcttttttccttgcagccgctgaggaggcgataaaattggcgtcacagtctcaagcagcgattgaaggcgtcttttcaactactcgattaaggttgggtatcgtcgtgggacttggaaatttgttgtttccatgaaatcctgcgcagtgtcgctcactaccgccgctgttgccttcggtgatgaggcaaagaaaatggcggaaggaaaagcgagccgcgagagtgaagaggagtctgttagcctgacagtcgaggaaagggaggcgcttggtggcatggacagccgtctcttcgggttcgtgaggcttcatgaagatggcgccagaacgaagaccctactaggcaaggctgttcgctgctacgaatctttaatcttaaaagctgaaggaaaagtggagtctgacttcttttgccaattaggtcacttcaacctcttgttggaagattattcaaaagcattatctgcatatcagagatattacagtttacaggctgactactggaagaatgctgcgtttttatatggccttggtttggtctacttctactacaatgcatttcattgggcaattaaagcatttcaagatgtcctttatgttgaccccagcttttgtcgagccaaggaaattcatttacgacttgggctcatgttcaaagtgaacacagactacaagtctagtttaaagcattttcagttagccttgattgactgtaatccatgtactttgtccaatgctgaaattcaatttcatattgcccatttgtatgaaacccagaggaagtatcattctgcaaaggaggcatatgaacaacttttgcagacagaaaaccttcctgcacaagtaaaagcaactgtattgcaacagttaggttggatgcatcataatatggatctagtaggagacaaagccacaaaggaaagctatgctattcagtatctccaaaagtctttggaggcagatcctaattctggccaatcgtggtattttcttggaaggtgttattcaagtattgggaaagttcaggatgcctttatatcttacaggcaatctattgataaatcagaagcaagtgcagatacatggtgttcaataggtgtgttgtatcagcagcaaaatcagcctatggatgctttacaggcatatatttgtgctgtacaattggaccatgggcatgccgcagcctggatggacctaggtactctctatgaatcctgcaatcaacctcaagatgccattaaatgctacctaaatgcagctagaagcaaacgttgtagtaatacctctacgcttgctgcaagaattaaatttctacagaatggttctgataactggaatggtggccagagtctttcacatcatccagtacagcaagtttattcgttgtgtttgacaccacagaaattacagcacttggaacaactgcgagcaaatagagataatttaaatccagcacagaagcatcagctggaacagttagaaagtcagtttgtcttaatgcagcaaatgagacacaaagaagttgctcaggtacgaactactggaattcataacggggccataactgattcatcactgcctacaaactctgtctctaatcgacaaccacatggtgctctgaccagagtatctagcgtctctcagcctggagttcgccctgcttgtgttgaaaaacttttgtccagtggagctttttctgcaggctgtattccttgtggcacatcaaaaattctaggaagtacagacactatcttgctaggcagtaattgtatagcaggaagtgaaagtaatggaaatgtgccttacctgcagcaaaatacacacactctacctcataatcatacagacctgaacagcagcacagaagagccatggagaaaacagctatctaactccgctcaggcctaccttggacatcttacaggtttcatacaagacaactgcaataaagggcttcataaaagtcagagttcatgtttgtcaggacctaatgaagaacaacctctgttttccactgggtcagcccagtatcaccaggcaactagcactggtattaagaaggcgaatgaacatctcactctgcctagtaattcagtaccacagggggatgctgacagtcacctctcctgtcatactgctacctcaggtggacaacaaggcattatgtttaccaaagagagcaagccttcaaaaaatagatccttggtgcctgaaacaagcaggcatactggagacacatctaatggctgtgctgatgtcaagggactttctaatcatgttcatcagttgatagcagatgctgtttccagtcctaaccatggagattcaccaaatttattaattgcagacaatcctcagctctctgctttgttgattggaaaagccaatggcaatgtgggtactggaacctgtgacaaagtgaataatattcacccagctgttcatacaaagactgatcattctgttgcctcttcaccctcttcagccatttccacagcaacaccttctcctaaatccactgagcagagaagcataaacagtgttaccagccttaacagtcctcacagtggattacacacagtcaatggagaggggctggggaagtcacagagctctacaaaagtagacctgcctttagctagccacagatctacttctcagatcttaccatcaatgtcagtgtctatatgccccagttcaacagaagttctgaaagcatgcaggaatccaggtaaaaatggcttgtctaatagctgcattttgttagataaatgtccacctccaagaccaccaacttcaccatacccacccttgccaaaggacaagttgaatccacccacacctagtatttacttggaaaataaacgtgatgctttctttcctccattacatcaattttgtacaaatccaaaaaaccctgttacagtaatacgtggccttgctggagctcttaaattagatcttggacttttctctaccaaaactttggtagaagctaacaatgaacatatggtagaagtgaggacacagttgctgcaaccagcagatgaaaactgggatcccactggaacaaagaaaatctggcgttgtgaaagcaatagatctcatactacaattgccaaatacgcacaataccaggcttcctccttccaggaatcattgagagaagaaaatgagaaaagaacacaacacaaagatcattcagataacgaatccacatcttcagagaattctggaaggagaaggaaaggaccttttaaaaccataaaatttgggaccaacattgacctctctgataacaaaaagtggaagttgcagttacatgaactgactaaacttcctgcttttgcgcgtgtggtgtcagcaggaaatcttctaacccatgttgggcataccattctgggcatgaatacagtacaactgtatatgaaagttccagggagtcggacaccaggtcaccaagaaaataacaacttctgctctgttaacataaatattggtccaggagattgtgaatggtttgttgtacctgaagattattggggtgttctgaatgacttctgtgaaaaaaataatttgaattttttaatgagttcttggtggcccaaccttgaagatctttatgaagcaaatgtccctgtgtatagatttattcagcgacctggagatttggtctggataaatgcaggcactgtgcattgggttcaagctgttggctggtgcaataacattgcctggaatgttggtccacttacagcctgccagtataaattggcagtggaacggtatgaatggaacaaattgaaaagtgtgaagtcaccagtacccatggtgcatctttcctggaatatggcacgaaatatcaaagtctcagatccaaagctttttgaaatgattaagtattgtcttttgaaaattctgaagcaatatcagacattgagagaagctcttgttgcagcaggaaaagaggttatatggcatgggcggacaaatgatgaaccagctcattactgtagcatttgtgaggtggaggtttttaatctgctttttgtcactaatgaaagcaatactcaaaaaacctacatagtacattgccatgattgtgcacgaaaaacaagcaaaagtttggaaaattttgtggtgctcgaacagtacaaaatggaggacctaatccaagtttatgatcaatttacactagctctttcattatcatcctcatcttgatatagttccatgaatattaaatgagattatttctgctcttcaggaaatttctgcaccactggttttgtagctgtttcataaaactgttgactaaaagctatgtctatgcaaccttccaagaatagtatgtcaagcaactggacacagtgctgcctctgcttcaggacttaacatgctgatccagctgtacttcagaaaaataatattaatcatatgttttgtgtacgtatgacaaactgtcaaagtgacacagaatactgatttgaagatagccttttttatgtttctctatttctgggctgatgaattaatattcatttgtattttaaccctgcagaattttccttagttaaaaacactttcctagctggtcatttcttcataagatagcaaatttaaatctctcctcgatcagcttttaaaaaatgtgtactattatctgaggaagttttttactgctttatgtttttgtgtgttttgaggccatgatgattacatttgtggttccaaaataatttttttaaatattaatagcccatatacaaagataatggattgcacatagacaaagaaataaacttcagatttgtgatttttgtttctaaacttgatacagatttacactatttataaatacgtatttattgcctgaaaatatttgtgaatggaatgttgtttttttccagacgtaactgccattaaatactaaggagttctgtagttttaaacactactcctattacattttatatgtgtagataaaactgcttagtattatacagaaatttttattaaaattgttaaatgtttaaagggtttcccaatgtttgagtttaaaaaagactttctgaaaaaatccactttttgttcattttcaaacctaatgattatatgtattttatatgtgtgtgtatgtgtacacacatgtataatatatacagaaacctcgatatataattgtatagattttaaaagttttattttttacatctatggtagtttttgaggtgcctattataaagtattacggaagtttgctgtttttaaagtaaatgtcttttagtgtgatttattaagttgtagtcaccatagtgatagcccataaataattgctggaaaattgtattttataacagtagaaaacatatagtcagtgaagtaaatattttaaaggaaacattatatagatttgataaatgttgtttataattaagagtttcttatggaaaagagattcagaatgataacctcttttagagaacaaataagtgacttatttttttaaagctagatgactttgaaatgctatactgtcctgcttgtacaacatggtttggggtgaaggggaggaaagtattaaaaaatctatatcgctagtaaattgtaataagttctattaaaacttgtatttcatatgaaaaatttgctaatttaatattaactcatttgataataatacttgtcttttctacctctc

SEQ ID NO: 22920 - DNA, 6652 bp, Homo sapiens
  misc_feature 1..6652: note = ENST00000540140
  source 1..6652: mol_type = unassigned DNA; mol_type = unassigned DNA
gctcatcgtttgttgtttagataatatcatgaactgataaatgcagttgccacgttgattccctagggcctggcttaccgactgaggtcataagatattatgccttctctttagacttggtcagtggagaggaaatgggcaaagaaccagcctatggaggtgacaaggccttagggccaaaagtcttgagggtgaaggtttagggcctgcgcagcttccctgccatgccccgcaaggtctcgcattcgcaaggcttgtgacagtgggagcctcattacggactctcctaaagtccatggtgtcctcttttcgcatttgcgccccgtgggtgatgcccgatgccgcccttcccatcgctctcttccccttcaagcgtatcgcaactgcaaaaacacccagcacagacactccattttctatcttaatgcatttaactagcacaacctacaggttgttccatcccagagactacccttttctccatagacgtgaccatcaaccaaccagcggtcagaatcagtcagcctctgtcatgttcctaggtccttggcgaactggctgggcggggtcccagcagcctaggagtacagtggagcaatgcctgacgtaagtcaacaaagatcacgtgagacgaatcagtcgcctagattggctacaactaagtggttgggagcggggaggtcgcggcggctgcgtggggttcgcccgtgacacaattacaactttgtgctggtgctggcaaagtttgtgattttaagaaattctgctgtgctctccagcactgcgagcttctgccttccctgtagtttcccagatgtgatccaggtagccgagttccgctgcccgtgcttcggtagcttaagtctttgcctcagcttttttccttgcagccgctgaggaggcgataaaattggcgtcacagtctcaagcagcgattgaaggcgtcttttcaactactcgattaaggttgggtatcgtcgtgggacttggaaatttgttgtttccatgaaatcctgcgcagtgtcgctcactaccgccgctgttgccttcggtgatgaggcaaagaaaatggcggaaggaaaagcgagccgcgagagtgaagaggagtctgttagcctgacagtcgaggaaagggaggcgcttggtggcatggacagccgtctcttcgggttcgtgaggcttcatgaagatggcgccagaacgaagaccctactaggcaaggctgttcgctgctacgaatctttaatcttaaaagctgaaggaaaagtggagtctgacttcttttgccaattaggtcacttcaacctcttgttggaagattattcaaaagcattatctgcatatcagagatattacagtttacaggctgactactggaagaatgctgcgtttttatatggccttggtttggtctacttctactacaatgcatttcattgggcaattaaagcatttcaagatgtcctttatgttgaccccagcttttgtcgagccaaggaaattcatttacgacttgggctcatgttcaaagtgaacacagactacaagtctagtttaaagcattttcagttagccttgattgactgtaatccatgtactttgtccaatgctgaaattcaatttcatattgcccatttgtatgaaacccagaggaagtatcattctgcaaaggaggcatatgaacaacttttgcagacagaaaaccttcctgcacaagtaaaagcaactgtattgcaacagttaggttggatgcatcataatatggatctagtaggagacaaagccacaaaggaaagctatgctattcagtatctccaaaagtctttggaggcagatcctaattctggccaatcgtggtattttcttggaagtgtgttgtatcagcagcaaaatcagcctatggatgctttacaggcatatatttgtgctgtacaattggaccatgggcatgccgcagcctggatggacctaggtactctctatgaatcctgcaatcaacctcaagatgccattaaatgctacctaaatgcagctagaagcaaacgttgtagtaatacctctacgcttgctgcaagaattaaatttctacaggctcagttgtgtaaccttccacaaagtagtctacagaataaaactaaattacttcctagtattgaggaggcatggagcctaccaatccccgcagagcttacctccaggcagggtgccatgaacacagcacagcagcaatccttgtcactacacatgattacttctagccaagtagaaggcctgtccagtcctgccaagaagaaaagaacatctagtccaacaaagaatggttctgataactggaatggtggccagagtctttcacatcatccagtacagcaagtttattcgttgtgtttgacaccacagaaattacagcacttggaacaactgcgagcaaatagagataatttaaatccagcacagaagcatcagctggaacagttagaaagtcagtttgtcttaatgcagcaaatgagacacaaagaagttgctcaggtacgaactactggaattcataacggggccataactgattcatcactgcctacaaactctgtctctaatcgacaaccacatggtgctctgaccagagtatctagcgtctctcagcctggagttcgccctgcttgtgttgaaaaacttttgtccagtggagctttttctgcaggctgtattccttgtggcacatcaaaaattctaggaagtacagacactatcttgctaggcagtaattgtatagcaggaagtgaaagtaatggaaatgtgccttacctgcagcaaaatacacacactctacctcataatcatacagacctgaacagcagcacagaagagccatggagaaaacagctatctaactccgctcaggggcttcataaaagtcagagttcatgtttgtcaggacctaatgaagaacaacctctgttttccactgggtcagcccagtatcaccaggcaactagcactggtattaagaaggcgaatgaacatctcactctgcctagtaattcagtaccacagggggatgctgacagtcacctctcctgtcatactgctacctcaggtggacaacaaggcattatgtttaccaaagagagcaagccttcaaaaaatagatccttggtgcctgaaacaagcaggcatactggagacacatctaatggctgtgctgatgtcaagggactttctaatcatgttcatcagttgatagcagatgctgtttccagtcctaaccatggagattcaccaaatttattaattgcagacaatcctcagctctctgctttgttgattggaaaagccaatggcaatgtgggtactggaacctgtgacaaagtgaataatattcacccagctgttcatacaaagactgatcattctgttgcctcttcaccctcttcagccatttccacagcaacaccttctcctaaatccactgagcagagaagcataaacagtgttaccagccttaacagtcctcacagtggattacacacagtcaatggagaggggctggggaagtcacagagctctacaaaagtagacctgcctttagctagccacagatctacttctcagatcttaccatcaatgtcagtgtctatatgccccagttcaacagaagttctgaaagcatgcaggaatccaggtaaaaatggcttgtctaatagctgcattttgttagataaatgtccacctccaagaccaccaacttcaccatacccacccttgccaaaggacaagttgaatccacccacacctagtatttacttggaaaataaacgtgatgctttctttcctccattacatcaattttgtacaaatccaaaaaaccctgttacagtaatacgtggccttgctggagctcttaaattagatcttggacttttctctaccaaaactttggtagaagctaacaatgaacatatggtagaagtgaggacacagttgctgcaaccagcagatgaaaactgggatcccactggaacaaagaaaatctggcgttgtgaaagcaatagatctcatactacaattgccaaatacgcacaataccaggcttcctccttccaggaatcattgagagaagaaaatgagaaaagaacacaacacaaagatcattcagataacgaatccacatcttcagagaattctggaaggagaaggaaaggaccttttaaaaccataaaatttgggaccaacattgacctctctgataacaaaaagtggaagttgcagttacatgaactgactaaacttcctgcttttgcgcgtgtggtgtcagcaggaaatcttctaacccatgttgggcataccattctgggcatgaatacagtacaactgtatatgaaagttccagggagtcggacaccaggtcaccaagaaaataacaacttctgctctgttaacataaatattggtccaggagattgtgaatggtttgttgtacctgaagattattggggtgttctgaatgacttctgtgaaaaaaataatttgaattttttaatgagttcttggtggcccaaccttgaagatctttatgaagcaaatgtccctgtgtatagatttattcagcgacctggagatttggtctggataaatgcaggcactgtgcattgggttcaagctgttggctggtgcaataacattgcctggaatgttggtccacttacagcctgccagtataaattggcagtggaacggtatgaatggaacaaattgaaaagtgtgaagtcaccagtacccatggtgcatctttcctggaatatggcacgaaatatcaaagtctcagatccaaagctttttgaaatgattaagtattgtcttttgaaaattctgaagcaatatcagacattgagagaagctcttgttgcagcaggaaaagaggttatatggcatgggcggacaaatgatgaaccagctcattactgtagcatttgtgaggtggaggtttttaatctgctttttgtcactaatgaaagcaatactcaaaaaacctacatagtacattgccatgattgtgcacgaaaaacaagcaaaagtttggaaaattttgtggtgctcgaacagtacaaaatggaggacctaatccaagtttatgatcaatttacactagctctttcattatcatcctcatcttgatatagttccatgaatattaaatgagattatttctgctcttcaggaaatttctgcaccactggttttgtagctgtttcataaaactgttgactaaaagctatgtctatgcaaccttccaagaatagtatgtcaagcaactggacacagtgctgcctctgcttcaggacttaacatgctgatccagctgtacttcagaaaaataatattaatcatatgttttgtgtacgtatgacaaactgtcaaagtgacacagaatactgatttgaagatagccttttttatgtttctctatttctgggctgatgaattaatattcatttgtattttaaccctgcagaattttccttagttaaaaacactttcctagctggtcatttcttcataagatagcaaatttaaatctctcctcgatcagcttttaaaaaatgtgtactattatctgaggaagttttttactgctttatgtttttgtgtgttttgaggccatgatgattacatttgtggttccaaaataatttttttaaatattaatagcccatatacaaagataatggattgcacatagacaaagaaataaacttcagatttgtgatttttgtttctaaacttgatacagatttacactatttataaatacgtatttattgcctgaaaatatttgtgaatggaatgttgtttttttccagacgtaactgccattaaatactaaggagttctgtagttttaaacactactcctattacattttatatgtgtagataaaactgcttagtattatacagaaatttttattaaaattgttaaatgtttaaagggtttcccaatgtttgagtttaaaaaagactttctgaaaaaatccactttttgttcattttcaaacctaatgattatatgtattttatatgtgtgtgtatgtgtacacacatgtataatatatacagaaacctcgatatataattgtatagattttaaaagttttattttttacatctatggtagtttttgaggtgcctattataaagtattacggaagtttgctgtttttaaagtaaatgtcttttagtgtgatttattaagttgtagtcaccatagtgatagcccataaataattgctggaaaattgtattttataacagtagaaaacatatagtcagtgaagtaaatattttaaaggaaacattatatagatttgataaatgttgtttataattaagagtttcttatggaaaagagattcagaatgataacctcttttagagaacaaataagtgacttatttttttaaagctagatgactttgaaatgctatactgtcctgcttgtacaacatggtttggggtgaaggggaggaaagtattaaaaaatctatatcgctagtaaattgtaataagttctattaaaacttgtatttcatatgaaaaatttgctaatttaatattaactcatttgataataatacttgtcttttctacctctc

SEQ ID NO: 22921 - DNA, 6661 bp, Homo sapiens
  misc_feature 1..6661: note = ENST00000382896
  source 1..6661: mol_type = unassigned DNA; mol_type = unassigned DNA
gctcatcgtttgttgtttagataatatcatgaactgataaatgcagttgccacgttgattccctagggcctggcttaccgactgaggtcataagatattatgccttctctttagacttggtcagtggagaggaaatgggcaaagaaccagcctatggaggtgacaaggccttagggccaaaagtcttgagggtgaaggtttagggcctgcgcagcttccctgccatgccccgcaaggtctcgcattcgcaaggcttgtgacagtgggagcctcattacggactctcctaaagtccatggtgtcctcttttcgcatttgcgccccgtgggtgatgcccgatgccgcccttcccatcgctctcttccccttcaagcgtatcgcaactgcaaaaacacccagcacagacactccattttctatcttaatgcatttaactagcacaacctacaggttgttccatcccagagactacccttttctccatagacgtgaccatcaaccaaccagcggtcagaatcagtcagcctctgtcatgttcctaggtccttggcgaactggctgggcggggtcccagcagcctaggagtacagtggagcaatgcctgacgtaagtcaacaaagatcacgtgagacgaatcagtcgcctagattggctacaactaagtggttgggagcggggaggtcgcggcggctgcgtggggttcgcccgtgacacaattacaactttgtgctggtgctggcaaagtttgtgattttaagaaattctgctgtgctctccagcactgcgagcttctgccttccctgtagtttcccagatgtgatccaggtagccgagttccgctgcccgtgcttcggtagcttaagtctttgcctcagcttttttccttgcagccgctgaggaggcgataaaattggcgtcacagtctcaagcagcgattgaaggcgtcttttcaactactcgattaaggttgggtatcgtcgtgggacttggaaatttgttgtttccatgaaatcctgcgcagtgtcgctcactaccgccgctgttgccttcggtgatgaggcaaagaaaatggcggaaggaaaagcgagccgcgagagtgaagaggagtctgttagcctgacagtcgaggaaagggaggcgcttggtggcatggacagccgtctcttcgggttcgtgaggcttcatgaagatggcgccagaacgaagaccctactaggcaaggctgttcgctgctacgaatctttaatcttaaaagctgaaggaaaagtggagtctgacttcttttgccaattaggtcacttcaacctcttgttggaagattattcaaaagcattatctgcatatcagagatattacagtttacaggctgactactggaagaatgctgcgtttttatatggccttggtttggtctacttctactacaatgcatttcattgggcaattaaagcatttcaagatgtcctttatgttgaccccagcttttgtcgagccaaggaaattcatttacgacttgggctcatgttcaaagtgaacacagactacaagtctagtttaaagcattttcagttagccttgattgactgtaatccatgtactttgtccaatgctgaaattcaatttcatattgcccatttgtatgaaacccagaggaagtatcattctgcaaaggaggcatatgaacaacttttgcagacagaaaaccttcctgcacaagtaaaagcaactgtattgcaacagttaggttggatgcatcataatatggatctagtaggagacaaagccacaaaggaaagctatgctattcagtatctccaaaagtctttggaggcagatcctaattctggccaatcgtggtattttcttggaaggtgttattcaagtattgggaaagttcaggatgcctttatatcttacaggcaatctattgataaatcagaagcaagtgcagatacatggtgttcaataggtgtgttgtatcagcagcaaaatcagcctatggatgctttacaggcatatatttgtgctgtacaattggaccatgggcatgccgcagcctggatggacctaggtactctctatgaatcctgcaatcaacctcaagatgccattaaatgctacctaaatgcagctagaagcaaacgttgtagtaatacctctacgcttgctgcaagaattaaatttctacaggctcagttgtgtaaccttccacaaagtagtctacagaataaaactaaattacttcctagtattgaggaggcatggagcctaccaatccccgcagagcttacctccaggcagggtgccatgaacacagcacagcagaatggttctgataactggaatggtggccagagtctttcacatcatccagtacagcaagtttattcgttgtgtttgacaccacagaaattacagcacttggaacaactgcgagcaaatagagataatttaaatccagcacagaagcatcagctggaacagttagaaagtcagtttgtcttaatgcagcaaatgagacacaaagaagttgctcaggtacgaactactggaattcataacggggccataactgattcatcactgcctacaaactctgtctctaatcgacaaccacatggtgctctgaccagagtatctagcgtctctcagcctggagttcgccctgcttgtgttgaaaaacttttgtccagtggagctttttctgcaggctgtattccttgtggcacatcaaaaattctaggaagtacagacactatcttgctaggcagtaattgtatagcaggaagtgaaagtaatggaaatgtgccttacctgcagcaaaatacacacactctacctcataatcatacagacctgaacagcagcacagaagagccatggagaaaacagctatctaactccgctcaggggcttcataaaagtcagagttcatgtttgtcaggacctaatgaagaacaacctctgttttccactgggtcagcccagtatcaccaggcaactagcactggtattaagaaggcgaatgaacatctcactctgcctagtaattcagtaccacagggggatgctgacagtcacctctcctgtcatactgctacctcaggtggacaacaaggcattatgtttaccaaagagagcaagccttcaaaaaatagatccttggtgcctgaaacaagcaggcatactggagacacatctaatggctgtgctgatgtcaagggactttctaatcatgttcatcagttgatagcagatgctgtttccagtcctaaccatggagattcaccaaatttattaattgcagacaatcctcagctctctgctttgttgattggaaaagccaatggcaatgtgggtactggaacctgtgacaaagtgaataatattcacccagctgttcatacaaagactgatcattctgttgcctcttcaccctcttcagccatttccacagcaacaccttctcctaaatccactgagcagagaagcataaacagtgttaccagccttaacagtcctcacagtggattacacacagtcaatggagaggggctggggaagtcacagagctctacaaaagtagacctgcctttagctagccacagatctacttctcagatcttaccatcaatgtcagtgtctatatgccccagttcaacagaagttctgaaagcatgcaggaatccaggtaaaaatggcttgtctaatagctgcattttgttagataaatgtccacctccaagaccaccaacttcaccatacccacccttgccaaaggacaagttgaatccacccacacctagtatttacttggaaaataaacgtgatgctttctttcctccattacatcaattttgtacaaatccaaaaaaccctgttacagtaatacgtggccttgctggagctcttaaattagatcttggacttttctctaccaaaactttggtagaagctaacaatgaacatatggtagaagtgaggacacagttgctgcaaccagcagatgaaaactgggatcccactggaacaaagaaaatctggcgttgtgaaagcaatagatctcatactacaattgccaaatacgcacaataccaggcttcctccttccaggaatcattgagagaagaaaatgagaaaagaacacaacacaaagatcattcagataacgaatccacatcttcagagaattctggaaggagaaggaaaggaccttttaaaaccataaaatttgggaccaacattgacctctctgataacaaaaagtggaagttgcagttacatgaactgactaaacttcctgcttttgcgcgtgtggtgtcagcaggaaatcttctaacccatgttgggcataccattctgggcatgaatacagtacaactgtatatgaaagttccagggagtcggacaccaggtcaccaagaaaataacaacttctgctctgttaacataaatattggtccaggagattgtgaatggtttgttgtacctgaagattattggggtgttctgaatgacttctgtgaaaaaaataatttgaattttttaatgagttcttggtggcccaaccttgaagatctttatgaagcaaatgtccctgtgtatagatttattcagcgacctggagatttggtctggataaatgcaggcactgtgcattgggttcaagctgttggctggtgcaataacattgcctggaatgttggtccacttacagcctgccagtataaattggcagtggaacggtatgaatggaacaaattgaaaagtgtgaagtcaccagtacccatggtgcatctttcctggaatatggcacgaaatatcaaagtctcagatccaaagctttttgaaatgattaagtattgtcttttgaaaattctgaagcaatatcagacattgagagaagctcttgttgcagcaggaaaagaggttatatggcatgggcggacaaatgatgaaccagctcattactgtagcatttgtgaggtggaggtttttaatctgctttttgtcactaatgaaagcaatactcaaaaaacctacatagtacattgccatgattgtgcacgaaaaacaagcaaaagtttggaaaattttgtggtgctcgaacagtacaaaatggaggacctaatccaagtttatgatcaatttacactagctctttcattatcatcctcatcttgatatagttccatgaatattaaatgagattatttctgctcttcaggaaatttctgcaccactggttttgtagctgtttcataaaactgttgactaaaagctatgtctatgcaaccttccaagaatagtatgtcaagcaactggacacagtgctgcctctgcttcaggacttaacatgctgatccagctgtacttcagaaaaataatattaatcatatgttttgtgtacgtatgacaaactgtcaaagtgacacagaatactgatttgaagatagccttttttatgtttctctatttctgggctgatgaattaatattcatttgtattttaaccctgcagaattttccttagttaaaaacactttcctagctggtcatttcttcataagatagcaaatttaaatctctcctcgatcagcttttaaaaaatgtgtactattatctgaggaagttttttactgctttatgtttttgtgtgttttgaggccatgatgattacatttgtggttccaaaataatttttttaaatattaatagcccatatacaaagataatggattgcacatagacaaagaaataaacttcagatttgtgatttttgtttctaaacttgatacagatttacactatttataaatacgtatttattgcctgaaaatatttgtgaatggaatgttgtttttttccagacgtaactgccattaaatactaaggagttctgtagttttaaacactactcctattacattttatatgtgtagataaaactgcttagtattatacagaaatttttattaaaattgttaaatgtttaaagggtttcccaatgtttgagtttaaaaaagactttctgaaaaaatccactttttgttcattttcaaacctaatgattatatgtattttatatgtgtgtgtatgtgtacacacatgtataatatatacagaaacctcgatatataattgtatagattttaaaagttttattttttacatctatggtagtttttgaggtgcctattataaagtattacggaagtttgctgtttttaaagtaaatgtcttttagtgtgatttattaagttgtagtcaccatagtgatagcccataaataattgctggaaaattgtattttataacagtagaaaacatatagtcagtgaagtaaatattttaaaggaaacattatatagatttgataaatgttgtttataattaagagtttcttatggaaaagagattcagaatgataacctcttttagagaacaaataagtgacttatttttttaaagctagatgactttgaaatgctatactgtcctgcttgtacaacatggtttggggtgaaggggaggaaagtattaaaaaatctatatcgctagtaaattgtaataagttctattaaaacttgtatttcatatgaaaaatttgctaatttaatattaactcatttgataataatacttgtcttttctacctctc

SEQ ID NO: 22922 - DNA, 6490 bp, Homo sapiens
  misc_feature 1..6490: note = ENST00000537580
  source 1..6490: mol_type = unassigned DNA; mol_type = unassigned DNA
gctcatcgtttgttgtttagataatatcatgaactgataaatgcagttgccacgttgattccctagggcctggcttaccgactgaggtcataagatattatgccttctctttagacttggtcagtggagaggaaatgggcaaagaaccagcctatggaggtgacaaggccttagggccaaaagtcttgagggtgaaggtttagggcctgcgcagcttccctgccatgccccgcaaggtctcgcattcgcaaggcttgtgacagtgggagcctcattacggactctcctaaagtccatggtgtcctcttttcgcatttgcgccccgtgggtgatgcccgatgccgcccttcccatcgctctcttccccttcaagcgtatcgcaactgcaaaaacacccagcacagacactccattttctatcttaatgcatttaactagcacaacctacaggttgttccatcccagagactacccttttctccatagacgtgaccatcaaccaaccagcggtcagaatcagtcagcctctgtcatgttcctaggtccttggcgaactggctgggcggggtcccagcagcctaggagtacagtggagcaatgcctgacgtaagtcaacaaagatcacgtgagacgaatcagtcgcctagattggctacaactaagtggttgggagcggggaggtcgcggcggctgcgtggggttcgcccgtgacacaattacaactttgtgctggtgctggcaaagtttgtgattttaagaaattctgctgtgctctccagcactgcgagcttctgccttccctgtagtttcccagatgtgatccaggtagccgagttccgctgcccgtgcttcggtagcttaagtctttgcctcagcttttttccttgcagccgctgaggaggcgataaaattggcgtcacagtctcaagcagcgattgaaggcgtcttttcaactactcgattaaggttgggtatcgtcgtgggacttggaaatttgttgtttccatgaaatcctgcgcagtgtcgctcactaccgccgctgttgccttcggtgatgaggcaaagaaaatggcggaaggaaaagcgagccgcgagagtgaagaggagtctgttagcctgacagtcgaggaaagggaggcgcttggtggcatggacagccgtctcttcgggttcgtgaggcttcatgaagatggcgccagaacgaagaccctactaggcaaggctgttcgctgctacgaatctttaatcttaaaagctgaaggaaaagtggagtctgacttcttttgccaattaggtcacttcaacctcttgttggaagattattcaaaagcattatctgcatatcagagatattacagtttacaggctgactactggaagaatgctgcgtttttatatggccttggtttggtctacttctactacaatgcatttcattgggcaattaaagcatttcaagatgtcctttatgttgaccccagcttttgtcgagccaaggaaattcatttacgacttgggctcatgttcaaagtgaacacagactacaagtctagtttaaagcattttcagttagccttgattgactgtaatccatgtactttgtccaatgctgaaattcaatttcatattgcccatttgtatgaaacccagaggaagtatcattctgcaaaggaggcatatgaacaacttttgcagacagaaaaccttcctgcacaagtaaaagcaactgtattgcaacagttaggttggatgcatcataatatggatctagtaggagacaaagccacaaaggaaagctatgctattcagtatctccaaaagtctttggaggcagatcctaattctggccaatcgtggtattttcttggaaggtgttattcaagtattgggaaagttcaggatgcctttatatcttacaggcaatctattgataaatcagaagcaagtgcagatacatggtgttcaataggtgtgttgtatcagcagcaaaatcagcctatggatgctttacaggcatatatttgtgctgtacaattggaccatgggcatgccgcagcctggatggacctaggtactctctatgaatcctgcaatcaacctcaagatgccattaaatgctacctaaatgcagctagaagcaaacgttgtagtaatacctctacgcttgctgcaagaattaaatttctacaggctcagttgtgtaaccttccacaaagtagtctacagaataaaactaaattacttcctagtattgaggaggcatggagcctaccaatccccgcagagcttacctccaggcagggtgccatgaacacagcacagcagaatggttctgataactggaatggtggccagagtctttcacatcatccagtacagcaagtttattcgttgtgtttgacaccacagaaattacagcacttggaacaactgcgagcaaatagagataatttaaatccagcacagaagcatcagctggaacagttagaaagtcagtttgtcttaatgcagcaaatgagacacaaagaagttgctcaggtacgaactactggaattcataacggggccataactgattcatcactgcctacaaactctgtctctaatcgacaaccacatggtgctctgaccagagtatctagcgtctctcagcctggagttcgccctgcttgtgttgaaaaacttttgtccagtggagctttttctgcaggctgtattccttgtggcacatcaaaaattctaggaagtacagacactatcttgctaggcagtaattgtatagcaggaagtgaaagtaatggaaatgtgccttacctgcagcaaaatacacacactctacctcataatcatacagacctgaacagcagcacagaagagccatggagaaaacagctatctaactccgctcaggggcttcataaaagtcagagttcatgtttgtcaggacctaatgaagaacaacctctgttttccactgggtcagcccagtatcaccaggcaactagcactggtattaagaaggcgaatgaacatctcactctgcctagtaattcagtaccacagggggatgctgacagtcacctctcctgtcatactgctacctcaggtggacaacaaggcattatgtttaccaaagagagcaagccttcaaaaaatagatccttggtgcctgaaacaagcaggcatactggagacacatctaatggctgtgctgatgtcaagggactttctaatcatgttcatcagttgatagcagatgctgtttccagtcctaaccatggagattcaccaaatttattaattgcagacaatcctcagctctctgctttgttgattggaaaagccaatggcaatgtgggtactggaacctgtgacaaagtgaataatattcacccagctgttcatacaaagactgatcattctgttgcctcttcaccctcttcagccatttccacagcaacaccttctcctaaatccactgagcagagaagcataaacagtgttaccagccttaacagtcctcacagtggattacacacagtcaatggagaggggctggggaagtcacagagctctacaaaagtagacctgcctttagctagccacagatctacttctcagatcttaccatcaatgtcagtgtctatatgccccagttcaacagaagttctgaaagcatgcaggaatccaggtaaaaatggcttgtctaatagctgcattttgttagataaatgtccacctccaagaccaccaacttcaccatacccacccttgccaaaggacaagttgaatccacccacacctagtatttacttggaaaataaacgtgatgctttctttcctccattacatcaattttgtacaaatccaaaaaaccctgttacagtaatacgtggccttgctggagctcttaaattagatcttggacttttctctaccaaaactttggtagaagctaacaatgaacatatggtagaagtgaggacacagttgctgcaaccagcagatgaaaactgggatcccactggaacaaagaaaatctggcgttgtgaaagcaatagatctcatactacaattgccaaatacgcacaataccaggcttcctccttccaggaatcattgagagaagaaaatgagaaaagaacacaacacaaagatcattcagataacgaatccacatcttcagagaattctggaaggagaaggaaaggaccttttaaaaccataaaatttgggaccaacattgacctctctgataacaaaaagtggaagttgcagttacatgaactgactaaacttcctgcttttgcgcgtgtggtgtcagcaggaaatcttctaacccatgttgggcataccattctgggcatgaatacagtacaactgtatatgaaagttccagggagtcggacaccaggtcaccaagaaaataacaacttctgctctgttaacataaatattggtccaggagattgtgaatggtttgttgtacctgaagattattggggtgttctgaatgacttctgtgaaaaaaataatttgaattttttaatgagttcttggtggcccaaccttgaagatctttatgaagcaaatgtccctgtgtatagatttattcagcgacctggagatttggtctggataaatgcaggcactgtgcattgggttcaagctgttggctggtgcaataacattgcctggaatgttggtccacttacagcctgccagtataaattggcagtggaacggtatgaatggaacaaattgaaaagtgtgaagtcaccagtacccatggtgcatctttcctggaatatggcacgaaatatcaaagtctcagatccaaagctttttgaaatgattaagtattgtcttttgaaaattctgaagcaatatcagacattgagagaagctcttgttgcagcaggaaaagaggttatatggcatgggcggacaaatgatgaaccagctcattactgtagcatttgtgaggctctttcattatcatcctcatcttgatatagttccatgaatattaaatgagattatttctgctcttcaggaaatttctgcaccactggttttgtagctgtttcataaaactgttgactaaaagctatgtctatgcaaccttccaagaatagtatgtcaagcaactggacacagtgctgcctctgcttcaggacttaacatgctgatccagctgtacttcagaaaaataatattaatcatatgttttgtgtacgtatgacaaactgtcaaagtgacacagaatactgatttgaagatagccttttttatgtttctctatttctgggctgatgaattaatattcatttgtattttaaccctgcagaattttccttagttaaaaacactttcctagctggtcatttcttcataagatagcaaatttaaatctctcctcgatcagcttttaaaaaatgtgtactattatctgaggaagttttttactgctttatgtttttgtgtgttttgaggccatgatgattacatttgtggttccaaaataatttttttaaatattaatagcccatatacaaagataatggattgcacatagacaaagaaataaacttcagatttgtgatttttgtttctaaacttgatacagatttacactatttataaatacgtatttattgcctgaaaatatttgtgaatggaatgttgtttttttccagacgtaactgccattaaatactaaggagttctgtagttttaaacactactcctattacattttatatgtgtagataaaactgcttagtattatacagaaatttttattaaaattgttaaatgtttaaagggtttcccaatgtttgagtttaaaaaagactttctgaaaaaatccactttttgttcattttcaaacctaatgattatatgtattttatatgtgtgtgtatgtgtacacacatgtataatatatacagaaacctcgatatataattgtatagattttaaaagttttattttttacatctatggtagtttttgaggtgcctattataaagtattacggaagtttgctgtttttaaagtaaatgtcttttagtgtgatttattaagttgtagtcaccatagtgatagcccataaataattgctggaaaattgtattttataacagtagaaaacatatagtcagtgaagtaaatattttaaaggaaacattatatagatttgataaatgttgtttataattaagagtttcttatggaaaagagattcagaatgataacctcttttagagaacaaataagtgacttatttttttaaagctagatgactttgaaatgctatactgtcctgcttgtacaacatggtttggggtgaaggggaggaaagtattaaaaaatctatatcgctagtaaattgtaataagttctattaaaacttgtatttcatatgaaaaatttgctaatttaatattaactcatttgataataatacttgtcttttctacctctc

SEQ ID NO: 22923 - DNA, 6817 bp, Homo sapiens
  misc_feature 1..6817: note = ENST00000545955
  source 1..6817: mol_type = unassigned DNA; mol_type = unassigned DNA
gctcatcgtttgttgtttagataatatcatgaactgataaatgcagttgccacgttgattccctagggcctggcttaccgactgaggtcataagatattatgccttctctttagacttggtcagtggagaggaaatgggcaaagaaccagcctatggaggtgacaaggccttagggccaaaagtcttgagggtgaaggtttagggcctgcgcagcttccctgccatgccccgcaaggtctcgcattcgcaaggcttgtgacagtgggagcctcattacggactctcctaaagtccatggtgtcctcttttcgcatttgcgccccgtgggtgatgcccgatgccgcccttcccatcgctctcttccccttcaagcgtatcgcaactgcaaaaacacccagcacagacactccattttctatcttaatgcatttaactagcacaacctacaggttgttccatcccagagactacccttttctccatagacgtgaccatcaaccaaccagcggtcagaatcagtcagcctctgtcatgttcctaggtccttggcgaactggctgggcggggtcccagcagcctaggagtacagtggagcaatgcctgacgtaagtcaacaaagatcacgtgagacgaatcagtcgcctagattggctacaactaagtggttgggagcggggaggtcgcggcggctgcgtggggttcgcccgtgacacaattacaactttgtgctggtgctggcaaagtttgtgattttaagaaattctgctgtgctctccagcactgcgagcttctgccttccctgtagtttcccagatgtgatccaggtagccgagttccgctgcccgtgcttcggtagcttaagtctttgcctcagcttttttccttgcagccgctgaggaggcgataaaattggcgtcacagtctcaagcagcgattgaaggcgtcttttcaactactcgattaaggttgggtatcgtcgtgggacttggaaatttgttgtttccatgaaatcctgcgcagtgtcgctcactaccgccgctgttgccttcggtgatgaggcaaagaaaatggcggaaggaaaagcgagccgcgagagtgaagaggagtctgttagcctgacagtcgaggaaagggaggcgcttggtggcatggacagccgtctcttcgggttcgtgaggcttcatgaagatggcgccagaacgaagaccctactaggcaaggctgttcgctgctacgaatctttaatcttaaaagctgaaggaaaagtggagtctgacttcttttgccaattaggtcacttcaacctcttgttggaagattattcaaaagcattatctgcatatcagagatattacagtttacaggctgactactggaagaatgctgcgtttttatatggccttggtttggtctacttctactacaatgcatttcattgggcaattaaagcatttcaagatgtcctttatgttgaccccagcttttgtcgagccaaggaaattcatttacgacttgggctcatgttcaaagtgaacacagactacaagtctagtttaaagcattttcagttagccttgattgactgtaatccatgtactttgtccaatgctgaaattcaatttcatattgcccatttgtatgaaacccagaggaagtatcattctgcaaaggaggcatatgaacaacttttgcagacagaaaaccttcctgcacaagtaaaagcaactgtattgcaacagttaggttggatgcatcataatatggatctagtaggagacaaagccacaaaggaaagctatgctattcagtatctccaaaagtctttggaggcagatcctaattctggccaatcgtggtattttcttggaaggtgttattcaagtattgggaaagttcaggatgcctttatatcttacaggcaatctattgataaatcagaagcaagtgcagatacatggtgttcaataggtgtgttgtatcagcagcaaaatcagcctatggatgctttacaggcatatatttgtgctgtacaattggaccatgggcatgccgcagcctggatggacctaggtactctctatgaatcctgcaatcaacctcaagatgccattaaatgctacctaaatgcagctagaagcaaacgttgtagtaatacctctacgcttgctgcaagaattaaatttctacaggctcagttgtgtaaccttccacaaagtagtctacagaataaaactaaattacttcctagtattgaggaggcatggagcctaccaatccccgcagagcttacctccaggcagggtgccatgaacacagcacagcaggcttatagagctcatgatccaaatactgaacatgtattaaaccacagtcaaacaccaattttacagcaatccttgtcactacacatgattacttctagccaagtagaaggcctgtccagtcctgccaagaagaaaagaacatctagtccaacaaagaatggttctgataactggaatggtggccagagtctttcacatcatccagtacagcaagtttattcgttgtgtttgacaccacagaaattacagcacttggaacaactgcgagcaaatagagataatttaaatccagcacagaagcatcagctggaacagttagaaagtcagtttgtcttaatgcagcaaatgagacacaaagaagttgctcaggtacgaactactggaattcataacggggccataactgattcatcactgcctacaaactctgtctctaatcgacaaccacatggtgctctgaccagagtatctagcgtctctcagcctggagttcgccctgcttgtgttgaaaaacttttgtccagtggagctttttctgcaggctgtattccttgtggcacatcaaaaattctaggaagtacagacactatcttgctaggcagtaattgtatagcaggaagtgaaagtaatggaaatgtgccttacctgcagcaaaatacacacactctacctcataatcatacagacctgaacagcagcacagaagagccatggagaaaacagctatctaactccgctcaggggcttcataaaagtcagagttcatgtttgtcaggacctaatgaagaacaacctctgttttccactgggtcagcccagtatcaccaggcaactagcactggtattaagaaggcgaatgaacatctcactctgcctagtaattcagtaccacagggggatgctgacagtcacctctcctgtcatactgctacctcaggtggacaacaaggcattatgtttaccaaagagagcaagccttcaaaaaatagatccttggtgcctgaaacaagcaggcatactggagacacatctaatggctgtgctgatgtcaagggactttctaatcatgttcatcagttgatagcagatgctgtttccagtcctaaccatggagattcaccaaatttattaattgcagacaatcctcagctctctgctttgttgattggaaaagccaatggcaatgtgggtactggaacctgtgacaaagtgaataatattcacccagctgttcatacaaagactgatcattctgttgcctcttcaccctcttcagccatttccacagcaacaccttctcctaaatccactgagcagagaagcataaacagtgttaccagccttaacagtcctcacagtggattacacacagtcaatggagaggggctggggaagtcacagagctctacaaaagtagacctgcctttagctagccacagatctacttctcagatcttaccatcaatgtcagtgtctatatgccccagttcaacagaagttctgaaagcatgcaggaatccaggtaaaaatggcttgtctaatagctgcattttgttagataaatgtccacctccaagaccaccaacttcaccatacccacccttgccaaaggacaagttgaatccacccacacctagtatttacttggaaaataaacgtgatgctttctttcctccattacatcaattttgtacaaatccaaaaaaccctgttacagtaatacgtggccttgctggagctcttaaattagatcttggacttttctctaccaaaactttggtagaagctaacaatgaacatatggtagaagtgaggacacagttgctgcaaccagcagatgaaaactgggatcccactggaacaaagaaaatctggcgttgtgaaagcaatagatctcatactacaattgccaaatacgcacaataccaggcttcctccttccaggaatcattgagagaagaaaatgagaaaagaacacaacacaaagatcattcagataacgaatccacatcttcagagaattctggaaggagaaggaaaggaccttttaaaaccataaaatttgggaccaacattgacctctctgataacaaaaagtggaagttgcagttacatgaactgactaaacttcctgcttttgcgcgtgtggtgtcagcaggaaatcttctaacccatgttgggcataccattctgggcatgaatacagtacaactgtatatgaaagttccagggagtcggacaccaggtcaccaagaaaataacaacttctgctctgttaacataaatattggtccaggagattgtgaatggtttgttgtacctgaagattattggggtgttctgaatgacttctgtgaaaaaaataatttgaattttttaatgagttcttggtggcccaaccttgaagatctttatgaagcaaatgtccctgtgtatagatttattcagcgacctggagatttggtctggataaatgcaggcactgtgcattgggttcaagctgttggctggtgcaataacattgcctggaatgttggtccacttacagcctgccagtataaattggcagtggaacggtatgaatggaacaaattgaaaagtgtgaagtcaccagtacccatggtgcatctttcctggaatatggcacgaaatatcaaagtctcagatccaaagctttttgaaatgattaagtattgtcttttgaaaattctgaagcaatatcagacattgagagaagctcttgttgcagcaggaaaagaggttatatggcatgggcggacaaatgatgaaccagctcattactgtagcatttgtgaggtggaggtttttaatctgctttttgtcactaatgaaagcaatactcaaaaaacctacatagtacattgccatgattgtgcacgaaaaacaagcaaaagtttggaaaattttgtggtgctcgaacagtacaaaatggaggacctaatccaagtttatgatcaatttacactagctctttcattatcatcctcatcttgatatagttccatgaatattaaatgagattatttctgctcttcaggaaatttctgcaccactggttttgtagctgtttcataaaactgttgactaaaagctatgtctatgcaaccttccaagaatagtatgtcaagcaactggacacagtgctgcctctgcttcaggacttaacatgctgatccagctgtacttcagaaaaataatattaatcatatgttttgtgtacgtatgacaaactgtcaaagtgacacagaatactgatttgaagatagccttttttatgtttctctatttctgggctgatgaattaatattcatttgtattttaaccctgcagaattttccttagttaaaaacactttcctagctggtcatttcttcataagatagcaaatttaaatctctcctcgatcagcttttaaaaaatgtgtactattatctgaggaagttttttactgctttatgtttttgtgtgttttgaggccatgatgattacatttgtggttccaaaataatttttttaaatattaatagcccatatacaaagataatggattgcacatagacaaagaaataaacttcagatttgtgatttttgtttctaaacttgatacagatttacactatttataaatacgtatttattgcctgaaaatatttgtgaatggaatgttgtttttttccagacgtaactgccattaaatactaaggagttctgtagttttaaacactactcctattacattttatatgtgtagataaaactgcttagtattatacagaaatttttattaaaattgttaaatgtttaaagggtttcccaatgtttgagtttaaaaaagactttctgaaaaaatccactttttgttcattttcaaacctaatgattatatgtattttatatgtgtgtgtatgtgtacacacatgtataatatatacagaaacctcgatatataattgtatagattttaaaagttttattttttacatctatggtagtttttgaggtgcctattataaagtattacggaagtttgctgtttttaaagtaaatgtcttttagtgtgatttattaagttgtagtcaccatagtgatagcccataaataattgctggaaaattgtattttataacagtagaaaacatatagtcagtgaagtaaatattttaaaggaaacattatatagatttgataaatgttgtttataattaagagtttcttatggaaaagagattcagaatgataacctcttttagagaacaaataagtgacttatttttttaaagctagatgactttgaaatgctatactgtcctgcttgtacaacatggtttggggtgaaggggaggaaagtattaaaaaatctatatcgctagtaaattgtaataagttctattaaaacttgtatttcatatgaaaaatttgctaatttaatattaactcatttgataataatacttgtcttttctacctctc

SEQ ID NO: 22924 - DNA, 6682 bp, Homo sapiens
  misc_feature 1..6682: note = ENST00000617789
  source 1..6682: mol_type = unassigned DNA; mol_type = unassigned DNA
gctcatcgtttgttgtttagataatatcatgaactgataaatgcagttgccacgttgattccctagggcctggcttaccgactgaggtcataagatattatgccttctctttagacttggtcagtggagaggaaatgggcaaagaaccagcctatggaggtgacaaggccttagggccaaaagtcttgagggtgaaggtttagggcctgcgcagcttccctgccatgccccgcaaggtctcgcattcgcaaggcttgtgacagtgggagcctcattacggactctcctaaagtccatggtgtcctcttttcgcatttgcgccccgtgggtgatgcccgatgccgcccttcccatcgctctcttccccttcaagcgtatcgcaactgcaaaaacacccagcacagacactccattttctatcttaatgcatttaactagcacaacctacaggttgttccatcccagagactacccttttctccatagacgtgaccatcaaccaaccagcggtcagaatcagtcagcctctgtcatgttcctaggtccttggcgaactggctgggcggggtcccagcagcctaggagtacagtggagcaatgcctgacgtaagtcaacaaagatcacgtgagacgaatcagtcgcctagattggctacaactaagtggttgggagcggggaggtcgcggcggctgcgtggggttcgcccgtgacacaattacaactttgtgctggtgctggcaaagtttgtgattttaagaaattctgctgtgctctccagcactgcgagcttctgccttccctgtagtttcccagatgtgatccaggtagccgagttccgctgcccgtgcttcggtagcttaagtctttgcctcagcttttttccttgcagccgctgaggaggcgataaaattggcgtcacagtctcaagcagcgattgaaggcgtcttttcaactactcgattaaggttgggtatcgtcgtgggacttggaaatttgttgtttccatgaaatcctgcgcagtgtcgctcactaccgccgctgttgccttcggtgatgaggcaaagaaaatggcggaaggaaaagcgagccgcgagagtgaagaggagtctgttagcctgacagtcgaggaaagggaggcgcttggtggcatggacagccgtctcttcgggttcgtgaggcttcatgaagatggcgccagaacgaagaccctactaggcaaggctgttcgctgctacgaatctttaatcttaaaagctgaaggaaaagtggagtctgacttcttttgccaattaggtcacttcaacctcttgttggaagattattcaaaagcattatctgcatatcagagatattacagtttacaggctgactactggaagaatgctgcgtttttatatggccttggtttggtctacttctactacaatgcatttcattgggcaattaaagcatttcaagatgtcctttatgttgaccccagcttttgtcgagccaaggaaattcatttacgacttgggctcatgttcaaagtgaacacagactacaagtctagtttaaagcattttcagttagccttgattgactgtaatccatgtactttgtccaatgctgaaattcaatttcatattgcccatttgtatgaaacccagaggaagtatcattctgcaaaggaggcatatgaacaacttttgcagacagaaaaccttcctgcacaagtaaaagcaactgtattgcaacagttaggttggatgcatcataatatggatctagtaggagacaaagccacaaaggaaagctatgctattcagtatctccaaaagtctttggaggcagatcctaattctggccaatcgtggtattttcttggaaggtgttattcaagtattgggaaagttcaggatgcctttatatcttacaggcaatctattgataaatcagaagcaagtgcagatacatggtgttcaataggtgtgttgtatcagcagcaaaatcagcctatggatgctttacaggcatatatttgtgctgtacaattggaccatgggcatgccgcagcctggatggacctaggtactctctatgaatcctgcaatcaacctcaagatgccattaaatgctacctaaatgcagctagaagcaaacgttgtagtaatacctctacgcttgctgcaagaattaaatttctacaggcttatagagctcatgatccaaatactgaacatgtattaaaccacagtcaaacaccaattttacagcaatccttgtcactacacatgattacttctagccaagtagaaggcctgtccagtcctgccaagaagaaaagaacatctagtccaacaaagaatggttctgataactggaatggtggccagagtctttcacatcatccagtacagcaagtttattcgttgtgtttgacaccacagaaattacagcacttggaacaactgcgagcaaatagagataatttaaatccagcacagaagcatcagctggaacagttagaaagtcagtttgtcttaatgcagcaaatgagacacaaagaagttgctcaggtacgaactactggaattcataacggggccataactgattcatcactgcctacaaactctgtctctaatcgacaaccacatggtgctctgaccagagtatctagcgtctctcagcctggagttcgccctgcttgtgttgaaaaacttttgtccagtggagctttttctgcaggctgtattccttgtggcacatcaaaaattctaggaagtacagacactatcttgctaggcagtaattgtatagcaggaagtgaaagtaatggaaatgtgccttacctgcagcaaaatacacacactctacctcataatcatacagacctgaacagcagcacagaagagccatggagaaaacagctatctaactccgctcaggggcttcataaaagtcagagttcatgtttgtcaggacctaatgaagaacaacctctgttttccactgggtcagcccagtatcaccaggcaactagcactggtattaagaaggcgaatgaacatctcactctgcctagtaattcagtaccacagggggatgctgacagtcacctctcctgtcatactgctacctcaggtggacaacaaggcattatgtttaccaaagagagcaagccttcaaaaaatagatccttggtgcctgaaacaagcaggcatactggagacacatctaatggctgtgctgatgtcaagggactttctaatcatgttcatcagttgatagcagatgctgtttccagtcctaaccatggagattcaccaaatttattaattgcagacaatcctcagctctctgctttgttgattggaaaagccaatggcaatgtgggtactggaacctgtgacaaagtgaataatattcacccagctgttcatacaaagactgatcattctgttgcctcttcaccctcttcagccatttccacagcaacaccttctcctaaatccactgagcagagaagcataaacagtgttaccagccttaacagtcctcacagtggattacacacagtcaatggagaggggctggggaagtcacagagctctacaaaagtagacctgcctttagctagccacagatctacttctcagatcttaccatcaatgtcagtgtctatatgccccagttcaacagaagttctgaaagcatgcaggaatccaggtaaaaatggcttgtctaatagctgcattttgttagataaatgtccacctccaagaccaccaacttcaccatacccacccttgccaaaggacaagttgaatccacccacacctagtatttacttggaaaataaacgtgatgctttctttcctccattacatcaattttgtacaaatccaaaaaaccctgttacagtaatacgtggccttgctggagctcttaaattagatcttggacttttctctaccaaaactttggtagaagctaacaatgaacatatggtagaagtgaggacacagttgctgcaaccagcagatgaaaactgggatcccactggaacaaagaaaatctggcgttgtgaaagcaatagatctcatactacaattgccaaatacgcacaataccaggcttcctccttccaggaatcattgagagaagaaaatgagaaaagaacacaacacaaagatcattcagataacgaatccacatcttcagagaattctggaaggagaaggaaaggaccttttaaaaccataaaatttgggaccaacattgacctctctgataacaaaaagtggaagttgcagttacatgaactgactaaacttcctgcttttgcgcgtgtggtgtcagcaggaaatcttctaacccatgttgggcataccattctgggcatgaatacagtacaactgtatatgaaagttccagggagtcggacaccaggtcaccaagaaaataacaacttctgctctgttaacataaatattggtccaggagattgtgaatggtttgttgtacctgaagattattggggtgttctgaatgacttctgtgaaaaaaataatttgaattttttaatgagttcttggtggcccaaccttgaagatctttatgaagcaaatgtccctgtgtatagatttattcagcgacctggagatttggtctggataaatgcaggcactgtgcattgggttcaagctgttggctggtgcaataacattgcctggaatgttggtccacttacagcctgccagtataaattggcagtggaacggtatgaatggaacaaattgaaaagtgtgaagtcaccagtacccatggtgcatctttcctggaatatggcacgaaatatcaaagtctcagatccaaagctttttgaaatgattaagtattgtcttttgaaaattctgaagcaatatcagacattgagagaagctcttgttgcagcaggaaaagaggttatatggcatgggcggacaaatgatgaaccagctcattactgtagcatttgtgaggtggaggtttttaatctgctttttgtcactaatgaaagcaatactcaaaaaacctacatagtacattgccatgattgtgcacgaaaaacaagcaaaagtttggaaaattttgtggtgctcgaacagtacaaaatggaggacctaatccaagtttatgatcaatttacactagctctttcattatcatcctcatcttgatatagttccatgaatattaaatgagattatttctgctcttcaggaaatttctgcaccactggttttgtagctgtttcataaaactgttgactaaaagctatgtctatgcaaccttccaagaatagtatgtcaagcaactggacacagtgctgcctctgcttcaggacttaacatgctgatccagctgtacttcagaaaaataatattaatcatatgttttgtgtacgtatgacaaactgtcaaagtgacacagaatactgatttgaagatagccttttttatgtttctctatttctgggctgatgaattaatattcatttgtattttaaccctgcagaattttccttagttaaaaacactttcctagctggtcatttcttcataagatagcaaatttaaatctctcctcgatcagcttttaaaaaatgtgtactattatctgaggaagttttttactgctttatgtttttgtgtgttttgaggccatgatgattacatttgtggttccaaaataatttttttaaatattaatagcccatatacaaagataatggattgcacatagacaaagaaataaacttcagatttgtgatttttgtttctaaacttgatacagatttacactatttataaatacgtatttattgcctgaaaatatttgtgaatggaatgttgtttttttccagacgtaactgccattaaatactaaggagttctgtagttttaaacactactcctattacattttatatgtgtagataaaactgcttagtattatacagaaatttttattaaaattgttaaatgtttaaagggtttcccaatgtttgagtttaaaaaagactttctgaaaaaatccactttttgttcattttcaaacctaatgattatatgtattttatatgtgtgtgtatgtgtacacacatgtataatatatacagaaacctcgatatataattgtatagattttaaaagttttattttttacatctatggtagtttttgaggtgcctattataaagtattacggaagtttgctgtttttaaagtaaatgtcttttagtgtgatttattaagttgtagtcaccatagtgatagcccataaataattgctggaaaattgtattttataacagtagaaaacatatagtcagtgaagtaaatattttaaaggaaacattatatagatttgataaatgttgtttataattaagagtttcttatggaaaagagattcagaatgataacctcttttagagaacaaataagtgacttatttttttaaagctagatgactttgaaatgctatactgtcctgcttgtacaacatggtttggggtgaaggggaggaaagtattaaaaaatctatatcgctagtaaattgtaataagttctattaaaacttgtatttcatatgaaaaatttgctaatttaatattaactcatttgataataatacttgtcttttctacctctc

SEQ ID NO: 22925 - DNA, 6277 bp, Homo sapiens
  misc_feature 1..6277: note = ENST00000618474
  source 1..6277: mol_type = unassigned DNA; mol_type = unassigned DNA
gctcatcgtttgttgtttagataatatcatgaactgataaatgcagttgccacgttgattccctagggcctggcttaccgactgaggtcataagatattatgccttctctttagacttggtcagtggagaggaaatgggcaaagaaccagcctatggaggtgacaaggccttagggccaaaagtcttgagggtgaaggtttagggcctgcgcagcttccctgccatgccccgcaaggtctcgcattcgcaaggcttgtgacagtgggagcctcattacggactctcctaaagtccatggtgtcctcttttcgcatttgcgccccgtgggtgatgcccgatgccgcccttcccatcgctctcttccccttcaagcgtatcgcaactgcaaaaacacccagcacagacactccattttctatcttaatgcatttaactagcacaacctacaggttgttccatcccagagactacccttttctccatagacgtgaccatcaaccaaccagcggtcagaatcagtcagcctctgtcatgttcctaggtccttggcgaactggctgggcggggtcccagcagcctaggagtacagtggagcaatgcctgacgtaagtcaacaaagatcacgtgagacgaatcagtcgcctagattggctacaactaagtggttgggagcggggaggtcgcggcggctgcgtggggttcgcccgtgacacaattacaactttgtgctggtgctggcaaagtttgtgattttaagaaattctgctgtgctctccagcactgcgagcttctgccttccctgtagtttcccagatgtgatccaggtagccgagttccgctgcccgtgcttcggtagcttaagtctttgcctcagcttttttccttgcagccgctgaggaggcgataaaattggcgtcacagtctcaagcagcgattgaaggcgtcttttcaactactcgattaaggttgggtatcgtcgtgggacttggaaatttgttgtttccatgaaatcctgcgcagtgtcgctcactaccgccgctgttgccttcggtgatgaggcaaagaaaatggcggaaggaaaagcgagccgcgagagtgaagaggagtctgttagcctgacagtcgaggaaagggaggcgcttggtggcatggacagccgtctcttcgggttcgtgaggcttcatgaagatggcgccagaacgaagaccctactaggcaagaatgctgcgtttttatatggccttggtttggtctacttctactacaatgcatttcattgggcaattaaagcatttcaagatgtcctttatgttgaccccagcttttgtcgagccaaggaaattcatttacgacttgggctcatgttcaaagtgaacacagactacaagtctagtttaaagaggaagtatcattctgcaaaggaggcatatgaacaacttttgcagacagaaaaccttcctgcacaagtaaaagcaactgtattgcaacagttaggttggatgcatcataatatggatctagtaggagacaaagccacaaaggaaagctatgctattcagtatctccaaaagtctttggaggcagatcctaattctggccaatcgtggtattttcttggaaggtgttattcaagtattgggaaagttcaggatgcctttatatcttacaggcaatctattgataaatcagaagcaagtgcagatacatggtgttcaataggtgtgttgtatcagcagcaaaatcagcctatggatgctttacaggcatatatttgtgctgtacaattggaccatgggcatgccgcagcctggatggacctaggtactctctatgaatcctgcaatcaacctcaagatgccattaaatgctacctaaatgcagctagaagcaaacgttgtagtaatacctctacgcttgctgcaagaattaaatttctacagaatggttctgataactggaatggtggccagagtctttcacatcatccagtacagcaagtttattcgttgtgtttgacaccacagaaattacagcacttggaacaactgcgagcaaatagagataatttaaatccagcacagaagcatcagctggaacagttagaaagtcagtttgtcttaatgcagcaaatgagacacaaagaagttgctcaggtacgaactactggaattcataacggggccataactgattcatcactgcctacaaactctgtctctaatcgacaaccacatggtgctctgaccagagtatctagcgtctctcagcctggagttcgccctgcttgtgttgaaaaacttttgtccagtggagctttttctgcaggctgtattccttgtggcacatcaaaaattctaggaagtacagacactatcttgctaggcagtaattgtatagcaggaagtgaaagtaatggaaatgtgccttacctgcagcaaaatacacacactctacctcataatcatacagacctgaacagcagcacagaagagccatggagaaaacagctatctaactccgctcaggggcttcataaaagtcagagttcatgtttgtcaggacctaatgaagaacaacctctgttttccactgggtcagcccagtatcaccaggcaactagcactggtattaagaaggcgaatgaacatctcactctgcctagtaattcagtaccacagggggatgctgacagtcacctctcctgtcatactgctacctcaggtggacaacaaggcattatgtttaccaaagagagcaagccttcaaaaaatagatccttggtgcctgaaacaagcaggcatactggagacacatctaatggctgtgctgatgtcaagggactttctaatcatgttcatcagttgatagcagatgctgtttccagtcctaaccatggagattcaccaaatttattaattgcagacaatcctcagctctctgctttgttgattggaaaagccaatggcaatgtgggtactggaacctgtgacaaagtgaataatattcacccagctgttcatacaaagactgatcattctgttgcctcttcaccctcttcagccatttccacagcaacaccttctcctaaatccactgagcagagaagcataaacagtgttaccagccttaacagtcctcacagtggattacacacagtcaatggagaggggctggggaagtcacagagctctacaaaagtagacctgcctttagctagccacagatctacttctcagatcttaccatcaatgtcagtgtctatatgccccagttcaacagaagttctgaaagcatgcaggaatccaggtaaaaatggcttgtctaatagctgcattttgttagataaatgtccacctccaagaccaccaacttcaccatacccacccttgccaaaggacaagttgaatccacccacacctagtatttacttggaaaataaacgtgatgctttctttcctccattacatcaattttgtacaaatccaaaaaaccctgttacagtaatacgtggccttgctggagctcttaaattagatcttggacttttctctaccaaaactttggtagaagctaacaatgaacatatggtagaagtgaggacacagttgctgcaaccagcagatgaaaactgggatcccactggaacaaagaaaatctggcgttgtgaaagcaatagatctcatactacaattgccaaatacgcacaataccaggcttcctccttccaggaatcattgagagaagaaaatgagaaaagaacacaacacaaagatcattcagataacgaatccacatcttcagagaattctggaaggagaaggaaaggaccttttaaaaccataaaatttgggaccaacattgacctctctgataacaaaaagtggaagttgcagttacatgaactgactaaacttcctgcttttgcgcgtgtggtgtcagcaggaaatcttctaacccatgttgggcataccattctgggcatgaatacagtacaactgtatatgaaagttccagggagtcggacaccaggtcaccaagaaaataacaacttctgctctgttaacataaatattggtccaggagattgtgaatggtttgttgtacctgaagattattggggtgttctgaatgacttctgtgaaaaaaataatttgaattttttaatgagttcttggtggcccaaccttgaagatctttatgaagcaaatgtccctgtgtatagatttattcagcgacctggagatttggtctggataaatgcaggcactgtgcattgggttcaagctgttggctggtgcaataacattgcctggaatgttggtccacttacagcctgccagtataaattggcagtggaacggtatgaatggaacaaattgaaaagtgtgaagtcaccagtacccatggtgcatctttcctggaatatggcacgaaatatcaaagtctcagatccaaagctttttgaaatgattaagtattgtcttttgaaaattctgaagcaatatcagacattgagagaagctcttgttgcagcaggaaaagaggttatatggcatgggcggacaaatgatgaaccagctcattactgtagcatttgtgaggtggaggtttttaatctgctttttgtcactaatgaaagcaatactcaaaaaacctacatagtacattgccatgattgtgcacgaaaaacaagcaaaagtttggaaaattttgtggtgctcgaacagtacaaaatggaggacctaatccaagtttatgatcaatttacactagctctttcattatcatcctcatcttgatatagttccatgaatattaaatgagattatttctgctcttcaggaaatttctgcaccactggttttgtagctgtttcataaaactgttgactaaaagctatgtctatgcaaccttccaagaatagtatgtcaagcaactggacacagtgctgcctctgcttcaggacttaacatgctgatccagctgtacttcagaaaaataatattaatcatatgttttgtgtacgtatgacaaactgtcaaagtgacacagaatactgatttgaagatagccttttttatgtttctctatttctgggctgatgaattaatattcatttgtattttaaccctgcagaattttccttagttaaaaacactttcctagctggtcatttcttcataagatagcaaatttaaatctctcctcgatcagcttttaaaaaatgtgtactattatctgaggaagttttttactgctttatgtttttgtgtgttttgaggccatgatgattacatttgtggttccaaaataatttttttaaatattaatagcccatatacaaagataatggattgcacatagacaaagaaataaacttcagatttgtgatttttgtttctaaacttgatacagatttacactatttataaatacgtatttattgcctgaaaatatttgtgaatggaatgttgtttttttccagacgtaactgccattaaatactaaggagttctgtagttttaaacactactcctattacattttatatgtgtagataaaactgcttagtattatacagaaatttttattaaaattgttaaatgtttaaagggtttcccaatgtttgagtttaaaaaagactttctgaaaaaatccactttttgttcattttcaaacctaatgattatatgtattttatatgtgtgtgtatgtgtacacacatgtataatatatacagaaacctcgatatataattgtatagattttaaaagttttattttttacatctatggtagtttttgaggtgcctattataaagtattacggaagtttgctgtttttaaagtaaatgtcttttagtgtgatttattaagttgtagtcaccatagtgatagcccataaataattgctggaaaattgtattttataacagtagaaaacatatagtcagtgaagtaaatattttaaaggaaacattatatagatttgataaatgttgtttataattaagagtttcttatggaaaagagattcagaatgataacctcttttagagaacaaataagtgacttatttttttaaagctagatgactttgaaatgctatactgtcctgcttgtacaacatggtttggggtgaaggggaggaaagtattaaaaaatctatatcgctagtaaattgtaataagttctattaaaacttgtatttcatatgaaaaatttgctaatttaatattaactcatttgataataatacttgtcttttctacctctc

SEQ ID NO: 22926 - DNA, 6586 bp, Homo sapiens
  misc_feature 1..6586: note = ENST00000612274
  source 1..6586: mol_type = unassigned DNA; mol_type = unassigned DNA
gctcatcgtttgttgtttagataatatcatgaactgataaatgcagttgccacgttgattccctagggcctggcttaccgactgaggtcataagatattatgccttctctttagacttggtcagtggagaggaaatgggcaaagaaccagcctatggaggtgacaaggccttagggccaaaagtcttgagggtgaaggtttagggcctgcgcagcttccctgccatgccccgcaaggtctcgcattcgcaaggcttgtgacagtgggagcctcattacggactctcctaaagtccatggtgtcctcttttcgcatttgcgccccgtgggtgatgcccgatgccgcccttcccatcgctctcttccccttcaagcgtatcgcaactgcaaaaacacccagcacagacactccattttctatcttaatgcatttaactagcacaacctacaggttgttccatcccagagactacccttttctccatagacgtgaccatcaaccaaccagcggtcagaatcagtcagcctctgtcatgttcctaggtccttggcgaactggctgggcggggtcccagcagcctaggagtacagtggagcaatgcctgacgtaagtcaacaaagatcacgtgagacgaatcagtcgcctagattggctacaactaagtggttgggagcggggaggtcgcggcggctgcgtggggttcgcccgtgacacaattacaactttgtgctggtgctggcaaagtttgtgattttaagaaattctgctgtgctctccagcactgcgagcttctgccttccctgtagtttcccagatgtgatccaggtagccgagttccgctgcccgtgcttcggtagcttaagtctttgcctcagcttttttccttgcagccgctgaggaggcgataaaattggcgtcacagtctcaagcagcgattgaaggcgtcttttcaactactcgattaaggttgggtatcgtcgtgggacttggaaatttgttgtttccatgaaatcctgcgcagtgtcgctcactaccgccgctgttgccttcggtgatgaggcaaagaaaatggcggaaggaaaagcgagccgcgagagtgaagaggagtctgttagcctgacagtcgaggaaagggaggcgcttggtggcatggacagccgtctcttcgggttcgtgaggcttcatgaagatggcgccagaacgaagaccctactaggcaaggctgttcgctgctacgaatctttaatcttaaaagctgaaggaaaagtggagtctgacttcttttgccaattaggtcacttcaacctcttgttggaagattattcaaaagcattatctgcatatcagagatattacagtttacaggctgactactggaagaatgctgcgtttttatatggccttggtttggtctacttctactacaatgcatttcattgggcaattaaagcatttcaagatgtcctttatgttgaccccagcttttgtcgagccaaggaaattcatttacgacttgggctcatgttcaaagtgaacacagactacaagtctagtttaaagcattttcagttagccttgattgactgtaatccatgtactttgtccaatgctgaaattcaatttcatattgcccatttgtatgaaacccagaggaagtatcattctgcaaaggaggcatatgaacaacttttgcagacagaaaaccttcctgcacaagtaaaagcaactgtattgcaacagttaggttggatgcatcataatatggatctagtaggagacaaagccacaaaggaaagctatgctattcagtatctccaaaagtctttggaggcagatcctaattctggccaatcgtggtattttcttggaaggtgttattcaagtattgggaaagttcaggatgcctttatatcttacaggcaatctattgataaatcagaagcaagtgcagatacatggtgttcaataggtgtgttgtatcagcagcaaaatcagcctatggatgctttacaggcatatatttgtgctgtacaattggaccatgggcatgccgcagcctggatggacctaggtactctctatgaatcctgcaatcaacctcaagatgccattaaatgctacctaaatgcagctagaagcaaacgttgtagtaatacctctacgcttgctgcaagaattaaatttctacaggctcagttgtgtaaccttccacaaagtagtctacagaataaaactaaattacttcctagtattgaggaggcatggagcctaccaatccccgcagagcttacctccaggcagggtgccatgaacacagcacagcagaatggttctgataactggaatggtggccagagtctttcacatcatccagtacagcaagtttattcgttgtgtttgacaccacagaaattacagcacttggaacaactgcgagcaaatagagataatttaaatccagcacagaagcatcagctggaacagttagaaagtcagtttgtcttaatgcagcaaatgagacacaaagaagttgctcaggtacgaactactggaattcataacggggccataactgattcatcactgcctacaaactctgtctctaatcgacaaccacatggtgctctgaccagagtatctagcgtctctcagcctggagttcgccctgcttgtgttgaaaaacttttgtccagtggagctttttctgcaggctgtattccttgtggcacatcaaaaattctaggaagtacagacactatcttgctaggcagtaattgtatagcaggaagtgaaagtaatggaaatgtgccttacctgcagcaaaatacacacactctacctcataatcatacagacctgaacagcagcacagaagagccatggagaaaacagctatctaactccgctcaggggcttcataaaagtcagagttcatgtttgtcaggacctaatgaagaacaacctctgttttccactgggtcagcccagtatcaccaggcaactagcactggtattaagaaggcgaatgaacatctcactctgcctagtaattcagtaccacagggggatgctgacagtcacctctcctgtcatactgctacctcaggtggacaacaaggcattatgtttaccaaagagagcaagccttcaaaaaatagatccttggtgcctgaaacaagcaggcatactggagacacatctaatggctgtgctgatgtcaagggactttctaatcatgttcatcagttgatagcagatgctgtttccagtcctaaccatggagattcaccaaatttattaattgcagacaatcctcagctctctgctttgttgattggaaaagccaatggcaatgtgggtactggaacctgtgacaaagtgaataatattcacccagctgttcatacaaagactgatcattctgttgcctcttcaccctcttcagccatttccacagcaacaccttctcctaaatccactgagcagagaagcataaacagtgttaccagccttaacagtcctcacagtggattacacacagtcaatggagaggggctggggaagtcacagagctctacaaaagtagacctgcctttagctagccacagatctacttctcagatcttaccatcaatgtcagtgtctatatgccccagttcaacagaagttctgaaagcatgcaggaatccaggtaaaaatggcttgtctaatagctgcattttgttagataaatgtccacctccaagaccaccaacttcaccatacccacccttgccaaaggacaagttgaatccacccacacctagtatttacttggaaaataaacgtgatgctttctttcctccattacatcaattttgtacaaatccaaaaaaccctgttacagtaatacgtggccttgctggagctcttaaattagatcttggacttttctctaccaaaactttggtagaagctaacaatgaacatatggtagaagtgaggacacagttgctgcaaccagcagatgaaaactgggatcccactggaacaaagaaaatctggcgttgtgaaagcaatagatctcatactacaattgccaaatacgcacaataccaggcttcctccttccaggaatcattgagagaagaaaatgagaaaagaacacaacacaaagatcattcagataacgaatccacatcttcagagaagtggaagttgcagttacatgaactgactaaacttcctgcttttgcgcgtgtggtgtcagcaggaaatcttctaacccatgttgggcataccattctgggcatgaatacagtacaactgtatatgaaagttccagggagtcggacaccaggtcaccaagaaaataacaacttctgctctgttaacataaatattggtccaggagattgtgaatggtttgttgtacctgaagattattggggtgttctgaatgacttctgtgaaaaaaataatttgaattttttaatgagttcttggtggcccaaccttgaagatctttatgaagcaaatgtccctgtgtatagatttattcagcgacctggagatttggtctggataaatgcaggcactgtgcattgggttcaagctgttggctggtgcaataacattgcctggaatgttggtccacttacagcctgccagtataaattggcagtggaacggtatgaatggaacaaattgaaaagtgtgaagtcaccagtacccatggtgcatctttcctggaatatggcacgaaatatcaaagtctcagatccaaagctttttgaaatgattaagtattgtcttttgaaaattctgaagcaatatcagacattgagagaagctcttgttgcagcaggaaaagaggttatatggcatgggcggacaaatgatgaaccagctcattactgtagcatttgtgaggtggaggtttttaatctgctttttgtcactaatgaaagcaatactcaaaaaacctacatagtacattgccatgattgtgcacgaaaaacaagcaaaagtttggaaaattttgtggtgctcgaacagtacaaaatggaggacctaatccaagtttatgatcaatttacactagctctttcattatcatcctcatcttgatatagttccatgaatattaaatgagattatttctgctcttcaggaaatttctgcaccactggttttgtagctgtttcataaaactgttgactaaaagctatgtctatgcaaccttccaagaatagtatgtcaagcaactggacacagtgctgcctctgcttcaggacttaacatgctgatccagctgtacttcagaaaaataatattaatcatatgttttgtgtacgtatgacaaactgtcaaagtgacacagaatactgatttgaagatagccttttttatgtttctctatttctgggctgatgaattaatattcatttgtattttaaccctgcagaattttccttagttaaaaacactttcctagctggtcatttcttcataagatagcaaatttaaatctctcctcgatcagcttttaaaaaatgtgtactattatctgaggaagttttttactgctttatgtttttgtgtgttttgaggccatgatgattacatttgtggttccaaaataatttttttaaatattaatagcccatatacaaagataatggattgcacatagacaaagaaataaacttcagatttgtgatttttgtttctaaacttgatacagatttacactatttataaatacgtatttattgcctgaaaatatttgtgaatggaatgttgtttttttccagacgtaactgccattaaatactaaggagttctgtagttttaaacactactcctattacattttatatgtgtagataaaactgcttagtattatacagaaatttttattaaaattgttaaatgtttaaagggtttcccaatgtttgagtttaaaaaagactttctgaaaaaatccactttttgttcattttcaaacctaatgattatatgtattttatatgtgtgtgtatgtgtacacacatgtataatatatacagaaacctcgatatataattgtatagattttaaaagttttattttttacatctatggtagtttttgaggtgcctattataaagtattacggaagtttgctgtttttaaagtaaatgtcttttagtgtgatttattaagttgtagtcaccatagtgatagcccataaataattgctggaaaattgtattttataacagtagaaaacatatagtcagtgaagtaaatattttaaaggaaacattatatagatttgataaatgttgtttataattaagagtttcttatggaaaagagattcagaatgataacctcttttagagaacaaataagtgacttatttttttaaagctagatgactttgaaatgctatactgtcctgcttgtacaacatggtttggggtgaaggggaggaaagtattaaaaaatctatatcgctagtaaattgtaataagttctattaaaacttgtatttcatatgaaaaatttgctaatttaatattaactcatttgataataatacttgtcttttctacctctc

SEQ ID NO: 22927 - DNA, 2420 bp, Homo sapiens
  misc_feature 1..2420: note = ENST00000374115
  source 1..2420: mol_type = unassigned DNA; mol_type = unassigned DNA
ggaggaggcaagagccgacgcgaggggaggggagcgcagcggcggggctaacgggcgggcaagcgggcgggcggcaacagcatgtccctcggccagcgcgggcggcctcttagcgcggcgggggctgctctgggcgcgccccgggcgaagtgcgcccagtctccggccccggcccctcggcgcgcccgacttcccggccgcccctgagcccagcagccgcgggtcccgggatcggctaagagtagctgcaacgcctcgccggacggagtcctttcctttcccgggacgctgggccatgagctccgcggccacctgaggcacaggggagtctgctcggccaggacagcctccccgaagtcccgtgccctcgcctctgcactgcgggacgccagcgctcggccctggcggaggcgtcctcggaagagcatcggggtgggggcatggaatccgcggaacctgcgggccaggcccgggcggcggccaccaagctgtcggaggctgtgggcgcggcgctgcaggagccccggcggcagaggcgcctggtgcttgttatcgtgtgcgtggcgctgttactggacaacatgctgtacatggtcatcgtgcccatagtgcccgactacatcgcccacatgcgcgggggcggcgagggccccacccggactcccgaggtgtgggagcccaccctgccgctgcccactccggccaatgccagcgcctacacggccaacacctcggcgtccccgacagctgcgtggccagcgggctcagcccttcggccccgctaccctacggagagcgaagacgtgaagatcggggtgctgtttgcttccaaggctatcctgcagctgctagtgaaccccttgagcgggcccttcatcgaccgcatgagctacgacgtgccgctgctgatcggcctgggcgtcatgttcgcctctacagtcctgttcgccttcgccgaggactacgccacgctgttcgcggcgcgcagcctgcagggcctgggctcagccttcgccgacacgtctggcatagccatgatcgccgataagtacccggaggagccggagcgcagtcgtgcactgggcgtggcgctggccttcattagcttcggaagcctagtggccccgcccttcgggggcatcctctatgagttcgccggcaagcgcgtgcccttcttggtgctagctgccgtgtcgctctttgacgcgctgttgctgctggcagtggccaaacccttctcggcggctgcacgggctcgggccaacctgccagtgggcactcccatccaccgcctcatgctagacccctacattgccgtggtggccggcgcgctcaccacctgtaacattcccctcgccttcctcgaacccaccattgccacgtggatgaagcatacgatggcggcttccgagtgggagatgggcatggcctggctgccggccttcgtgcctcatgtgctgggcgtctacctcaccgtgcgcctggcggcgcgctacccacacctgcagtggctgtacggcgcgcttgggctggctgtgatcggcgccagctcgtgcatcgtgcccgcctgccgctccttcgcgccgctagtggtctcactatgcggcctctgttttggcatagccctagtcgacacagcactgctgcccacgctcgccttcctggtggacgtgcgccatgtctcagtctatggcagcgtctacgccatcgccgacatctcctattcggtggcctacgcgctcgggcccatagtggcaggccacattgtgcactcgctgggctttgagcagctcagccttggcatgggactggccaacctgctctatgctcccgtcttgctgctgctccgcaacgtgggcctcctgacgcgctcccgttccgagcgcgatgtgctgcttgatgagccaccgcaaggtctgtacgatgcggtgcgcctgcgtgagcgtcctgtgtctggccaggacggcgagcctcgcagcccgcctggcccttttgatgcgtgcgaggacgactacaactactactacacccgcagctagcatccccactcctcctccagcccacccaaccgccttgggtcaagggggctgctctgcaagcccactggccagctctggctcagggcccacctcctccagcgagtaccccagccactcctcaaccttgacttctgcccaaatcccctccctgtgacccgttccatatccctttctctcttgtccaatggggcttggagcaccgaggccagcgaagccatcgcgctccttgcggaggtgaagaggaccctgagtccccacctgcggctcccctgtgtagagcctgcatctgtctgtccttccttccattgctcccagtgccaaacttgggccgctgcaccgcggcgcctccgcccaaatcaataaactgtgtctgtcccagga

SEQ ID NO: 22928 - DNA, 1068 bp, Homo sapiens
  misc_feature 1..1068: note = ENST00000400911
  source 1..1068: mol_type = unassigned DNA; mol_type = unassigned DNA
gcggggtagtcggcgcgaggcggagcttggcagttccgtccacttcagccgcagcgtccctcaccgggtgtctcgccgcagcctccggagaggaacagaccctcactctctctgtcagaaaaatgtctgctccagctcagccacctgctgaagggacagaagggactgccccaggtgggggtccccctggccctcctcctaacatgaccagtaacagacgactacagcaaacccaggcacaagtggaggaggtggtggacatcatacgtgtgaacgtggacaaggtcctggagagggaccagaagctgtcagagctggatgaccgagctgatgccttgcaggcaggagcatcacaatttgagagcagtgctgccaagctaaagaggaagtattggtggaaaaactgcaagatgatgatcatgctgggagccatctgtgccatcatcgtggtagttattgtaaggcgggactgaagagctggaagaaagcagtcagtaccctcccaacggcccccctcgaaggtctccactctcctctgggctcctccttgcctaatgcagggggtcaccgctggagaagaaccaccactgtcctcgatgtgtcccaagcctggagcgaatccgtcctcttggctctcccagccctatcacaggaatcattcctgggtttctgtccctctgaggctcaccaggtgtagttggccttgttctttgggggtattagcccttctactttctttctcacccaccctgtaccctcttctgtgtgtctctgctatccccctttcctcccaccacccatgtgcatgagcaaatgtgcaacaaaaccctgggactttgcagtcaaatgaagctgagcttcccacatcccgttcttcggtttgccatgagacgatgtggggtttccactgtgtgtctgtcatcacctctttgtctttttttcctaaccctgatctcatacttgtatagagtaataacaacagttgtacttccaccaaaggcatgtggcatatttaccaatgtcatgtattctgaacaaaggcaaaaaatacaaattcctaccattaaa

SEQ ID NO: 22929 - DNA, 3449 bp, Homo sapiens
  misc_feature 1..3449: note = ENST00000361716
  source 1..3449: mol_type = unassigned DNA; mol_type = unassigned DNA
accacaaatgcctaacaaactgctgaagcgccctccgaagggacagacctcatctccaccccgccccgtccctccgccagactggagcgcaaactatggtcgcattgatcactgaaggatcctcacagcaaccgctcctttccggagtcggatgagaggagagttgtgactggcaattggcaggggcggggcgggctaggcctgtagcgctgggcgaccgtcctgggcatggattgggccgcggggttgtcaccgttatccgggaggcgtggtcagcactaataaaggcggaggccggcgcggcagctgcagtaagttccagcgcagctagaccgcggggtagtcggcgcgaggcggagcttggcagttccgtccacttcagccgcagcgtccctcaccgggtgtctcgccgcagcctccggagaggaacagaccctcactctctctgtcagaaaaatgtctgctccagctcagccacctgctgaagggacagaagggactgccccaggtgggggtccccctggccctcctcctaacatgaccagtaacagacgactacagcaaacccaggcacaagtggaggaggtggtggacatcatacgtgtgaacgtggacaaggtcctggagagggaccagaagctgtcagagctggatgaccgagctgatgccttgcaggcaggagcatcacaatttgagagcagtgctgccaagctaaagaggaagtattggtggaaaaactgcaagatgatgatcatgctgggagccatctgtgccatcatcgtggtagttattgtaagtaagtatcgctgaagttgctggtggggtgaagaggtgggaaggtcctggagtcttctccctgcctgcctgcctgcctggggagtggggctgctctgactgaggtatggagaccgctgctatgggatcgtcacctggttcgggacgggggaagggcagagacaagggatttctttgatggacaagccttccccctgcaacgcattgcagggagatggcgcctcctgttctgaggaagtggggctatgctgtgtgtcactggcttgggttggagggagaccatggggatggggcacttaacaatggagagacctgaatgtctggtaacttggtgtaattcaccctcttgttttctcctgtctctttctcttttccgtctgggacttcctgattcctgtgtccagtctacttttttacttgagaatgtaccaccccttccctgttgtccattgccatccacattcatgtcctctgccctctgtttgctctctcaacacacttccccacccaccgtcctccattccagcccaggcttctccatcacccattcctcctttttcgttgcgttcatttgcactctgtccctcaacactagaaatgctgctcgtggcacaatctaagtcattacccgaagagcaacagctggcgcctcctccctgcctgctttttctgtactctcaagttcccccaaagccccaaagagttggaggccaagggaaggggcagggaggggagtggctgaggcgaagtacccatgaagctgcccagacttgggaggagaagagtatcggtgcccatggtgacttctagaaaacctggccactggtaggagctagggaggggctgggaagatggcagctcactcagtactgcctggtcatgtggagctttccttcctggaccaggcctgaagagggtcctgggggtggaccaaagtccaacttggtttcagtgcagtacccttttcgaaagtaaaaacttgttttttgtagttatttctaatctgttcgtccaggattttccgtgtctttggggatcttacaactttactttgttctccagaggcctggagaacacttagggattgtgaaaatagcaggacttgtttccatcctagaagcagtcccatgtgcttctagctggaaggagctttctcttctttacattttctacagcattctgtatgagggcaccaaataaatccatctagctggtagttttatctagccaaataatttaacctagctcccagttaattgttggcataaagagagagattgcctgttagttatagagaaacagtgagtcaagtgcttaatttgaaagtaacaagctcagaggaagccactccttgccctcgttaaagagggtcctgttcctctcttcctgttgatgaaggagcgtgagggtgttagcagtgtgagatctttggacacccatggaatcctttcctccacaccacccgtgcacttgccaaagacagggatgaggcaagtggttcttcctggggcccggccgatcctcaggatgcagagaagtcatgtagacccaccagccccaccttggggggaggcgtgccagcctgtgtcaggtgtgcttgtgtattgctgtgctgtcatggggccctctccttgagagccgcctctctgttcttcctgtagtatattcccctttgaaccaccctttcctgtctgaattctactttgcctcctttctcttcctcctctttgcatggtttgtgtgtatagacagtggaacctgaggatgggatctgctcagcctatcttcggggcaattgctgagcttcaggatgggctattaatgtgggataagcccaggtgcaaggggaggagggcaggctgggaacagagcggagaatgcccatggccctttattccttcttccctcggtccacgaacaggaagaggctgaggccatgctgggcagggtctggatgcccactttccatgcagcagcatttcattgctcaaaaccatccttcctttcctttcgcccttgtttcccacattcccttcgtcctgcccaagggcgggactgaagagctggaagaaagcagtcagtaccctcccaacggcccccctcgaaggtctccactctcctctgggctcctccttgcctaatgcagggggtcaccgctggagaagaaccaccactgtcctcgatgtgtcccaagcctggagcgaatccgtcctcttggctctcccagccctatcacaggaatcattcctgggtttctgtccctctgaggctcaccaggtgtagttggccttgttctttgggggtattagcccttctactttctttctcacccaccctgtaccctcttctgtgtgtctctgctatccccctttcctcccaccacccatgtgcatgagcaaatgtgcaacaaaaccctgggactttgcagtcaaatgaagctgagcttcccacatcccgttcttcggtttgccatgagacgatgtggggtttccactgtgtgtctgtcatcacctctttgtctttttttcctaaccctgatctcatacttgtatagagtaataacaacagttgtacttccaccaaaggcatgtggcatatttaccaatgtcatgtattctgaacaaaggcaaaaaatacaaattcctaccattaaa

SEQ ID NO: 22930 - DNA, 759 bp, Homo sapiens
  misc_feature 1..759: note = ENST00000544432
  source 1..759: mol_type = unassigned DNA; mol_type = unassigned DNA
ccacttcagccgcagcgtccctcaccgggtgtctcgccgcagcctccggagaggaacagaccctcactctctctgtcagaaaaatgtggtggacatcatacgtgtgaacgtggacaaggtcctggagagggaccagaagctgtcagagctggatgaccgagctgatgccttgcaggcaggagcatcacaatttgagagcagtgctgccaagctaaagaggaagtattggtggaaaaactgcaagatgatgatcatgctgggagccatctgtgccatcatcgtggtagttattgtaaggcgggactgaagagctggaagaaagcagtcagtaccctcccaacggcccccctcgaaggtctccactctcctctgggctcctccttgcctaatgcagggggtcaccgctggagaagaaccaccactgtcctcgatgtgtcccaagcctggagcgaatccgtcctcttggctctcccagccctatcacaggaatcattcctgggtttctgtccctctgaggctcaccaggtgtagttggccttgttctttgggggtattagcccttctactttctttctcacccaccctgtaccctcttctgtgtgtctctgctatccccctttcctcccaccacccatgtgcatgagcaaatgtgcaacaaaaccctgggactttgcagtcaaatgaagctgagcttcccacatcccgttcttcggtttgccatgagacgatgtggggtttccactgtgtgtctgtcatcac

SEQ ID NO: 22931 - DNA, 747 bp, Homo sapiens
  misc_feature 1..747: note = ENST00000535180
  source 1..747: mol_type = unassigned DNA
gtcggcgcgaggcggagcttggcagttccgtccacttcagccgcagcgtccctcaccgggtgtctcgccgcagcctccggagaggaacagaccctcactctctctgtcagaaaaatgtctgctccagctcagccacctgctgaagggacagaagggactgccccaggtgggggtccccctggccctcctcctaacatgaccagtaacagacgactacagcaaacccaggcacaagtggaggaggtggtggacatcatacgtgtgaacgtggacaaggtcctggagagggaccagaagctgtcagagctggatgaccgagctgatgccttgcaggcaggagcatcacaatttgagagcagtgctgccaagctaaagaggaagtattggtggaaaaactgcaagatgatgatcatgctgggagccatctgtgccatcatcgtggtagttattgtaagaagaggctgaggccatgctgggcagggtctggatgcccactttccatgcagcagcatttcattgctcaaaaccatccttcctttcctttcgcccttgtttcccacattcccttcgtcctgcccaagggcgggactgaagagctggaagaaagcagtcagtaccctcccaacggcccccctcgaaggtctccactctcctctgggctcctccttgcctaatgcagggggtcaccgctggagaagaaccaccactgtcctcgatgtgtcccaagcctggagcgaatccgtcctc

SEQ ID NO: 22932 - DNA, 1113 bp, Homo sapiens
  misc_feature 1..1113: note = ENST00000396308
  source 1..1113: mol_type = unassigned DNA; mol_type = unassigned DNA
agtaagttccagcgcagctagaccgcggggtagtcggcgcgaggcggagcttggcagttccgtccacttcagccgcagcgtccctcaccgggtgtctcgccgcagcctccggagaggaacagaccctcactctctctgtcagaaaaatgtctgctccagctcagccacctgctgaagggacagaagggactgccccaggtgggggtccccctggccctcctcctaacatgaccagtaacagacgactacagcaaacccaggcacaagtggaggaggtggtggacatcatacgtgtgaacgtggacaaggtcctggagagggaccagaagctgtcagagctggatgaccgagctgatgccttgcaggcaggagcatcacaatttgagagcagtgctgccaagctaaagaggaagtattggtggaaaaactgcaagatgatgatcatgctgggagccatctgtgccatcatcgtggtagttattgtaatctacttttttacttgagaatgtaccaccccttccctgttgtccattgccatccacattcatgtcctctgccctctgtttgctctctcaacacacttccccacccaccgtcctccattccagcccaggcttctccatcacccattcctcctttttcgttgcgttcatttgcactctgtccctcaacactagaaatgctgctcgtggcacaatctaagtcattacccgaagagcaacagctggcgcctcctccctgcctgctttttctgtactctcaagttcccccaaagccccaaagagttggaggccaagggaaggggcagggaggggagtggctgaggcgaagtacccatgaagctgcccagacttgggaggagaagagtatcggtgcccatggtgacttctagaaaacctggccactggtaggagctagggaggggctgggaagatggcagctcactcagtactgcctggtcatgtggagctttccttcctggaccaggcctgaagagggtcctgggggtggaccaaagtccaacttggtttcagtgcagtacccttttcgaaagtaaaaacttgttttttgtagttatttctaatctgttcgtccaggattttccgtgtcttt

SEQ ID NO: 22933 - DNA, 567 bp, Homo sapiens
  misc_feature 1..567: note = ENST00000538970
  source 1..567: mol_type = unassigned DNA; mol_type = unassigned DNA
atgaccagtaacagacgactacagcaaacccaggcacaagtggaggaggtggtggacatcatacgtgtgaacgtggacaaggtcctggagagggaccagaagctgtcagagctggatgaccgagctgatgccttgcaggcaggagcatcacaatttgagagcagtgctgccaagctaaagaggaagtattggtggaaaaactgcaagatgatgatcatgctgggagccatctgtgccatcatcgtggtagttattgtaagtaagtatcgctgaagttgctggtggggtgaagaggtgggaaggtcctggagtcttctccctgcctgcctgcctgcctggggagtggggctgctctgactgaggtatggagaccgctgctatgggatcgtcacctggttcgggacgggggaagggcagagacaagggatttctttgatggacaagccttccccctgcaacgcattgcagggagatggcgcctcctgttctgaggaagtggggctatgctgtgtgtcactggcttgggttggagggagaccatggggatggggcacttaacaatggaga

SEQ ID NO: 22934 - DNA, 578 bp, Homo sapiens
  misc_feature 1..578: note = ENST00000535927
  source 1..578: mol_type = unassigned DNA; mol_type = unassigned DNA
agtaagttccagcgcagctagaccgcggggtagtcggcgcgaggcggagcttggcagttccgtccacttcagccgcagcgtccctcaccgggtgtctcgccgcagcctccggagaggaacagaccctcactctctctgtcagaaaaatgtggtggacatcatacgtgtgaacgtggacaaggtcctggagagggaccagaagctgtcagagctggatgaccgagctgatgccttgcaggcaggagcatcacaatttgagagcagtgctgccaagctaaagaggaagtattggtggaaaaactgcaagatgatgatcatgctgggagccatctgtgccatcatcgtggtagttattgtaagtaagtatcgctgaagttgctggtggggtgaagaggtgggaaggtcctggagtcttctccctgcctgcctgcctgcctggggagtggggctgctctgactgaggtatggagaccgctgctatgggatcgtcacctggttcgggacgggggaagggcagagacaagggatttctttgatggacaagccttccccctgcaacgcattgcagggagatggcg

SEQ ID NO: 22935 - DNA, 565 bp, Homo sapiens
  misc_feature 1..565: note = ENST00000539047
  source 1..565: mol_type = unassigned DNA; mol_type = unassigned DNA
agtaagttccagcgcagctagaccgcggggtagtcggcgcgaggcggagcttggcagttccgtccacttcagccgcagcgtccctcaccgggtgtctcgccgcagcctccggagaggaacagaccctcactctctctgtcagaaaaatgtctgctccagctcagccacctgctgaagggacagaagggactgccccaggtgggggtccccctggccctcctcctaacatgaccagtaacagacgactacagcaaacccaggcacaagtggaggaggtggtggacatcatacgtgtgaacgtggacaaggtcctggagagggaccagaagctgtcagagctggatgaccgagctgatgccttgcaggcaggagcatcacaatttgagagcagtgctgccaagctaaagaggaagtattggtggaaaaactgcaagctttctcagattgaaatatatatttttaaataactgcaacttttgagaatgagctgaacacttcacagtgaaaattgaactaattggttaaatatccagagtctgtatctctattggaatgccttctaaag

SEQ ID NO: 22936 - DNA, 3825 bp, Homo sapiens
  misc_feature 1..3825: note = ENST00000302536
  source 1..3825: mol_type = unassigned DNA; mol_type = unassigned DNA
gtggaccgcggcggcgctcgcagaggctgcagccattgcacagccgagcatcccacattcaacaggaggaacccgcgggagaggagccccactcccccagcgccgcagccaccgcagccaccgcagcccgtgcgccccgcgccctcgagcgccatggccaaggaaggcgtggagaaggcggaggagacggagcaaatgatcgagaaggaggcaggcaaggagccggcggagggcggcggcggcgacggctcgcaccgcctcggggacgcccaggagatgcgcgcggtggtgctggctggcttcggggggctcaacaagctgcggctcttcaggaaggccatgcccgagcctcaggacggcgagctcaagatccgcgtcaaagcctgtggattaaacttcattgacttgatggtgcgacaagggaatattgacaaccctcccaagactcccctggtgccaggatttgagtgttctgggattgttgaagctctgggggacagcgtgaaaggatatgagattggagaccgtgtcatggcatttgtcaattacaatgcctgggcagaggtggtctgcacaccagtggagtttgtctacaagatcccggatgacatgagcttctccgaggctgctgcattccccatgaacttcgtcacagcctatgtgatgctgtttgaagttgccaacctccgggaagggatgtctgtgctcgtgcactcagctggtgggggcgtgggtcaagctgtggctcagctgtgttccactgtccccaacgtgactgtctttggaacagcctctactttcaagcatgaagcaatcaaagactctgtgacccacctctttgacagaaatgcagactacgtgcaagaagttaaaagaatctctgctgaaggtgtggacatcgttttggattgcctctgtggggacaacactggaaaaggtctcagtcttctcaaacccctgggaacctacattttatatggctcatccaacatggtaactggagagaccaagagcttcttcagctttgcaaaatcatggtggcaggtggagaaggtgaaccccatcaagctgtatgaggagaacaaagtcatcgcggggttttcccttttaaatctgctcttcaaacaaggccgggcgggcctcattcggggagtggtggaaaaactcatagggctctacaaccagaagaagatcaagcctgtggtggactccttgtgggctctggaggaggtgaaggaggccatgcagcggattcacgaccgagggaacattggcaagttaattctggatgtagaaaagaccccaactccactgatggccaatgacagcacagagaccagtgaagcaggggaagaggaggaggaccacgagggagacagcgagaacaaggagcggatgccctttatccagtaactgaggacccaggtgggagaatgtgaaggatggtttggaagatgaggacccggctgagaaaactcttctgtgccccagtgaacaaatgctgtagtccagtgcgtgtcgtgtttgtctgcagtcagctgagctaaaaagctgttgatcactgttgttttttgaagtgccaatcccatgccatgcagtattatgtccctctcctatctgtgtattacacattcccctctcccctgtatcaaaaccatccatctgtgggttcttcttgacagttctagaacagccttgcaaattaatacaagtcccaggcccaatgcctaagagaccagacgtgggcaaagacaagtttggatggaaaggtgttatcacagagccctgtccagctcctagaattcctcaggccagtgacacttttttgctgctggccacccatgcctctgatgagaacacttgccaatttggccagcagaaagagagtaggccggatgttttcatgagcccacaaatttagaaactctcctagtagtactttttctctctccatttaagagacaactacggtcaaaagtttgagccattctcttctaccccttcagtgtctgaccctttcactggctcttatctgtaaacacagggaggcaggtatggatttttcacagtagacaatgggtcaacagcatgagtttgaggacctgctgtgaagatttctcctccaaaatacatctcatgggcaggattcttcctgctccatatctgtttcaattttaagaaagcaccacatacaagacacattcagaagtcattcctgagcattgctggtgtttgcacacttgccacctgcattaccaattctgtaaatttcaattcctggtggaaagtgaccactttgaccatggatttcccaaagaagagttcctttgcagaccataggtggaaaagtcaatgagcatctccttccttgccaaagcatgtcccaacatgtaacaaactctagggatacaaaaggtttatattcagcatctgatgtcagatgtacagttcctcccctcccatatataaaccccggtgtagaatctgcagcgccctgctcttcggaaaccaaggaacaagccacctgctcacacaccttgttcaacttttcagctcctaaggaaccccacccccatgcaatttgactgtgcttgagaggtgaatacagttaccttcgagaaacagagggagctcctcaccccgtccttccagtccttttggctaaaatgcttaactatcactcacaaacaaatgtggagataccaggagctcatttgattcataccccaactttgtgttctgaaaaacatcagagggattttacattgcccagtttctccaccaacaagccttagggtggacccaaccctttccgcaagtggtaggaacgaatgcatcttagcaattacctgatttccaaagtccttttgtagcaaatgtcacctcattcgtggtctttttacctatcctaagcttatgatgatgagttatgtatgccaaatacttatctgaagagtttctcctcattgtgaatgtgtatgtaaaatatgaagacaagaaagggtgctttcatctgaggaaccaaggggtgagagtatcccaaaggaggacaccagcatcatcttttcttcgtactccaggacccaccaatattccagttctgggtcatttagagagataatggggcgtttattcccctattacctttgctaagtgctatattattggctgtttctcccgtaaccatgctgaaaagggggtcttagggagaactgtcatccaagtggcattcctagtaagttgggtagaaatgacattttccagagctgaaggagtgaagagcccttggccatactagggctctccttcccccggggagtgggaactcagccacattcagaattcacatcgcctttgttatgtccagaggagaggcataaaaaggcactctcccccaccacccctaccaaatctgggtttggtttggttttatttaactagcaaagttaatccagtaatcgcaaattactccagatggttaaagaaaaccctttcagaatacagaacgagaaaactagagtttgaccaataagaccaatttctgccatgaagaaccgggggacgcaagttaattgtttaacgtactctcattttaagcaccttctttcctgtctcttgattgttttttctgaaggaagtgtaaagaatgtctcagtctgccttaaaggaactgtgaaggcttctctgtaatttaagcttgatagaagtgaactgaaacattgtctaatgtctttgtggctttagagcttttgttatattgtgcctataaagcaaattatgtttacataaaaatataaataaagtattcagcatagcaaaacctca

SEQ ID NO: 22937 - DNA, 615 bp, Homo sapiens
  misc_feature 1..615: note = ENST00000563850
  source 1..615: mol_type = unassigned DNA; mol_type = unassigned DNA
ggtcaagctgtggctcagctgtgttccactgtccccaacgtgactgtctttggaacagcctctactttcaagcatgaagcaatcaaagactctgtgacccacctctttgacagaaatgcagactacgtgcaagaagttaaaagaatctctgctgaaggtgtggacatcgttttggattgcctctgtggggacaacactggaaaaggtctcagtcttctcaaacccctgggaacctacattttatatggctcatccaacatggtaactggagagaccaagagcttcttcagctttgcaaaatcaaggcctgctcaaacactgagggtcatttggaagaaaactgaagagagggcctacgaagaggtggaactttgctctgaaaagtcctagaaaaaaaatttttcaatgtattcaagaagggcttagaaattaaaggtcgactggaattatacaggaatttcccactcagctatcttaatgatgttgcatcttaaaatcgctgcagtttgtgcctcactatttgtcaaacatgctattttctttcacaccataacgatgatgatactaatagaagaagttaacatttacagagcaatctgactccaaatttggagc

SEQ ID NO: 22938 - DNA, 4691 bp, Homo sapiens
  misc_feature 1..4691: note = ENST00000406606
  source 1..4691: mol_type = unassigned DNA; mol_type = unassigned DNA
gccatggagcagtggcggcagtgcggccgctggctcatcgattgcaaggtcctgccgcccaaccaccgggtggtgtggccctcggccgtggtcttcgacctggcgcaggcgctgcgcgacggggtccttctgtgccagctgctgcacaacctctcccccggctccatcgacctcaaggacatcaacttccggccgcagatgtcccagtttctgtgtttgaagaacatacgcaccttcctgaaagtctgccacgataaatttggattaaggaacagcgagctgtttgacccctttgacctcttcgatgtgcgagactttggaaaggtcatctccgcggtgtcgaggctctccctgcacagcatcgcgcagaacaaagggatcaggccttttccctcagaggagaccacagagaatgacgatgacgtctaccgcagcctggaggagctggccgacgagcatgacctgggggaggacatctacgactgcgtcccgtgtgaggatggaggggacgacatctacgaggacatcatcaaggtggaggtgcagcagcccatgaaaatgggcatgactgaagatgacaagaggaactgctgcctgctggagatccaggagaccgaggccaagtactaccgcaccctggaggacattgagaagaactacatgagccccctgcggctggtgctgagcccggcggacatggcagctgtcttcattaacctggaggacctgatcaaggtgcatcacagcttcctgagggccatcgacgtgtccgtgatggtggggggcagcacgctggccaaggtcttcctcgatttcaaggaaaggcttctgatctacggggagtactgcagccacatggagcacgcccagaacacactgaaccagctcctggccagccgggaggacttcaggcagaaagtcgaggagtgcacactgaaggtccaggatggaaaatttaagctgcaagacctgctggtggtccccatgcagagggtgctcaaataccacctgctcttgaaggagcttctgagccattctgcggaacggcctgagaggcagcagctcaaagaagcactggaagccatgcaggacttggcgatgtacatcaatgaagttaaacgggacaaggagaccttgaggaaaatcagcgaatttcagagttctatagaaaatttgcaagtgaaactggaggaatttggaagaccaaagattgacggggaactgaaagtccggtccatagtcaaccacaccaagcaggacaggtacttgttcctgtttgacaaggtggtcatcgtctgcaagcggaagggctacagctacgagctcaaggagatcatcgagctgctgttccacaagatgaccgacgaccccatgaacaacaaggacgtcaagaagtggtcctacggcttctacctaattcaccttcaaggaaagcagggcttccagtttttctgcaaaacagaagatatgaagaggaagtggatggagcagtttgagatggccatgtcaaacatcaagccagacaaagccaatgccaaccaccacagtttccagatgtacacgtttgacaagaccaccaactgcaaagcctgcaaaatgttcctcaggggcaccttctaccagggatacatgtgtaccaagtgtggcgtcggggcacacaaggagtgcctggaagtgatacctccctgcaagttcacttctcctgcagatctggacgcctccggagcgggaccaggtcccaagatggtggccatgcagaattaccatggcaacccagcccctcccgggaagcctgtgctgaccttccagacgggcgacgtgcttgagctgctgaggggcgaccctgagtctccgtggtgggagggtcgtctggtacaaaccaggaagtcagggtatttccccagctcatctgtgaagccctgccctgtggatggaaggccgcccatcagccggccgccatcccgggagatcgactacactgcatacccctggtttgcaggtaacatggagaggcagcagacggacaacctgctcaagtcccacgccagcgggacctacctgatcagggagcggcctgccgaggctgagcgctttgcaataagcatcaagttcaatgatgaggtgaagcacatcaaggtggtggagaaggacaactggatccacatcacagaggccaagaaattcgacagcctcctggagttggtggagtactaccagtgccactcactgaaggagagcttcaagcagctggacaccacactcaagtacccctacaagtcccgggaacgttcggcctccagggcctccagccggtccccagtgttcacgccccgcgtcatcggcacagctgtggccaggtataactttgccgcccgagatatgagggagctttcgctgcgggagggtgacgtggtgaggatctacagccgcatcggcggagaccagggctggtggaagggcgagaccaacggacggattggctggtttccttcaacgtacgtagaagaggagggcatccagtgacggcaggaacgtggacaagactcgcagattttcttgggagagtcactccagccctgaagtctgtctctagctcctctgtgactcagaggggaaataccaacctcccagtcttccactgcccacagggatagggagggtgttgagaatcctaaactcgaaccgtttcactgtcagcctgccctcggcgacccatcactgggtatgctattgtacatagaggaaacctgggctagccccacccagagcgcagaggagggggcaccgacagcgctgcgagccaggctctgggtagtggctgaggccagaggcccatcgcctgcccctgtccaactgagatggccttcaggagcctaggtttgaacagcagatgctgtcccaggaagggctagggacatcggaggggacctgcccccacaccctctgctcagcccctggactcagccttgcctgtcttttcctgctgctcccagggggaggtgtcagacctcgggaggcagacgggaccagagccaggctgttcactgtgggcccacttgccccactgtgctagggcgcgggaggagagagcactgtggtcgccctctgcagccactctggctcccaagacttccctgactcccccactcccctccttgccaggggcacacccggaccccacacggcaggcccctctcttgggaggggcctttggaatgatgaaattccaaccctgctgcccggtcagcggtaccgtttcctgccctctctctgagaggccctttctggagtcctgggaaggtgtctgcctggccgcgctgccagatcagtacatcttttgtaaaaaccctgaaatgggcagggaagaaaacagggatttcccctctctagatccctgccaggtccctctccaggaggcccctctgctctcctgaagggtggtccctgagggtctgcccagccttggcacgagaggttggttccagcccctggcagggcttccttccaagggcccctgcagcctacaaactgggcctcgggcgactcaaaataagtgctcttgggggtggctctaccccattacctcccccagccacaactcctggccttcgacttctggctgggttagccagaccctggtttctctaccctgatgttgcatgagacctggtaacagtgtctccctcccagctccttgccaaagcctctgttgagacctgggcttcttgtagccccttctccctctggccagctgcacagcctgtgggaggtgcccggcccaggctgggtgtgggggaagctggtccctgctgtgggtggcgctggggacctaggggctccttctgaggttggccttgtggcctctgggctgtatgcctctggggtgtagggaagaggcgggaggagtcatggggatggggagcggcagggggagagaggggccctcgacaaaggcttgggaaatgaggggaggtggaggcagggcaggggaagcgaagagtcagccttggagagagcaccctggggcctccgtgtcggggtacacccagcactttgcgacctgcggcccagcaggcgcggaggatggcggggaggaagccagcagcccctgtgtttactgtcgtcagaaaggtcttgtgttttggttttggggtttttgttttgtttgtgttttgtttggcttgtttgttttttaaggggaaaaaagtttgtaattatttcatccaaatctcccgttatatatctgtgaataataagagattttataatagcaagaaaatgatgtatattttagtttgttgacaaataagtcatcatgatcacgaaggacactgagaaaaaataatttagaaccctggtttttgtgaatttttttgttttgtgtttctttgttttgagatttgtgtttggtttggtttttgcactgcactaaggcaggagggttggagggctgggtgcagcctgggagtccgatggttttcagcaggagacggggtgtcccctgcagggggctaaactgcaggggcctgagattagctgtgaacatgtgggagcccgatgcatgtgggtcagggatctgggggcccccccagctggcgggaaccccaaatggacacaaactgtacatttgccaatgggtttttttcagaccatggtttttacttgcaaataaacctgagttcttttctgca

SEQ ID NO: 22939 - DNA, 4837 bp, Homo sapiens
  misc_feature 1..4837: note = ENST00000371850
  source 1..4837: mol_type = unassigned DNA; mol_type = unassigned DNA
actgccctgagccggtcgggcccgcgggcgccatggagcagtggcggcagtgcggccgctggctcatcgattgcaaggtcctgccgcccaaccaccgggtggtgtggccctcggccgtggtcttcgacctggcgcaggcgctgcgcgacggggtccttctgtgccagctgctgcacaacctctcccccggctccatcgacctcaaggacatcaacttccggccgcagatgtcccagtttctgtgtttgaagaacatacgcaccttcctgaaagtctgccacgataaatttggattaaggaacagcgagctgtttgacccctttgacctcttcgatgtgcgagactttggaaaggtcatctccgcggtgtcgaggctctccctgcacagcatcgcgcagaacaaagggatcaggccttttccctcagaggagaccacagagaatgacgatgacgtctaccgcagcctggaggagctggccgacgagcatgacctgggggaggacatctacgactgcgtcccgtgtgaggatggaggggacgacatctacgaggacatcatcaaggtggaggtgcagcagcccatgattagatacatgcagaaaatgggcatgactgaagatgacaagaggaactgctgcctgctggagatccaggagaccgaggccaagtactaccgcaccctggaggacattgagaagaactacatgagccccctgcggctggtgctgagcccggcggacatggcagctgtcttcattaacctggaggacctgatcaaggtgcatcacagcttcctgagggccatcgacgtgtccgtgatggtggggggcagcacgctggccaaggtcttcctcgatttcaaggaaaggcttctgatctacggggagtactgcagccacatggagcacgcccagaacacactgaaccagctcctggccagccgggaggacttcaggcagaaagtcgaggagtgcacactgaaggtccaggatggaaaatttaagctgcaagacctgctggtggtccccatgcagagggtgctcaaataccacctgctcttgaaggagcttctgagccattctgcggaacggcctgagaggcagcagctcaaagaagcactggaagccatgcaggacttggcgatgtacatcaatgaagttaaacgggacaaggagaccttgaggaaaatcagcgaatttcagagttctatagaaaatttgcaagtgaaactggaggaatttggaagaccaaagattgacggggaactgaaagtccggtccatagtcaaccacaccaagcaggacaggtacttgttcctgtttgacaaggtggtcatcgtctgcaagcggaagggctacagctacgagctcaaggagatcatcgagctgctgttccacaagatgaccgacgaccccatgaacaacaaggacgtcaagaagtctcacgggaaaatgtggtcctacggcttctacctaattcaccttcaaggaaagcagggcttccagtttttctgcaaaacagaagatatgaagaggaagtggatggagcagtttgagatggccatgtcaaacatcaagccagacaaagccaatgccaaccaccacagtttccagatgtacacgtttgacaagaccaccaactgcaaagcctgcaaaatgttcctcaggggcaccttctaccagggatacatgtgtaccaagtgtggcgtcggggcacacaaggagtgcctggaagtgatacctccctgcaagttcacttctcctgcagatctggacgcctccggagcgggaccaggtcccaagatggtggccatgcagaattaccatggcaacccagcccctcccgggaagcctgtgctgaccttccagacgggcgacgtgcttgagctgctgaggggcgaccctgagtctccgtggtgggagggtcgtctggtacaaaccaggaagtcagggtatttccccagctcatctgtgaagccctgccctgtggatggaaggccgcccatcagccggccgccatcccgggagatcgactacactgcatacccctggtttgcaggtaacatggagaggcagcagacggacaacctgctcaagtcccacgccagcgggacctacctgatcagggagcggcctgccgaggctgagcgctttgcaataagcatcaagttcaatgatgaggtgaagcacatcaaggtggtggagaaggacaactggatccacatcacagaggccaagaaattcgacagcctcctggagttggtggagtactaccagtgccactcactgaaggagagcttcaagcagctggacaccacactcaagtacccctacaagtcccgggaacgttcggcctccagggcctccagccggtccccagcttcctgtgcttcctacaacttttcttttctcagtcctcagggcctcagctttgcttctcagggcccctccgctcccttctggtcagtgttcacgccccgcgtcatcggcacagctgtggccaggtataactttgccgcccgagatatgagggagctttcgctgcgggagggtgacgtggtgaggatctacagccgcatcggcggagaccagggctggtggaagggcgagaccaacggacggattggctggtttccttcaacgtacgtagaagaggagggcatccagtgacggcaggaacgtggacaagactcgcagattttcttgggagagtcactccagccctgaagtctgtctctagctcctctgtgactcagaggggaaataccaacctcccagtcttccactgcccacagggatagggagggtgttgagaatcctaaactcgaaccgtttcactgtcagcctgccctcggcgacccatcactgggtatgctattgtacatagaggaaacctgggctagccccacccagagcgcagaggagggggcaccgacagcgctgcgagccaggctctgggtagtggctgaggccagaggcccatcgcctgcccctgtccaactgagatggccttcaggagcctaggtttgaacagcagatgctgtcccaggaagggctagggacatcggaggggacctgcccccacaccctctgctcagcccctggactcagccttgcctgtcttttcctgctgctcccagggggaggtgtcagacctcgggaggcagacgggaccagagccaggctgttcactgtgggcccacttgccccactgtgctagggcgcgggaggagagagcactgtggtcgccctctgcagccactctggctcccaagacttccctgactcccccactcccctccttgccaggggcacacccggaccccacacggcaggcccctctcttgggaggggcctttggaatgatgaaattccaaccctgctgcccggtcagcggtaccgtttcctgccctctctctgagaggccctttctggagtcctgggaaggtgtctgcctggccgcgctgccagatcagtacatcttttgtaaaaaccctgaaatgggcagggaagaaaacagggatttcccctctctagatccctgccaggtccctctccaggaggcccctctgctctcctgaagggtggtccctgagggtctgcccagccttggcacgagaggttggttccagcccctggcagggcttccttccaagggcccctgcagcctacaaactgggcctcgggcgactcaaaataagtgctcttgggggtggctctaccccattacctcccccagccacaactcctggccttcgacttctggctgggttagccagaccctggtttctctaccctgatgttgcatgagacctggtaacagtgtctccctcccagctccttgccaaagcctctgttgagacctgggcttcttgtagccccttctccctctggccagctgcacagcctgtgggaggtgcccggcccaggctgggtgtgggggaagctggtccctgctgtgggtggcgctggggacctaggggctccttctgaggttggccttgtggcctctgggctgtatgcctctggggtgtagggaagaggcgggaggagtcatggggatggggagcggcagggggagagaggggccctcgacaaaggcttgggaaatgaggggaggtggaggcagggcaggggaagcgaagagtcagccttggagagagcaccctggggcctccgtgtcggggtacacccagcactttgcgacctgcggcccagcaggcgcggaggatggcggggaggaagccagcagcccctgtgtttactgtcgtcagaaaggtcttgtgttttggttttggggtttttgttttgtttgtgttttgtttggcttgtttgttttttaaggggaaaaaagtttgtaattatttcatccaaatctcccgttatatatctgtgaataataagagattttataatagcaagaaaatgatgtatattttagtttgttgacaaataagtcatcatgatcacgaaggacactgagaaaaaataatttagaaccctggtttttgtgaatttttttgttttgtgtttctttgttttgagatttgtgtttggtttggtttttgcactgcactaaggcaggagggttggagggctgggtgcagcctgggagtccgatggttttcagcaggagacggggtgtcccctgcagggggctaaactgcaggggcctgagattagctgtgaacatgtgggagcccgatgcatgtgggtcagggatctgggggcccccccagctggcgggaaccccaaatggacacaaactgtacatttgccaatgggtttttttcagaccatggtttttacttgcaaataaacctgagttcttttctgca

SEQ ID NO: 22940 - DNA, 5101 bp, Homo sapiens
  misc_feature 1..5101: note = ENST00000371851
  source 1..5101: mol_type = unassigned DNA; mol_type = unassigned DNA
cgcggattggggagcgctgcggcgactggctgcgtggagcccggcccggggcccgcaggcacttgcgtgtgtgaagcggggagatccggcgcgctgcccgttgcccgccccgcggccgcacgtgggcgggagcggcggcccgagaggagcccgaggagtaggaggaggaagaggaggggacgcacggcggcgcagcgggggacctggggcagcccgcgcgaagccccgccccggccctgagccccgcgcgcgcgcgggcgggatgccccgcggccgctgcactttggctcgagcactgccctgagccggtcgggcccgcgggcgccatggagcagtggcggcagtgcggccgctggctcatcgattgcaaggtcctgccgcccaaccaccgggtggtgtggccctcggccgtggtcttcgacctggcgcaggcgctgcgcgacggggtccttctgtgccagctgctgcacaacctctcccccggctccatcgacctcaaggacatcaacttccggccgcagatgtcccagtttctgtgtttgaagaacatacgcaccttcctgaaagtctgccacgataaatttggattaaggaacagcgagctgtttgacccctttgacctcttcgatgtgcgagactttggaaaggtcatctccgcggtgtcgaggctctccctgcacagcatcgcgcagaacaaagggatcaggccttttccctcagaggagaccacagagaatgacgatgacgtctaccgcagcctggaggagctggccgacgagcatgacctgggggaggacatctacgactgcgtcccgtgtgaggatggaggggacgacatctacgaggacatcatcaaggtggaggtgcagcagcccatgaaaatgggcatgactgaagatgacaagaggaactgctgcctgctggagatccaggagaccgaggccaagtactaccgcaccctggaggacattgagaagaactacatgagccccctgcggctggtgctgagcccggcggacatggcagctgtcttcattaacctggaggacctgatcaaggtgcatcacagcttcctgagggccatcgacgtgtccgtgatggtggggggcagcacgctggccaaggtcttcctcgatttcaaggaaaggcttctgatctacggggagtactgcagccacatggagcacgcccagaacacactgaaccagctcctggccagccgggaggacttcaggcagaaagtcgaggagtgcacactgaaggtccaggatggaaaatttaagctgcaagacctgctggtggtccccatgcagagggtgctcaaataccacctgctcttgaaggagcttctgagccattctgcggaacggcctgagaggcagcagctcaaagaagcactggaagccatgcaggacttggcgatgtacatcaatgaagttaaacgggacaaggagaccttgaggaaaatcagcgaatttcagagttctatagaaaatttgcaagtgaaactggaggaatttggaagaccaaagattgacggggaactgaaagtccggtccatagtcaaccacaccaagcaggacaggtacttgttcctgtttgacaaggtggtcatcgtctgcaagcggaagggctacagctacgagctcaaggagatcatcgagctgctgttccacaagatgaccgacgaccccatgaacaacaaggacgtcaagaagtggtcctacggcttctacctaattcaccttcaaggaaagcagggcttccagtttttctgcaaaacagaagatatgaagaggaagtggatggagcagtttgagatggccatgtcaaacatcaagccagacaaagccaatgccaaccaccacagtttccagatgtacacgtttgacaagaccaccaactgcaaagcctgcaaaatgttcctcaggggcaccttctaccagggatacatgtgtaccaagtgtggcgtcggggcacacaaggagtgcctggaagtgatacctccctgcaagttcacttctcctgcagatctggacgcctccggagcgggaccaggtcccaagatggtggccatgcagaattaccatggcaacccagcccctcccgggaagcctgtgctgaccttccagacgggcgacgtgcttgagctgctgaggggcgaccctgagtctccgtggtgggagggtcgtctggtacaaaccaggaagtcagggtatttccccagctcatctgtgaagccctgccctgtggatggaaggccgcccatcagccggccgccatcccgggagatcgactacactgcatacccctggtttgcaggtaacatggagaggcagcagacggacaacctgctcaagtcccacgccagcgggacctacctgatcagggagcggcctgccgaggctgagcgctttgcaataagcatcaagttcaatgatgaggtgaagcacatcaaggtggtggagaaggacaactggatccacatcacagaggccaagaaattcgacagcctcctggagttggtggagtactaccagtgccactcactgaaggagagcttcaagcagctggacaccacactcaagtacccctacaagtcccgggaacgttcggcctccagggcctccagccggtccccagcttcctgtgcttcctacaacttttcttttctcagtcctcagggcctcagctttgcttctcagggcccctccgctcccttctggtcagtgttcacgccccgcgtcatcggcacagctgtggccaggtataactttgccgcccgagatatgagggagctttcgctgcgggagggtgacgtggtgaggatctacagccgcatcggcggagaccagggctggtggaagggcgagaccaacggacggattggctggtttccttcaacgtacgtagaagaggagggcatccagtgacggcaggaacgtggacaagactcgcagattttcttgggagagtcactccagccctgaagtctgtctctagctcctctgtgactcagaggggaaataccaacctcccagtcttccactgcccacagggatagggagggtgttgagaatcctaaactcgaaccgtttcactgtcagcctgccctcggcgacccatcactgggtatgctattgtacatagaggaaacctgggctagccccacccagagcgcagaggagggggcaccgacagcgctgcgagccaggctctgggtagtggctgaggccagaggcccatcgcctgcccctgtccaactgagatggccttcaggagcctaggtttgaacagcagatgctgtcccaggaagggctagggacatcggaggggacctgcccccacaccctctgctcagcccctggactcagccttgcctgtcttttcctgctgctcccagggggaggtgtcagacctcgggaggcagacgggaccagagccaggctgttcactgtgggcccacttgccccactgtgctagggcgcgggaggagagagcactgtggtcgccctctgcagccactctggctcccaagacttccctgactcccccactcccctccttgccaggggcacacccggaccccacacggcaggcccctctcttgggaggggcctttggaatgatgaaattccaaccctgctgcccggtcagcggtaccgtttcctgccctctctctgagaggccctttctggagtcctgggaaggtgtctgcctggccgcgctgccagatcagtacatcttttgtaaaaaccctgaaatgggcagggaagaaaacagggatttcccctctctagatccctgccaggtccctctccaggaggcccctctgctctcctgaagggtggtccctgagggtctgcccagccttggcacgagaggttggttccagcccctggcagggcttccttccaagggcccctgcagcctacaaactgggcctcgggcgactcaaaataagtgctcttgggggtggctctaccccattacctcccccagccacaactcctggccttcgacttctggctgggttagccagaccctggtttctctaccctgatgttgcatgagacctggtaacagtgtctccctcccagctccttgccaaagcctctgttgagacctgggcttcttgtagccccttctccctctggccagctgcacagcctgtgggaggtgcccggcccaggctgggtgtgggggaagctggtccctgctgtgggtggcgctggggacctaggggctccttctgaggttggccttgtggcctctgggctgtatgcctctggggtgtagggaagaggcgggaggagtcatggggatggggagcggcagggggagagaggggccctcgacaaaggcttgggaaatgaggggaggtggaggcagggcaggggaagcgaagagtcagccttggagagagcaccctggggcctccgtgtcggggtacacccagcactttgcgacctgcggcccagcaggcgcggaggatggcggggaggaagccagcagcccctgtgtttactgtcgtcagaaaggtcttgtgttttggttttggggtttttgttttgtttgtgttttgtttggcttgtttgttttttaaggggaaaaaagtttgtaattatttcatccaaatctcccgttatatatctgtgaataataagagattttataatagcaagaaaatgatgtatattttagtttgttgacaaataagtcatcatgatcacgaaggacactgagaaaaaataatttagaaccctggtttttgtgaatttttttgttttgtgtttctttgttttgagatttgtgtttggtttggtttttgcactgcactaaggcaggagggttggagggctgggtgcagcctgggagtccgatggttttcagcaggagacggggtgtcccctgcagggggctaaactgcaggggcctgagattagctgtgaacatgtgggagcccgatgcatgtgggtcagggatctgggggcccccccagctggcgggaaccccaaatggacacaaactgtacatttgccaatgggtttttttcagaccatggtttttacttgcaaataaacctgagttcttttctgca

SEQ ID NO: 22941 - DNA, 523 bp, Homo sapiens
  misc_feature 1..523: note = ENST00000486113
  source 1..523: mol_type = unassigned DNA; mol_type = unassigned DNA
gcggccgctggctcatcgattgcaaggtcctgccgcccaaccaccgggtggtgtggccctcggccgtggtcttcgacctggcgcaggcgctgcgcgacggggtccttctgtgccagctgctgcacaacctctcccccggctccatcgacctcaaggacatcaacttccggccgcagatgtcccagtttctgtgtttgaagaacatacgcaccttcctgaaagtctgccacgataaatttggattaaggaacagcgagctgtttgacccctttgacctcttcgatgtgcgagactttggaaaggtcatctccgcggtgtcgaggctctccctgcacagcatcgcgcagaacaaagggatcaggtgagctctccggagtgcgctgccaaggccgggtcctttcatctccatcgacaccagcgtgccttgtcacagatactggggttggaagcagatgccctctgcctgtgtctttatcatgcatttgcagcgtgttgtcgcgtaacccgttggcggctgcaggaa

SEQ ID NO: 22942 - DNA, 506 bp, Homo sapiens
  misc_feature 1..506: note = ENST00000472905
  source 1..506: mol_type = unassigned DNA; mol_type = unassigned DNA
gctgctgttgctgttacggtttttacagagcttacagttttaataagtttttccttgccctccctttgttttttccctttagtttctgtgtttgaagaacatacgcaccttcctgaaagtctgccacgataaatttggattaaggaacagcgagctgtttgacccctttgacctcttcgatgtgcgagactttggaaaggatcctaggaggctgtgatttcaagacctgagttcaagctctgggagcggccttggcccatgagtggatcccttgatctccatgccagtggtgtgaggacttggctctgggaagaggggcctctgggtggcagtggtggcagcagcccacgcttcaggacgcactaggagcagaggaggtgtgctcaggccctgccattgtttctcatttgcccccaagacattaattgtgtctgttggagcctgacaatttgatgtttgcagcaaaaaagccaaatgagaccaagaaggagaaaagaaaaaaaaat

SEQ ID NO: 22943 - DNA, 1147 bp, Homo sapiens
  misc_feature 1..1147: note = ENST00000234392
  source 1..1147: mol_type = unassigned DNA; mol_type = unassigned DNA
ccgccgtagaggggttggcagtggcggtcagcatgggcgatgggggcgccgagcgcgaccggggccccgcgcgccgggcggagtctggtggcggcggtgggcgctgcggagaccgcagcggagcgggggacttgcgagctgatggcggtggccacagcccaacggaggtggccgggacctcagcctccagtcccgcaggctccagggagagtggagccgacagcgacgggcagcccgggcccggcgaggcagaccactgccgccgcatactggtgcgagatgccaaagggacaattcgggaaattgtcctgcctaagggcctggacctggaccggcccaagcggacacgtacatccttcactgccgagcagctgtaccgcctggagatggagttccagcgctgccagtatgtggtgggccgcgagcgcactgagctggcccgccagctgaacctctccgagacccaggtgaaggtctggttccagaaccgccgcaccaagcagaagaaagaccagagcagagacctggagaagcgggcgtcctcctcagcctccgaggcctttgccacctccaacattctgcggctgctggagcagggccggctgctctctgtgcccagggcccctagcctcctggcgctgacccctagcctgccaggcctacctgccagccacaggggcacctccttaggtgaccccaggaactcctccccacgcctcaacccgctgtcctcggcctcagcgtcccccccactgccgccccctctgccagctgtctgcttttcctcggccccgctcctggatctgcctgccggctacgaactgggttcctcggccttcgagccatacagctggctagaacggaaagtgggcagcgccagcagctgcaagaaagctaacacttaagactcccaccctgtgacactgagtcccgagcacagcaccttcccagtctcctgtgccccagcggacagcactgagcaggccccggagaggaggggctgcagccacacactcttccccacctgccccccagctcagagactcgtgaccaaatggccttggtcccgcagcttgtgtgcgtgagtgcagtgtgagtgtgtgtgtctctcactgaaataaaaggaaaacaatgacaagaagggaaa

SEQ ID NO: 22944 - DNA, 12625 bp, Homo sapiens
  misc_feature 1..12625: note = ENST00000265077
  source 1..12625: mol_type = unassigned DNA; mol_type = unassigned DNA
gctgtccccaagccgattggtacttcttgtcaggaagaaacgccaagaggtgggagtgcctggggagggaggcaggcggtccctaccgcaggcgcggggagctgcctttccgcccctccgcctgctttccaagcctggactcttaggagtggctgaagctgcggagcgcttttggagcctgtgaatgaaccctcctcctctccctcctccttcttctcgctgagtctcctcctcggctctgacggtacagtgatataatgatgatgggtgtcacaacccgcatttgaacttgcaggcgagctgccccgagcctttctggggaagaactccaggcgtgcggacgcaacagccgagaacattaggtgttgtggacaggagctgggaccaagatcttcggccagccccgcatcctcccgcatcttccagcaccgtcccgcaccctccgcatccttccccgggccaccacgcttcctatgtgacccgcctgggcaacgccgaacccagtcgcgcagcgctgcagtgaattttccccccaaactgcaataagccgccttccaaggccaagatgttcataaatataaagagcatcttatggatgtgttcaaccttaatagtaacccatgcgctacataaagtcaaagtgggaaaaagcccaccggtgaggggctccctctctggaaaagtcagcctaccttgtcatttttcaacgatgcctactttgccacccagttacaacaccagtgaatttctccgcatcaaatggtctaagattgaagtggacaaaaatggaaaagatttgaaagagactactgtccttgtggcccaaaatggaaatatcaagattggtcaggactacaaagggagagtgtctgtgcccacacatcccgaggctgtgggcgatgcctccctcactgtggtcaagctgctggcaagtgatgcgggtctttaccgctgtgacgtcatgtacgggattgaagacacacaagacacggtgtcactgactgtggatggggttgtgtttcactacagggcggcaaccagcaggtacacactgaattttgaggctgctcagaaggcttgtttggacgttggggcagtcatagcaactccagagcagctctttgctgcctatgaagatggatttgagcagtgtgacgcaggctggctggctgatcagactgtcagatatcccatccgggctcccagagtaggctgttatggagataagatgggaaaggcaggagtcaggacttatggattccgttctccccaggaaacttacgatgtgtattgttatgtggatcatctggatggtgatgtgttccacctcactgtccccagtaaattcaccttcgaggaggctgcaaaagagtgtgaaaaccaggatgccaggctggcaacagtgggggaactccaggcggcatggaggaacggctttgaccagtgcgattacgggtggctgtcggatgccagcgtgcgccaccctgtgactgtggccagggcccagtgtggaggtggtctacttggggtgagaaccctgtatcgttttgagaaccagacaggcttccctccccctgatagcagatttgatgcctactgctttaaacctaaagaggctacaaccatcgatttgagtatcctcgcagaaactgcatcacccagtttatccaaagaaccacaaatggtttctgatagaactacaccaatcatccctttagttgatgaattacctgtcattccaacagagttccctcccgtgggaaatattgtcagttttgaacagaaagccacagtccaacctcaggctatcacagatagtttagccaccaaattacccacacctactggcagtaccaagaagccctgggatatggatgactactcaccttctgcttcaggacctcttggaaagctagacatatcagaaattaaggaagaagtgctccagagtacaactggcgtctctcattatgctacggattcatgggatggtgtcgtggaagataaacaaacacaagaatcggttacacagattgaacaaatagaagtgggtcctttggtaacatctatggaaatcttaaagcacattccttccaaggaattccctgtaactgaaacaccattggtaactgcaagaatgatcctggaatccaaaactgaaaagaaaatggtaagcactgtttctgaattggtaaccacaggtcactatggattcaccttgggagaagaggatgatgaagacagaacacttacagttggatctgatgagagcaccttgatctttgaccaaattcctgaagtcattacggtgtcaaagacttcagaagacaccatccacactcatttagaagacttggagtcagtctcagcatccacaactgtttcccctttaattatgcctgataataatggatcatccatggatgactgggaagagagacaaactagtggtaggataacggaagagtttcttggcaaatatctgtctactacaccttttccatcacagcatcgtacagaaatagaattgtttccttattctggtgataaaatattagtagagggaatttccacagttatttatccttctctacaaacagaaatgacacatagaagagaaagaacagaaacactaataccagagatgagaacagatacttatacagatgaaatacaagaagagatcactaaaagtccatttatgggaaaaacagaagaagaagtcttctctgggatgaaactctctacatctctctcagagccaattcatgttacagagtcttctgtggaaatgaccaagtcttttgatttcccaacattgataacaaagttaagtgcagagccaacagaagtaagagatatggaggaagactttacagcaactccaggtactacaaaatatgatgaaaatattacaacagtgcttttggcccatggtactttaagtgttgaagcagccactgtatcaaaatggtcatgggatgaagataatacaacatccaagcctttagagtctacagaaccttcagcctcttcaaaattgccccctgccttactcacaactgtggggatgaatggaaaggataaagacatcccaagtttcactgaagatggagcagatgaatttactcttattccagatagtactcaaaagcagttagaggaggttactgatgaagacatagcagcccatggaaaattcacaattagatttcagccaactacatcaactggtattgcagaaaagtcaactttgagagattctacaactgaagaaaaagttccacctatcacaagcactgaaggccaagtttatgcaaccatggaaggaagtgctttgggtgaagtagaagatgtggacctctctaagccagtatctactgttccccaatttgcacacacttcagaggtggaaggattagcatttgttagttatagtagcacccaagagcctactacttatgtagactcttcccataccattcctctttctgtaattcccaagacagactggggagtgttagtaccttctgttccatcagaagatgaagttctaggtgaaccctctcaagacatacttgtcattgatcagactcgccttgaagcgactatttctccagaaactatgagaacaacaaaaatcacagagggaacaactcaggaagaattcccttggaaagaacagactgcagagaaaccagttcctgctctcagttctacagcttggactcccaaggaggcagtaacaccactggatgaacaagagggcgatggatcagcatatacagtctctgaagatgaattgttgacaggttctgagagggtcccagttttagaaacaactccagttggaaaaattgatcacagtgtgtcttatccaccaggtgctgtaactgagcacaaagtgaaaacagatgaagtggtaacactaacaccacgcattgggccaaaagtatctttaagtccagggcctgaacaaaaatatgaaacagaaggtagtagtacaacaggatttacatcatctttgagtccttttagtacccacattacccagcttatggaagaaaccactactgagaaaacatccctagaggatattgatttaggctcaggattatttgaaaagcccaaagccacagaactcatagaattttcaacaatcaaagtcacagttccaagtgatattaccactgccttcagttcagtagacagacttcacacaacttcagcattcaagccatcttccgcgatcactaagaaaccacctctcatcgacagggaacctggtgaagaaacaaccagtgacatggtaatcattggagaatcaacatctcatgttcctcccactacccttgaagatattgtagccaaggaaacagaaaccgatattgatagagagtatttcacgacttcaagtcctcctgctacacagccaacaagaccacccactgtggaagacaaagaggcctttggacctcaggcgctttctacgccacagcccccagcaagcacaaaatttcaccctgacattaatgtttatattattgaggtcagagaaaataagacaggtcgaatgagtgatttgagtgtaattggtcatccaatagattcagaatctaaagaagatgaaccttgtagtgaagaaacagatccagtgcatgatctaatggctgaaattttacctgaattccctgacataattgaaatagacctataccacagtgaagaaaatgaagaagaagaagaagagtgtgcaaatgctactgatgtgacaaccaccccatctgtgcagtacataaatgggaagcatctcgttaccactgtgcccaaggacccagaagctgcagaagctaggcgtggccagtttgaaagtgttgcaccttctcagaatttctcggacagctctgaaagtgatactcatccatttgtaatagccaaaacggaattgtctactgctgtgcaacctaatgaatctacagaaacaactgagtctcttgaagttacatggaagcctgagacttaccctgaaacatcagaacatttttcaggtggtgagcctgatgttttccccacagtcccattccatgaggaatttgaaagtggaacagccaaaaaaggggcagaatcagtcacagagagagatactgaagttggtcatcaggcacatgaacatactgaacctgtatctctgtttcctgaagagtcttcaggagagattgccattgaccaagaatctcagaaaatagcctttgcaagggctacagaagtaacatttggtgaagaggtagaaaaaagtacttctgtcacatacactcccactatagttccaagttctgcatcagcatatgtttcagaggaagaagcagttaccctaataggaaatccttggccagatgacctgttgtctaccaaagaaagctgggtagaagcaactcctagacaagttgtagagctctcagggagttcttcgattccaattacagaaggctctggagaagcagaagaagatgaagatacaatgttcaccatggtaactgatttatcacagagaaatactactgatacactcattactttagacactagcaggataatcacagaaagcttttttgaggttcctgcaaccaccatttatccagtttctgaacaaccttctgcaaaagtggtgcctaccaagtttgtaagtgaaacagacacttctgagtggatttccagtaccactgttgaggaaaagaaaaggaaggaggaggagggaactacaggtacggcttctacatttgaggtatattcatctacacagagatcggatcaattaattttaccctttgaattagaaagtccaaatgtagctacatctagtgattcaggtaccaggaaaagttttatgtccttgacaacaccaacacagtctgaaagggaaatgacagattctactcctgtctttacagaaacaaatacattagaaaatttgggggcacagaccactgagcacagcagtatccatcaacctggggttcaggaagggctgaccactctcccacgtagtcctgcctctgtctttatggagcagggctctggagaagctgctgccgacccagaaaccaccactgtttcttcattttcattaaacgtagagtatgcaattcaagccgaaaaggaagtagctggcactttgtctccgcatgtggaaactacattctccactgagccaacaggactggttttgagtacagtaatggacagagtagttgctgaaaatataacccaaacatccagggaaatagtgatttcagagcgattaggagaaccaaattatggggcagaaataaggggcttttccacaggttttcctttggaggaagatttcagtggtgactttagagaatactcaacagtgtctcatcccatagcaaaagaagaaacggtaatgatggaaggctctggagatgcagcatttagggacacccagacttcaccatctacagtacctacttcagttcacatcagtcacatatctgactcagaaggacccagtagcaccatggtcagcacttcagccttcccctgggaagagtttacatcctcagctgagggctcaggtgagcaactggtcacagtcagcagctctgttgttccagtgcttcccagtgctgtgcaaaagttttctggtacagcttcctccattatcgacgaaggattgggagaagtgggtactgtcaatgaaattgatagaagatccaccattttaccaacagcagaagtggaaggtacgaaagctccagtagagaaggaggaagtaaaggtcagtggcacagtttcaacaaactttccccaaactatagagccagccaaattatggtctaggcaagaagtcaaccctgtaagacaagaaattgaaagtgaaacaacatcagaggaacaaattcaagaagaaaagtcatttgaatcccctcaaaactctcctgcaacagaacaaacaatctttgattcacagacatttactgaaactgaactcaaaaccacagattattctgtactaacaacaaagaaaacttacagtgatgataaagaaatgaaggaggaagacacttctttagttaacatgtctactccagatccagatgcaaatggcttggaatcttacacaactctccctgaagctactgaaaagtcacattttttcttagctactgcattagtaactgaatctataccagctgaacatgtagtcacagattcaccaatcaaaaaggaagaaagtacaaaacattttccgaaaggcatgagaccaacaattcaagagtcagatactgagctcttattctctggactgggatcaggagaagaagttttacctactctaccaacagagtcagtgaattttactgaagtggaacaaatcaataacacattatatccccacacttctcaagtggaaagtacctcaagtgacaaaattgaagactttaacagaatggaaaatgtggcaaaagaagttggaccactcgtatctcaaacagacatctttgaaggtagtgggtcagtaaccagcacaacattaatagaaattttaagtgacactggagcagaaggacccacggtggcacctctccctttctccacggacatcggacatcctcaaaatcagactgtcaggtgggcagaagaaatccagactagtagaccacaaaccataactgaacaagactctaacaagaattcttcaacagcagaaattaacgaaacaacaacctcatctactgattttctggctagagcttatggttttgaaatggccaaagaatttgttacatcagcaccaaaaccatctgacttgtattatgaaccttctggagaaggatctggagaagtggatattgttgattcatttcacacttctgcaactactcaggcaaccagacaagaaagcagcaccacatttgtttctgatgggtccctggaaaaacatcctgaggtgccaagcgctaaagctgttactgctgatggattcccaacagtttcagtgatgctgcctcttcattcagagcagaacaaaagctcccctgatccaactagcacactgtcaaatacagtgtcatatgagaggtccacagacggtagtttccaagaccgtttcagggaattcgaggattccaccttaaaacctaacagaaaaaaacccactgaaaatattatcatagacctggacaaagaggacaaggatttaatattgacaattacagagagtaccatccttgaaattctacctgagctgacatcggataaaaatactatcatagatattgatcatactaaacctgtgtatgaagacattcttggaatgcaaacagatatagatacagaggtaccatcagaaccacatgacagtaatgatgaaagtaatgatgacagcactcaagttcaagagatctatgaggcagctgtcaacctttctttaactgaggaaacatttgagggctctgctgatgttctggctagctacactcaggcaacacatgatgaatcaatgacttatgaagatagaagccaactagatcacatgggctttcacttcacaactgggatccctgctcctagcacagaaacagaattagacgttttacttcccacggcaacatccctgccaattcctcgtaagtctgccacagttattccagagattgaaggaataaaagctgaagcaaaagccctggatgacatgtttgaatcaagcactttgtctgatggtcaagctattgcagaccaaagtgaaataataccaacattgggccaatttgaaaggactcaggaggagtatgaagacaaaaaacatgctggtccttcttttcagccagaattctcttcaggagctgaggaggcattagtagaccatactccctatctaagtattgctactacccaccttatggatcagagtgtaacagaggtgcctgatgtgatggaaggatccaatcccccatattacactgatacaacattagcagtttcaacatttgcgaagttgtcttctcagacaccatcatctcccctcactatctactcaggcagtgaagcctctggacacacagagatcccccagcccagtgctctgccaggaatagacgtcggctcatctgtaatgtccccacaggattcttttaaggaaattcatgtaaatattgaagcgactttcaaaccatcaagtgaggaataccttcacataactgagcctccctctttatctcctgacacaaaattagaaccttcagaagatgatggtaaacctgagttattagaagaaatggaagcttctcccacagaacttattgctgtggaaggaactgagattctccaagatttccaaaacaaaaccgatggtcaagtttctggagaagcaatcaagatgtttcccaccattaaaacacctgaggctggaactgttattacaactgccgatgaaattgaattagaaggtgctacacagtggccacactctacttctgcttctgccacctatggggtcgaggcaggtgtggtgccttggctaagtccacagacttctgagaggcccacgctttcttcttctccagaaataaaccctgaaactcaagcagctttaatcagagggcaggattccacgatagcagcatcagaacagcaagtggcagcgagaattcttgattccaatgatcaggcaacagtaaaccctgtggaatttaatactgaggttgcaacaccaccattttcccttctggagacttctaatgaaacagatttcctgattggcattaatgaagagtcagtggaaggcacggcaatctatttaccaggacctgatcgctgcaaaatgaacccgtgccttaacggaggcacctgttatcctactgaaacttcctacgtatgcacctgtgtgccaggatacagcggagaccagtgtgaacttgattttgatgaatgtcactctaatccctgtcgtaatggagccacttgtgttgatggttttaacacattcaggtgcctctgccttccaagttatgttggtgcactttgtgagcaagataccgagacatgtgactatggctggcacaaattccaagggcagtgctacaaatactttgcccatcgacgcacatgggatgcagctgaacgggaatgccgtctgcagggtgcccatctcacaagcatcctgtctcacgaagaacaaatgtttgttaatcgtgtgggccatgattatcagtggataggcctcaatgacaagatgtttgagcatgacttccgttggactgatggcagcacactgcaatacgagaattggagacccaaccagccagacagcttcttttctgctggagaagactgtgttgtaatcatttggcatgagaatggccagtggaatgatgttccctgcaattaccatctcacctatacgtgcaagaaaggaacagtcgcttgcggccagccccctgttgtagaaaatgccaagacctttggaaagatgaaacctcgttatgaaatcaactccctgattagataccactgcaaagatggtttcattcaacgtcaccttccaactatccggtgcttaggaaatggaagatgggctatacctaaaattacctgcatgaacccatctgcataccaaaggacttattctatgaaatactttaaaaattcctcatcagcaaaggacaattcaataaatacatccaaacatgatcatcgttggagccggaggtggcaggagtcgaggcgctgatccctaaaatggcgaacatgtgttttcatcatttcagccaaagtcctaacttcctgtgcctttcctatcacctcgagaagtaattatcagttggtttggatttttggaccaccgttcagtcattttgggttgccgtgctcccaaaacattttaaatgaaagtattggcattcaaaaagacagcagacaaaatgaaagaaaatgagagcagaaagtaagcatttccagcctatctaatttctttagttttctatttgcctccagtgcagtccatttcctaatgtataccagcctactgtactatttaaaatgctcaatttcagcaccgatggccatgtaaataagatgatttaatgttgattttaatcctgtatataaaataaaaagtcacaatgagtttgggcatatttaatgatgattatggagccttagaggtctttaatcattggttcggctgcttttatgtagtttaggctggaaatggtttcacttgctctttgactgtcagcaagactgaagatggcttttcctggacagctagaaaacacaaaatcttgtaggtcattgcacctatctcagccataggtgcagtttgcttctacatgatgctaaaggctgcgaatgggatcctgatggaactaaggactccaatgtcgaactcttctttgctgcattcctttttcttcacttacaagaaaggcctgaatggaggacttttctgtaaccaggaacattttttaggggtcaaagtgctaataattaactcaaccaggtctactttttaatggctttcataacactaactcataaggttaccgatcaatgcatttcatacggatatagacctagggctctggagggtgggggattgttaaaacacatgcaaaaaaaaaaaaaaaaaaaaaaaaagaaattttgtatatataaccattttaatcttttataaagttttgaatgttcatgtatgaatgctgcagctgtgaagcatacataaataaatgaagtaagccatactgatttaatttattggatgttattttccctaagacctgaaaatgaacatagtatgctagttatttttcagtgttagccttttactttcctcacacaatttggaatcatataatataggtactttgtccctgattaaataatgtgacggatagaatgcatcaagtgtttattatgaaaagagtggaaaagtatatagcttttagcaaaaggtgtttgcccattctaagaaatgagcgaatatatagaaatagtgtgggcatttcttcctgttaggtggagtgtatgtgttgacatttctccccatctcttcccactctgttttctccccattatttgaataaagtgactgctgaagatgactttgaatccttatccacttaatttaatgtttaaagaaaaacctgtaatggaaagtaagactccttccctaatttcagtttagagcaacttgaagaagagtagacaaaaaataaaatgcacatagaaaaagagaaaaagggcacaaagggattggcccaatattgattctttttttataaaacctcctttggcttagaaggaatgactctagctacaataatacacagtatgtttaagcaggttcccttggttgttgcattaaatgtaatccacctttaggtattttagagcacagaacaacactgtgttgatctagtaggtttctatttttcctttctctttacaatgcacataatactttcctgtatttatatcataacgtgtatagtgtaaaatgtgaatgactttttttgtgaatgaaaatctaaaatctttgtaactttttatatctgcttttgtttcaccaaagaaacctaaaatccttcttttactacac

SEQ ID NO: 22945 - DNA, 498 bp, Homo sapiens
  misc_feature 1..498: note = ENST00000503923
  source 1..498: mol_type = unassigned DNA; mol_type = unassigned DNA
tgaagctgcggagcgcttttggagcctgtgaatgaaccctcctcctctccctcctccttcttctcgctgagtctcctcctcggctctgacggtacagtgatataatgatgatgggtgtcacaacccgcatttgaacttgcaggcgagctgccccgagcctttctggggaagaactccaggcgtgcggacgcaacagccgagaacattaggtgttgtggacaggagctgggaccaagatcttcggccagccccgcatcctcccgcatcttccagcaccgtcccgcaccctccgcatccttccccgggccaccacgcttcctatgtgacccgcctgggcaacgccgaacccagtcgcgcagcgctgcagtgaattttccccccaaactgcaataagccgccttccaaggccaagatgttcataaatataaagagcatcttatggatgtgttcaaccttaatagtaacccatgcgctacataaaggtgagtgtgctaacaa

SEQ ID NO: 22946 - DNA, 5923 bp, Homo sapiens
  misc_feature 1..5923: note = ENST00000512590
  source 1..5923: mol_type = unassigned DNA; mol_type = unassigned DNA
gctgccccgagcctttctggggaagaactccaggcgtgcggacgcaacagccgagaacattaggtgttgtggacaggagctgggaccaagatcttcggccagccccgcatcctcccgcatcttccagcaccgtcccgcaccctccgcatccttccccgggccaccacgcttcctatgtgacccgcctgggcaacgccgaacccagtcgcgcagcgctgcagtgaattttccccccaaactgcaataagccgccttccaaggccaagatgttcataaatataaagagcatcttatggatgtgttcaaccttaatagtaacccatgcgctacataaagtcaaagtgggaaaaagcccaccggtgaggggctccctctctggaaaagtcagcctaccttgtcatttttcaacgatgcctactttgccacccagttacaacaccagtgaatttctccgcatcaaatggtctaagattgaagtggacaaaaatggaaaagatttgaaagagactactgtccttgtggcccaaaatggaaatatcaagattggtcaggactacaaagggagagtgtctgtgcccacacatcccgaggctgtgggcgatgcctccctcactgtggtcaagctgctggcaagtgatgcgggtctttaccgctgtgacgtcatgtacgggattgaagacacacaagacacggtgtcactgactgtggatggggttgtgtttcactacagggcggcaaccagcaggtacacactgaattttgaggctgctcagaaggcttgtttggacgttggggcagtcatagcaactccagagcagctctttgctgcctatgaagatggatttgagcagtgtgacgcaggctggctggctgatcagactgtcagatatcccatccgggctcccagagtaggctgttatggagataagatgggaaaggcaggagtcaggacttatggattccgttctccccaggaaacttacgatgtgtattgttatgtggatcatctggatggtgatgtgttccacctcactgtccccagtaaattcaccttcgaggaggctgcaaaagagtgtgaaaaccaggatgccaggctggcaacagtgggggaactccaggcggcatggaggaacggctttgaccagtgcgattacgggtggctgtcggatgccagcgtgcgccaccctgtgactgtggccagggcccagtgtggaggtggtctacttggggtgagaaccctgtatcgttttgagaaccagacaggcttccctccccctgatagcagatttgatgcctactgctttaaacctaaagaggctacaaccatcgatttgagtatcctcgcagaaactgcatcacccagtttatccaaagaaccacaaatggtttctgatagaactacaccaatcatccctttagttgatgaattacctgtcattccaacagagttccctcccgtgggaaatattgtcagttttgaacagaaagccacagtccaacctcaggctatcacagatagtttagccaccaaattacccacacctactggcagtaccaagaagccctgggatatggatgactactcaccttctgcttcaggacctcttggaaagctagacatatcagaaattaaggaagaagtgctccagagtacaactggcgtctctcattatgctacggattcatgggatggtgtcgtggaagataaacaaacacaagaatcggttacacagattgaacaaatagaagtgggtcctttggtaacatctatggaaatcttaaagcacattccttccaaggaattccctgtaactgaaacaccattggtaactgcaagaatgatcctggaatccaaaactgaaaagaaaatggtaagcactgtttctgaattggtaaccacaggtcactatggattcaccttgggagaagaggatgatgaagacagaacacttacagttggatctgatgagagcaccttgatctttgaccaaattcctgaagtcattacggtgtcaaagacttcagaagacaccatccacactcatttagaagacttggagtcagtctcagcatccacaactgtttcccctttaattatgcctgataataatggatcatccatggatgactgggaagagagacaaactagtggtaggataacggaagagtttcttggcaaatatctgtctactacaccttttccatcacagcatcgtacagaaatagaattgtttccttattctggtgataaaatattagtagagggaatttccacagttatttatccttctctacaaacagaaatgacacatagaagagaaagaacagaaacactaataccagagatgagaacagatacttatacagatgaaatacaagaagagatcactaaaagtccatttatgggaaaaacagaagaagaagtcttctctgggatgaaactctctacatctctctcagagccaattcatgttacagagtcttctgtggaaatgaccaagtcttttgatttcccaacattgataacaaagttaagtgcagagccaacagaagtaagagatatggaggaagactttacagcaactccaggtactacaaaatatgatgaaaatattacaacagtgcttttggcccatggtactttaagtgttgaagcagccactgtatcaaaatggtcatgggatgaagataatacaacatccaagcctttagagtctacagaaccttcagcctcttcaaaattgccccctgccttactcacaactgtggggatgaatggaaaggataaagacatcccaagtttcactgaagatggagcagatgaatttactcttattccagatagtactcaaaagcagttagaggaggttactgatgaagacatagcagcccatggaaaattcacaattagatttcagccaactacatcaactggtattgcagaaaagtcaactttgagagattctacaactgaagaaaaagttccacctatcacaagcactgaaggccaagtttatgcaaccatggaaggaagtgctttgggtgaagtagaagatgtggacctctctaagccagtatctactgttccccaatttgcacacacttcagaggtggaaggattagcatttgttagttatagtagcacccaagagcctactacttatgtagactcttcccataccattcctctttctgtaattcccaagacagactggggagtgttagtaccttctgttccatcagaagatgaagttctaggtgaaccctctcaagacatacttgtcattgatcagactcgccttgaagcgactatttctccagaaactatgagaacaacaaaaatcacagagggaacaactcaggaagaattcccttggaaagaacagactgcagagaaaccagttcctgctctcagttctacagcttggactcccaaggaggcagtaacaccactggatgaacaagagggcgatggatcagcatatacagtctctgaagatgaattgttgacaggttctgagagggtcccagttttagaaacaactccagttggaaaaattgatcacagtgtgtcttatccaccaggtgctgtaactgagcacaaagtgaaaacagatgaagtggtaacactaacaccacgcattgggccaaaagtatctttaagtccagggcctgaacaaaaatatgaaacagaaggtagtagtacaacaggatttacatcatctttgagtccttttagtacccacattacccagcttatggaagaaaccactactgagaaaacatccctagaggatattgatttaggctcaggattatttgaaaagcccaaagccacagaactcatagaattttcaacaatcaaagtcacagttccaagtgatattaccactgccttcagttcagtagacagacttcacacaacttcagcattcaagccatcttccgcgatcactaagaaaccacctctcatcgacagggaacctggtgaagaaacaaccagtgacatggtaatcattggagaatcaacatctcatgttcctcccactacccttgaagatattgtagccaaggaaacagaaaccgatattgatagagagtatttcacgacttcaagtcctcctgctacacagccaacaagaccacccactgtggaagacaaagaggcctttggacctcaggcgctttctacgccacagcccccagcaagcacaaaatttcaccctgacattaatgtttatattattgaggtcagagaaaataagacaggacctgatcgctgcaaaatgaacccgtgccttaacggaggcacctgttatcctactgaaacttcctacgtatgcacctgtgtgccaggatacagcggagaccagtgtgaacttgattttgatgaatgtcactctaatccctgtcgtaatggagccacttgtgttgatggttttaacacattcaggtgcctctgccttccaagttatgttggtgcactttgtgagcaagataccgagacatgtgactatggctggcacaaattccaagggcagtgctacaaatactttgcccatcgacgcacatgggatgcagctgaacgggaatgccgtctgcagggtgcccatctcacaagcatcctgtctcacgaagaacaaatgtttgttaatcgtgtgggccatgattatcagtggataggcctcaatgacaagatgtttgagcatgacttccgttggactgatggcagcacactgcaatacgagaattggagacccaaccagccagacagcttcttttctgctggagaagactgtgttgtaatcatttggcatgagaatggccagtggaatgatgttccctgcaattaccatctcacctatacgtgcaagaaaggaacagtcgcttgcggccagccccctgttgtagaaaatgccaagacctttggaaagatgaaacctcgttatgaaatcaactccctgattagataccactgcaaagatggtttcattcaacgtcaccttccaactatccggtgcttaggaaatggaagatgggctatacctaaaattacctgcatgaacccatctgcataccaaaggacttattctatgaaatactttaaaaattcctcatcagcaaaggacaattcaataaatacatccaaacatgatcatcgttggagccggaggtggcaggagtcgaggcgctgatccctaaaatggcgaacatgtgttttcatcatttcagccaaagtcctaacttcctgtgcctttcctatcacctcgagaagtaattatcagttggtttggatttttggaccaccgttcagtcattttgggttgccgtgctcccaaaacattttaaatgaaagtattggcattcaaaaagacagcagacaaaatgaaagaaaatgagagcagaaagtaagcatttccagcctatctaatttctttagttttctatttgcctccagtgcagtccatttcctaatgtataccagcctactgtactatttaaaatgctcaatttcagcaccgatggccatgtaaataagatgatttaatgttgattttaatcctgtatataaaataaaaagtcacaatgagtttgggcatatttaatgatgattatggagccttagaggtctttaatcattggttcggctgcttttatgtagtttaggctggaaatggtttcacttgctctttgactgtcagcaagactgaagatggcttttcctggacagctagaaaacacaaaatcttgtaggtcattgcacctatctcagccataggtgcagtttgcttctacatgatgctaaaggctgcgaatgggatcctgatggaactaaggactccaatgtcgaactcttctttgctgcattcctttttcttcacttacaagaaaggcctgaatggaggacttttctgtaaccagg

SEQ ID NO: 22947 - DNA, 3973 bp, Homo sapiens
  misc_feature 1..3973: note = ENST00000513960
  source 1..3973: mol_type = unassigned DNA; mol_type = unassigned DNA
tttctggggaagaactccaggcgtgcggacgcaacagccgagaacattaggtgttgtggacaggagctgggaccaagatcttcggccagccccgcatcctcccgcatcttccagcaccgtcccgcaccctccgcatccttccccgggccaccacgcttcctatgtgacccgcctgggcaacgccgaacccagtcgcgcagcgctgcagtgaattttccccccaaactgcaataagccgccttccaaggccaagatgttcataaatataaagagcatcttatggatgtgttcaaccttaatagtaacccatgcgctacataaagtcaaagtgggaaaaagcccaccggtgaggggctccctctctggaaaagtcagcctaccttgtcatttttcaacgatgcctactttgccacccagttacaacaccagtgaatttctccgcatcaaatggtctaagattgaagtggacaaaaatggaaaagatttgaaagagactactgtccttgtggcccaaaatggaaatatcaagattggtcaggactacaaagggagagtgtctgtgcccacacatcccgaggctgtgggcgatgcctccctcactgtggtcaagctgctggcaagtgatgcgggtctttaccgctgtgacgtcatgtacgggattgaagacacacaagacacggtgtcactgactgtggatggggttgtgtttcactacagggcggcaaccagcaggtacacactgaattttgaggctgctcagaaggcttgtttggacgttggggcagtcatagcaactccagagcagctctttgctgcctatgaagatggatttgagcagtgtgacgcaggctggctggctgatcagactgtcagatatcccatccgggctcccagagtaggctgttatggagataagatgggaaaggcaggagtcaggacttatggattccgttctccccaggaaacttacgatgtgtattgttatgtggatcatctggatggtgatgtgttccacctcactgtccccagtaaattcaccttcgaggaggctgcaaaagagtgtgaaaaccaggatgccaggctggcaacagtgggggaactccaggcggcatggaggaacggctttgaccagtgcgattacgggtggctgtcggatgccagcgtgcgccaccctgtgactgtggccagggcccagtgtggaggtggtctacttggggtgagaaccctgtatcgttttgagaaccagacaggcttccctccccctgatagcagatttgatgcctactgctttaaacgtcgaatgagtgatttgagtgtaattggtcatccaatagattcagaatctaaagaagatgaaccttgtagtgaagaaacagatccagtgcatgatctaatggctgaaattttacctgaattccctgacataattgaaatagacctataccacagtgaagaaaatgaagaagaagaagaagagtgtgcaaatgctactgatgtgacaaccaccccatctgtgcagtacataaatgggaagcatctcgttaccactgtgcccaaggacccagaagctgcagaagctaggcgtggccagtttgaaagtgttgcaccttctcagaatttctcggacagctctgaaagtgatactcatccatttgtaatagccaaaacggaattgtctactgctgtgcaacctaatgaatctacagaaacaactgagtctcttgaagttacatggaagcctgagacttaccctgaaacatcagaacatttttcaggtggtgagcctgatgttttccccacagtcccattccatgaggaatttgaaagtggaacagccaaaaaaggggcagaatcagtcacagagagagatactgaagttggtcatcaggcacatgaacatactgaacctgtatctctgtttcctgaagagtcttcaggagagattgccattgaccaagaatctcagaaaatagcctttgcaagggctacagaagtaacatttggtgaagaggtagaaaaaagtacttctgtcacatacactcccactatagttccaagttctgcatcagcatatgtttcagaggaagaagcagttaccctaataggaaatccttggccagatgacctgttgtctaccaaagaaagctgggtagaagcaactcctagacaagttgtagagctctcagggagttcttcgattccaattacagaaggctctggagaagcagaagaagatgaagatacaatgttcaccatggtaactgatttatcacagagaaatactactgatacactcattactttagacactagcaggataatcacagaaagcttttttgaggttcctgcaaccaccatttatccagtttctgaacaaccttctgcaaaagtggtgcctaccaagtttgtaagtgaaacagacacttctgagtggatttccagtaccactgttgaggaaaagaaaaggaaggaggaggagggaactacaggtacggcttctacatttgaggtatattcatctacacagagatcggatcaattaattttaccctttgaattagaaagtccaaatgtagctacatctagtgattcaggtaccaggaaaagttttatgtccttgacaacaccaacacagtctgaaagggaaatgacagattctactcctgtctttacagaaacaaatacattagaaaatttgggggcacagaccactgagcacagcagtatccatcaacctggggttcaggaagggctgaccactctcccacgtagtcctgcctctgtctttatggagcagggctctggagaagctgctgccgacccagaaaccaccactgtttcttcattttcattaaacgtagagtatgcaattcaagccgaaaaggaagtagctggcactttgtctccgcatgtggaaactacattctccactgagccaacaggactggttttgagtacagtaatggacagagtagttgctgaaaatataacccaaacatccagggaaatagtgatttcagagcgattaggagaaccaaattatggggcagaaataaggggcttttccacaggttttcctttggaggaagatttcagtggtgactttagagaatactcaacagtgtctcatcccatagcaaaagaagaaacggtaatgatggaaggctctggagatgcagcatttagggacacccagacttcaccatctacagtacctacttcagttcacatcagtcacatatctgactcagaaggacccagtagcaccatggtcagcacttcagccttcccctgggaagagtttacatcctcagctgagggctcaggtgagcaactggtcacagtcagcagctctgttgttccagtgcttcccagtgctgtgcaaaagttttctggtacagcttcctccattatcgacgaaggattgggagaagtgggtactgtcaatgaaattgatagaagatccaccattttaccaacagcagaagtggaaggtacgaaagctccagtagagaaggaggaagtaaaggtcagtggcacagtttcaacaaactttccccaaactatagagccagccaaattatggtctaggcaagaagtcaaccctgtaagacaagaaattgaaagtgaaacaacatcagaggaacaaattcaagaagaaaagtcatttgaatcccctcaaaactctcctgcaacagaacaaacaatctttgattcacagacatttactgaaactgaactcaaaaccacagattattctgtactaacaacaaagaaaacttacagtgatgataaagaaatgaaggaggaagacacttctttagttaacatgtctactccagatccagatgcaaatggcttggaatcttacacaactctccctgaagctactgaaaagtcacattttttcttagctactgcattagtaactgaatctataccagctgaacatgtagtcacagattcaccaatc

SEQ ID NO: 22948 - DNA, 1825 bp, Homo sapiens
  misc_feature 1..1825: note = ENST00000513984
  source 1..1825: mol_type = unassigned DNA; mol_type = unassigned DNA
ctccaggcgtgcggacgcaacagccgagaacattaggtgttgtggacaggagctgggaccaagatcttcggccagccccgcatcctcccgcatcttccagcaccgtcccgcaccctccgcatccttccccgggccaccacgcttcctatgtgacccgcctgggcaacgccgaacccagtcgcgcagcgctgcagtgaattttccccccaaactgcaataagccgccttccaaggccaagatgttcataaatataaagagcatcttatggatgtgttcaaccttaatagtaacccatgcgctacataaagtcaaagtgggaaaaagcccaccggtgaggggctccctctctggaaaagtcagcctaccttgtcatttttcaacgatgcctactttgccacccagttacaacaccagtgaatttctccgcatcaaatggtctaagattgaagtggacaaaaatggaaaagatttgaaagagactactgtccttgtggcccaaaatggaaatatcaagattggtcaggactacaaagggagagtgtctgtgcccacacatcccgaggctgtgggcgatgcctccctcactgtggtcaagctgctggcaagtgatgcgggtctttaccgctgtgacgtcatgtacgggattgaagacacacaagacacggtgtcactgactgtggatggggttgtgtttcactacagggcggcaaccagcaggtacacactgaattttgaggctgctcagaaggcttgtttggacgttggggcagtcatagcaactccagagcagctctttgctgcctatgaagatggatttgagcagtgtgacgcaggctggctggctgatcagactgtcagatatcccatccgggctcccagagtaggctgttatggagataagatgggaaaggcaggagtcaggacttatggattccgttctccccaggaaacttacgatgtgtattgttatgtggatcatctggatggtgatgtgttccacctcactgtccccagtaaattcaccttcgaggaggctgcaaaagagtgtgaaaaccaggatgccaggctggcaacagtgggggaactccaggcggcatggaggaacggctttgaccagtgcgattacgggtggctgtcggatgccagcgtgcgccaccctgtgactgtggccagggcccagtgtggaggtggtctacttggggtgagaaccctgtatcgttttgagaaccagacaggcttccctccccctgatagcagatttgatgcctactgctttaaacgtaagtgtttgatacctttttaaaaattacagttttaaaaaaaatgcttcgaagcatgcattgatgttcaactagccgttggagtggattccatgtcttgcagtgtgtgcacggaatggaaacagttcagtgattttcaaaagcaagcaaactgaacagcagtgatatggttaaaaccacaggaattttggcaaatggatttttagaggggtgaggaaatatcaggttaagctgtaactgtgctctgttgtgtccagagccacagagcatttttctaagtattttatattaattgcagtccttaagttttgcaatttgtttattggtgttacaatgccaaggccaactgaggctgagttaaatccttaagattgttgattttgtcttcggtatcactctgtttctttgagatggcaaagaatttaaatttcagtaattacaggtgagtatttgaagctgacatggatactcaaaatgttcaagtcataactaaaaatgaaccatactatcaataaaaatctccatttatgtcaagtaatggaaa

SEQ ID NO: 22949 - DNA, 2087 bp, Homo sapiens
  misc_feature 1..2087: note = ENST00000502527
  source 1..2087: mol_type = unassigned DNA; mol_type = unassigned DNA
caccacgcttcctatgtgacccgcctgggcaacgccgaacccagtcgcgcagcgctgcagtgaattttccccccaaactgcaataagccgccttccaaggccaagatgttcataaatataaagagcatcttatggatgtgttcaaccttaatagtaacccatgcgctacataaagtcaaagtgggaaaaagcccaccggtgaggggctccctctctggaaaagtcagcctaccttgtcatttttcaacgatgcctactttgccacccagttacaacaccagtgaatttctccgcatcaaatggtctaagattgaagtggacaaaaatggaaaagatttgaaagagactactgtccttgtggcccaaaatggaaatatcaagattggtcaggactacaaagggagagtgtctgtgcccacacatcccgaggctgtgggcgatgcctccctcactgtggtcaagctgctggcaagtgatgcgggtctttaccgctgtgacgtcatgtacgggattgaagacacacaagacacggtgtcactgactgtggatggggttgtgtttcactacagggcggcaaccagcaggtacacactgaattttgaggctgctcagaaggcttgtttggacgttggggcagtcatagcaactccagagcagctctttgctgcctatgaagatggatttgagcagtgtgacgcaggctggctggctgatcagactgtcagatatcccatccgggctcccagagtaggctgttatggagataagatgggaaaggcaggagtcaggacttatggattccgttctccccaggaaacttacgatgtgtattgttatgtggatcatctggatggtgatgtgttccacctcactgtccccagtaaattcaccttcgaggaggctgcaaaagagtgtgaaaaccaggatgccaggctggcaacagtgggggaactccaggcggcatggaggaacggctttgaccagtgcgattacgggtggctgtcggatgccagcgtgcgccaccctgtgactgtggccagggcccagtgtggaggtggtctacttggggtgagaaccctgtatcgttttgagaaccagacaggcttccctccccctgatagcagatttgatgcctactgctttaaacgacctgatcgctgcaaaatgaacccgtgccttaacggaggcacctgttatcctactgaaacttcctacgtatgcacctgtgtgccaggatacagcggagaccagtgtgaacttgattttgatgaatgtcactctaatccctgtcgtaatggagccacttgtgttgatggttttaacacattcaggtgcctctgccttccaagttatgttggtgcactttgtgagcaagataccgagacatgtgactatggctggcacaaattccaagggcagtgctacaaatactttgcccatcgacgcacatgggatgcagctgaacgggaatgccgtctgcagggtgcccatctcacaagcatcctgtctcacgaagaacaaatgtttgttaatcgtgtgggccatgattatcagtggataggcctcaatgacaagatgtttgagcatgacttccgttggactgatggcagcacactgcaatacgagaattggagacccaaccagccagacagcttcttttctgctggagaagactgtgttgtaatcatttggcatgagaatggccagtggaatgatgttccctgcaattaccatctcacctatacgtgcaagaaaggaacagtcgcttgcggccagccccctgttgtagaaaatgccaagacctttggaaagatgaaacctcgttatgaaatcaactccctgattagataccactgcaaagatggtttcattcaacgtcaccttccaactatccggtgcttaggaaatggaagatgggctatacctaaaattacctgcatgaacccatctgcataccaaaggacttattctatgaaatactttaaaaattcctcatcagcaaaggacaattcaataaatacatccaaacatgatcatcgttggagccggaggtggcaggagtcgaggcgctgatccctaaaatggcg

SEQ ID NO: 22950 - DNA, 536 bp, Homo sapiens
  misc_feature 1..536: note = ENST00000515397
  source 1..536: mol_type = unassigned DNA; mol_type = unassigned DNA
ggtgatgtgttccacctcactgtccccagtaaattcaccttcgaggaggctgcaaaagagtgtgaaaaccaggatgccaggctggcaacagtgggggaactccaggcggcatggaggaacggctttgaccagtgcgattacgggtggctgtcggatgccagcgtgcgccaccctgtgactgtggccagggcccagtgtggaggtggtctacttggggtgagaaccctgtatcgttttgagaaccagacaggcttccctccccctgatagcagatttgatgcctactgctttaaacgtcgaatgagtgatttgagtgtaattggtcatccaatagattcagaatctaaagaagatgaaccttgtagtgaagaaacagatccagtgcatgatctaatggctgaaattttacctgaattccctgacataattgaaatagacctataccacagtgaagaaaatgaagaagaagaagaagagtgtgcaaatgctactgatgtgacaaccaccccatctgtgcagtacataaatgggaagca

SEQ ID NO: 22951 - DNA, 8483 bp, Homo sapiens
  misc_feature 1..8483: note = ENST00000513016
  source 1..8483: mol_type = unassigned DNA; mol_type = unassigned DNA
ctgatgaaacagcaaaagctagatattgtttcttctatacatagaaggaaatagcttcttgcaacaggaacaattcaggagaaaacagttgttttctcccctttagatgataggttgggaagcagggttggctccgtcataatgatttctcctaaacacttctcaggtttggcctatgcatgtgtgttatagattggggatagtttgaaaactcattctgtagtattattcctatgggcagggtggtgagtagtgtgtaaattctttgtcttctttatgggtcagtatatccacaggcacattttcatactgctttgtcactgaaagtaaggcagctgcagtggcaggaccctgttctaggacagttgaatgcctctatgatgagacctcagaatttcctctttcctagtgcccaagacaaggagctttgctgatgtatttctgatagcagaaaaggccattgagcttagtggttggtaccatatggcaatttacaatctgggaaatattctgatgatacatacttttcgaggaatgctagttagaatatttagataggactcctgaactttctttgagaagatgttgatgacaagaactaaaatcagcctaatctgggtcacatcccaggaaggataaaggtctataggtgtggaaggctctttctggtcctttcagtgagctatttccaatagagcccgcctatccagagcttcccactcttgtgcataggatgtggttaagctcatgtctcagtgccacagtaggtagaggatgccattgcaatgtaaaagggctataaataaagctctcttgtttttccataaaacagtctgctctagaacagattataaaggggccagaaggaatctcttctcattttcttattgaatagagagtgtataaattattcccttacataaaggacaattactttttctatatagatcatatatagaaatagagctatagaaaaagtaattaattctatatgatatggcctcaatttttaatttttaaattgtttttatatgaaatagtcttaattttactctttttgcagttcacacaaagatgaattcctgcacttcaagattacattgtatatgtgattccttgcttcattttaaggactatgttgttttcttaaatgtgttgatgagtctttataacctgttttaataatgttaaattgaattcatttttcttattgttaatacaaaaacagtaaatttgaagactgagaaccatataagagggtgattgcacttattatgaaaagatttgaatccttctttgtgtgtgtgggtgtgaccagccttgctatcaatttcttctgtcatacactgccaaattttctatttaagtattgtgaaaactctgtttttttcaggtcgaatgagtgatttgagtgtaattggtcatccaatagattcagaatctaaagaagatgaaccttgtagtgaagaaacagatccagtgcatgatctaatggctgaaattttacctgaattccctgacataattgaaatagacctataccacagtgaagaaaatgaagaagaagaagaagagtgtgcaaatgctactgatgtgacaaccaccccatctgtgcagtacataaatgggaagcatctcgttaccactgtgcccaaggacccagaagctgcagaagctaggcgtggccagtttgaaagtgttgcaccttctcagaatttctcggacagctctgaaagtgatactcatccatttgtaatagccaaaacggaattgtctactgctgtgcaacctaatgaatctacagaaacaactgagtctcttgaagttacatggaagcctgagacttaccctgaaacatcagaacatttttcaggtggtgagcctgatgttttccccacagtcccattccatgaggaatttgaaagtggaacagccaaaaaaggggcagaatcagtcacagagagagatactgaagttggtcatcaggcacatgaacatactgaacctgtatctctgtttcctgaagagtcttcaggagagattgccattgaccaagaatctcagaaaatagcctttgcaagggctacagaagtaacatttggtgaagaggtagaaaaaagtacttctgtcacatacactcccactatagttccaagttctgcatcagcatatgtttcagaggaagaagcagttaccctaataggaaatccttggccagatgacctgttgtctaccaaagaaagctgggtagaagcaactcctagacaagttgtagagctctcagggagttcttcgattccaattacagaaggctctggagaagcagaagaagatgaagatacaatgttcaccatggtaactgatttatcacagagaaatactactgatacactcattactttagacactagcaggataatcacagaaagcttttttgaggttcctgcaaccaccatttatccagtttctgaacaaccttctgcaaaagtggtgcctaccaagtttgtaagtgaaacagacacttctgagtggatttccagtaccactgttgaggaaaagaaaaggaaggaggaggagggaactacaggtacggcttctacatttgaggtatattcatctacacagagatcggatcaattaattttaccctttgaattagaaagtccaaatgtagctacatctagtgattcaggtaccaggaaaagttttatgtccttgacaacaccaacacagtctgaaagggaaatgacagattctactcctgtctttacagaaacaaatacattagaaaatttgggggcacagaccactgagcacagcagtatccatcaacctggggttcaggaagggctgaccactctcccacgtagtcctgcctctgtctttatggagcagggctctggagaagctgctgccgacccagaaaccaccactgtttcttcattttcattaaacgtagagtatgcaattcaagccgaaaaggaagtagctggcactttgtctccgcatgtggaaactacattctccactgagccaacaggactggttttgagtacagtaatggacagagtagttgctgaaaatataacccaaacatccagggaaatagtgatttcagagcgattaggagaaccaaattatggggcagaaataaggggcttttccacaggttttcctttggaggaagatttcagtggtgactttagagaatactcaacagtgtctcatcccatagcaaaagaagaaacggtaatgatggaaggctctggagatgcagcatttagggacacccagacttcaccatctacagtacctacttcagttcacatcagtcacatatctgactcagaaggacccagtagcaccatggtcagcacttcagccttcccctgggaagagtttacatcctcagctgagggctcaggtgagcaactggtcacagtcagcagctctgttgttccagtgcttcccagtgctgtgcaaaagttttctggtacagcttcctccattatcgacgaaggattgggagaagtgggtactgtcaatgaaattgatagaagatccaccattttaccaacagcagaagtggaaggtacgaaagctccagtagagaaggaggaagtaaaggtcagtggcacagtttcaacaaactttccccaaactatagagccagccaaattatggtctaggcaagaagtcaaccctgtaagacaagaaattgaaagtgaaacaacatcagaggaacaaattcaagaagaaaagtcatttgaatcccctcaaaactctcctgcaacagaacaaacaatctttgattcacagacatttactgaaactgaactcaaaaccacagattattctgtactaacaacaaagaaaacttacagtgatgataaagaaatgaaggaggaagacacttctttagttaacatgtctactccagatccagatgcaaatggcttggaatcttacacaactctccctgaagctactgaaaagtcacattttttcttagctactgcattagtaactgaatctataccagctgaacatgtagtcacagattcaccaatcaaaaaggaagaaagtacaaaacattttccgaaaggcatgagaccaacaattcaagagtcagatactgagctcttattctctggactgggatcaggagaagaagttttacctactctaccaacagagtcagtgaattttactgaagtggaacaaatcaataacacattatatccccacacttctcaagtggaaagtacctcaagtgacaaaattgaagactttaacagaatggaaaatgtggcaaaagaagttggaccactcgtatctcaaacagacatctttgaaggtagtgggtcagtaaccagcacaacattaatagaaattttaagtgacactggagcagaaggacccacggtggcacctctccctttctccacggacatcggacatcctcaaaatcagactgtcaggtgggcagaagaaatccagactagtagaccacaaaccataactgaacaagactctaacaagaattcttcaacagcagaaattaacgaaacaacaacctcatctactgattttctggctagagcttatggttttgaaatggccaaagaatttgttacatcagcaccaaaaccatctgacttgtattatgaaccttctggagaaggatctggagaagtggatattgttgattcatttcacacttctgcaactactcaggcaaccagacaagaaagcagcaccacatttgtttctgatgggtccctggaaaaacatcctgaggtgccaagcgctaaagctgttactgctgatggattcccaacagtttcagtgatgctgcctcttcattcagagcagaacaaaagctcccctgatccaactagcacactgtcaaatacagtgtcatatgagaggtccacagacggtagtttccaagaccgtttcagggaattcgaggattccaccttaaaacctaacagaaaaaaacccactgaaaatattatcatagacctggacaaagaggacaaggatttaatattgacaattacagagagtaccatccttgaaattctacctgagctgacatcggataaaaatactatcatagatattgatcatactaaacctgtgtatgaagacattcttggaatgcaaacagatatagatacagaggtaccatcagaaccacatgacagtaatgatgaaagtaatgatgacagcactcaagttcaagagatctatgaggcagctgtcaacctttctttaactgaggaaacatttgagggctctgctgatgttctggctagctacactcaggcaacacatgatgaatcaatgacttatgaagatagaagccaactagatcacatgggctttcacttcacaactgggatccctgctcctagcacagaaacagaattagacgttttacttcccacggcaacatccctgccaattcctcgtaagtctgccacagttattccagagattgaaggaataaaagctgaagcaaaagccctggatgacatgtttgaatcaagcactttgtctgatggtcaagctattgcagaccaaagtgaaataataccaacattgggccaatttgaaaggactcaggaggagtatgaagacaaaaaacatgctggtccttcttttcagccagaattctcttcaggagctgaggaggcattagtagaccatactccctatctaagtattgctactacccaccttatggatcagagtgtaacagaggtgcctgatgtgatggaaggatccaatcccccatattacactgatacaacattagcagtttcaacatttgcgaagttgtcttctcagacaccatcatctcccctcactatctactcaggcagtgaagcctctggacacacagagatcccccagcccagtgctctgccaggaatagacgtcggctcatctgtaatgtccccacaggattcttttaaggaaattcatgtaaatattgaagcgactttcaaaccatcaagtgaggaataccttcacataactgagcctccctctttatctcctgacacaaaattagaaccttcagaagatgatggtaaacctgagttattagaagaaatggaagcttctcccacagaacttattgctgtggaaggaactgagattctccaagatttccaaaacaaaaccgatggtcaagtttctggagaagcaatcaagatgtttcccaccattaaaacacctgaggctggaactgttattacaactgccgatgaaattgaattagaaggtgctacacagtggccacactctacttctgcttctgccacctatggggtcgaggcaggtgtggtgccttggctaagtccacagacttctgagaggcccacgctttcttcttctccagaaataaaccctgaaactcaagcagctttaatcagagggcaggattccacgatagcagcatcagaacagcaagtggcagcgagaattcttgattccaatgatcaggcaacagtaaaccctgtggaatttaatactgaggttgcaacaccaccattttcccttctggagacttctaatgaaacagatttcctgattggcattaatgaagagtcagtggaaggcacggcaatctatttaccaggacctgatcgctgcaaaatgaacccgtgccttaacggaggcacctgttatcctactgaaacttcctacgtatgcacctgtgtgccaggatacagcggagaccagtgtgaacttgattttgatgaatgtcactctaatccctgtcgtaatggagccacttgtgttgatggttttaacacattcaggtgcctctgccttccaagttatgttggtgcactttgtgagcaagataccgagacatgtgactatggctggcacaaattccaagggcagtgctacaaatactttgcccatcgacgcacatgggatgcagctgaacgggaatgccgtctgcagggtgcccatctcacaagcatcctgtctcacgaagaacaaatgtttgttaatcgtgtgggccatgattatcagtggataggcctcaatgacaagatgtttgagcatgacttccgttggactgatggcagcacactgcaatacgagaattggagacccaaccagccagacagcttcttttctgctggagaagactgtgttgtaatcatttggcatgagaatggccagtggaatgatgttccctgcaattaccatctcacctatacgtgcaagaaaggaacagtcgcttgcggccagccccctgttgtagaaaatgccaagacctttggaaagatgaaacctcgttatgaaatcaactccctgattagataccactgcaaagatggtttcattcaacgtcaccttccaactatccggtgcttaggaaatggaagatgggctatacctaaaattacctgcatgaacccatctgcataccaaaggacttattctatgaaatactttaaaaattcctcatcagcaaaggacaattcaataaatacatccaaacatgatcatcgttggagccggaggtggcaggagtcgaggcgctgatccctaaaatggcgaacatgtgttttcatcatttcagccaaagtcctaacttcctgtgcctttcctatcacctcgagaagtaattatcagttggtttggatttttggaccaccgttcagtcattttgggttgccgtgctcccaaaacattttaaatgaaagtattggcattcaaaaagacagcagacaaaatgaaagaaaatgagagcagaaagtaagcatttccagcctatctaatttctttagttttctatttgcctccagtgcagtccatttcctaatgtataccagcctactgtactatttaaaatgctcaatttcagcaccgatggccatgtaaataagatgatttaatgttgattttaatcctgtatataaaataaaaagtcacaatgagtttgggcatatttaatgatgattatggagccttagaggtctttaatcattggttcggctgcttttatgtagtttaggctggaaatggtttcacttgctctttgactgtcagcaagactgaagatggcttttcctggacagctagaaaacacaaaatcttgtaggtcattgcacctatctcagccataggtgcagtttgcttctacatgatgctaaaggctgcgaatgggatcctgatggaactaaggactccaatgtcgaactcttctttgctgcattcctttttcttcacttacaagaaaggcctgaatggaggacttttctgtaaccaggaacattttttaggggtcaaagtgctaataattaactcaaccaggtctactttttaatggctttcataacactaactcataaggttaccgatcaatgcatttcatacggatatagacctagggctctggagggtgggggattgttaaaacacatgcaaaaaaaaaaaaaaaaaaa

SEQ ID NO: 22952 - DNA, 766 bp, Homo sapiens
  misc_feature 1..766: note = ENST00000507162
  source 1..766: mol_type = unassigned DNA; mol_type = unassigned DNA
ccacctatggggtcgaggcaggtgtggtgccttggctaagtccacagacttctgagaggcccacgctttcttcttctccagaaataaaccctgaaactcaagcagctttaatcagagggcaggattccacgatagcagcatcagaacagcaagtggcagcgagaattcttgattccaatgatcaggcaacagtaaaccctgtggaatttaatactgaggttgcaacaccaccattttcccttctggagacttctaatgaaacagatttcctgattggcattaatgaagagtcagtggaaggcacggcaatctatttaccagtttaaaggagtacatttggaacgtgtttttggaaaaagcatgttaatgtagcagaagagacttcagtgcacactttcgaagaaaaacagtttctgagcattaagtggacctgatcgctgcaaaatgaacccgtgccttaacggaggcacctgttatcctactgaaacttcctacgtatgcacctgtgtgccaggatacagcggagaccagtgtgaacttgattttgatgaatgtcactctaatccctgtcgtaatggagccacttgtgttgatggttttaacacattcaggtgcctctgccttccaagttatgttggtgcactttgtgagcaagataccgagacatgtgactatggctggcacaaattccaagggcagtgctacaaatactttgcccatcgacgcacatgggatgcagctgaacgggaatgccgtctgcagggtg

SEQ ID NO: 22953 - DNA, 810 bp, Homo sapiens
  misc_feature 1..810: note = ENST00000505615
  source 1..810: mol_type = unassigned DNA; mol_type = unassigned DNA
agataccgagacatgtgactatggctggcacaaattccaagggcagtgctacaaatactttgcccatcgacgcacatgggatgcagctgaacgggaatgccgtctgcagggtgcccatctcacaagcatcctgtctcacgaagaacaaatgtttgttaatcgtgtgggccatgattatcagtggataggcctcaatgacaagatgtttgagcatgacttccgttggactgatggcagcacactgcaatacgagaattggagacccaaccagccagacagcttcttttctgctggagaagactgtgttgtaatcatttggcatgagaatggccagtggaatgatgttccctgcaattaccatctcacctatacgtgcaagaaaggaacagtcgcttgcggccagccccctgttgtagaaaatgccaagacctttggaaagatgaaacctcgttatgaaatcaactccctgattagataccactgcaaagatggtttcattcaacgtcaccttccaactatccggtgcttaggaaatggaagatgggctatacctaaaattacctgcatgaaccgtaagtggtcctttagaaagaatggactaccgtgctataacaactactagacaccttcattttacggctgtggtatcggcagtttagggtatggagcaagtaatattgtgtgttttctttttttctttctttccttccatgtagcatctgcataccaaaggacttattctatgaaatactttaaaaattcctcatcagcaaaggacaattcaataaatacatccaaacatgatcatcg

SEQ ID NO: 22954 - DNA, 7154 bp, Homo sapiens
  misc_feature 1..7154: note = ENST00000342785
  source 1..7154: mol_type = unassigned DNA; mol_type = unassigned DNA
cttcttctcgctgagtctcctcctcggctctgacggtacagtgatataatgatgatgggtgtcacaacccgcatttgaacttgcaggcgagctgccccgagcctttctggggaagaactccaggcgtgcggacgcaacagccgagaacattaggtgttgtggacaggagctgggaccaagatcttcggccagccccgcatcctcccgcatcttccagcaccgtcccgcaccctccgcatccttccccgggccaccacgcttcctatgtgacccgcctgggcaacgccgaacccagtcgcgcagcgctgcagtgaattttccccccaaactgcaataagccgccttccaaggccaagatgttcataaatataaagagcatcttatggatgtgttcaaccttaatagtaacccatgcgctacataaagtcaaagtgggaaaaagcccaccggtgaggggctccctctctggaaaagtcagcctaccttgtcatttttcaacgatgcctactttgccacccagttacaacaccagtgaatttctccgcatcaaatggtctaagattgaagtggacaaaaatggaaaagatttgaaagagactactgtccttgtggcccaaaatggaaatatcaagattggtcaggactacaaagggagagtgtctgtgcccacacatcccgaggctgtgggcgatgcctccctcactgtggtcaagctgctggcaagtgatgcgggtctttaccgctgtgacgtcatgtacgggattgaagacacacaagacacggtgtcactgactgtggatggggttgtgtttcactacagggcggcaaccagcaggtacacactgaattttgaggctgctcagaaggcttgtttggacgttggggcagtcatagcaactccagagcagctctttgctgcctatgaagatggatttgagcagtgtgacgcaggctggctggctgatcagactgtcagatatcccatccgggctcccagagtaggctgttatggagataagatgggaaaggcaggagtcaggacttatggattccgttctccccaggaaacttacgatgtgtattgttatgtggatcatctggatggtgatgtgttccacctcactgtccccagtaaattcaccttcgaggaggctgcaaaagagtgtgaaaaccaggatgccaggctggcaacagtgggggaactccaggcggcatggaggaacggctttgaccagtgcgattacgggtggctgtcggatgccagcgtgcgccaccctgtgactgtggccagggcccagtgtggaggtggtctacttggggtgagaaccctgtatcgttttgagaaccagacaggcttccctccccctgatagcagatttgatgcctactgctttaaacctaaagaggctacaaccatcgatttgagtatcctcgcagaaactgcatcacccagtttatccaaagaaccacaaatggtttctgatagaactacaccaatcatccctttagttgatgaattacctgtcattccaacagagttccctcccgtgggaaatattgtcagttttgaacagaaagccacagtccaacctcaggctatcacagatagtttagccaccaaattacccacacctactggcagtaccaagaagccctgggatatggatgactactcaccttctgcttcaggacctcttggaaagctagacatatcagaaattaaggaagaagtgctccagagtacaactggcgtctctcattatgctacggattcatgggatggtgtcgtggaagataaacaaacacaagaatcggttacacagattgaacaaatagaagtgggtcctttggtaacatctatggaaatcttaaagcacattccttccaaggaattccctgtaactgaaacaccattggtaactgcaagaatgatcctggaatccaaaactgaaaagaaaatggtaagcactgtttctgaattggtaaccacaggtcactatggattcaccttgggagaagaggatgatgaagacagaacacttacagttggatctgatgagagcaccttgatctttgaccaaattcctgaagtcattacggtgtcaaagacttcagaagacaccatccacactcatttagaagacttggagtcagtctcagcatccacaactgtttcccctttaattatgcctgataataatggatcatccatggatgactgggaagagagacaaactagtggtaggataacggaagagtttcttggcaaatatctgtctactacaccttttccatcacagcatcgtacagaaatagaattgtttccttattctggtgataaaatattagtagagggaatttccacagttatttatccttctctacaaacagaaatgacacatagaagagaaagaacagaaacactaataccagagatgagaacagatacttatacagatgaaatacaagaagagatcactaaaagtccatttatgggaaaaacagaagaagaagtcttctctgggatgaaactctctacatctctctcagagccaattcatgttacagagtcttctgtggaaatgaccaagtcttttgatttcccaacattgataacaaagttaagtgcagagccaacagaagtaagagatatggaggaagactttacagcaactccaggtactacaaaatatgatgaaaatattacaacagtgcttttggcccatggtactttaagtgttgaagcagccactgtatcaaaatggtcatgggatgaagataatacaacatccaagcctttagagtctacagaaccttcagcctcttcaaaattgccccctgccttactcacaactgtggggatgaatggaaaggataaagacatcccaagtttcactgaagatggagcagatgaatttactcttattccagatagtactcaaaagcagttagaggaggttactgatgaagacatagcagcccatggaaaattcacaattagatttcagccaactacatcaactggtattgcagaaaagtcaactttgagagattctacaactgaagaaaaagttccacctatcacaagcactgaaggccaagtttatgcaaccatggaaggaagtgctttgggtgaagtagaagatgtggacctctctaagccagtatctactgttccccaatttgcacacacttcagaggtggaaggattagcatttgttagttatagtagcacccaagagcctactacttatgtagactcttcccataccattcctctttctgtaattcccaagacagactggggagtgttagtaccttctgttccatcagaagatgaagttctaggtgaaccctctcaagacatacttgtcattgatcagactcgccttgaagcgactatttctccagaaactatgagaacaacaaaaatcacagagggaacaactcaggaagaattcccttggaaagaacagactgcagagaaaccagttcctgctctcagttctacagcttggactcccaaggaggcagtaacaccactggatgaacaagagggcgatggatcagcatatacagtctctgaagatgaattgttgacaggttctgagagggtcccagttttagaaacaactccagttggaaaaattgatcacagtgtgtcttatccaccaggtgctgtaactgagcacaaagtgaaaacagatgaagtggtaacactaacaccacgcattgggccaaaagtatctttaagtccagggcctgaacaaaaatatgaaacagaaggtagtagtacaacaggatttacatcatctttgagtccttttagtacccacattacccagcttatggaagaaaccactactgagaaaacatccctagaggatattgatttaggctcaggattatttgaaaagcccaaagccacagaactcatagaattttcaacaatcaaagtcacagttccaagtgatattaccactgccttcagttcagtagacagacttcacacaacttcagcattcaagccatcttccgcgatcactaagaaaccacctctcatcgacagggaacctggtgaagaaacaaccagtgacatggtaatcattggagaatcaacatctcatgttcctcccactacccttgaagatattgtagccaaggaaacagaaaccgatattgatagagagtatttcacgacttcaagtcctcctgctacacagccaacaagaccacccactgtggaagacaaagaggcctttggacctcaggcgctttctacgccacagcccccagcaagcacaaaatttcaccctgacattaatgtttatattattgaggtcagagaaaataagacaggacctgatcgctgcaaaatgaacccgtgccttaacggaggcacctgttatcctactgaaacttcctacgtatgcacctgtgtgccaggatacagcggagaccagtgtgaacttgattttgatgaatgtcactctaatccctgtcgtaatggagccacttgtgttgatggttttaacacattcaggtgcctctgccttccaagttatgttggtgcactttgtgagcaagataccgagacatgtgactatggctggcacaaattccaagggcagtgctacaaatactttgcccatcgacgcacatgggatgcagctgaacgggaatgccgtctgcagggtgcccatctcacaagcatcctgtctcacgaagaacaaatgtttgttaatcgtgtgggccatgattatcagtggataggcctcaatgacaagatgtttgagcatgacttccgttggactgatggcagcacactgcaatacgagaattggagacccaaccagccagacagcttcttttctgctggagaagactgtgttgtaatcatttggcatgagaatggccagtggaatgatgttccctgcaattaccatctcacctatacgtgcaagaaaggaacagtcgcttgcggccagccccctgttgtagaaaatgccaagacctttggaaagatgaaacctcgttatgaaatcaactccctgattagataccactgcaaagatggtttcattcaacgtcaccttccaactatccggtgcttaggaaatggaagatgggctatacctaaaattacctgcatgaacccatctgcataccaaaggacttattctatgaaatactttaaaaattcctcatcagcaaaggacaattcaataaatacatccaaacatgatcatcgttggagccggaggtggcaggagtcgaggcgctgatccctaaaatggcgaacatgtgttttcatcatttcagccaaagtcctaacttcctgtgcctttcctatcacctcgagaagtaattatcagttggtttggatttttggaccaccgttcagtcattttgggttgccgtgctcccaaaacattttaaatgaaagtattggcattcaaaaagacagcagacaaaatgaaagaaaatgagagcagaaagtaagcatttccagcctatctaatttctttagttttctatttgcctccagtgcagtccatttcctaatgtataccagcctactgtactatttaaaatgctcaatttcagcaccgatggccatgtaaataagatgatttaatgttgattttaatcctgtatataaaataaaaagtcacaatgagtttgggcatatttaatgatgattatggagccttagaggtctttaatcattggttcggctgcttttatgtagtttaggctggaaatggtttcacttgctctttgactgtcagcaagactgaagatggcttttcctggacagctagaaaacacaaaatcttgtaggtcattgcacctatctcagccataggtgcagtttgcttctacatgatgctaaaggctgcgaatgggatcctgatggaactaaggactccaatgtcgaactcttctttgctgcattcctttttcttcacttacaagaaaggcctgaatggaggacttttctgtaaccaggaacattttttaggggtcaaagtgctaataattaactcaaccaggtctactttttaatggctttcataacactaactcataaggttaccgatcaatgcatttcatacggatatagacctagggctctggagggtgggggattgttaaaacacatgcaaaaaaaaaaaaaaaaaaaaaaaaagaaattttgtatatataaccattttaatcttttataaagttttgaatgttcatgtatgaatgctgcagctgtgaagcatacataaataaatgaagtaagccatactgatttaatttattggatgttattttccctaagacctgaaaatgaacatagtatgctagttatttttcagtgttagccttttactttcctcacacaatttggaatcatataatataggtactttgtccctgattaaataatgtgacggatagaatgcatcaagtgtttattatgaaaagagtggaaaagtatatagcttttagcaaaaggtgtttgcccattctaagaaatgagcgaatatatagaaatagtgtgggcatttcttcctgttaggtggagtgtatgtgttgacatttctccccatctcttcccactctgttttctccccattatttgaataaagtgactgctgaagatgactttgaatccttatccacttaatttaatgtttaaagaaaaacctgtaatggaaagtaagactccttccctaatttcagtttagagcaacttgaagaagagtagacaaaaaataaaatgcacatagaaaaagagaaaaagggcacaaagggattggcccaatattgattctttttttataaaacctcctttggcttagaaggaatgactctagctacaataatacacagtatgtttaagcaggttcccttggttgttgcattaaatgtaatccacctttaggtattttagagcacagaacaacactgtgttgatctagtaggtttctatttttcctttctctttacaatgcacataatactttcctgtatttatatcataacgtgtatagtgtaaaatgtgaatgactttttttgtgaatgaaaatctaaaatctttgtaactttttatatctgcttttgtttcaccaaagaaacctaaaatccttcttttactacac

SEQ ID NO: 22955 - DNA, 9455 bp, Homo sapiens
  misc_feature 1..9455: note = ENST00000343200
  source 1..9455: mol_type = unassigned DNA; mol_type = unassigned DNA
cttcttctcgctgagtctcctcctcggctctgacggtacagtgatataatgatgatgggtgtcacaacccgcatttgaacttgcaggcgagctgccccgagcctttctggggaagaactccaggcgtgcggacgcaacagccgagaacattaggtgttgtggacaggagctgggaccaagatcttcggccagccccgcatcctcccgcatcttccagcaccgtcccgcaccctccgcatccttccccgggccaccacgcttcctatgtgacccgcctgggcaacgccgaacccagtcgcgcagcgctgcagtgaattttccccccaaactgcaataagccgccttccaaggccaagatgttcataaatataaagagcatcttatggatgtgttcaaccttaatagtaacccatgcgctacataaagtcaaagtgggaaaaagcccaccggtgaggggctccctctctggaaaagtcagcctaccttgtcatttttcaacgatgcctactttgccacccagttacaacaccagtgaatttctccgcatcaaatggtctaagattgaagtggacaaaaatggaaaagatttgaaagagactactgtccttgtggcccaaaatggaaatatcaagattggtcaggactacaaagggagagtgtctgtgcccacacatcccgaggctgtgggcgatgcctccctcactgtggtcaagctgctggcaagtgatgcgggtctttaccgctgtgacgtcatgtacgggattgaagacacacaagacacggtgtcactgactgtggatggggttgtgtttcactacagggcggcaaccagcaggtacacactgaattttgaggctgctcagaaggcttgtttggacgttggggcagtcatagcaactccagagcagctctttgctgcctatgaagatggatttgagcagtgtgacgcaggctggctggctgatcagactgtcagatatcccatccgggctcccagagtaggctgttatggagataagatgggaaaggcaggagtcaggacttatggattccgttctccccaggaaacttacgatgtgtattgttatgtggatcatctggatggtgatgtgttccacctcactgtccccagtaaattcaccttcgaggaggctgcaaaagagtgtgaaaaccaggatgccaggctggcaacagtgggggaactccaggcggcatggaggaacggctttgaccagtgcgattacgggtggctgtcggatgccagcgtgcgccaccctgtgactgtggccagggcccagtgtggaggtggtctacttggggtgagaaccctgtatcgttttgagaaccagacaggcttccctccccctgatagcagatttgatgcctactgctttaaacgtcgaatgagtgatttgagtgtaattggtcatccaatagattcagaatctaaagaagatgaaccttgtagtgaagaaacagatccagtgcatgatctaatggctgaaattttacctgaattccctgacataattgaaatagacctataccacagtgaagaaaatgaagaagaagaagaagagtgtgcaaatgctactgatgtgacaaccaccccatctgtgcagtacataaatgggaagcatctcgttaccactgtgcccaaggacccagaagctgcagaagctaggcgtggccagtttgaaagtgttgcaccttctcagaatttctcggacagctctgaaagtgatactcatccatttgtaatagccaaaacggaattgtctactgctgtgcaacctaatgaatctacagaaacaactgagtctcttgaagttacatggaagcctgagacttaccctgaaacatcagaacatttttcaggtggtgagcctgatgttttccccacagtcccattccatgaggaatttgaaagtggaacagccaaaaaaggggcagaatcagtcacagagagagatactgaagttggtcatcaggcacatgaacatactgaacctgtatctctgtttcctgaagagtcttcaggagagattgccattgaccaagaatctcagaaaatagcctttgcaagggctacagaagtaacatttggtgaagaggtagaaaaaagtacttctgtcacatacactcccactatagttccaagttctgcatcagcatatgtttcagaggaagaagcagttaccctaataggaaatccttggccagatgacctgttgtctaccaaagaaagctgggtagaagcaactcctagacaagttgtagagctctcagggagttcttcgattccaattacagaaggctctggagaagcagaagaagatgaagatacaatgttcaccatggtaactgatttatcacagagaaatactactgatacactcattactttagacactagcaggataatcacagaaagcttttttgaggttcctgcaaccaccatttatccagtttctgaacaaccttctgcaaaagtggtgcctaccaagtttgtaagtgaaacagacacttctgagtggatttccagtaccactgttgaggaaaagaaaaggaaggaggaggagggaactacaggtacggcttctacatttgaggtatattcatctacacagagatcggatcaattaattttaccctttgaattagaaagtccaaatgtagctacatctagtgattcaggtaccaggaaaagttttatgtccttgacaacaccaacacagtctgaaagggaaatgacagattctactcctgtctttacagaaacaaatacattagaaaatttgggggcacagaccactgagcacagcagtatccatcaacctggggttcaggaagggctgaccactctcccacgtagtcctgcctctgtctttatggagcagggctctggagaagctgctgccgacccagaaaccaccactgtttcttcattttcattaaacgtagagtatgcaattcaagccgaaaaggaagtagctggcactttgtctccgcatgtggaaactacattctccactgagccaacaggactggttttgagtacagtaatggacagagtagttgctgaaaatataacccaaacatccagggaaatagtgatttcagagcgattaggagaaccaaattatggggcagaaataaggggcttttccacaggttttcctttggaggaagatttcagtggtgactttagagaatactcaacagtgtctcatcccatagcaaaagaagaaacggtaatgatggaaggctctggagatgcagcatttagggacacccagacttcaccatctacagtacctacttcagttcacatcagtcacatatctgactcagaaggacccagtagcaccatggtcagcacttcagccttcccctgggaagagtttacatcctcagctgagggctcaggtgagcaactggtcacagtcagcagctctgttgttccagtgcttcccagtgctgtgcaaaagttttctggtacagcttcctccattatcgacgaaggattgggagaagtgggtactgtcaatgaaattgatagaagatccaccattttaccaacagcagaagtggaaggtacgaaagctccagtagagaaggaggaagtaaaggtcagtggcacagtttcaacaaactttccccaaactatagagccagccaaattatggtctaggcaagaagtcaaccctgtaagacaagaaattgaaagtgaaacaacatcagaggaacaaattcaagaagaaaagtcatttgaatcccctcaaaactctcctgcaacagaacaaacaatctttgattcacagacatttactgaaactgaactcaaaaccacagattattctgtactaacaacaaagaaaacttacagtgatgataaagaaatgaaggaggaagacacttctttagttaacatgtctactccagatccagatgcaaatggcttggaatcttacacaactctccctgaagctactgaaaagtcacattttttcttagctactgcattagtaactgaatctataccagctgaacatgtagtcacagattcaccaatcaaaaaggaagaaagtacaaaacattttccgaaaggcatgagaccaacaattcaagagtcagatactgagctcttattctctggactgggatcaggagaagaagttttacctactctaccaacagagtcagtgaattttactgaagtggaacaaatcaataacacattatatccccacacttctcaagtggaaagtacctcaagtgacaaaattgaagactttaacagaatggaaaatgtggcaaaagaagttggaccactcgtatctcaaacagacatctttgaaggtagtgggtcagtaaccagcacaacattaatagaaattttaagtgacactggagcagaaggacccacggtggcacctctccctttctccacggacatcggacatcctcaaaatcagactgtcaggtgggcagaagaaatccagactagtagaccacaaaccataactgaacaagactctaacaagaattcttcaacagcagaaattaacgaaacaacaacctcatctactgattttctggctagagcttatggttttgaaatggccaaagaatttgttacatcagcaccaaaaccatctgacttgtattatgaaccttctggagaaggatctggagaagtggatattgttgattcatttcacacttctgcaactactcaggcaaccagacaagaaagcagcaccacatttgtttctgatgggtccctggaaaaacatcctgaggtgccaagcgctaaagctgttactgctgatggattcccaacagtttcagtgatgctgcctcttcattcagagcagaacaaaagctcccctgatccaactagcacactgtcaaatacagtgtcatatgagaggtccacagacggtagtttccaagaccgtttcagggaattcgaggattccaccttaaaacctaacagaaaaaaacccactgaaaatattatcatagacctggacaaagaggacaaggatttaatattgacaattacagagagtaccatccttgaaattctacctgagctgacatcggataaaaatactatcatagatattgatcatactaaacctgtgtatgaagacattcttggaatgcaaacagatatagatacagaggtaccatcagaaccacatgacagtaatgatgaaagtaatgatgacagcactcaagttcaagagatctatgaggcagctgtcaacctttctttaactgaggaaacatttgagggctctgctgatgttctggctagctacactcaggcaacacatgatgaatcaatgacttatgaagatagaagccaactagatcacatgggctttcacttcacaactgggatccctgctcctagcacagaaacagaattagacgttttacttcccacggcaacatccctgccaattcctcgtaagtctgccacagttattccagagattgaaggaataaaagctgaagcaaaagccctggatgacatgtttgaatcaagcactttgtctgatggtcaagctattgcagaccaaagtgaaataataccaacattgggccaatttgaaaggactcaggaggagtatgaagacaaaaaacatgctggtccttcttttcagccagaattctcttcaggagctgaggaggcattagtagaccatactccctatctaagtattgctactacccaccttatggatcagagtgtaacagaggtgcctgatgtgatggaaggatccaatcccccatattacactgatacaacattagcagtttcaacatttgcgaagttgtcttctcagacaccatcatctcccctcactatctactcaggcagtgaagcctctggacacacagagatcccccagcccagtgctctgccaggaatagacgtcggctcatctgtaatgtccccacaggattcttttaaggaaattcatgtaaatattgaagcgactttcaaaccatcaagtgaggaataccttcacataactgagcctccctctttatctcctgacacaaaattagaaccttcagaagatgatggtaaacctgagttattagaagaaatggaagcttctcccacagaacttattgctgtggaaggaactgagattctccaagatttccaaaacaaaaccgatggtcaagtttctggagaagcaatcaagatgtttcccaccattaaaacacctgaggctggaactgttattacaactgccgatgaaattgaattagaaggtgctacacagtggccacactctacttctgcttctgccacctatggggtcgaggcaggtgtggtgccttggctaagtccacagacttctgagaggcccacgctttcttcttctccagaaataaaccctgaaactcaagcagctttaatcagagggcaggattccacgatagcagcatcagaacagcaagtggcagcgagaattcttgattccaatgatcaggcaacagtaaaccctgtggaatttaatactgaggttgcaacaccaccattttcccttctggagacttctaatgaaacagatttcctgattggcattaatgaagagtcagtggaaggcacggcaatctatttaccaggacctgatcgctgcaaaatgaacccgtgccttaacggaggcacctgttatcctactgaaacttcctacgtatgcacctgtgtgccaggatacagcggagaccagtgtgaacttgattttgatgaatgtcactctaatccctgtcgtaatggagccacttgtgttgatggttttaacacattcaggtgcctctgccttccaagttatgttggtgcactttgtgagcaagataccgagacatgtgactatggctggcacaaattccaagggcagtgctacaaatactttgcccatcgacgcacatgggatgcagctgaacgggaatgccgtctgcagggtgcccatctcacaagcatcctgtctcacgaagaacaaatgtttgttaatcgtgtgggccatgattatcagtggataggcctcaatgacaagatgtttgagcatgacttccgttggactgatggcagcacactgcaatacgagaattggagacccaaccagccagacagcttcttttctgctggagaagactgtgttgtaatcatttggcatgagaatggccagtggaatgatgttccctgcaattaccatctcacctatacgtgcaagaaaggaacagtcgcttgcggccagccccctgttgtagaaaatgccaagacctttggaaagatgaaacctcgttatgaaatcaactccctgattagataccactgcaaagatggtttcattcaacgtcaccttccaactatccggtgcttaggaaatggaagatgggctatacctaaaattacctgcatgaacccatctgcataccaaaggacttattctatgaaatactttaaaaattcctcatcagcaaaggacaattcaataaatacatccaaacatgatcatcgttggagccggaggtggcaggagtcgaggcgctgatccctaaaatggcgaacatgtgttttcatcatttcagccaaagtcctaacttcctgtgcctttcctatcacctcgagaagtaattatcagttggtttggatttttggaccaccgttcagtcattttgggttgccgtgctcccaaaacattttaaatgaaagtattggcattcaaaaagacagcagacaaaatgaaagaaaatgagagcagaaagtaagcatttccagcctatctaatttctttagttttctatttgcctccagtgcagtccatttcctaatgtataccagcctactgtactatttaaaatgctcaatttcagcaccgatggccatgtaaataagatgatttaatgttgattttaatcctgtatataaaataaaaagtcacaatgagtttgggcatatttaatgatgattatggagccttagaggtctttaatcattggttcggctgcttttatgtagtttaggctggaaatggtttcacttgctctttgactgtcagcaagactgaagatggcttttcctggacagctagaaaacacaaaatcttgtaggtcattgcacctatctcagccataggtgcagtttgcttctacatgatgctaaaggctgcgaatgggatcctgatggaactaaggactccaatgtcgaactcttctttgctgcattcctttttcttcacttacaagaaaggcctgaatggaggacttttctgtaaccaggaacattttttaggggtcaaagtgctaataattaactcaaccaggtctactttttaatggctttcataacactaactcataaggttaccgatcaatgcatttcatacggatatagacctagggctctggagggtgggggattgttaaaacacatgcaaaaaaaaaaaaaaaaaaaaaaaaagaaattttgtatatataaccattttaatcttttataaagttttgaatgttcatgtatgaatgctgcagctgtgaagcatacataaataaatgaagtaagccatactgatttaatttattggatgttattttccctaagacctgaaaatgaacatagtatgctagttatttttcagtgttagccttttactttcctcacacaatttggaatcatataatataggtactttgtccctgattaaataatgtgacggatagaatgcatcaagtgtttattatgaaaagagtggaaaagtatatagcttttagcaaaaggtgtttgcccattctaagaaatgagcgaatatatagaaatagtgtgggcatttcttcctgttaggtggagtgtatgtgttgacatttctccccatctcttcccactctgttttctccccattatttgaataaagtgactgctgaagatgactttgaatccttatccacttaatttaatgtttaaagaaaaacctgtaatggaaagtaagactccttccctaatttcagtttagagcaacttgaagaagagtagacaaaaaataaaatgcacatagaaaaagagaaaaagggcacaaagggattggcccaatattgattctttttttataaaacctcctttggcttagaaggaatgactctagctacaataatacacagtatgtttaagcaggttcccttggttgttgcattaaatgtaatccacctttaggtattttagagcacagaacaacactgtgttgatctagtaggtttctatttttcctttctctttacaatgcacataatactttcctgtatttatatcataacgtgtatagtgtaaaatgtgaatgactttttttgtgaatgaaaatctaaaatctttgtaactttttatatctgcttttgtttcaccaaagaaacctaaaatccttcttttactacac

SEQ ID NO: 22956 - DNA, 3725 bp, Homo sapiens
  misc_feature 1..3725: note = ENST00000273038
  source 1..3725: mol_type = unassigned DNA; mol_type = unassigned DNA
acatttcagagcagtccgggttgtggacgccaggagtttgccaaacacagcaaacactggtgtgtgagcggctgaaggggactctttccactccgatctccctccctcccagcctgttttgatttactaggacttcctcctccgggcgaggcgggggaaggacgccgccgagcgcctggagttgtgcgcgtgtgcgtgtgcgcgtgtgcgagtgtgaagtgcagcgctggagtgcaacatgctgtaatgggaggaaacccagcggcgtcggagcgcccgggaccgccgcggccgttctgagcgcagtggcgccgagcagcccctcccgcagccggtgtgacctgtcccttcaggctccaaccaggaatggagacgccattggatgttttgtccagggcagcatctctggtgcatgctgatgacgaaaaacgcgaagctgctctcaggggagaacccagaatacagaccctgccggtggcctctgccctcagcagtcaccgcaccggccctcccccaatcagccccagcaagaggaagttcagcatggagccaggtgacgaggacctagactgtgacaacgaccacgtctccaaaatgagtcgcatcttcaacccccatctgaacaagactgccaatggagactgccgcagagacccccgggagcggagccgcagccccatcgagcgcgctgtggcccccaccatgagcctgcacggcagccacctgtacacctccctccccagccttggcctggagcagcccctcgcactgaccaagaacagcctggacgccagcaggccagccggcctctcgcccacactgaccccgggggagcggcagcagaaccggccctccgtgatcacctgtgcctcggctggcgcccgcaactgcaacctctcgcactgccccatcgcgcacagcggctgtgccgcgcccgggcctgccagctaccggaggccaccgagcgctgccaccacctgtgaccccgtggtggaggagcatttccgcaggagcctgggcaagaattacaaggagcccgagccggcacccaactccgtgtccatcacgggctccgtggacgaccactttgccaaagctctgggtgacacgtggctccagatcaaagcggccaaggacggagcatccagcagccctgagtccgcctctcgcaggggccagcccgccagcccctctgcccacatggtcagccacagtcactccccctctgtggtctcctgaagggagcgcctcctccaacaacacgtggatctgcatggtttgcctgagctttgaacagtcagtacttaaaaaaaaaaaaatcatgggggtggggtggggggaagggaagggatggtttatttgcaaaaaccatgttgttgggatttgtgttctgtttttgtacttgcttggtatccgtacaagggggccctcaaacatgatagcaggaactacgcgtggaacatctgtctaatgtagcatccttacttcctgcctcagttaccaaagaaacctctgatgcaggtctgctgccccgacggggccaggactccacagcgctttctcagtcacaagccatgatgaattggtgactcagacgctttgtgctttttcctttgcttcttgagaccggggtgtgtgtggctcagcttccacggcgtgtttggttcggtccatgtgtgtgcgtgtgtatacttgaagagaactgtcgtgtctgatttgcactattggaggaggactaaagttgcctgacaactttatgtgttatgccagaactctgagggcaaactgctgaaaaacaaagggtttaaggatgacatttctgaccatttgtgtgtttgttgttgttactgtttttgttttttttaatgtagacaatacagctttggaaggggaagtctcatacaggttataggtctttctctctctagatttcaggtgcttgcaactggactgcagactctaccaatcacgggcattttatcttctctgaacactgcagtttgttagactagagctgaggttggaggattccatagtgctttaaacgtgatgcatgttttaatggagaaaaaatagctggtttctattaattatatagacagtaaacaaaaaccttaatacttactatcttcttttcagaattagtttatttttgtcagttacagtcctagatatacttactgctggtacagttgtactctaagattggtatttgatattcactttactcacaagtagtgcgggaggccagctcctggcaggccctcgcgatgagcagtgggtcagctgcggtgtgggatgctggagtttggctgcaggctgacatcatttatttttgcatccctgtctgctttgttacaagctcccaggggaggtggggtttgtgtcttccaacttccctacatgcagaaactgctccctttgaactctcttggctgaacagcagattactgacagacaatctgtgatatggtgttttatacgcttcctcgtacgctggggccaaggcagtatacattcctctgactttatactgttattactgcatttattatttgctatattaatagctactaactagaaattagatgaagcaagcatgacagacacagctgtggaggtcacagctgctcctttttggtcaatgagcgtttctatcccctccccctggggtgtgctgtgtcccacctggcccaccagaggctcacgacgatggcacctgaccaggtgacgtgggcgtggtcacctcacctgcaaggctttgtggactctgcacaccgtatgacccccggttttacagtttttagctgttgaattttggaaattggcactgggtgaaaaggtcggaggactggctcttgtagtcacagagtggctgcaggcctttgaaaagtggaggaaagaaaagcccttctccttgccccgcacacatttcactcccactgtactgggcttccaagctttggcattcaggcccctatattttctgtaggaaaaatcgttgagaacacttttctatatgggtgattttgagaccatcgttacgctgtgcgtaaagaatgtacagagaaatttgtaggtattttttgaagaacattaatttgttaatgatatgtagctatttaatttttccctttcctattgtaatcattcattttttttgttgttcggaaaaaaaaagttgatctttttttttgtcgtagatttgtctgtaaaagtgcaggaacagttattctatgagaacactgcatctgcattcatagccacgagtttgttattgctacaggctactgagcgtcgtaacaggaaaaccacccacagctgaccggctcggtggaggacactcctgggacaggtctctttgtcagtgaacaagggcgtcactctgggaggggtcggcggtgctggcggccgggtccctggtgcactgacctatctgggataggcagtaccctggaggggggcctggggcagaggaggcagcagaaaaccaaacatttcactgagaaagccccctccctgctctaagaaggggctccgtgaagttcttcccagagccgcgctgcctgcagtgcgctctgaccttctcttcatgtgtgtaaatctgtaatataccattctctgtggcctgtttttcctggaagaagaaaaaaaaaggtttggcaggccatctttttttgtacttaaaagtagccttaagaacaataataaagtgctcttaaacc

SEQ ID NO: 22957 - DNA, 1554 bp, Homo sapiens
  misc_feature 1..1554: note = ENST00000413604
  source 1..1554: mol_type = unassigned DNA; mol_type = unassigned DNA
aattttaaccccaccacacatacaacagttaccactcttgtctaacatacaagtgttgggttaaggccatctagggaggggccccaaagatgcataaaggcacataactgaacggacctgtccctgaccttatgtgcggattcttttcctttgctgtaagccttgtgtgaggctgcacagtcttaggatgaggcgttgtctgattgcagaggccatgggttcttgcctccagctaacctgttaactggaggatcttgggcgaagctgctctcaggggagaacccagaatacagaccctgccggtggcctctgccctcagcagtcaccgcaccggccctcccccaatcagccccagcaagaggaagttcagcatggagccaggtgacgaggacctagactgtgacaacgaccacgtctccaaaatgagtcgcatcttcaacccccatctgaacaagactgccaatggagactgccgcagagacccccgggagcggagccgcagccccatcgagcgcgctgtggcccccaccatgagcctgcacggcagccacctgtacacctccctccccagccttggcctggagcagcccctcgcactgaccaagaacagcctggacgccagcaggccagccggcctctcgcccacactgaccccgggggagcggcagcagaaccggccctccgtgatcacctgtgcctcggctggcgcccgcaactgcaacctctcgcactgccccatcgcgcacagcggctgtgccgcgcccgggcctgccagctaccggaggccaccgagcgctgccaccacctgtgaccccgtggtggaggagcatttccgcaggagcctgggcaagaattacaaggagcccgagccggcacccaactccgtgtccatcacgggctccgtggacgaccactttgccaaagctctgggtgacacgtggctccagatcaaagcggccaaggacggagcatccagcagccctgagtccgcctctcgcaggggccagcccgccagcccctctgcccacatggtcagccacagtcactccccctctgtggtctcctgaagggagcgcctcctccaacaacacgtggatctgcatggtttgcctgagctttgaacagtcagtacttaaaaaaaaaaaaatcatgggggtggggtggggggaagggaagggatggtttatttgcaaaaaccatgttgttgggatttgtgttctgtttttgtacttgcttggtatccgtacaagggggccctcaaacatgatagcaggaactacgcgtggaacatctgtctaatgtagcatccttacttcctgcctcagttaccaaagaaacctctgatgcaggtctgctgccccgacggggccaggactccacagcgctttctcagtcacaagccatgatgaattggtgactcagacgctttgtgctttttcctttgcttcttgagaccggggtgtgtgtggctcagcttccacggcgtgtttggttcggtccatgtgtgtgcgtgtgtatacttgaagagaactgtcgtgtctgatttgcactatt

SEQ ID NO: 22958 - DNA, 938 bp, Homo sapiens
  misc_feature 1..938: note = ENST00000451674
  source 1..938: mol_type = unassigned DNA; mol_type = unassigned DNA
atccagttttgtgcctgagactgcttgccaagtttgtgaggcccaaggctttcttgtgggaggacgctgggctgtcttcatgctctttggcaatgattaaagtgaggaacaagactgccaatggagactgccgcagagacccccgggagcggagccgcagccccatcgagcgcgctgtggcccccaccatgagcctgcacggcagccacctgtacacctccctccccagccttggcctggagcagcccctcgcactgaccaagaacagcctggacgccagcaggccagccggcctctcgcccacactgaccccgggggagcggcagcagaaccggccctccgtgatcacctgtgcctcggctggcgcccgcaactgcaacctctcgcactgccccatcgcgcacagcggctgtgccgcgcccgggcctgccagctaccggaggccaccgagcgctgccaccacctgtgaccccgtggtggaggagcatttccgcaggagcctgggcaagaattacaaggagcccgagccggcacccaactccgtgtccatcacgggctccgtggacgaccactttgccaaagctctgggtgacacgtggctccagatcaaagcggccaaggacggagcatccagcagccctgagtccgcctctcgcaggggccagcccgccagcccctctgcccacatggtcagccacagtcactccccctctgtggtctcctgaagggagcgcctcctccaacaacacgtggatctgcatggtttgcctgagctttgaacagtcagtacttaaaaaaaaaaaaatcatgggggtggggtggggggaagggaagggatggtttatttgcaaaaaccatgttgttgggatttgtgttctgtttttgtacttgcttggtatccgtacaagggggccctcaaacatgatagcaggaactac

SEQ ID NO: 22959 - DNA, 1025 bp, Homo sapiens
  misc_feature 1..1025: note = ENST00000424529
  source 1..1025: mol_type = unassigned DNA; mol_type = unassigned DNA
agtgcccgcctaggatggggatgaggcccggggcggggccgggtgccgtgcagcctcagcggctctgataggcctggcacggagccactcagagtcctttgggtgttcgcggggatgccgtgggctctctcgggcacagtcctgaccaggagcggaggcgacttccatctcccgggcaggatgcgtgcggttttctgccgtccccgggagcacatgacgcctgggaagcagtggccgggaggtgattcatccgggcgagcggggcctggaaaacaatgtctgtcttgaagctccgggaaccaggaaaatgagctggaaatgaacaagactgccaatggagactgccgcagagacccccgggagcggagccgcagccccatcgagcgcgctgtggcccccaccatgagcctgcacggcagccacctgtacacctccctccccagccttggcctggagcagcccctcgcactgaccaagaacagcctggacgccagcaggccagccggcctctcgcccacactgaccccgggggagcggcagcagaaccggccctccgtgatcacctgtgcctcggctggcgcccgcaactgcaacctctcgcactgccccatcgcgcacagcggctgtgccgcgcccgggcctgccagctaccggaggccaccgagcgctgccaccacctgtgaccccgtggtggaggagcatttccgcaggagcctgggcaagaattacaaggagcccgagccggcacccaactccgtgtccatcacgggctccgtggacgaccactttgccaaagctctgggtgacacgtggctccagatcaaagcggccaaggacggagcatccagcagccctgagtccgcctctcgcaggggccagcccgccagcccctctgcccacatggtcagccacagtcactccccctctgtggtctcctgaagggagcgcctcctccaacaacacgtggatctgcatggtttgcctgagctttgaacagtcagtacttaaaaaaaaaaaaatcatgg

SEQ ID NO: 22960 - DNA, 1377 bp, Homo sapiens
  misc_feature 1..1377: note = ENST00000430365
  source 1..1377: mol_type = unassigned DNA; mol_type = unassigned DNA
atgccaagcatagccctcatgtcagcgctgccggcttgcagcgggctgtgagaggggccggcgccgctttgtcctaggaaacgggctgcgcgtttctctttttcactcttttccatttccaggaaggacttgtaaggacttctgaaacgctgttttcatactcgatcggggatacagtacatacaccgtctaccagtaagcccttgaagggtttcgtgtgagctcgatttttttgtgcctgatttttttttttttaacttttgcatactttgttttgatagtctgaggctgggcctctgcctttgtgaagttgaagagccaggagctactcagcaacaattgatttttgaaacttaactcttttggggcaaaagcaaagagctggttttctttgctagcccaataaatgctatttatgaagatggacctgttgaactatcagtacttggacaagatgaacaacaatatcggcattctgtgctacgaaggcgaagctgctctcaggggagaacccagaatacagaccctgccggtggcctctgccctcagcagtcaccgcaccggccctcccccaatcagccccagcaagaggaagttcagcatggagccaggtgacgaggacctagactgtgacaacgaccacgtctccaaaatgagtcgcatcttcaacccccatctgaacaagactgccaatggagactgccgcagagacccccgggagcggagccgcagccccatcgagcgcgctgtggcccccaccatgagcctgcacggcagccacctgtacacctccctccccagccttggcctggagcagcccctcgcactgaccaagaacagcctggacgccagcaggccagccggcctctcgcccacactgaccccgggggagcggcagcagaaccggccctccgtgatcacctgtgcctcggctggcgcccgcaactgcaacctctcgcactgccccatcgcgcacagcggctgtgccgcgcccgggcctgccagctaccggaggccaccgagcgctgccaccacctgtgaccccgtggtggaggagcatttccgcaggagcctgggcaagaattacaaggagcccgagccggcacccaactccgtgtccatcacgggctccgtggacgaccactttgccaaagctctgggtgacacgtggctccagatcaaagcggccaaggacggagcatccagcagccctgagtccgcctctcgcaggggccagcccgccagcccctctgcccacatggtcagccacagtcactccccctctgtggtctcctgaagggagcgcctcctccaacaacacgtggatctgcatggtttgcctgagctttgaacagtcagtacttaaaaaaaaaaaaa

SEQ ID NO: 22961 - DNA, 1428 bp, Homo sapiens
  misc_feature 1..1428: note = ENST00000426568
  source 1..1428: mol_type = unassigned DNA; mol_type = unassigned DNA
ggacgccaggagtttgccaaacacagcaaacactggtgtgtgagcggctgaaggggactctttccactccgatctccctccctcccagcctgttttgatttactaggacttcctcctccgggcgaggcgggggaaggacgccgccgagcgcctggagttgtgcgcgtgtgcgtgtgcgcgtgtgcgagtgtgaagtgcagcgctggagtgcaacatgctgtaatgggaggaaacccagcggcgtcggagcgcccgggaccgccgcggccgttctgagcgcagtggcgccgagcagcccctcccgcagccggtgtgacctgtcccttcaggctccaaccaggaatggagacgccattggatgttttgtccagggcagcatctctggtgcatgctgatgacgaaaaaccgtcacctgggaacttgttagaaatgcagaatcgtagtcctcgctgcggaactgatgactgagaatacgcattttgacaaaatccctgagtcctgtgcactcaaaagttggagacatccaggtctgcaccatggcgaagctgctctcaggggagaacccagaatacagaccctgccggtggcctctgccctcagcagtcaccgcaccggccctcccccaatcagccccagcaagaggaagttcagcatggagccaggtgacgaggacctagactgtgacaacgaccacgtctccaaaatgagtcgcatcttcaacccccatctgaacaagactgccaatggagactgccgcagagacccccgggagcggagccgcagccccatcgagcgcgctgtggcccccaccatgagcctgcacggcagccacctgtacacctccctccccagccttggcctggagcagcccctcgcactgaccaagaacagcctggacgccagcaggccagccggcctctcgcccacactgaccccgggggagcggcagcagaaccggccctccgtgatcacctgtgcctcggctggcgcccgcaactgcaacctctcgcactgccccatcgcgcacagcggctgtgccgcgcccgggcctgccagctaccggaggccaccgagcgctgccaccacctgtgaccccgtggtggaggagcatttccgcaggagcctgggcaagaattacaaggagcccgagccggcacccaactccgtgtccatcacgggctccgtggacgaccactttgccaaagctctgggtgacacgtggctccagatcaaagcggccaaggacggagcatccagcagccctgagtccgcctctcgcaggggccagcccgccagcccctctgcccacatggtcagccacagtcactccccctctgtggtctcctgaagggagcgcctcctccaacaacacgtggatctgcatggtttgcctgagctttgaacagtcagtacttaaaaaaaaaaaaa

SEQ ID NO: 22962 - DNA, 726 bp, Homo sapiens
  misc_feature 1..726: note = ENST00000445411
  source 1..726: mol_type = unassigned DNA
gggttgtggacgccaggagtttgccaaacacagcaaacactggctccaaccaggaatggagacgccattggatgttttgtccagggcagcatctctggtgcatgctgatgacgaaaaacgcgaagctgctctcaggggagaacccagaatacagaccctgccggtggcctctgccctcagcagtcaccgcaccggccctcccccaatcagccccagcaagaggaagttcagcatggagccaggtgacgaggacctagactgtgacaacgaccacgtctccaaaatgagtcgcatcttcaacccccatctgaacaagactgccaatggagactgccgcagagacccccgggagcggagccgcagccccatcgagcgcgctgtggcccccaccatgagcctgcacggcagccacctgtacacctccctccccagccttggcctggagcagcccctcgcactgaccaagaacagcctggacgccagcaggccagccggcctctcgcccacactgaccccgggggagcggcagcagaaccggccctccgtgatcacctgtgcctcggctggcgcccgcaactgcaacctctcgcactgccccatcgcgcacagcggctgtgccgcgcccgggcctgccagctaccggaggccaccgagcgctgccaccacctgtgaccccgtggtggaggagcatttccgcaggagcctgggcaagaattacaaggagcc

SEQ ID NO: 22963 - DNA, 792 bp, Homo sapiens
  misc_feature 1..792: note = ENST00000418000
  source 1..792: mol_type = unassigned DNA
gcgcgtgcgtgtgcgtgtgcgtgtttggcgggggcccgtgcgggggctcgggcgcgagcccgcctgtgcgtctgcgcgccctcggggtgcgccccgcgtgcccaggtcccgtccccgcccctgggtcccccgcagggccaggccggccccaggcgggcgcgcccagagccgccgggcggctccaaccaggaatggagacgccattggatgttttgtccagggcagcatctctggtgcatgctgatgacgaaaaacgcgaagctgctctcaggggagaacccagaatacagaccctgccggtggcctctgccctcagcagtcaccgcaccggccctcccccaatcagccccagcaagaggaagttcagcatggagccaggtgacgaggacctagactgtgacaacgaccacgtctccaaaatgagtcgcatcttcaacccccatctgaacaagactgccaatggagactgccgcagagacccccgggagcggagccgcagccccatcgagcgcgctgtggcccccaccatgagcctgcacggcagccacctgtacacctccctccccagccttggcctggagcagcccctcgcactgaccaagaacagcctggacgccagcaggccagccggcctctcgcccacactgaccccgggggagcggcagcagaaccggccctccgtgatcacctgtgcctcggctggcgcccgcaactgcaacctctcgcactgccccatcgcgcacagcggctgtgccgcgcccgggcctgccagctaccggaggccaccgagcg

SEQ ID NO: 22964 - DNA, 766 bp, Homo sapiens
  misc_feature 1..766: note = ENST00000458499
  source 1..766: mol_type = unassigned DNA; mol_type = unassigned DNA
ggggtttcaccatgttggccaggctggtctcgaactcctgaccttagatgatccaactgcctcggcctcccaaagtgctgggattacagatgtaatgaaatctccagctctgccagatcttttgtgtcatgagaaaaaaccaaaacaacttagttcctgcccatccagggcttatctttgaagtaataagaggagaatgaaagacttgaagaaaagagtggcacttggatacatttccacccacacaggcgaagctgctctcaggggagaacccagaatacagaccctgccggtggcctctgccctcagcagtcaccgcaccggccctcccccaatcagccccagcaagaggaagttcagcatggagccaggtgacgaggacctagactgtgacaacgaccacgtctccaaaatgagtcgcatcttcaacccccatctgaacaagactgccaatggagactgccgcagagacccccgggagcggagccgcagccccatcgagcgcgctgtggcccccaccatgagcctgcacggcagccacctgtacacctccctccccagccttggcctggagcagcccctcgcactgaccaagaacagcctggacgccagcaggccagccggcctctcgcccacactgaccccgggggagcggcagcagaaccggccctccgtgatcacctgtgcctcggctggcgcccgcaactgcaacctctcgcactgccccatcgcgcacagcggctgtgccgcgcccgggcctgccagc

SEQ ID NO: 22965 - DNA, 581 bp, Homo sapiens
  misc_feature 1..581: note = ENST00000417206
  source 1..581: mol_type = unassigned DNA; mol_type = unassigned DNA
agggattcctcgcgctcccgcgctcccgtccgccggcccggtccgcgcgtgcgtgtgcgtgctccaaccaggaatggagacgccattggatgttttgtccagggcagcatctctggtgcatgctgatgacgaaaaacgcgaagctgctctcaggggagaacccagaatacagaccctgccggtggcctctgccctcagcagtcaccgcaccggccctcccccaatcagccccagcaagaggaagttcagcatggagccaggtgacgaggacctagactgtgacaacgaccacgtctccaaaatgagtcgcatcttcaacccccatctgaacaagactgccaatggagactgccgcagagacccccgggagcggagccgcagccccatcgagcgcgctgtggcccccaccatgagcctgcacggcagccacctgtacacctccctccccagccttggcctggagcagcccctcgcactgaccaagaacagcctggacgccagcaggccagccggcctctcgcccacactgaccccgggggagcggcagcaggtgggcctctgtctgggagggtggcgtgggg

SEQ ID NO: 22966 - DNA, 894 bp, Homo sapiens
  misc_feature 1..894: note = ENST00000417466
  source 1..894: mol_type = unassigned DNA; mol_type = unassigned DNA
gcgctcccgtccgccggcccggtccgcgcgtgcgtgtgcgtgtgcgtgtttggcgggggcccgtgcgggggctcgggcgcgagcccgcctgtgcgtctgcgcgccctcggggtgcgccccgcgtgcccaggtcccgtccccgcccctgggtcccccgcagggccaggccggccccaggcgggcgcgcccagagccgccgggcggctccaaccaggaatggagacgccattggatgttttgtccagggcagcatctctggtgcatgctgatgacgaaaaacggtcttgctctgttgcccagactggagtatagtggcacaatcttggctcactgcaagctccgccccctggggctcaagtgatcctcccacctcagcctctcgagtagctgggaccacagcgtcacctgggaacttgttagaaatgcagaatcgtagtcctcgctgcggaactgatgactgagaatacgcattttgacaaaatccctgagtcctgtgcactcaaaagttggagacatccaggtctgcaccatggcgaagctgctctcaggggagaacccagaatacagaccctgccggtggcctctgccctcagcagtcaccgcaccggccctcccccaatcagccccagcaagaggaagttcagcatggagccaggtgacgaggacctagactgtgacaacgaccacgtctccaaaatgagtcgcatcttcaacccccatctgaacaagactgccaatggagactgccgcagagacccccgggagcggagccgcagccccatcgagcgcgctgtggcccccaccatgagcctgcacggcagccacctgtacacctccctccccagccttggcctggagcagcccctcgcactgaccaagaacagcctggacgcc

SEQ ID NO: 22967 - DNA, 437 bp, Homo sapiens
  misc_feature 1..437: note = ENST00000424709
  source 1..437: mol_type = unassigned DNA; mol_type = unassigned DNA
gcactttcctagtttactcagaggcctctgaggctacctgagagccagagtctagggaatggaggaccaagaatagaaggcgaagctgctctcaggggagaacccagaatacagaccctgccggtggcctctgccctcagcagtcaccgcaccggccctcccccaatcagccccagcaagaggaagttcagcatggagccaggtgacgaggacctagactgtgacaacgaccacgtctccaaaatgagtcgcatcttcaacccccatctgaacaagactgccaatggagactgccgcagagacccccgggagcggagccgcagccccatcgagcgcgctgtggcccccaccatgagcctgcacggcagccacctgtacacctccctccccagccttggcctggagcagcccctcgcactgaccaagaacagcctgga

SEQ ID NO: 22968 - DNA, 466 bp, Homo sapiens
  misc_feature 1..466: note = ENST00000419541
  source 1..466: mol_type = unassigned DNA; mol_type = unassigned DNA
ggcaggaacacctggcagtttgaatgtgattcctccgatgctcacccccctggcctccacatctagacaaggctccaaccaggaatggagacgccattggatgttttgtccagggcagcatctctggtgcatgctgatgacgaaaaacgcgaagctgctctcaggggagaacccagaatacagaccctgccggtggcctctgccctcagcagtcaccgcaccggccctcccccaatcagccccagcaagaggaagttcagcatggagccaggtgacgaggacctagactgtgacaacgaccacgtctccaaaatgagtcgcatcttcaacccccatctgaacaagactgccaatggagactgccgcagagacccccgggagcggagccgcagccccatcgagcgcgctgtggcccccaccatgagcctgcacggcagccacctgtacacctccctccccagccttg

SEQ ID NO: 22969 - DNA, 544 bp, Homo sapiens
  misc_feature 1..544: note = ENST00000437722
  source 1..544: mol_type = unassigned DNA; mol_type = unassigned DNA
atagtatgagaggtgctttgtgttgccacccaagggctgggggattgcaggcgatccttgcgcttgggcagacagcacgtcacggcttttatctgccggctcgcattgcaatgggcgtcctataaaaaaagaaaaaagtgagccagaatggggctagccacaagttgaacaatttgaaggagattgacttcacggtgtcttctccccagctgctcgaccgtgagacaaagaagtattatttgaaagaaagcgaagctgctctcaggggagaacccagaatacagaccctgccggtggcctctgccctcagcagtcaccgcaccggccctcccccaatcagccccagcaagaggaagttcagcatggagccaggtgacgaggacctagactgtgacaacgaccacgtctccaaaatgagtcgcatcttcaacccccatctgaacaagactgccaatggagactgccgcagagacccccgggagcggagccgcagccccatcgagcgcgctgtggcccccaccatgagcctgcacggcagccacct

SEQ ID NO: 22970 - DNA, 728 bp, Homo sapiens
  misc_feature 1..728: note = ENST00000623028
  source 1..728: mol_type = unassigned DNA; mol_type = unassigned DNA
ggcctttctaaaacgcccagcccgtccctggaggccacaggttattgcctgtgttctcttctcttttgatagccagccaagaagagggaacgcagggtgactcaccaggtgcccacctggactggatttaagtcagaagagaaggaagatgtgagtattcattaaacgtctctgcgaagcctgtaaccccacaccggctcttcgaagggctaagatccagtgagacaccgtgctgttccttgatatgatcagatgaggcaacagatgggaaaacagtttgaaaactgcaaagcattttttttttccagcacgaatgacttcctcctccgggcgaggcgggggaaggacgccgccgagcgcctggagttgtgcgcgtgtgcgtgtgcgcgtgtgcgagtgtgaagtgcagcgctggagtgcaacatgctgtaatgggaggaaacccagcggcgtcggagcgcccgggaccgccgcggccgttctgagcgcagtggcgccgagcagcccctcccgcagccggtgtgacctgtcccttcaggctccaaccaggaatggagacgccattggatgttttgtccagggcagcatctctggtgcatgctgatgacgaaaaacgcgaagctgctctcaggggagaacccagaatacagaccctgccggtggcctctgccctcagcagtcaccgcaccggccctcccccaatcagccccagcaagaggaagttcagc

SEQ ID NO: 22971 - DNA, 586 bp, Homo sapiens
  misc_feature 1..586: note = ENST00000480288
  source 1..586: mol_type = unassigned DNA; mol_type = unassigned DNA
tttgagacggtgtcttgctctgtcgccaggctggagtgcagtggtgcgatctcggctcactgcaacctccgccttccaggttcaagcgattcttctgcctcagcctcctgagtagctgggactacaggtgcgtgccaccacacccagctaatttttttgtatttttagtagagacggggtttcacagtgttggccaggatggtcttgatctcttgacctcgtgatcttgcccgccttggcctcccaaagtgctgggattacaggtgtgagccaccgctcctggccctcctctgccttcttggagggattaggtgtttgtattttcatggcatgctgtgcatacttctgccatggaatttatctcgctgtgttacctccctcctctgtctggcttactctaatttctgggagggctaggattttgtcttgcagctactcgttcttcacaccaggcaagtgttgtctccttatgaatgactccagtgtcttttgactaaagataagcattgaaattgcctgactagcccaaggatactcagcgagttggtgatacaagcgaagctgctctcaggggagaacccagaat

SEQ ID NO: 22972 - DNA, 238 bp, Homo sapiens
  misc_feature 1..238: note = ENST00000463387
  source 1..238: mol_type = unassigned DNA; mol_type = unassigned DNA
cgcggccgttctgagcgcagtggcgccgagcagcccctcccgcagccggtgtgacctgtcccttcaggctccaaccaggaatggagacgccattggatgttttgtccagggcagcatctctggtgcatgctgatgacgaaaaacagatggggtttcatcatgttgcccaggctggtctcaaactcctggcctccagcagtccatccgccttggcctcccaaactgctgtgattacagg

SEQ ID NO: 22973 - DNA, 453 bp, Homo sapiens
  misc_feature 1..453: note = ENST00000414047
  source 1..453: mol_type = unassigned DNA; mol_type = unassigned DNA
ctatgggggcaaaagctaaaaggggtaatagagatagcaataagggagccaaagctgtgaggaaagtccttggcagagagatgagaaagaactagattggggaggacgcacaaagaaacagagcgaaagggaaactgagaagctgtgcagtcgatgggtgcccacctggactggatttaagtcagaagagaaggaagatgtgagtattcattaaacgtctctgcgaagcctgtaaccccacaccggctcttcgaagaagcattatctctgttttacggatgagaaaactgaggacttcctcctccgggcgaggcgggggaaggacgccgccgagcgcctggagttgtgcgcgtgtgcgtgtgcgcgtgtgcgagtgtgaagtgcagcgctggagtgcaacatgctgtaatgggaggaaacccagcggcgtcggagcgcccgggaccgccgcgg

SEQ ID NO: 22974 - DNA, 93 bp, Homo sapiens
  misc_feature 1..93: note = ENST00000638314
  source 1..93: mol_type = unassigned DNA; mol_type = unassigned DNA
atggagacgccattggatgttttgtccagggcagcatctctggtgcatgctgatgacgaaaaacgatcatgctgtgttgcccaggctggtttc

SEQ ID NO: 22975 - DNA, 2135 bp, Homo sapiens
  misc_feature 1..2135: note = ENST00000544301
  source 1..2135: mol_type = unassigned DNA; mol_type = unassigned DNA
gcctctccaaaggctgcagaagtttcttgctaacaaaaagtccgcacattcgagcaaagacaggctttagcgagttattaaaaacttaggggcgctcttgtcccccacagggcccgaccgcacacagcaaggcgatggcccagctgtaagttggtagcactgagaactagcagcgcgcgcggagcccgctgagacttgaatcaatctggtctaacggtttcccctaaaccgctaggagccctcaatcggcgggacagcagggcgcgtcctctgccactctcgctccgaggtccccgcgccagagacgcagccgcgctcccaccacccacacccaccgcgccctcgttcgcctcttctccgggagccagtccgcgccaccgccgccgcccaggccatcgccaccctccgcagccatgtccaccaggtccgtgtcctcgtcctcctaccgcaggatgttcggcggcccgggcaccgcgagccggccgagctccagccggagctacgtgactacgtccacccgcacctacagcctgggcagcgcgctgcgccccagcaccagccgcagcctctacgcctcgtccccgggcggcgtgtatgccacgcgctcctctgccgtgcgcctgcggagcagcgtgcccggggtgcggctcctgcaggactcggtggacttctcgctggccgacgccatcaacaccgagttcaagaacacccgcaccaacgagaaggtggagctgcaggagctgaatgaccgcttcgccaactacatcgacaaggtgcgcttcctggagcagcagaataagatcctgctggccgagctcgagcagctcaagggccaaggcaagtcgcgcctgggggacctctacgaggaggagatgcgggagctgcgccggcaggtggaccagctaaccaacgacaaagcccgcgtcgaggtggagcgcgacaacctggccgaggacatcatgcgcctccgggagaaattgcaggaggagatgcttcagagagaggaagccgaaaacaccctgcaatctttcagacaggatgttgacaatgcgtctctggcacgtcttgaccttgaacgcaaagtggaatctttgcaagaagagattgcctttttgaagaaactccacgaagaggaaatccaggagctgcaggctcagattcaggaacagcatgtccaaatcgatgtggatgtttccaagcctgacctcacggctgccctgcgtgacgtacgtcagcaatatgaaagtgtggctgccaagaacctgcaggaggcagaagaatggtacaaatccaagtttgctgacctctctgaggctgccaaccggaacaatgacgccctgcgccaggcaaagcaggagtccactgagtaccggagacaggtgcagtccctcacctgtgaagtggatgcccttaaaggaaccaatgagtccctggaacgccagatgcgtgaaatggaagagaactttgccgttgaagctgctaactaccaagacactattggccgcctgcaggatgagattcagaatatgaaggaggaaatggctcgtcaccttcgtgaataccaagacctgctcaatgttaagatggcccttgacattgagattgccacctacaggaagctgctggaaggcgaggagagcaggatttctctgcctcttccaaacttttcctccctgaacctgagggaaactaatctggattcactccctctggttgatacccactcaaaaaggacacttctgattaagacggttgaaactagagatggacaggttatcaacgaaacttctcagcatcacgatgaccttgaataaaaattgcacacactcagtgcagcaatatattaccagcaagaataaaaaagaaatccatatcttaaagaaacagctttcaagtgcctttctgcagtttttcaggagcgcaagatagatttggaataggaataagctctagttcttaacaaccgacactcctacaagatttagaaaaaagtttacaacataatctagtttacagaaaaatcttgtgctagaatactttttaaaaggtattttgaataccattaaaactgcttttttttttccagcaagtatccaaccaacttggttctgcttcaataaatctttggaaaaact

SEQ ID NO: 22976 - DNA, 757 bp, Homo sapiens
  misc_feature 1..757: note = ENST00000478746
  source 1..757: mol_type = unassigned DNA; mol_type = unassigned DNA
gcagggcgcggtgagtcaccgccggtgactaagcgaccccacccctctccctcgggctttcctctgccaccgccgtctcgcaactcccgccgtccgaagctggactgagcccgttaggtccctcgacagaacctcccctccccccaacatctctccgccaagtcctctgccactctcgctccgaggtccccgcgccagagacgcagccgcgctcccaccacccacacccaccgcgccctcgttcgcctcttctccgggagccagtccgcgccaccgccgccgcccaggccatcgccaccctccgcagccatgtccaccaggtccgtgtcctcgtcctcctaccgcaggatgttcggcggcccgggcaccgcgagccggccgagctccagccggagctacgtgactacgtccacccgcacctacagcctgggcagcgcgctgcgccccagcaccagccgcagcctctacgcctcgtccccgggcggcgtgtatgccacgcgctcctctgccgtgcgcctgcggagcagcgtgcccggggtgcggctcctgcaggactcggtggacttctcgctggccgacgccatcaacaccgagttcaagaacacccgcaccaacgagaaggtggagctgcaggagctgaatgaccgcttcgccaactacatcgacaaggtgcgcttcctggagcagcagaataagatcctgctggccgagctcgagcagctcaagggccaaggcaagtcgcgcctgggggacctct

SEQ ID NO: 22977 - DNA, 634 bp, Homo sapiens
  misc_feature 1..634: note = ENST00000497849
  source 1..634: mol_type = unassigned DNA; mol_type = unassigned DNA
cgctcctttgcccgcgggtctccccgcctgaccgcagccccgagaccgccgcgcacctcctcccacgcccctttggcgtggtgccaccggacccctctggttcagtcccaggcggacccccccctcaccgcgcgaccccgcctttttcagcaccccaggtcctctgccactctcgctccgaggtccccgcgccagagacgcagccgcgctcccaccacccacacccaccgcgccctcgttcgcctcttctccgggagccagtccgcgccaccgccgccgcccaggccatcgccaccctccgcagccatgtccaccaggtccgtgtcctcgtcctcctaccgcaggatgttcggcggcccgggcaccgcgagccggccgagctccagccggagctacgtgactacgtccacccgcacctacagcctgggcagcgcgctgcgccccagcaccagccgcagcctctacgcctcgtccccgggcggcgtgtatgccacgcgctcctctgccgtgcgcctgcggagcagcgtgcccggggtgcggctcctgcaggactcggtggacttctcgctggccgacgccatcaacaccgagttcaagaacacccgcaccaacgagaaggtggagctgcaggagc

SEQ ID NO: 22978 - DNA, 1868 bp, Homo sapiens
  misc_feature 1..1868: note = ENST00000224237
  source 1..1868: mol_type = unassigned DNA; mol_type = unassigned DNA
ctctgccactctcgctccgaggtccccgcgccagagacgcagccgcgctcccaccacccacacccaccgcgccctcgttcgcctcttctccgggagccagtccgcgccaccgccgccgcccaggccatcgccaccctccgcagccatgtccaccaggtccgtgtcctcgtcctcctaccgcaggatgttcggcggcccgggcaccgcgagccggccgagctccagccggagctacgtgactacgtccacccgcacctacagcctgggcagcgcgctgcgccccagcaccagccgcagcctctacgcctcgtccccgggcggcgtgtatgccacgcgctcctctgccgtgcgcctgcggagcagcgtgcccggggtgcggctcctgcaggactcggtggacttctcgctggccgacgccatcaacaccgagttcaagaacacccgcaccaacgagaaggtggagctgcaggagctgaatgaccgcttcgccaactacatcgacaaggtgcgcttcctggagcagcagaataagatcctgctggccgagctcgagcagctcaagggccaaggcaagtcgcgcctgggggacctctacgaggaggagatgcgggagctgcgccggcaggtggaccagctaaccaacgacaaagcccgcgtcgaggtggagcgcgacaacctggccgaggacatcatgcgcctccgggagaaattgcaggaggagatgcttcagagagaggaagccgaaaacaccctgcaatctttcagacaggatgttgacaatgcgtctctggcacgtcttgaccttgaacgcaaagtggaatctttgcaagaagagattgcctttttgaagaaactccacgaagaggaaatccaggagctgcaggctcagattcaggaacagcatgtccaaatcgatgtggatgtttccaagcctgacctcacggctgccctgcgtgacgtacgtcagcaatatgaaagtgtggctgccaagaacctgcaggaggcagaagaatggtacaaatccaagtttgctgacctctctgaggctgccaaccggaacaatgacgccctgcgccaggcaaagcaggagtccactgagtaccggagacaggtgcagtccctcacctgtgaagtggatgcccttaaaggaaccaatgagtccctggaacgccagatgcgtgaaatggaagagaactttgccgttgaagctgctaactaccaagacactattggccgcctgcaggatgagattcagaatatgaaggaggaaatggctcgtcaccttcgtgaataccaagacctgctcaatgttaagatggcccttgacattgagattgccacctacaggaagctgctggaaggcgaggagagcaggatttctctgcctcttccaaacttttcctccctgaacctgagggaaactaatctggattcactccctctggttgatacccactcaaaaaggacacttctgattaagacggttgaaactagagatggacaggttatcaacgaaacttctcagcatcacgatgaccttgaataaaaattgcacacactcagtgcagcaatatattaccagcaagaataaaaaagaaatccatatcttaaagaaacagctttcaagtgcctttctgcagtttttcaggagcgcaagatagatttggaataggaataagctctagttcttaacaaccgacactcctacaagatttagaaaaaagtttacaacataatctagtttacagaaaaatcttgtgctagaatactttttaaaaggtattttgaataccattaaaactgcttttttttttccagcaagtatccaaccaacttggttctgcttcaataaatctttggaaaaactc

SEQ ID NO: 22979 - DNA, 2272 bp, Homo sapiens
  misc_feature 1..2272: note = ENST00000487938
  source 1..2272: mol_type = unassigned DNA; mol_type = unassigned DNA
ctctgccactctcgctccgaggtccccgcgccagagacgcagccgcgctcccaccacccacacccaccgcgccctcgttcgcctcttctccgggagccagtccgcgccaccgccgccgcccaggccatcgccaccctccgcagccatgtccaccaggtccgtgtcctcgtcctcctaccgcaggatgttcggcggcccgggcaccgcgagccggccgagctccagccggagctacgtgactacgtccacccgcacctacagcctgggcagcgcgctgcgccccagcaccagccgcagcctctacgcctcgtccccgggcggcgtgtatgccacgcgctcctctgccgtgcgcctgcggagcagcgtgcccggggtgcggctcctgcaggactcggtggacttctcgctggccgacgccatcaacaccgagttcaagaacacccgcaccaacgagaaggtggagctgcaggagctgaatgaccgcttcgccaactacatcgacaaggtgcgcttcctggagcagcagaataagatcctgctggccgagctcgagcagctcaagggccaaggcaagtcgcgcctgggggacctctacgaggaggagatgcgggagctgcgccggcaggtggaccagctaaccaacgacaaagcccgcgtcgaggtggagcgcgacaacctggccgaggacatcatgcgcctccgggagaaattgcaggaggagatgcttcagagagaggaagccgaaaacaccctgcaatctttcagacaggatgttgacaatgcgtctctggcacgtcttgaccttgaacgcaaagtggaatctttgcaagaagagattgcctttttgaagaaactccacgaagaggaaatccaggagctgcaggctcagattcaggaacagcatgtccaaatcgatgtggatgtttccaagcctgacctcacggctgccctgcgtgacgtacgtcagcaatatgaaagtgtggctgccaagaacctgcaggaggcagaagaatggtacaaatccaagtttgctgacctctctgaggctgccaaccggaacaatgacgccctgcgccaggcaaagcaggagtccactgagtaccggagacaggtgcagtccctcacctgtgaagtggatgcccttaaaggaaccaatgagtccctggaacgccagatgcgtgaaatggaagagaactttgccgttgaagctgctaactaccaagacactattggccgcctgcaggatgagattcagaatatgaaggaggaaatggctcgtcaccttcgtgaataccaagacctgctcaatgttaagatggcccttgacattgagattgccacctacaggaagctgctggaaggcgaggagagcaggatttctctgcctcttccaaacttttcctccctgaacctgaggggtaagcattttatttccctttaggaaaaacgtcagctgcttgtaaccactgtgtttatgtcaaagcattcattttttttaggatatctgaaaaaatgccatataagagaaaactctataaaacatctataattttcgaacccaagtacactcttgcattctatgctttaagttaaatgcaaactcctttttccttcttcctgctgcaagtactatctcatcctgatgctcaagagtgtcagggcctgggtttccaaacagagactaccctaaaattatttggcgagtagtactttacacaattgcctctcccccacaaatcataattgtttcagtaaaatggttacttggtttttccaagaaaaaactcgtttttactcatttttggcctgtttgtttatttagaaactaatctggattcactccctctggttgatacccactcaaaaaggacacttctgattaagacggttgaaactagagatggacaggttatcaacgaaacttctcagcatcacgatgaccttgaataaaaattgcacacactcagtgcagcaatatattaccagcaagaataaaaaagaaatccatatcttaaagaaacagctttcaagtgcctttctgcagtttttcaggagcgcaagatagatttggaataggaataagctctagttcttaacaaccgacactcctacaagatttagaaaaaagtttacaacataatctagtttacagaaaaatcttgtgctagaatactttttaaaaggtattttgaataccattaaaactgcttttttttttccagcaagtatccaaccaacttggttctgcttcaataaatctttggaaaaactc

SEQ ID NO: 22980 - DNA, 1139 bp, Homo sapiens
  misc_feature 1..1139: note = ENST00000485947
  source 1..1139: mol_type = unassigned DNA; mol_type = unassigned DNA
gctccgaggtccccgcgccagagacgcagccgcgctcccaccacccacacccaccgcgccctcgttcgcctcttctccgggagccagtccgcgccaccgccgccgcccaggccatcgccaccctccgcagccatgtccaccaggtccgtgtcctcgtcctcctaccgcaggatgttcggcggcccgggcaccgcgagccggccgagctccagccggagctacgtgactacgtccacccgcacctacagcctgggcagcgcgctgcgccccagcaccagccgcagcctctacgcctcgtccccgggcggcgtgtatgccacgcgctcctctgccgtgcgcctgcggagcagcgtgcccggggtgcggctcctgcaggactcggtggacttctcgctggccgacgccatcaacaccgagttcaagaacacccgcaccaacgagaaggtggagctgcaggagctgaatgaccgcttcgccaactacatcgacaaggtgcgcttcctggagcagcagaataagatcctgctggccgagctcgagcagctcaagggccaaggcaagtcgcgcctgggggacctctacgaggaggagatgcgggagctgcgccggcaggtggaccagctaaccaacgacaaagcccgcgtcgaggtggagcgcgacaacctggccgaggacatcatgcgcctccgggagaaattgcaggaggagatgcttcagagagaggaagccgaaaacaccctgcaatctttcagacaggtttgtagactctcttcccactcgcagccgcctgaccccacccaacacaacccacgagcaattctaaaagttgcttaactcacgtctaaaaagtgcaaaacttcagggctgcgcgtaaagccctctagtggcgggaagaccacaggttggagcttctcatgattagaaaaatattaataaaaccccttgagcgattttttttttttttttgagacggagtcttactctgtcgcccaggctggagtgcagtggcgagatcttggctcactgcatcctccgcctcccgggttcaagcgatccttgaatgatttctaagcagttccttgggacataaagaaaaatcttttaactttttactttgtttcccaaatgttgcacagttt

SEQ ID NO: 22981 - DNA, 2666 bp, Homo sapiens
  misc_feature 1..2666: note = ENST00000469543
  source 1..2666: mol_type = unassigned DNA; mol_type = unassigned DNA
aagtagctgggcctcgggagggggctggagggagaggggaacgcccccccggcccccgcgagagctgccacgcccttggggatgtggccggggggaggcctgccagggagacagcggagagcggggctgtggctgtggtggcgcagccccgcccagaacccagaccttgcagttcgcatttcctcctctgtccccacacattgcccaaggacgctccgtttcaagttacagatttcttaaaactaccactttgtgtgcagttgaaggcccttgggcacaatgagagccagtcctccaaactttcagaaagtttcctgccccttctggcaggctgccaatcaccgggcgggagaaggaaggaggggaaggcggtggagggagcgagacaaagggatggtccctcgggggcggggatggcggggctgtcctgtaggtctgtgcggccaccgtgattgcccctctgcgcggtgcccgaagtcccgctgaaacctgccgagggcagcaggtctgaaagctgcaggcgctagttgcgcggaggtggcgcagctgctctggaggcgcagagcgaatacgtggtgtttgggtgtggccgccccgcccctggcggtttcctcgttcccctttggttaatgcgcaactgtttcagattgcaggaggagatgcttcagagagaggaagccgaaaacaccctgcaatctttcagacaggatgttgacaatgcgtctctggcacgtcttgaccttgaacgcaaagtggaatctttgcaagaagagattgcctttttgaagaaactccacgaagaggaaatccaggagctgcaggctcagattcaggaacagcatgtccaaatcgatgtggatgtttccaagcctgacctcacggctgccctgcgtgacgtacgtcagcaatatgaaagtgtggctgccaagaacctgcaggaggcagaagaatggtacaaatccaagtttgctgacctctctgaggctgccaaccggaacaatgacgccctgcgccaggcaaagcaggagtccactgagtaccggagacaggtgcagtccctcacctgtgaagtggatgcccttaaaggaaccaatgagtccctggaacgccagatgcgtgaaatggaagagaactttgccgttgaagctgctaactaccaagacactattggccgcctgcaggatgagattcagaatatgaaggaggaaatggctcgtcaccttcgtgaataccaagacctgctcaatgttaagatggcccttgacattgagattgccacctacaggaagctgctggaaggcgaggagagcaggtagggaactcagacttggatgcgtgaactaatggtgaccatttgttaggccctgtgccactgggctctaagcagtgtcacatttaatctttagaaagtttctttgaggtaactgctttccactttttgtagaggaggaatttgaattgagagagagtaagtgacttgctgaaaaagggttaatcaacagcagagctgggatttgaacccataactctgtcaaagcctccactcctaactcctgttcatgctcctgtggagaaaatgcttgtagtaacatattttaaatgtactaacaagaccagtcatgggaaaatgtttctgagacaaatctctagtttatgatttaaaacagtacgttttcttacgtgacgaaaacaaaaagtgtgttaatttgttcccagtggttgaagttatttgccaacaattttactgtttctcttcatctgtttataggatttctctgcctcttccaaacttttcctccctgaacctgaggggtaagcattttatttccctttaggaaaaacgtcagctgcttgtaaccactgtgtttatgtcaaagcattcattttttttaggatatctgaaaaaatgccatataagagaaaactctataaaacatctataattttcgaacccaagtacactcttgcattctatgctttaagttaaatgcaaactcctttttccttcttcctgctgcaagtactatctcatcctgatgctcaagagtgtcagggcctgggtttccaaacagagactaccctaaaattatttggcgagtagtactttacacaattgcctctcccccacaaatcataattgtttcagtaaaatggttacttggtttttccaagaaaaaactcgtttttactcatttttggcctgtttgtttatttagaaactaatctggattcactccctctggttgatacccactcaaaaaggacacttctgattaagacggttgaaactagagatggacaggttatcaacgaaacttctcagcatcacgatgaccttgaataaaaattgcacacactcagtgcagcaatatattaccagcaagaataaaaaagaaatccatatcttaaagaaacagctttcaagtgcctttctgcagtttttcaggagcgcaagatagatttggaataggaataagctctagttcttaacaaccgacactcctacaagatttagaaaaaagtttacaacataatctagtttacagaaaaatcttgtgctagaatactttttaaaaggtattttgaataccattaaaactgcttttttttttccagcaagtatccaaccaacttggttctgcttcaataaatctttggaaaaactc

SEQ ID NO: 22982 - DNA, 753 bp, Homo sapiens
  misc_feature 1..753: note = ENST00000421459
  source 1..753: mol_type = unassigned DNA; mol_type = unassigned DNA
ggtttcctcgttcccctttggttaatgcgcaactgtttcagattgcaggaggagatgcttcagagagaggaagccgaaaacaccctgcaatctttcagacaggatgttgacaatgcgtctctggcacgtcttgaccttgaacgcaaagtggaatctttgcaagaagagattgcctttttgaagaaactccacgaagaggaaatccaggagctgcaggctcagattcaggaacagcatgtccaaatcgatgtggatgtttccaagcctgacctcacggctgccctgcgtgacgtacgtcagcaatatgaaagtgtggctgccaagaacctgcaggaggcagaagaatggtacaaatccaagtttgctgacctctctgaggctgccaaccggaacaatgacgccctgcgccaggcaaagcaggagtccactgagtaccggagacaggtgcagtccctcacctgtgaagtggatgcccttaaaggaaccgtgagtaccaaccctgcagtaaaagagggaaaataatgacccattctgctgactaggctcatgatgatacctgaacaaaatgttgagtgagtaaaaatgtatatcataatgcaaagaaaatgagttatcaagacagactcaaaagggacttcatggaactcttgaaggttttagcttgcctatatcattgcttctaatatgaaggacttggtactcgcattctccacctaaaattagagtggtcgccatttgccgctaatggaaatt

SEQ ID NO: 22983 - DNA, 508 bp, Homo sapiens
  misc_feature 1..508: note = ENST00000637053
  source 1..508: mol_type = unassigned DNA; mol_type = unassigned DNA
caggaggagatgcttcagagagaggaagccgaaaacaccctgcaatctttcagacaggatgttgacaatgcgtctctggcacgtcttgaccttgaacgcaaagtggaatctttgcaagaagagattgcctttttgaagaaactccacgaagaggaaatccaggagctgcaggctcagattcaggaacagcatgtccaaatcgatgtggatgtttccaagcctgacctcacggctgccctgcgtgacgtacgtcagcaatatgaaagtgtggctgccaagaacctgcaggaggcagaagaatggtacaaatccaaggtaggaaacaaatcagtgcggcttcaaccaaagaaaagcattgtgttctcaaaaccccatacctgtgtgtgattcctaaatatcctctagctccaatgcaaagctggctttgacttcttgctcatattgtgtttgccaccacagcctccccaccactcacatcacctcctttatttatttatttattttctta

SEQ ID NO: 22984 - DNA, 962 bp, Homo sapiens
  misc_feature 1..962: note = ENST00000495528
  source 1..962: mol_type = unassigned DNA; mol_type = unassigned DNA
ggcataagccaccatgaccagccttaaaaagtaattttaaaatatcactggtaaaatgtggattcagtcatgattgagtgcagtttaccatgtgtgtggacatttatttattttaaaattgtctgatcaccaccttgagtaaaacacaagcagtcacaattaaaatatattagtgagcaggagaaagcacagcatattatagcactgaatgatttataaacctattccagggtcataaaatgtgtcaacggcttttctatagtaaggagactaggttcagatggttaatctaagacaaataaatgagataagccatacacttttacatcctccatgtcctgtcttttctctgttcaaaataggatgttgacaatgcgtctctggcacgtcttgaccttgaacgcaaagtggaatctttgcaagaagagattgcctttttgaagaaactccacgaagaggaaatccaggagctgcaggctcagattcaggaacagcatgtccaaatcgatgtggatgtttccaagcctgacctcacggctgccctgcgtgacgtacgtcagcaatatgaaagtgtggctgccaagaacctgcaggaggcagaagaatggtacaaatccaagtttgctgacctctctgaggctgccaaccggaacaatgacgccctgcgccaggcaaagcaggagtccactgagtaccggagacaggtgcagtccctcacctgtgaagtggatgcccttaaaggaaccgtgagtaccaaccctgcagtaaaagagggaaaataatgacccattctgctgactaggctcatgatgatacctgaacaaaatgttgagtgagtaaaaatgtatatcataatgcaaagaaaatgagttatcaagacagactcaaaagggacttcatggaactcttgaaggttttagcttgcctatatcattgcttctaatatgaaggacttggtactc

SEQ ID NO: 22985 - DNA, 1584 bp, Homo sapiens
  misc_feature 1..1584: note = ENST00000367244
  source 1..1584: mol_type = unassigned DNA; mol_type = unassigned DNA
gggtagagtgagaagcaccagcaggcagtaacagccaacccttagccattgctaagggcagagaactggtggagcctttctcttactcccaggacttcagcacctaagacagctccaaaacaaaccagaacagtcagctccgggggagcacgactgggcgagaggcacagaaatggacaccagaaataaggcccagctccttgtgctcctgactcttctcagtgtgctcttctcacagacttcggcatggcctctttacagggcaccttctgctctcaggttgggtgacagaataccctttgagggagcaaatgaacctgatcaagtttcattaaaagaagacattgacatgttgcaaaatgcattagctgaaaatgacacaccctattatgatgtatccagaaatgccaggcatgctgatggagttttcaccagtgacttcagtaaactcttgggtcaactttctgccaaaaagtaccttgagtctcttatgggaaaacgtgttagcagtaacatctcagaagaccctgtaccagtcaaacgtcactcagatgcagtcttcactgacaactatacccgccttagaaaacaaatggctgtaaagaaatatttgaactcaattctgaatggaaagaggagcagtgagggagaatctcccgactttccagaagagttagaaaaatgatgaaaaagacctttggagcaaagctgatgacaacttcccagtgaattcttgaaggaaaatgatacgcaacataattaaattttgagttctacataagtaattcaagaaaacaacttcaatatccaaaccaaataaaaatattgtgttgtgaatgttgtgatgtattctagctaatgtaataactgtgaagtttacattgtaaatagtatttgagagttctaaattttgtctttaactcataaaaagcctgcaatttcatatgctgtatatcctttctaacaaaaaaatatatttaatgataagtaaatgctaggttaattccaattatatgagacgtttttggaagagtagtaatagagcaaaattgatgtgtttatttatagagtgtacttaactattcaggagagtagaacagataatcagtgtgtctaaatttgaatgttaagcagatggaatgctgtgttaaataaacctcaaaatgtctaagatagtaacaatgaagataaaaagacattcttccaaaaagattttcagaaaatattatgtgtttccatattttataggcaacctttatttttaatggtgttttaaaaaatctcaaatttggattgctaatcaccaaaggctctctcctgatagtctttcagttaaggagaacgacccctgcttctgacactgaaacttccctttctgcttgtgttaagtatgtgtaaaatgtgaagtgaatgaaacactcagttgttcaataataaatatttttgccataatgactcagaatattgctttggtcatatgagcttccttctgtgaaagtacatttggagacacaactatttttccaaaataattttaagaaatcaaagagagaaaataaagaccttgcttatgattgcagataa

SEQ ID NO: 22986 - DNA, 1581 bp, Homo sapiens
  misc_feature 1..1581: note = ENST00000367243
  source 1..1581: mol_type = unassigned DNA; mol_type = unassigned DNA
gggtagagtgagaagcaccagcaggcagtaacagccaacccttagccattgctaagggcagagaactggtggagcctttctcttactcccaggacttcagcacctaagacagctccaaaacaaaccagaacagtcagctccgggggagcacgactgggcgagaggcacagaaatggacaccagaaataaggcccagctccttgtgctcctgactcttctcagtgtgctcttctcacagacttcggcatggcctctttacagggcaccttctgctctcaggttgggtgacagaataccctttgagggagcaaatgaacctgatcaagtttcattaaaagaagacattgacatgttgcaaaatgcattagctgaaaatgacacaccctattatgatgtatccagaaatgccaggcatgctgatggagttttcaccagtgacttcagtaaactcttgggtcaactttctgccaaaaagtaccttgagtctcttatgggaaaacgtgttagtaacatctcagaagaccctgtaccagtcaaacgtcactcagatgcagtcttcactgacaactatacccgccttagaaaacaaatggctgtaaagaaatatttgaactcaattctgaatggaaagaggagcagtgagggagaatctcccgactttccagaagagttagaaaaatgatgaaaaagacctttggagcaaagctgatgacaacttcccagtgaattcttgaaggaaaatgatacgcaacataattaaattttgagttctacataagtaattcaagaaaacaacttcaatatccaaaccaaataaaaatattgtgttgtgaatgttgtgatgtattctagctaatgtaataactgtgaagtttacattgtaaatagtatttgagagttctaaattttgtctttaactcataaaaagcctgcaatttcatatgctgtatatcctttctaacaaaaaaatatatttaatgataagtaaatgctaggttaattccaattatatgagacgtttttggaagagtagtaatagagcaaaattgatgtgtttatttatagagtgtacttaactattcaggagagtagaacagataatcagtgtgtctaaatttgaatgttaagcagatggaatgctgtgttaaataaacctcaaaatgtctaagatagtaacaatgaagataaaaagacattcttccaaaaagattttcagaaaatattatgtgtttccatattttataggcaacctttatttttaatggtgttttaaaaaatctcaaatttggattgctaatcaccaaaggctctctcctgatagtctttcagttaaggagaacgacccctgcttctgacactgaaacttccctttctgcttgtgttaagtatgtgtaaaatgtgaagtgaatgaaacactcagttgttcaataataaatatttttgccataatgactcagaatattgctttggtcatatgagcttccttctgtgaaagtacatttggagacacaactatttttccaaaataattttaagaaatcaaagagagaaaataaagaccttgcttatgattgcagataa

SEQ ID NO: 22987 - DNA, 1257 bp, Homo sapiens
  misc_feature 1..1257: note = ENST00000431366
  source 1..1257: mol_type = unassigned DNA; mol_type = unassigned DNA
agtttcattaaaagaagacattgacatgttgcaaaatgcattagctgaaaatgacacaccctattatgatgtatccagaaatgccaggcatgctgatggagttttcaccagtgacttcagtaaactcttgggtcaactttctgccaaaaagtaccttgagtctcttatgggaaaacgtgttagcagtaacatctcagaagaccctgtaccagtcaaacgtcactcagatgcagtcttcactgacaactatacccgccttagaaaacaaatggctgtaaagaaatatttgaactcaattctgaatggaaagaggagtgagggagaatctcccgactttccagaagagttagaaaaatgatgaaaaagacctttggagcaaagctgatgacaacttcccagtgaattcttgaaggaaaatgatacgcaacataattaaattttgagttctacataagtaattcaagaaaacaacttcaatatccaaaccaaataaaaatattgtgttgtgaatgttgtgatgtattctagctaatgtaataactgtgaagtttacattgtaaatagtatttgagagttctaaattttgtctttaactcataaaaagcctgcaatttcatatgctgtatatcctttctaacaaaaaaatatatttaatgataagtaaatgctaggttaattccaattatatgagacgtttttggaagagtagtaatagagcaaaattgatgtgtttatttatagagtgtacttaactattcaggagagtagaacagataatcagtgtgtctaaatttgaatgttaagcagatggaatgctgtgttaaataaacctcaaaatgtctaagatagtaacaatgaagataaaaagacattcttccaaaaagattttcagaaaatattatgtgtttccatattttataggcaacctttatttttaatggtgttttaaaaaatctcaaatttggattgctaatcaccaaaggctctctcctgatagtctttcagttaaggagaacgacccctgcttctgacactgaaacttccctttctgcttgtgttaagtatgtgtaaaatgtgaagtgaatgaaacactcagttgttcaataataaatatttttgccataatgactcagaatattgctttggtcatatgagcttccttctgtgaaagtacatttggagacacaactatttttccaaaataattttaagaaatcaaagagagaaaataaagaccttgcttatgattgcagataa

SEQ ID NO: 22988 - DNA, 3944 bp, Homo sapiens
  misc_feature 1..3944: note = ENST00000262178
  source 1..3944: mol_type = unassigned DNA; mol_type = unassigned DNA
gtgcattgagcgcgctccagctgccgggacggagggggcggcccccgcgctcgggcgctcggctacagctgcggggcccgaggtctccgcgcactcgctcccggcccatgctggaggcggcggaaccgcggggacctaggacggaggcggcgggcgctgggcggcccccggcacgctgagctcgggatgcggacgctgctgcctcccgcgctgctgacctgctggctgctcgcccccgtgaacagcattcacccagaatgccgatttcatctggaaatacaggaggaagaaacaaaatgtgcagagcttctgaggtctcaaacagaaaaacacaaagcctgcagtggcgtctgggacaacatcacgtgctggcggcctgccaatgtgggagagaccgtcacggtgccctgcccaaaagtcttcagcaatttttacagcaaagcaggaaacataagcaaaaactgtacgagtgacggatggtcagagacgttcccagatttcgtcgatgcctgtggctacagcgacccggaggatgagagcaagatcacgttttatattctggtgaaggccatttatacactgggctacagtgtctctctgatgtctcttgcaacaggaagcataattctgtgcctcttcaggaagctgcactgcaccaggaattacatccacctgaacctgttcctgtccttcatcctgagagccatctcagtgctggtcaaggacgacgttctctactccagctctggcacgttgcactgccctgaccagccatcctcctgggtgggctgcaagctgagcctggtcttcctgcagtactgcatcatggccaacttcttctggctgctggtggaggggctctacctccacaccctcctggtggccatgctcccccctagaaggtgcttcctggcctacctcctgatcggatggggcctccccaccgtctgcatcggtgcatggactgcggccaggctctacttagaagacaccggttgctgggatacaaacgaccacagtgtgccctggtgggtcatacgaataccgattttaatttccatcatcgtcaattttgtccttttcattagtattatacgaattttgctgcagaagttaacatccccagatgtcggcggcaacgaccagtctcagtacaagaggctggccaagtccacgctcctgcttatcccgctgttcggcgtccactacatggtgtttgccgtgtttcccatcagcatctcctccaaataccagatactgtttgagctgtgcctcgggtcgttccagggcctggtggtggccgtcctctactgtttcctgaacagtgaggtgcagtgcgagctgaagcgaaaatggcgaagccggtgcccgaccccgtccgcgagccgggattacagggtctgcggttcctccttctcccgcaacggctcggagggcgccctgcagttccaccgcggctcccgcgcccagtccttcctgcaaacggagacctcggtcatctagccccacccctgcctgtcggacgcggcgggaggcccacggttcggggcttctgcggggctgagacgccggcttcctccttccagatgcccgagcaccgtgtcgggcaggtcagcgcggtcctgactccgtcaagctggttgtccactaaaccccatacctggaattggagtcgtgttgtcattgactcgatttaaactccagcatttagataatcttgtgcaaaatgtgtttcagccgtatagtggatccacttttttttttttttttttttttgagacggagtctcgctctgtcgcccaggctggactgcagtggcctgatctctgctccctgcaagctccgcctcccgggttcacgccattctcctgcctcagcctcccatagctgggactacaggcgcccgccaacacgcctggctaattttttgtatttttagtagagacagggtttcaccatgttagccaggatggtctcgatctcctgacctcgtgatgggcccgcctcggcctcccaaagtgctgggattaaggcgtgagccactgcgcccggcccaagagaataggggagccaaggaggaaatgtggaaacgcagttgtgtggcccagcacgagcctgggcgaccaccgggtgacatccgtcccacatcagggcggcctcccaggtcccataagggtagccccctcatctgcaggacagagggaagccagtcagggcccccctgacgttaggaccaggagaaatcaacaggagggcagcccgtcctctctcttggggcgcccacccggcccggctgagccctgccccacccaactccacagggctgttttgcctccccacggaaggcgggctgaggagacaaccagatcaggagagcaaggtcatgaaggaggggacctctccacacaggtgttccgtgggaccctcagcagctctggctctgcctcaggaggtcacctgccgccctgtgggagccgcagagcctgacgctcagccccaggccagctgcggccaggcctgcgggcccctggtgatggggttacgtggggtgcgggatacagctgagtgggaaccggaaacctattctctttttaacaaaaataatcttaggataagaattattttaacaacatataaaactgtttcaagccctcctccccagagctggcgctcagcagccctagcggctgctccttcaggcgaagggtggtttgcagatgtggggagggtgtctggggacgttgctgagccagctgcagaagggtggggatatcagggcacagtctccatgtgtgtgccaagccctggcccccacagcgctcgatggacctcagcaagctgcccagccctggcccaggtgccccgactgtgggactcagttgttctgagcacatttgactccacttttcccttaaaaatgaatgtcttgttcctgtgcattggtggcatcacagaccccagctggggcgcgatgtcaaaggtcgggacagctgtgccgggaggcagccacagggaagctcacacatcctgtcagtgtcaccttggtttgcaaaacccatatccccggtaaaatgaggccggacagaggggctgttaggacagcaaagcagcagtgtccagagacccctcaatccccaaaggtccgcaccctgtcctgcacaccctgggccacgccggccacacccctctgctgcaacaagctcatccctggacttctgggagaatgaacccgaggttggtttggggagacaggtgaggcggtcggatctacagaacaacccaccatttctgggggccgcagaggatccatcacagacggatactggggagtaaacggcccaggccaggtgcccaggaaaggacggctgagcatgtggagcgagagggaggcaggtggacgctgcagaccccaggttcagtgcggcccctcggctgttcctcccctgtagggtttggacagacccacccccagccttgcccagctttcaaaggacaaaagggagcatcccccacctactctcaggtttttgaggaaacaaagatttgtggtaactgaaggtgttgggtcagtggccaggtgccgacactgagctgtgacccagaggggacgctgaggaagtgggcgtgagtggacgtgtcaggtggttaccaggcactggttgttgatggtcggtggttgggtgtgggcagtcatcagtcatcaggtgtgctcaggggacaatctcccctcaaccgcacatgtgccactgttcagcggagctgactggtttctcctggtagaggggccggctgtttcctgacagatgcctggtgagcaggggaagcaggacccagtggtcagcaggtgtctttaactgtcattgtgtgtggaatgtcgcagactcctccacgtggcgggaatgagctgtgtaaatacttcaataaagcctgacttcacatctgca

SEQ ID NO: 22989 - DNA, 1491 bp, Homo sapiens
  misc_feature 1..1491: note = ENST00000377633
  source 1..1491: mol_type = unassigned DNA; mol_type = unassigned DNA
aaacttcactccccagggctcccatccctggtgacaaagatcacagcagctggcactgcagatgcctttgtgggaggcaccatctgatcatcccgccaaccctcctgcaaccctgcaaggacacaccagcctcccagggtgccaggaggagcctgccagagacccccagagcggcctgccccaaatcacctctgagagcagcagcttttctgaaggaagcctcccctcatggtcctcaggcccagcaggtgccaagctcaatgccagccacgagggcattggctcatcgagtgatgggaacggggacagcaaggcggccacagagagggtggtctcagccatggacacagtacggcggaagcatcccgagatcacgttttatattctggtgaaggccatttatacactgggctacagtgtctctctgatgtctcttgcaacaggaagcataattctgtgcctcttcaggaagctgcactgcaccaggaattacatccacctgaacctgttcctgtccttcatcctgagagccatctcagtgctggtcaaggacgacgttctctactccagctctggcacgttgcactgccctgaccagccatcctcctgggtgggctgcaagctgagcctggtcttcctgcagtactgcatcatggccaacttcttctggctgctggtggaggggctctacctccacaccctcctggtggccatgctcccccctagaaggtgcttcctggcctacctcctgatcggatggggcctccccaccgtctgcatcggtgcatggactgcggccaggctctacttagaagacaccggttgctgggatacaaacgaccacagtgtgccctggtgggtcatacgaataccgattttaatttccatcatcgtcaattttgtccttttcattagtattatacgaattttgctgcagaagttaacatccccagatgtcggcggcaacgaccagtctcagtacaagaggctggccaagtccacgctcctgcttatcccgctgttcggcgtccactacatggtgtttgccgtgtttcccatcagcatctcctccaaataccagatactgtttgagctgtgcctcgggtcgttccagggcctggtggtggccgtcctctactgtttcctgaacagtgaggtgcagtgcgagctgaagcgaaaatggcgaagccggtgcccgaccccgtccgcgagccgggattacagggtctgcggttcctccttctcccgcaacggctcggagggcgccctgcagttccaccgcggctcccgcgcccagtccttcctgcaaacggagacctcggtcatctagccccacccctgcctgtcggacgcggcgggaggcccacggttcggggcttctgcggggctgagacgccggcttcctccttccagatgcccgagcaccgtgtcgggcaggtcagcgcggtcctgactccgtcaagctggttgtccactaaaccccatacctgg

SEQ ID NO: 22990 - DNA, 1926 bp, Homo sapiens
  misc_feature 1..1926: note = ENST00000402066
  source 1..1926: mol_type = unassigned DNA; mol_type = unassigned DNA
tcccggcccatgctggaggcggcggaaccgcggggacctaggacggaggcggcgggcgctgggcggcccccggcacgctgagctcgggatgcggacgctgctgcctcccgcgctgctgacctgctggctgctcgcccccgtgagtgcgcccgcgacccccgccccacggcgcctcggacccggttctccccttccgagaagagcgctcctcccgccggtcttcgccttcctcccgggtgctggagcgcgggcggggtccgggagagggagcggggtcgcccggggtccggagcttcctcccggagagcgtgaagcgctgagctccggtcccgccgggttgcgggactcgggttgggaggctgcctgcgcccttccccgcgccccaccgtccggggtttgctggaaacgggatcgtttcttcctggacgcgtcaacgatgagctcgttcggggccgtcccgggagctgggagctgcgggcgcctgcgcgggctgcgcgtttcacggggagatcggggttggcgttggccgcagatgcctctcggtccctccctgtacttactggtgaacagcattcacccagaatgccgatttcatctggaaatacaggaggaagaaacaaaatgtgcagagcttctgaggtctcaaacagaaaaacacaaagcctgcagtggcgtctgggacaacatcacgtgctggcggcctgccaatgtgggagagaccgtcacggtgccctgcccaaaagtcttcagcaatttttacagcaaagcaggaaacataagcaaaaactgtacgagtgacggatggtcagagacgttcccagatttcgtcgatgcctgtggctacagcgacccggaggatgagagcaagatcacgttttatattctggtgaaggccatttatacactgggctacagtgtctctctgatgtctcttgcaacaggaagcataattctgtgcctcttcaggaagctgcactgcaccaggaattacatccacctgaacctgttcctgtccttcatcctgagagccatctcagtgctggtcaaggacgacgttctctactccagctctggcacgttgcactgccctgaccagccatcctcctgggtgggctgcaagctgagcctggtcttcctgcagtactgcatcatggccaacttcttctggctgctggtggaggggctctacctccacaccctcctggtggccatgctcccccctagaaggtgcttcctggcctacctcctgatcggatggggcctccccaccgtctgcatcggtgcatggactgcggccaggctctacttagaagacaccggttgctgggatacaaacgaccacagtgtgccctggtgggtcatacgaataccgattttaatttccatcatcgtcaattttgtccttttcattagtattatacgaattttgctgcagaagttaacatccccagatgtcggcggcaacgaccagtctcagtacaagaggctggccaagtccacgctcctgcttatcccgctgttcggcgtccactacatggtgtttgccgtgtttcccatcagcatctcctccaaataccagatactgtttgagctgtgcctcgggtcgttccagggcctggtggtggccgtcctctactgtttcctgaacagtgaggtgcagtgcgagctgaagcgaaaatggcgaagccggtgcccgaccccgtccgcgagccgggattacagggtctgcggttcctccttctcccgcaacggctcggagggcgccctgcagttccaccgcggctcccgcgcccagtccttcctgcaaacggagacctcggtcatctagccccacccctgcctgtcggacgcggcgggaggcccacggttcggggcttctgcggggctgagacgccggcttcctccttccagatgcccgagcaccgt

SEQ ID NO: 22991 - DNA, 717 bp, Homo sapiens
  misc_feature 1..717: note = ENST00000421760
  source 1..717: mol_type = unassigned DNA; mol_type = unassigned DNA
ccatgctggaggcggcggaaccgcggggacctaggacggaggcggcgggcgctgggcggcccccggcacgctgagctcgggatgcggacgctgctgcctcccgcgctgctgacctgctggctgctcgcccccgtgaacagcattcacccagaatgccgatttcatctggaaatacaggaggaagaaacaaaatgtgcagagcttctgaggtctcaaacagaaaaacacaaaggccatacaaagggattcatcctcattcacgccggaggtttaaagaggatcctggacccacatacctacccattggctccatgaccagtgcttttataattacaaaatcattgagaaattaagtcacaggaagcctcgtgtgtggtatacactggtgataaagcaagtcccatgcagtctgagatggcaagggaccttctagggaaagggcagtgacccagaagcccgactgctcggctggctcccgcactccgtcctgtggtcagagtgtgtttcctcccctctgtgaacctggtctcctccccagtgtgaggacaggggctctcgccttcttcagggagttgctgggaggacaaaatggagtatatgtaaaagtcatttcctagataagggggagcatgtcgtaagagtctcttgaaatttaattgatgtttatgtcattgacattgaaataatgagaaaataaatccaaatccagagctcaaa

SEQ ID NO: 22992 - DNA, 2810 bp, Homo sapiens
  misc_feature 1..2810: note = ENST00000379242
  source 1..2810: mol_type = unassigned DNA; mol_type = unassigned DNA
aattcagcactaaaaccagtgtgagaagcagtatgtgtgagcatgtgtgtgtgtgtatgtgtgtgggggggggtgtaaaatgtgtttttcaaagtactgagaggttgatgggactgttcgattagctcctctgagaagaagagaaaaggttcttggacctctccctgtttcttccttagaataatttggatgggatttgtgatgcaggaaagcctaagggaaaaagaatattcattctgtgtggtgaaaattttttgaaaaaaaaattgccttcttcaaacaagggtgtcattctgatatttatgaggactgttgttctcactatgaaggcatctgttattgaaatgttccttgttttgctggtgactggagtacattcaaacaaagaaacggcaaagaagattaaaaggcccaagttcactgtgcctcagatcaactgcgatgtcaaagccggaaagatcatcgatcctgagttcattgtgaaatgtccagcaggatgccaagaccccaaataccatgtttatggcactgacgtgtatgcatcctactccagtgtgtgtggcgctgccgtacacagtggtgtgcttgataattcaggagggaaaatacttgttcggaaggttgctggacagtctggttacaaagggagttattccaacggtgtccaatcgttatccctaccacgatggagagaatcctttatcgtcttagaaagtaaacccaaaaagggtgtaacctacccatcagctcttacatactcatcatcgaaaagtccagctgcccaagcaggtgagaccacaaaagcctatcagaggccacctattccagggacaactgcacagccggtcactctgatgcagcttctggctgtcactgtagctgtggccacccccaccaccttgccaaggccatccccttctgctgcttctaccaccagcatccccagaccacaatcagtgggccacaggagccaggagatggatctctggtccactgccacctacacaagcagccaaaacaggcccagagctgatccaggtatccaaaggcaagatccttcaggagctgccttccagaaacctgttggagcggatgtcagcctgggagagatggactcatggaaacctggatcggtccttttagatgaaggacttgttccaaaagaagaattgagcacacagtctttggagccagtatccctgggagatccaaactgcaaaattgacttgtcgtttttaattgatgggagcaccagcattggcaaacggcgattccgaatccagaagcagctcctggctgatgttgcccaagctcttgacattggccctgccggtccactgatgggtgttgtccagtatggagacaaccctgctactcactttaacctcaagacacacacgaattctcgagatctgaagacagccatagagaaaattactcagagaggaggactttctaatgtaggtcgggccatctcctttgtgaccaagaacttcttttccaaagccaatggaaacagaagcggggctcccaatgtggtggtggtgatggtggatggctggcccacggacaaagtggaggaggcttcaagacttgcgagagagtcaggaatcaacattttcttcatcaccattgaaggtgctgctgaaaatgagaagcagtatgtggtggagcccaactttgcaaacaaggccgtgtgcagaacaaacggcttctactcgctccacgtgcagagctggtttggcctccacaagaccctgcagcctctggtgaagcgggtctgcgacactgaccgcctggcctgcagcaagacctgcttgaactcggctgacattggcttcgtcatcgacggctccagcagtgtggggacgggcaacttccgcaccgtcctccagtttgtgaccaacctcaccaaagagtttgagatttccgacacggacacgcgcatcggggccgtgcagtacacctacgaacagcggctggagtttgggttcgacaagtacagcagcaagcctgacatcctcaacgccatcaagagggtgggctactggagtggtggcaccagcacgggggctgccatcaacttcgccctggagcagctcttcaagaagtccaagcccaacaagaggaagttaatgatcctcatcaccgacgggaggtcctacgacgacgtccggatcccagccatggctgcccatctgaagggagtgatcacctatgcgataggcgttgcctgggctgcccaagaggagctagaagtcattgccactcaccccgccagagaccactccttctttgtggacgagtttgacaacctccatcagtatgtccccaggatcatccagaacatttgtacagagttcaactcacagcctcggaactgaattcagagcaggcagagcaccagcaagtgctgctttactaactgacgtgttggaccaccccaccgcttaatggggcacgcacggtgcatcaagtcttgggcagggcatggagaaacaaatgtcttgttattattctttgccatcatgctttttcatattccaaaacttggagttacaaagatgatcacaaacgtatagaatgagccaaaaggctacatcatgttgagggtgctggagattttacattttgacaattgttttcaaaataaatgttcggaatacagtgcagcccttacgacaggcttacgtagagcttttgtgagatttttaagttgttatttctgattagaactctgtaaccctcagcaagtttcatttttgtcatgacaatgtaggaattgctgaattaaatgtttagaaggatga

SEQ ID NO: 22993 - DNA, 1344 bp, Homo sapiens
  misc_feature 1..1344: note = ENST00000457137
  source 1..1344: mol_type = unassigned DNA; mol_type = unassigned DNA
gtaaaatgtgtttttcaaagtactgagaggttgatgggactgttcgattagctcctctgagaagaagagaaaaggttcttggacctctccctgtttcttccttagaataatttggatgggatttgtgatgcaggaaagcctaagggaaaaagaatattcattctgtgtggtgaaaattttttgaaaaaaaaattgccttcttcaaacaagggtgtcattctgatatttatgaggactgttgttctcactatgaaggcatctgttattgaaatgttccttgttttgctggtgactggagtacattcaaacaaagaaacggcaaagaagattaaaaggcccaagttcactgtgcctcagatcaactgcgatgtcaaagccggaaagatcatcgatcctgagttcattgtgaaatgtccagcaggatgccaagaccccaaataccatgtttatggcactgacgtgtatgcatcctactccagtgtgtgtggcgctgccgtacacagtggtgtgcttgataattcaggagggaaaatacttgttcggaaggttgctggacagtctggttacaaagggagttattccaacggtgtccaatcgttatccctaccacgatggagagaatcctttatcgtcttagaaagtaaacccaaaaagggtgtaacctacccatcagctcttacatactcatcatcgaaaagtccagctgcccaagcaggcaagtgctcacgtgtgattgaatctaaaccttctgagtccatgaacacgcgacgtgttttgggagatagcggagaaattaacatcttaaccggtcaagctccactggctctggcaatattttaacagatgccaggaacatgggcacagaaatcaatgagatcagatggctggggctgaagaatgaaagctttattttttgtttttgcaattccgagattgtgtctctatatttgtgtcattttcattcagattgactgttgccttgagttttaatgtattgttgctttagaaaatgacatgacattctgtccggaaatgtttcctggcagctaaaaggaaaaagctgtatctacttagatatgaaatgaagagaagcaaagagaacgaggtggtttatgtgataacagcaagctgctcatccaaataacccaggccaaaaatacactgtctacaaggttgtgccaactcagctttcatgtgaaccacaaaagggagtatcggtagacctcaggccaagaaaatacctttttccaggtttctgtgttaaatcaagaactgtactatgcattattgtatctccagaggtgttttgatttcccacacaaagagaaactgtgagtcgcttta

SEQ ID NO: 22994 - DNA, 2650 bp, Homo sapiens
  misc_feature 1..2650: note = ENST00000497382
  source 1..2650: mol_type = unassigned DNA; mol_type = unassigned DNA
gttcgattagctcctctgagaagaagagaaaaggttcttggacctctccctgtttcttccttagaataatttggatgggatttgtgatgcaggaaagcctaagggaaaaagaatattcattctgtgtggtgaaaattttttgaaaaaaaaattgccttcttcaaacaagggtgtcattctgatatttatgaggactgttgttctcactatgaaggcatctgttattgaaatgttccttgttttgctggtgactggagtacattcaaacaaagaaacggcaaagaagattaaaaggcccaagttcactgtgcctcagatcaactgcgatgtcaaagccggaaagatcatcgatcctgagttcattgtgaaatgtccagcaggatgccaagaccccaaataccatgtttatggcactgacgtgtatgcatcctactccagtgtgtgtggcgctgccgtacacagtggtgtgcttgataattcaggagggaaaatacttgttcggaaggttgctggacagtctggttacaaagggagttattccaacggtgtccaatcgttatccctaccacgatggagagaatcctttatcgtcttagaaagtaaacccaaaaagggtgtaacctacccatcagctcttacatactcatcatcgaaaagtccagctgcccaagcaggtgagaccacaaaagcctatcagaggccacctattccagggacaactgcacagccggtcactctgatgcagcttctggctgtcactgtagctgtggccacccccaccaccttgccaaggccatccccttctgctgcttctaccaccagcatccccagaccacaatcagtgggccacaggagccaggagatggatctctggtccactgccacctacacaagcagccaaaacaggcccagagctgatccaggtatccaaaggcaagatccttcaggagctgccttccagaaacctgttggagcggatgtcagcctgggacttgttccaaaagaagaattgagcacacagtctttggagccagtatccctgggagatccaaactgcaaaattgacttgtcgtttttaattgatgggagcaccagcattggcaaacggcgattccgaatccagaagcagctcctggctgatgttgcccaagctcttgacattggccctgccggtccactgatgggtgttgtccagtatggagacaaccctgctactcactttaacctcaagacacacacgaattctcgagatctgaagacagccatagagaaaattactcagagaggaggactttctaatgtaggtcgggccatctcctttgtgaccaagaacttcttttccaaagccaatggaaacagaagcggggctcccaatgtggtggtggtgatggtggatggctggcccacggacaaagtggaggaggcttcaagacttgcgagagagtcaggaatcaacattttcttcatcaccattgaaggtgctgctgaaaatgagaagcagtatgtggtggagcccaactttgcaaacaaggccgtgtgcagaacaaacggcttctactcgctccacgtgcagagctggtttggcctccacaagaccctgcagcctctggtgaagcgggtctgcgacactgaccgcctggcctgcagcaagacctgcttgaactcggctgacattggcttcgtcatcgacggctccagcagtgtggggacgggcaacttccgcaccgtcctccagtttgtgaccaacctcaccaaagagtttgagatttccgacacggacacgcgcatcggggccgtgcagtacacctacgaacagcggctggagtttgggttcgacaagtacagcagcaagcctgacatcctcaacgccatcaagagggtgggctactggagtggtggcaccagcacgggggctgccatcaacttcgccctggagcagctcttcaagaagtccaagcccaacaagaggaagttaatgatcctcatcaccgacgggaggtcctacgacgacgtccggatcccagccatggctgcccatctgaagggagtgatcacctatgcgataggcgttgcctgggctgcccaagaggagctagaagtcattgccactcaccccgccagagaccactccttctttgtggacgagtttgacaacctccatcagtatgtccccaggatcatccagaacatttgtacagagttcaactcacagcctcggaactgaattcagagcaggcagagcaccagcaagtgctgctttactaactgacgtgttggaccaccccaccgcttaatggggcacgcacggtgcatcaagtcttgggcagggcatggagaaacaaatgtcttgttattattctttgccatcatgctttttcatattccaaaacttggagttacaaagatgatcacaaacgtatagaatgagccaaaaggctacatcatgttgagggtgctggagattttacattttgacaattgttttcaaaataaatgttcggaatacagtgcagcccttacgacaggcttacgtagagcttttgtgagatttttaagttgttatttctgattagaactctgtaaccctcagcaagtttcatttttgtcatgacaatgtaggaattgctgaattaaatgtttagaaggatga

SEQ ID NO: 22995 - DNA, 2438 bp, Homo sapiens
  misc_feature 1..2438: note = ENST00000404084
  source 1..2438: mol_type = unassigned DNA; mol_type = unassigned DNA
agaagagaaaaggttcttggacctctccctgtttcttccttagaataatttggatgggatttgtgatgcaggaaagcctaagggaaaaagaatattcattctgtgtggtgaaaattttttgaaaaaaaaattgccttcttcaaacaagggtgtcattctgatatttatgaggactgttgttctcactatgaaggcatctgttattgaaatgttccttgctgtgcctcagatcaactgcgatgtcaaagccggaaagatcatcgatcctgagttcattgtgaaatgtccagcaggatgccaagaccccaaataccatgtttatggcactgacgtgtatgcatcctactccagtgtgtgtggcgctgccgtacacagtggtgtgcttgataattcaggagggaaaatacttgttcggaaggttgctggacagtctggttacaaagggagttattccaacggtgtccaatcgttatccctaccacgatggagagaatcctttatcgtcttagaaagtaaacccaaaaagggtgtaacctacccatcagctcttacatactcatcatcgaaaagtccagctgcccaagcaggtgagaccacaaaagcctatcagaggccacctattccagggacaactgcacagccggtcactctgatgcagcttctggctgtcactgtagctgtggccacccccaccaccttgccaaggccatccccttctgctgcttctaccaccagcatccccagaccacaatcagtgggccacaggagccaggagatgggagagatggactcatggaaacctggatcggtccttttagatgaaggacttgttccaaaagaagaattgagcacacagtctttggagccagtatccctgggagatccaaactgcaaaattgacttgtcgtttttaattgatgggagcaccagcattggcaaacggcgattccgaatccagaagcagctcctggctgatgttgcccaagctcttgacattggccctgccggtccactgatgggtgttgtccagtatggagacaaccctgctactcactttaacctcaagacacacacgaattctcgagatctgaagacagccatagagaaaattactcagagaggaggactttctaatgtaggtcgggccatctcctttgtgaccaagaacttcttttccaaagccaatggaaacagaagcggggctcccaatgtggtggtggtgatggtggatggctggcccacggacaaagtggaggaggcttcaagacttgcgagagagtcaggaatcaacattttcttcatcaccattgaaggtgctgctgaaaatgagaagcagtatgtggtggagcccaactttgcaaacaaggccgtgtgcagaacaaacggcttctactcgctccacgtgcagagctggtttggcctccacaagaccctgcagcctctggtgaagcgggtctgcgacactgaccgcctggcctgcagcaagacctgcttgaactcggctgacattggcttcgtcatcgacggctccagcagtgtggggacgggcaacttccgcaccgtcctccagtttgtgaccaacctcaccaaagagtttgagatttccgacacggacacgcgcatcggggccgtgcagtacacctacgaacagcggctggagtttgggttcgacaagtacagcagcaagcctgacatcctcaacgccatcaagagggtgggctactggagtggtggcaccagcacgggggctgccatcaacttcgccctggagcagctcttcaagaagtccaagcccaacaagaggaagttaatgatcctcatcaccgacgggaggtcctacgacgacgtccggatcccagccatggctgcccatctgaagggagtgatcacctatgcgataggcgttgcctgggctgcccaagaggagctagaagtcattgccactcaccccgccagagaccactccttctttgtggacgagtttgacaacctccatcagtatgtccccaggatcatccagaacatttgtacagagttcaactcacagcctcggaactgaattcagagcaggcagagcaccagcaagtgctgctttactaactgacgtgttggaccaccccaccgcttaatggggcacgcacggtgcatcaagtcttgggcagggcatggagaaacaaatgtcttgttattattctttgccatcatgctttttcatattccaaaacttggagttacaaagatgatcacaaacgtatagaatgagccaaaaggctacatcatgttgagggtgctggagattttacattttgacaattgttttcaaaataaatgttcggaatacagtgcagcccttacgacaggcttacgtagagcttttgtgagatttttaagttgttatttctgattagaactctgtaaccctcagcaagtttcatttt

SEQ ID NO: 22996 - DNA, 2525 bp, Homo sapiens
  misc_feature 1..2525: note = ENST00000379241
  source 1..2525: mol_type = unassigned DNA; mol_type = unassigned DNA
tagaataatttggatgggatttgtgatgcaggaaagcctaagggaaaaagaatattcattctgtgtggtgaaaattttttgaaaaaaaaattgccttcttcaaacaagggtgtcattctgatatttatgaggactgttgttctcactatgaaggcatctgttattgaaatgttccttgttttgctggtgactggagtacattcaaacaaagaaacggcaaagaagattaaaaggcccaagttcactgtgcctcagatcaactgcgatgtcaaagccggaaagatcatcgatcctgagttcattgtgaaatgtccagcaggatgccaagaccccaaataccatgtttatggcactgacgtgtatgcatcctactccagtgtgtgtggcgctgccgtacacagtggtgtgcttgataattcaggagggaaaatacttgttcggaaggttgctggacagtctggttacaaagggagttattccaacggtgtccaatcgttatccctaccacgatggagagaatcctttatcgtcttagaaagtaaacccaaaaagggtgtaacctacccatcagctcttacatactcatcatcgaaaagtccagctgcccaagcaggtgagaccacaaaagcctatcagaggccacctattccagggacaactgcacagccggtcactctgatgcagcttctggctgtcactgtagctgtggccacccccaccaccttgccaaggccatccccttctgctgcttctaccaccagcatccccagaccacaatcagtgggccacaggagccaggagatggatctctggtccactgccacctacacaagcagccaaaacaggcccagagctgatccaggacttgttccaaaagaagaattgagcacacagtctttggagccagtatccctgggagatccaaactgcaaaattgacttgtcgtttttaattgatgggagcaccagcattggcaaacggcgattccgaatccagaagcagctcctggctgatgttgcccaagctcttgacattggccctgccggtccactgatgggtgttgtccagtatggagacaaccctgctactcactttaacctcaagacacacacgaattctcgagatctgaagacagccatagagaaaattactcagagaggaggactttctaatgtaggtcgggccatctcctttgtgaccaagaacttcttttccaaagccaatggaaacagaagcggggctcccaatgtggtggtggtgatggtggatggctggcccacggacaaagtggaggaggcttcaagacttgcgagagagtcaggaatcaacattttcttcatcaccattgaaggtgctgctgaaaatgagaagcagtatgtggtggagcccaactttgcaaacaaggccgtgtgcagaacaaacggcttctactcgctccacgtgcagagctggtttggcctccacaagaccctgcagcctctggtgaagcgggtctgcgacactgaccgcctggcctgcagcaagacctgcttgaactcggctgacattggcttcgtcatcgacggctccagcagtgtggggacgggcaacttccgcaccgtcctccagtttgtgaccaacctcaccaaagagtttgagatttccgacacggacacgcgcatcggggccgtgcagtacacctacgaacagcggctggagtttgggttcgacaagtacagcagcaagcctgacatcctcaacgccatcaagagggtgggctactggagtggtggcaccagcacgggggctgccatcaacttcgccctggagcagctcttcaagaagtccaagcccaacaagaggaagttaatgatcctcatcaccgacgggaggtcctacgacgacgtccggatcccagccatggctgcccatctgaagggagtgatcacctatgcgataggcgttgcctgggctgcccaagaggagctagaagtcattgccactcaccccgccagagaccactccttctttgtggacgagtttgacaacctccatcagtatgtccccaggatcatccagaacatttgtacagagttcaactcacagcctcggaactgaattcagagcaggcagagcaccagcaagtgctgctttactaactgacgtgttggaccaccccaccgcttaatggggcacgcacggtgcatcaagtcttgggcagggcatggagaaacaaatgtcttgttattattctttgccatcatgctttttcatattccaaaacttggagttacaaagatgatcacaaacgtatagaatgagccaaaaggctacatcatgttgagggtgctggagattttacattttgacaattgttttcaaaataaatgttcggaatacagtgcagcccttacgacaggcttacgtagagcttttgtgagatttttaagttgttatttctgattagaactctgtaaccctcagcaagtttcatttttgtcatgacaatgtaggaattgctgaattaaatgtttagaaggatgaca

SEQ ID NO: 22997 - DNA, 2161 bp, Homo sapiens
  misc_feature 1..2161: note = ENST00000401530
  source 1..2161: mol_type = unassigned DNA; mol_type = unassigned DNA
ggatgggatttgtgatgcaggaaagcctaagggaaaaagaatattcattctgtgtggtgaaaattttttgaaaaaaaaattgccttcttcaaacaagggtgtcattctgatatttatgaggactgttgttctcactatgaaggcatctgttattgaaatgttccttgttttgctggtgactggagtacattcaaacaaagaaacggcaaagaagattaaaaggcccaagttcactgtgcctcagatcaactgcgatgtcaaagccggaaagatcatcgatcctgagttcattgtgaaatgtccagcaggatgccaagaccccaaataccatgtttatggcactgacgtgtatgcatcctactccagtgtgtgtggcgctgccgtacacagtggtgtgcttgataattcaggagggaaaatacttgttcggaaggttgctggacagtctggttacaaagggagttattccaacggtgtccaatcgttatccctaccacgatggagagaatcctttatcgtcttagaaagtaaacccaaaaagggtgtaacctacccatcagctcttacatactcatcatcgaaaagtccagctgcccaagcaggtgagaccacaaaagcctatcagaggccacctattccagggacaactgcacagccggtcactctgatgcagcttctggctgtcactgtagctgtggccacccccaccaccttgccaaggccatccccttctgctgcttctaccaccagcatccccagaccacaatcagtgggccacaggagccaggagatggatctctggtccactgccacctacacaagcagccaaaacaggcccagagctgatccaggtatccaaaggcaagatccttcaggagctgccttccagaaacctgttggagcggatgtcagcctggactgcaaaattgacttgtcgtttttaattgatgggagcaccagcattggcaaacggcgattccgaatccagaagcagctcctggctgatgttgcccaagctcttgacattggccctgccggtccactgatgggtgttgtccagtatggagacaaccctgctactcactttaacctcaagacacacacgaattctcgagatctgaagacagccatagagaaaattactcagagaggaggactttctaatgtaggtcgggccatctcctttgtgaccaagaacttcttttccaaagccaatggaaacagaagcggggctcccaatgtggtggtggtgatggtggatggctggcccacggacaaagtggaggaggcttcaagacttgcgagagagtcaggaatcaacattttcttcatcaccattgaaggtgctgctgaaaatgagaagcagtatgtggtggagcccaactttgcaaacaaggccgtgtgcagaacaaacggcttctactcgctccacgtgcagagctggtttggcctccacaagaccctgcagcctctggtgaagcgggtctgcgacactgaccgcctggcctgcagcaagacctgcttgaactcggctgacattggcttcgtcatcgacggctccagcagtgtggggacgggcaacttccgcaccgtcctccagtttgtgaccaacctcaccaaagagtttgagatttccgacacggacacgcgcatcggggccgtgcagtacacctacgaacagcggctggagtttgggttcgacaagtacagcagcaagcctgacatcctcaacgccatcaagagggtgggctactggagtggtggcaccagcacgggggctgccatcaacttcgccctggagcagctcttcaagaagtccaagcccaacaagaggaagttaatgatcctcatcaccgacgggaggtcctacgacgacgtccggatcccagccatggctgcccatctgaagggagtgatcacctatgcgataggcgttgcctgggctgcccaagaggagctagaagtcattgccactcaccccgccagagaccactccttctttgtggacgagtttgacaacctccatcagtatgtccccaggatcatccagaacatttgtacagagttcaactcacagcctcggaactgaattcagagcaggcagagcaccagcaagtgctgctttactaactgacgtgttggaccaccccaccgcttaatg

SEQ ID NO: 22998 - DNA, 579 bp, Homo sapiens
  misc_feature 1..579: note = ENST00000464309
  source 1..579: mol_type = unassigned DNA; mol_type = unassigned DNA
acacaagcagccaaaacaggcccagagctgatccaggtatccaaaggcaagatccttcaggagctgccttccagaaacctgttggagcggatgtcagcctgggacttgttccaaaagaagaattgagcacacagtctttggagccagtatccctgggagatccaaactgcaaaattgacttgtcgtttttaattgatgggagcaccagcattggcaaacggcgattccgaatccagaagcagctcctggctgatgttgcccaagctcttgacattggccctgccggtccactgatgggtgttgtccagtatgggcccctgcactggtactggaaaaactcaccaggcaatggagaagaatgggtgggaagagagacggcccccatcagtcagctgagcacctagatgactttcgccaacctgctctattattatacttaggatagaaatggagggctcgtgttgacatccagtctcaatctttcatttggcggtaataaatcactcttatttcagatatgaataggtttctcactgaaacagatacatagatattgataataaacaatcaaaagaacaa

SEQ ID NO: 22999 - DNA, 2770 bp, Homo sapiens
  misc_feature 1..2770: note = ENST00000389975
  source 1..2770: mol_type = unassigned DNA; mol_type = unassigned DNA
aattcagcactaaaaccagtgtgagaagcagtatgtgtgagcatgtgtgtgtgtgtatgtgtgtgggggggggtgtaaaatgtgtttttcaaagtactgagaggttgatgggactgttcgattagctcctctgagaagaagagaaaaggttcttggacctctccctgtttcttccttagaataatttggatgggatttgtgatgcaggaaagcctaagggaaaaagaatattcattctgtgtggtgaaaattttttgaaaaaaaaattgccttcttcaaacaagggtgtcattctgatatttatgaggactgttgttctcactatgaaggcatctgttattgaaatgttccttgttttgctggtgactggagtacattcaaacaaagaaacggcaaagaagattaaaaggcccaagttcactgtgcctcagatcaactgcgatgtcaaagccggaaagatcatcgatcctgagttcattgtgaaatgtccagcaggatgccaagaccccaaataccatgtttatggcactgacgtgtatgcatcctactccagtgtgtgtggcgctgccgtacacagtggtgtgcttgataattcaggagggaaaatacttgttcggaaggttgctggacagtctggttacaaagggagttattccaacggtgtccaatcgttatccctaccacgatggagagaatcctttatcgtcttagaaagtaaacccaaaaagggtgtaacctacccatcagctcttacatactcatcatcgaaaagtccagctgcccaagcaggtgagaccacaaaagcctatcagaggccacctattccagggacaactgcacagccggtcactctgatgcagcttctggctgtcactgtagctgtggccacccccaccaccttgccaaggccatccccttctgctgcttctaccaccagcatccccagaccacaatcagtgggccacaggagccaggagatggatctctggtccactgccacctacacaagcagccaaaacaggcccagagctgatccaggtatccaaaggcaagatccttcaggagctgccttccagaaacctgttggagcggatgtcagcctgggacttgttccaaaagaagaattgagcacacagtctttggagccagtatccctgggagatccaaactgcaaaattgacttgtcgtttttaattgatgggagcaccagcattggcaaacggcgattccgaatccagaagcagctcctggctgatgttgcccaagctcttgacattggccctgccggtccactgatgggtgttgtccagtatggagacaaccctgctactcactttaacctcaagacacacacgaattctcgagatctgaagacagccatagagaaaattactcagagaggaggactttctaatgtaggtcgggccatctcctttgtgaccaagaacttcttttccaaagccaatggaaacagaagcggggctcccaatgtggtggtggtgatggtggatggctggcccacggacaaagtggaggaggcttcaagacttgcgagagagtcaggaatcaacattttcttcatcaccattgaaggtgctgctgaaaatgagaagcagtatgtggtggagcccaactttgcaaacaaggccgtgtgcagaacaaacggcttctactcgctccacgtgcagagctggtttggcctccacaagaccctgcagcctctggtgaagcgggtctgcgacactgaccgcctggcctgcagcaagacctgcttgaactcggctgacattggcttcgtcatcgacggctccagcagtgtggggacgggcaacttccgcaccgtcctccagtttgtgaccaacctcaccaaagagtttgagatttccgacacggacacgcgcatcggggccgtgcagtacacctacgaacagcggctggagtttgggttcgacaagtacagcagcaagcctgacatcctcaacgccatcaagagggtgggctactggagtggtggcaccagcacgggggctgccatcaacttcgccctggagcagctcttcaagaagtccaagcccaacaagaggaagttaatgatcctcatcaccgacgggaggtcctacgacgacgtccggatcccagccatggctgcccatctgaagggagtgatcacctatgcgataggcgttgcctgggctgcccaagaggagctagaagtcattgccactcaccccgccagagaccactccttctttgtggacgagtttgacaacctccatcagtatgtccccaggatcatccagaacatttgtacagagttcaactcacagcctcggaactgaattcagagcaggcagagcaccagcaagtgctgctttactaactgacgtgttggaccaccccaccgcttaatggggcacgcacggtgcatcaagtcttgggcagggcatggagaaacaaatgtcttgttattattctttgccatcatgctttttcatattccaaaacttggagttacaaagatgatcacaaacgtatagaatgagccaaaaggctacatcatgttgagggtgctggagattttacattttgacaattgttttcaaaataaatgttcggaatacagtgcagcccttacgacaggcttacgtagagcttttgtgagatttttaagttgttatttctgattagaactctgtaaccctcagcaagtttcatttttgtcatgacaatgtaggaattgctgaattaaatgtttagaaggatgacatgc

SEQ ID NO: 23000 - DNA, 231 bp, Homo sapiens
  misc_feature 1..231: note = ENST00000588915
  source 1..231: mol_type = unassigned DNA; mol_type = unassigned DNA
aaaggacggttcgcagaacaggaacagagggctcagcggcccctgggcggaagacagtttataaaggagaaaatgaagaagggcccgcactaagagcctaactgaaatcccgcgaggatcaaccgagctcgccgaaaggagggaggaacgtatcccttctggaggctgtctcagggggcagagggaccggaccggaagtgacgtgagcgggttccggttgtctggagccca

SEQ ID NO: 23001 - DNA, 2712 bp, Homo sapiens
  misc_feature 1..2712: note = ENST00000262291
  source 1..2712: mol_type = unassigned DNA; mol_type = unassigned DNA
gacaagttccggatcaagaatcacaaagcgagcagtcattcttcctcttgccacacccacagggcccgcactaagagcctaactgaaatcccgcgaggatcaaccgagctcgccgaaaggagggaggaacgtatcccttctggaggctgtctcagggggcagagggaccggaccggaagtgacgtgagcgggttccggttgtctggagcccagcggcgggtgtgagagtccgtaaggagcagcttccaggatcctgagatccggagcagccggggtcggagcggctcctcaagagttactgatctatgaaatggcagagaatggaaaaaattgtgaccagagacgtgtagcaatgaacaaggaacatcataatggaaatttcacagacccctcttcagtgaatgaaaagaagaggagggagcgggaagaaaggcagaatattgtcctgtggagacagccgctcattaccttgcagtatttttctctggaaatccttgtaatcttgaaggaatggacctcaaaattatggcatcgtcaaagcattgtggtgtcttttttactgctgcttgctgtgcttatagctacgtattatgttgaaggagtgcatcaacagtatgtgcaacgtatagagaaacagtttcttttgtatgcctactggataggcttaggaattttgtcttctgttgggcttggaacagggctgcacacctttctgctttatctgggtccacatatagcctcagttacattagctgcttatgaatgcaattcagttaattttcccgaaccaccctatcctgatcagattatttgtccagatgaagagggcactgaaggaaccatttctttgtggagtatcatctcaaaagttaggattgaagcctgcatgtggggtatcggtacagcaatcggagagctgcctccatatttcatggccagagcagctcgcctctcaggtgctgaaccagatgatgaagagtatcaggaatttgaagagatgctggaacatgcagagtctgcacaagactttgcctcccgggccaaactggcagttcaaaaactagtacagaaagttggattttttggaattttggcctgtgcttcaattccaaatcctttatttgatctggctggaataacgtgtggacactttctggtacctttttggaccttctttggtgcaaccctaattggaaaagcaataataaaaatgcatatccagaaaatttttgttataataacattcagcaagcacatagtggagcaaatggtggctttcattggtgctgtccccggcataggtccatctctgcagaagccatttcaggagtacctggaggctcaacggcagaagcttcaccacaaaagcgaaatgggcacaccacagggagaaaactggttgtcctggatgtttgaaaagttggtcgttgtcatggtgtgttacttcatcctatctatcattaactccatggcacaaagttatgccaaacgaatccagcagcggttgaactcagaggagaaaactaaataagtagagaaagttttaaactgcagaaattggagtggatgggttctgccttaaattgggaggactccaagccgggaaggaaaattcccttttccaacctgtatcaatttttacaacttttttcctgaaagcagtttagtccatactttgcactgacatactttttccttctgtgctaaggtaaggtatccaccctcgatgcaatccaccttgtgttttcttagggtggaatgtgatgttcagcagcaaacttgcaacagactggccttctgtttgttactttcaaaaggcccacatgatacaattagagaattcccaccgcacaaaaaaagttcctaagtatgttaaatatgtcaagctttttaggcttgtcacaaatgattgctttgttttcctaagtcatcaaaatgtatataaattatctagattggataacagtcttgcatgtttatcatgttacaatttaatattccatcctgcccaacccttcctctcccatcctcaaaaaagggccattttatgatgcattgcacaccctctggggaaattgatctttaaattttgagacagtataaggaaaatctggttggtgtcttacaagtgagctgacaccattttttattctgtgtatttagaatgaagtcttgaaaaaaactttataaagacatctttaatcattccaaaattgtgtccgttttcttgagcgttttgattttttacttttagcttataccagctgaatggcagccttgcctaatccacctacaacaagaatttcttaagctttcttttatttgcatgagagagccactaccaaggcatgttttgttatgctgaaactgggctgctgcatactgctaaatggcacctctgggattggcctacctggggatttcttggtttgtgaaaacaggagaggagaaatatctcatacaagtgaaaggatactggagagagaaattacccatttctaaaaaaaaaccacactctgtcgtatctgtgttaatgttttctagcatgtactctggtttcaacagacacaaatttatatgttaacccagttttcttgccgttctgtaagtgttttattcttagtgtgatttttttccattgggatgtttttgattgaacttgttcattttgttttgcttgggaggaaaataaacaattttacttttttcctt

SEQ ID NO: 23002 - DNA, 558 bp, Homo sapiens
  misc_feature 1..558: note = ENST00000593168
  source 1..558: mol_type = unassigned DNA; mol_type = unassigned DNA
gtgagcgggttccggttgtctggagcccagcggcgggtgtgagagtccgtaaggagcagcttccaggatcctgagatccggagcagccggggtcggagcggctcctcaagagttactgatctatgaaatggcagagaatggaaaaaattgtgaccagagacgtgtagcaatgaacaaggaacatcataatggaaatttcacagacccctcttcagtgaatgaaaagaagaggagggagcgggaagaaaggcagaatattgtcctgtggagacagccgctcattaccttgcagtatttttctctggaaatccttgtaatcttgaaggaatggacctcaaaggtccacatatagcctcagttacattagctgcttatgaatgcaattcagttaattttcccgaaccaccctatcctgatcagattatttgtccagatgaagagggcactgaaggaaccatttctttgtggagtatcatctcaaaagttaggattgaagcctgcatgtggggtatcggtacagcaatcggagagctgcctccatatttcatggccagagca

SEQ ID NO: 23003 - DNA, 544 bp, Homo sapiens
  misc_feature 1..544: note = ENST00000586245
  source 1..544: mol_type = unassigned DNA; mol_type = unassigned DNA
gagcgggttccggttgtctggagcccagcggcgggtgtgagagtccgtaaggagcagcttccaggatcctgagatccggagcagccggggtcggagcggctcctcaagagttactgatctatgaaatggcagagaatggaaaaaattgtgaccagagacgtgtagcaatgaacaaggaacatcataatggaaatttcacagattatggcatcgtcaaagcattgtggtgtcttttttactgctgcttgctgtgcttatagctacgtattatgttgaaggagtgcatcaacagtatgtgcaacgtatagagaaacagtttcttttgtatgcctactggataggcttaggaattttgtcttctgttgggcttggaacagggctgcacacctttctgctttatctgggtccacatatagcctcagttacattagctgcttatgaatgcaattcagttaattttcccgaaccaccctatcctgatcagattatttgtccagatgaagagggcactgaaggaaccatttctttgtggagtatcatctca

SEQ ID NO: 23004 - DNA, 545 bp, Homo sapiens
  misc_feature 1..545: note = ENST00000585847
  source 1..545: mol_type = unassigned DNA; mol_type = unassigned DNA
agcgggttccggttgtctggagcccagcggcgggtgtgagagtccgtaaggagcagcttccaggatcctgagatccggagcagccggggtcggagcggctcctcaagagttactgatctatgaaatggcagagaatggaaaaaattgtgaccagagacgtgtagcaatgaacaaggaacatcataatggaaatttcacagacccctcttcagtgaatgaaaagaagaggagggagcgggaagaaaggcagaatattgtcctgtggagacagccgctcattaccttgcagtatttttctctggaaatccttgtaatcttgaaggaatggacctcaaatatgtgcaacgtatagagaaacagtttcttttgtatgcctactggataggcttaggaattttgtcttctgttgggcttggaacagggctgcacacctttctgctttatctgggtccacatatagcctcagttacattagctgcttatgaatgcaattcagttaattttcccgaaccaccctatcctgatcagattatttgtccagatga

SEQ ID NO: 23005 - DNA, 583 bp, Homo sapiens
  misc_feature 1..583: note = ENST00000587945
  source 1..583: mol_type = unassigned DNA; mol_type = unassigned DNA
tgtctggagcccagcggcgggtgtgagagtccgtaaggagcagcttccaggatcctgagatccggagcagccggggtcggagcggattatggcatcgtcaaagcattgtggtgtcttttttactgctgcttgctgtgcttatagctacgtattatgttgaaggagtgcatcaacagtatgtgcaacgtatagagaaacagtttcttttgtatgcctactggataggcttaggaattttgtcttctgttgggcttggaacagggctgcacacctttctgctttatctgggtccacatatagcctcagttacattagctgcttatgaatgcaattcagttaattttcccgaaccaccctatcctgatcagattatttgtccagatgaagagggcactgaaggaaccatttctttgtggagtatcatctcaaaagttaggattgaagcctgcatgtggggtatcggtacagcaatcggagagctgcctccatatttcatggccagagcagctcgcctctcaggtgctgaaccagatgatgaagagtatcaggaatttgaagagatgctggaacatgcagagtctgc

SEQ ID NO: 23006 - DNA, 587 bp, Homo sapiens
  misc_feature 1..587: note = ENST00000588131
  source 1..587: mol_type = unassigned DNA; mol_type = unassigned DNA
agcccagcggcgggtgtgagagtccgtaaggagcagcttccaggatcctgagatccggagcagccggggtcggagcggctcctcaagagttactgatctatgaaatggcagagaatggaaaaaattgtgaccagagacgtgtagcaatgaacaaggaacatcataatggaaatttcacagacccctcttcagtgaatgaaaagaagaggagggagcgggaagaaaggcagaatattgtcctgtggagacagccgctcattaccttgcagtatttttctctggaaatccttgtaatcttgaaggaatggacctcaaagtaaagagtcttctcccactaccttttacatacacctcatttactcatttaaaaaatcctcagtaatctcttactttctgccctctactccatcaaaatggattaattacctttagaatattaccataggaacatatttattctcctttctttaggttgaagaaaaatagattagggaaagacattgctatttgctgtttgcttactggattatcacagttgtccactgttttttcatgttgaatctgcagtggagaacactgaaaaatac

SEQ ID NO: 23007 - DNA, 580 bp, Homo sapiens
  misc_feature 1..580: note = ENST00000589823
  source 1..580: mol_type = unassigned DNA; mol_type = unassigned DNA
gtaaggagcagcttccaggatcctgagatccggagcagccggggtcggagcggctcctcaagagttactgatctatgaaatggcagagaatggaaaaaattgtgaccagagacgtgtagcaatgaacaaggaacatcataatggaaatttcacagacccctcttcagtgaatgaaaagaagaggagggagcgggaagaaaggcagaatattgtcctgtggagacagccgctcattaccttgcagtatttttctctggaaatccttgtaatcttgaaggaatggacctcaaaattatggcatcgtcaaagcattgtggtgtcttttttactgctgcttgctgtgcttatagctacgtattatgttgaaggagtgcatcaacagtatgtgcaacgtatagagaaacagtttcttttgtatgcctactggataggcttaggaattttgtcttctgttgggcttggaacagggctgcacacctttctgctttatctgattatttgtccagatgaagagggcactgaaggaaccatttctttgtggagtatcatctcaaaagttaggattgaagcctgcatgtgg

SEQ ID NO: 23008 - DNA, 341 bp, Homo sapiens
  misc_feature 1..341: note = ENST00000592106
  source 1..341: mol_type = unassigned DNA; mol_type = unassigned DNA
gcttccaggatcctgagatccggagcagccggggtcggagcggtttgtaatgtattgctggattttattttgctgtattagctcctcaagagttactgatctatgaaatggcagagaatggaaaaaattgtgaccagagacgtgtagcaatgaacaaggaacatcataatggaaatttcacagacccctcttcagtgaatgaaaagaagaggagggagcgggaagaaaggcagaatattgtcctgtggagacagccgctcattaccttgcagtatttttctctggaaatccttgtaatcttgaaggaatggacctcaaaattatggcatcgtcaaagcatt

SEQ ID NO: 23009 - DNA, 800 bp, Homo sapiens
  misc_feature 1..800: note = ENST00000591315
  source 1..800: mol_type = unassigned DNA; mol_type = unassigned DNA
ctgagatccggagcagccggggtcggagcgggtaggtaaactaactcagggaattggggaccgaagcctgaggctgtcctcagagcttggcgtcttccggagctctcccacttaggcattgcggatctggggcactgtgattccgacttccagcagtgttttaggacgctgctgactggatgtctcaccctggatgtctcacgctggcggtagccaggttatttgggacaccttctcatggttggtcacccggacattgaacccagacaccgggctgttcgttctcctctccgcgtacttggaagccttgctaggcttctttagagaacctcttagtcccgggatgtccaggaccttggactcctcaagagttactgatctatgaaatggcagagaatggaaaaaattgtgaccagagacgtgtagcaatgaacaaggaacatcataatggaaatttcacagacccctcttcagtgaatgaaaagaagaggagggagcgggaagaaaggcagaatattgtcctgtggagacagccgctcattaccttgcagtatttttctctggaaatccttgtaatcttgaaggaatggacctcaaaattatggcatcgtcaaagcattgtggtgtcttttttactgctgcttgctgtgcttatagctacgtattatgttgaaggagtgcatcaacagtatgtgcaacgtatagagaaacagtttcttttgtatgcctactggataggcttaggaattttgtcttctgttgggcttggaacagggctgcacacctttctgctttatctg

SEQ ID NO: 23010 - DNA, 606 bp, Homo sapiens
  misc_feature 1..606: note = ENST00000587259
  source 1..606: mol_type = unassigned DNA; mol_type = unassigned DNA
tgttcctgtcacccaggctggagcgcaatggcacgatcttggctcactgcaacctccgcctcgggggtccaagcgattctcctgcctcagcctcccgagtagctgggattacagccacccaccaccacgccaggctaatttttgtatttttagtagagacggggtttcaccatgttgcgcaggctagtcttgaactcctgacctcactatctgcctgccttggcctcccaaagtgctgggattacaggcgtgagccactgcgcctggtctattatctgtcttttactataaccatcctaacagctcctcaagagttactgatctatgaaatggcagagaatggaaaaaattgtgaccagagacgtgtagcaatgaacaaggaacatcataatggaaatttcacagacccctcttcagtgaatgaaaagaagaggagggagcgggaagaaaggcagaatattgtcctgtggagacagccgctcattaccttgcagtatttttctctggaaatccttgtaatcttgaaggaatggacctcaaaattatggcatcgtcaaagcattgtggtgtcttttttactgctgcttgctgtgcttatagctacgt

SEQ ID NO: 23011 - DNA, 838 bp, Homo sapiens
  misc_feature 1..838: note = ENST00000592619
  source 1..838: mol_type = unassigned DNA; mol_type = unassigned DNA
acccctcttcagtgaatgaaaagaagaggagggagcgggaagaaaggcagaatattgtcctgtggagacagccgctcattaccttgcagtatttttctctggaaatccttgtaatcttgaaggaatggacctcaaagactttgcctcccgggccaaactggcagttcaaaaactagtacagaaagttggattttttggaattttggcctgtgcttcaattccaaatcctttatttgatctggctggaataacgtgtggacactttctggtacctttttggaccttctttggtgcaaccctaattggaaaagcaataataaaaatgcatatccagaaaatttttgttataataacattcagcaagcacatagtggagcaaatggtggctttcattggtgctgtccccggcataggtccatctctgcagaagccatttcaggagtacctggaggctcaacggcagaagcttcaccacaaaagcgaaatgggcacaccacagggagaaaactggttgtcctggatgtttgaaaagttggtcgttgtcatggtgtgttacttcatcctatctatcattaactccatggcacaaagttatgccaaacgaatccagcagcggttgaactcagaggagaaaactaaataagtagagaaagttttaaactgcagaaattggagtggatgggttctgccttaaattgggaggactccaagccgggaaggaaaattcccttttccaacctgtatcaatttttacaacttttttcctgaaagcagtttagtccatactttgcactgacatactttttccttctgtgctaaggtaaggtatccaccctcg

SEQ ID NO: 23012 - DNA, 791 bp, Homo sapiens
  misc_feature 1..791: note = ENST00000591877
  source 1..791: mol_type = unassigned DNA; mol_type = unassigned DNA
ggtatcggtacagcaatcggagagctgcctccatatttcatggccagagcagctcgcctctcaggtgctgaaccagatgatgaagagtatcaggaatttgaagagatgctggaacatgcagagtctgcacaagactttgcctcccgggccaaactggcagttcaaaaactagtacagaaagttggattttttggaattttggcctgtgcttcaattccaaatcctttatttgatctggctggaataacgtgtggacactttctggtacctttttggaccttctttggtgcaaccctaattggaaaagcaataataaaaatgcatatccagaaaatttttgttataataacattcagcaagcacatagtggagcaaatggtggctttcattgggctggaggacaatggcgcactgcaacctccacctcccagtgctgtccccggcataggtccatctctgcagaagccatttcaggagtacctggaggctcaacggcagaagcttcaccacaaaagcgaaatgggcacaccacagggagaaaactggttgtcctggatgtttgaaaagttggtcgttgtcatggtgtgttacttcatcctatctatcattaactccatggcacaaagttatgccaaacgaatccagcagcggttgaactcagaggagaaaactaaataagtagagaaagttttaaactgcagaaattggagtggatgggttctgccttaaattgggaggactccaagccgggaaggaaaattcccttttccaacctgtatcaatttttacaa

SEQ ID NO: 23013 - DNA, 729 bp, Homo sapiens
  misc_feature 1..729: note = ENST00000591782
  source 1..729: mol_type = unassigned DNA; mol_type = unassigned DNA
ttcaaagttcatagttccttctttgttcctttgttaatcactgacttctgactagtgggaggtgcctcccaagtttgctaatgcattctttttggataaggatgacgcacagattgtcctaataaggacttagattgagaaagaccgccccctctgagaagaggggacaatgctgtccccggcataggtccatctctgcagaagccatttcaggagtacctggaggctcaacggcagaagcttcaccacaaaagcgaaatgggcacaccacagggagaaaactggttgtcctggatgtttgaaaagttggtcgttgtcatggtgtgttacttcatcctatctatcattaactccatggcacaaagttatgccaaacgaatccagcagcggttgaactcagaggagaaaactaaataagtagagaaagttttaaactgcagaaattggagtggatgggttctgccttaaattgggaggactccaagccgggaaggaaaattcccttttccaacctgtatcaatttttacaacttttttcctgaaagcagtttagtccatactttgcactgacatactttttccttctgtgctaaggtaaggtatccaccctcgatgcaatccaccttgtgttttcttagggtggaatgtgatgttcagcagcaaacttgcaacagactggccttctgtttgttactttcaaaaggcccacatgatacaattagagaattc

SEQ ID NO: 23014 - DNA, 884 bp, Homo sapiens
  misc_feature 1..884: note = ENST00000588617
  source 1..884: mol_type = unassigned DNA; mol_type = unassigned DNA
tttccttattaattggttcaaaccagttcttacaggaactagtggtgataaatgtgggacttctgagaagtcattcattttattctttgtgccataccagagtacagtatcagctgagctgaccttactctgaggactaactcttttgctggaagcggtttctgatttacagctcttggtttctcccagacatgttggtgggagagattttggtttttaaggggttgttagatggagtaaattttctttttttttttttttttttttaactaaaaaggggtcacagaatttcagcagttctctgatttttatattttattcctcttcctatccaatccctgccttttgagtccaggtggtccatctctgcagaagccatttcaggagtacctggaggctcaacggcagaagcttcaccacaaaagcgaaatgggcacaccacagggagaaaactggttgtcctggatgtttgaaaagttggtcgttgtcatggtgtgttacttcatcctatctatcattaactccatggcacaaagttatgccaaacgaatccagcagcggttgaactcagaggagaaaactaaataagtagagaaagttttaaactgcagaaattggagtggatgggttctgccttaaattgggaggactccaagccgggaaggaaaattcccttttccaacctgtatcaatttttacaacttttttcctgaaagcagtttagtccatactttgcactgacatactttttccttctgtgctaaggtaaggtatccaccctcgatgcaatccaccttgtgttttcttagggtggaatgtgatgttcagcagcaaacttgcaacagactggccttctgtttgttactttcaaaaggcccacatga

SEQ ID NO: 23015 - DNA, 4325 bp, Homo sapiens
  misc_feature 1..4325: note = ENST00000592790
  source 1..4325: mol_type = unassigned DNA; mol_type = unassigned DNA
attttattctttgtgccataccagagtacagtatcagctgagctgaccttactctgaggactaactcttttgctggaagcggtttctgatttacagctcttggtttctcccagacatgttggtgggagagattttggtttttaaggggttgttagatggagtaaattttctttttttttttttttttttttaactaaaaaggggtcacagaatttcagcagttctctgatttttatattttattcctcttcctatccaatccctgccttttgagtccaggtggtaagtacattttctttaacgtttttcctgcttttcttcccaaatgtgtctttttctttgggctactgtaccctgcttccagtgctgtccccggcataggtccatctctgcagaagccatttcaggagtacctggaggctcaacggcagaagcttcaccacaaaagcgaaatgggcacaccacaggtaagactttaatccggtttcttctcccctctgggaagtttcgggctgaaattacattcacagctctcactcacatttttaggcaaataagtgaagttggtttgccagtgttccttgacagaagttgagcgtctgtgtatgctctactgggaaatttgtctttgtcttagactagaaagtgtaacttctgtacatcttctcctaaaaacaagggtagagccaatggaaagtaatggttctgttacatagaatgagttgttgccttgatcttaaatgatgtattggtagatatacttcccaagtggattaaaaagttaaaacttacagcataacaaagtattagacttactgaggtgacttgaatatctccttttgattttcactctatttttcttttcacccatgggaaaatgataattttttaataaaccaaggctcttaccatagctgaactttaaaacttagactgtcttttctgtaaacgattctgaggcaaagggaaatgactagaagaggatgagtaaacaataacctgaaatgggaaactcgagggaagcacaggttttttttgttttgttttgtttggttcgttttttgttctttggggtttttttgagacagaatttcgctctcgttgcccaagttggagtgcaatggcgcgatcttggctcactgcaacctccgcctcccgggttcaagcgattctcctgcctcagcctcccaagtagctgtgattccaggcacgtgccaccacaccagctaattttttgtattttaatagaaacagggtttcaccgtgttagccaggctggtctcaaactgacctcagatgatccgcccgccttggcctcccaaagtgctgggattacagatgtgagccaccgcgcccggccagagcactgttttttttaatggccttgcactcttcttatggacctttgctgccctcagttgaccaaacatgacatcagaaacagatacatttgtgtgttttaaaaacagctcctaatactggaacaaaaatatttaactgtcttgacaatactcatgagtatctgcatggcgacttcagagttgagtttaatcaaagagtttattcttaggtcctagtagaagagctaacctcacactcatcccattctaaactatgtgattcaacactgattttacatccaacaaagtgaaatcttgatagttgggtgtaaaaaggagagtaatggagatttcagagtagttggggttgcttacttttcatttttaattctttaggttttgtaagttacacacttcaagcattatagatgatcctctttttactactgaactaatgaagcctttttcattgcattgttctgcatttatttctacagggagaaaactggttgtcctggatgtttgaaaagttggtcgttgtcatggtgtgttacttcatcctatctatcattaactccatggcacaaagttatgccaaacgaatccagcagcggttgaactcagaggagaaaactaaataagtagagaaagttttaaactgcagaaattggagtggatgggttctgccttaaattgggaggactccaagccgggaaggaaaattcccttttccaacctgtatcaatttttacaacttttttcctgaaagcagtttagtccatactttgcactgacatactttttccttctgtgctaaggtaaggtatccaccctcgatgcaatccaccttgtgttttcttagggtggaatgtgatgttcagcagcaaacttgcaacagactggccttctgtttgttactttcaaaaggcccacatgatacaattagagaattcccaccgcacaaaaaaagttcctaagtatgttaaatatgtcaagctttttaggcttgtcacaaatgattgctttgttttcctaagtcatcaaaatgtatataaattatctagattggataacagtcttgcatgtttatcatgttacaatttaatattccatcctgcccaacccttcctctcccatcctcaaaaaagggccattttatgatgcattgcacaccctctggggaaattgatctttaaattttgagacagtataaggaaaatctggttggtgtcttacaagtgagctgacaccattttttattctgtgtatttagaatgaagtcttgaaaaaaactttataaagacatctttaatcattccaaaattgtgtccgttttcttgagcgttttgattttttacttttagcttataccagctgaatggcagccttgcctaatccacctacaacaagaatttcttaagctttcttttatttgcatgagagagccactaccaaggcatgttttgttatgctgaaactgggctgctgcatactgctaaatggcacctctgggattggcctacctggggatttcttggtttgtgaaaacaggagaggagaaatatctcatacaagtgaaaggatactggagagagaaattacccatttctaaaaaaaaaccacactctgtcgtatctgtgttaatgttttctagcatgtactctggtttcaacagacacaaatttatatgttaacccagttttcttgccgttctgtaagtgttttattcttagtgtgatttttttccattgggatgtttttgattgaacttgttcattttgttttgcttgggaggaaaataaacaattttacttttttcctttaggagcattatgagcattatgtcagaatagaatagaattggggttcgatcttaacaggccagaaatgcctgggtttttttggtttgtttttgtttttgtttttttatcaaatcctgcctgactgtctgcttgttttgcctaccatcgtgacatctccatggctgtaccaccttgtcgggtagcttatcagactgatgttgactgttgaatctcatggcaacaccagtcgatgggctgtctgacattttggtatctttcatctgaccatccatatccaatgttctcatttaaacattacccagcatcattgtttataatcagaaactctggtccttctgtctggtggcacttagagtcttttgtgccataatgcagcagtatggagggaggattttatggagaaatggggatagtcttcatgaccacaaataaataaaggaaaactaagctgcattgtgggttttgaaaaggttattatacttcttaacaattctttttttcagggacttttctagctgtatgactgttacttgaccttctttgaaaagcattcccaaaatgctctattttagatagattaacattaaccaacataattttttttagatcgagtcagcataaatttctaagtcagcctctagtcgtggttcatctctttcacctgcattttatttggtgtttgtctgaagaaaggaaagaggaaagcaaatacgaattgtactatttgtaccaaatctttgggattcattggcaaataatttcagtgtggtgtattattaaatagaaaaaaaaaattttgtttcctaggttgaaggtctaattgatacgtttgacttatgatgaccatttatgcactttcaaatgaatttgctttcaaaataaatgaagagcagctgtccttctttcctcttttaagtgttcagctgtggcatgctcagaggttcctgctggattccagctggagcggtgtgatacccttctttttcagctgttcgtgccttcctttcttgtatccaccaaagtggagacaaatacatgatctcaaagatacacagtacctacttaattccagctgatgggagaccaaagaatttgcaagtggatggtttggtatcactgtaaataaaaagagggcctgggaattcttgcgattccatctcta

SEQ ID NO: 23016 - DNA, 995 bp, Homo sapiens
  misc_feature 1..995: note = ENST00000587470
  source 1..995: mol_type = unassigned DNA; mol_type = unassigned DNA
ccagagtacagtatcagctgagctgaccttactctgaggactaactcttttgctggaagcggtttctgatttacagctcttggtttctcccagacatgttggtgggagagattttggtttttaaggggttgttagatggagtaaattttctttttttttttttttttttttaactaaaaaggggtcacagaatttcagcagttctctgatttttatattttattcctcttcctatccaatccctgccttttgagtccaggtggtaagtacattttctttaacgtttttcctgcttttcttcccaaatgtgtctttttctttgggctactgtaccctgcttccagtgctgtccccggcataggtccatctctgcagaagccatttcaggagtacctggaggctcaacggcagaagcttcaccacaaaagcgaaatgggcacaccacagggagaaaactggttgtcctggatgtttgaaaagttggtcgttgtcatggtgtgttacttcatcctatctatcattaactccatggcacaaagttatgccaaacgaatccagcagcggttgaactcagaggagaaaactaaataagtagagaaagttttaaactgcagaaattggagtggatgggttctgccttaaattgggaggactccaagccgggaaggaaaattcccttttccaacctgtatcaatttttacaacttttttcctgaaagcagtttagtccatactttgcactgacatactttttccttctgtgctaaggtaaggtatccaccctcgatgcaatccaccttgtgttttcttagggtggaatgtgatgttcagcagcaaacttgcaacagactggccttctgtttgttactttcaaaaggcccacatgatacaattagagaattcccaccgcacaaaaaaagttcctaagtatgttaaatatgtcaagctttttaggcttgtcacaaatgattgctttgttttcctaagtcatcaaa

SEQ ID NO: 23017 - DNA, 3028 bp, Homo sapiens
  misc_feature 1..3028: note = ENST00000267202
  source 1..3028: mol_type = unassigned DNA; mol_type = unassigned DNA
gggctcacaggctgcgggaacttccttcccactgcctgttttccttggatcgcggtatctctcttcctggaggaaaaaggctcttatgacctcatggcgcgctctcccgagccgcagtgacgtcattaatgcgctcacgcgtcacagcccaatcatagggcccttcccctccctttagaagtcccgactgtccctgacacattccactccaagcgagccgcgacacttacgtcacgtccgcccgcccgcgcggtgatgacgtcacgacccagggctggcgtcacgtgtcccccccgcggggggcggcccttgagggcggcgcttccggtcggcggagcctggtggccgcagcggcggtggcgacgacggccgagacgtggggatggcgggcgccgggagcgaagcccggttcgccgggctgtcgctggtgcagctcaacgagctgctggaggacgagggccagctgacggagatggtgcagaagatggaggagacacagaatgttcagcttaacaaagaaatgacacttgccagcaaccggagcctggcagaaggaaaccttttgtaccagccccagctggacacgttgaaagcacgcttgacccagaaataccaggaactccaggttctctttgaagcctatcagataaagaagaccaaattagacagacagtctagcagtgcttccttggagaccctgttagcacttcttcaggcagaaggggccaagattgaggaagacactgagaacatggcagagaagtttctggatggagaacttcctctggattccttcattgatgtctatcagagcaaacggaaactggcccacatgcgacgggtgaaaatcgagaagctccaggagatggtcctaaaggggcagagactcccacaggccctggccccgctgccccccaggctgcccgaactggcacctaccgccccccttccctaccctgccccagaggccagtgggcctcctgccgttgcacctcggcgcatcccccccccaccacccccggtgcctgcgggacgcttagccaccccgtttactgcggccatgagttcgggacaggccgtgccgtacccaggattacagtgcccgcccctgcccccccgcgtgggcctccccactcagcaaggattctcttcgcagttcgtgtccccatatccgccacctctccctcagagacccccgccccggctccctccacaccagccgggtttcatcctccagtgagcgccggcgcggtccttcccgggagacttcttccacctggcgtgttgtgctctgctcacgggaaggaggctggaggtccgctctgtgccaagggctctggggccctgggccagcgtgtctgtctgattttagaactgtaggtcagtggtgagtagtaggagcccaggctttgggcatcaaggcagttgtgtgtgccgggttacagcctgacacctgtgcgttgcatcggtttgcattatccgtgtgatttctaagtatcttagcgttgatgaactcatgtttgggaagaaataggcctctcccccagtcccatttagaatcgtggtccttctgttgcagctttatttaatgagcatggttcatgatacttattttattttcgaaagacagtcctatgtgtctcacccaccggccactgcagccctggtgagggcgggtgggcgccggccggcctggaagagcgccgtggctgggccaccacctgtggctgcgttgttgctcactgaatctgttggggagaggtcaccatagtcaccgcctgacctggctgctgctcttgcttcagagccacaagcaaagtttgcactgggcccactgccgagtccagaggccggagaacggccactggtgtgggaggggagcgcacgagtgggactttgcacagcaaattgtgtccccagctcctcctctcccgcctgcctggagccggccctgaaggtttctatgaagaaataatcccccaatatttttactacgtgtgtgattttcctgttttatattgaaaaaacttttttgacactcccaagaccattcagggaaattttataaaaaatgcagatactgtcttgagcagatcgaaatgccgatgaagtggatgcaatttccttttgtgcaagcagtgcacggtgcccccccctcgggtgtccgtgctgtgccttagcttccccaggtgccgggactcacacctgctaggggctgggcaaggccccggctctgctttctctgaagggcttgtccaagttcattgccctgttacaggtggtcaagacgtccggccgccttgacccaggctacccttagccaatatcctctgcccctgggtggctggtggctgggcctcagggtgggcaacgttaggggtttggcgaaagcccgccccatgggattgagggacggggctgcactccaaccgtctgcacctgctcttcccccacccctgtgggacctcatcttcacgtgccatgtgtgctgaaggcccagggcccagcagggggcagtggcacctgttgacggaaaaggccgaggtgcttaccagtggaccttctggcccgcccctcccctgtcacttgtcgggcatccagggccccgacctgtgcctagccgccagggtgacagaaggcagaactgaagcggggtctgggccacgggccaggccactgccttttgtcctcagtgaccgtacattcctgctctcggacttgaactctactgtaactgttttcttaaaggaaatgaagctgtacaggacgattcactgccatgccagtcaggcgggcttgccatgttctgtgaatctcgagtgagcggtgccacccgcccccatacctccgccaccggccgctgtcggggatgccacagcctgccacggtcgcagccagacgtgagcttggcattgaagttgcaaagcggcccctggccgggctcgccgtcgctgtccagggccgtgtccggtgctgtggctgtaaagctgtaggaccctttttaataaatagagaattattaataaca

SEQ ID NO: 23018 - DNA, 879 bp, Homo sapiens
  misc_feature 1..879: note = ENST00000535765
  source 1..879: mol_type = unassigned DNA; mol_type = unassigned DNA
ggcgcttccggtcggcggagcctggtggccgcagcggcggtggcgacgacggccgagacgtggggatggcgggcgccgggagcgaagcccggttcgccgggctgtcgctggtgcagctcaacgagctgctggaggacgagggccagctgacggagatggtgcagaagatggaggagaatgttcagcttaacaaagaaatgacacttgccagcaaccggagcctggcagaaggaaaccttttgtaccagccccagctggacacgttgaaagcacgcttgacccagaaataccaggaactccaggttctctttgaagcctatcagataaagaagaccaaattagacagacagtctagcagtgcttccttggagaccctgttagcacttcttcaggcagaaggggccaagattgaggaagacactgagaacatggcagagaagtttctggatggagaacttcctctggattccttcattgatgtctatcagagcaaacggaaactggcccacatgcgacgggtgaaaatcgagaagctccaggagatggtcctaaaggggcagagactcccacaggccctggccccgctgccccccaggctgcccgaactggcacctaccgccccccttccctaccctgccccagaggccagtgggcctcctgccgttgcacctcggcgcatcccccccccaccacccccggtgcctgcgggacgcttagccaccccgtttactgcggccatgagttcgggacaggccgtgccgtacccaggattacagtgcccgcccctgcccccccgcgtgggcctccccactcagcaaggattctcttcgcagttcgtgtccccatatccgccacctctccctcagagacccccgcccc

SEQ ID NO: 23019 - DNA, 2088 bp, Homo sapiens
  misc_feature 1..2088: note = ENST00000371248
  source 1..2088: mol_type = unassigned DNA; mol_type = unassigned DNA
aataatatctaccagagggcacagagaataaggaactttgtctacctgctacccagccgaggaagtaaacactgccaaccggcggaaccccccgccttgtgctctgccctcagtgtgctcttccccatgtccactgttgtgaattatttatttctctaagtaggcttttgatggacaaaaatgggggctcaggaggaagtgacacaggcacagaggcaggaaagcagggatgggttgtccgacgagcgagttctcgtctactttggccagatggcatgtacttgtgtgtagagaaatgacaagaaatagggctggtgagggggagtgccagggtgtgcgccccatggtggttaatttaggaggaaacaaggagcttcgtgatgattttggagcagagaagcagtcggatgaaactgctcttttttttttttttttttgagaccgagttttgctcttgtctcccaggctggagtgcaatggcacaatctcggctcaccgcaacctctgcctcccggattcaagcgattctcctgcctcagcctcccaagtagctgggattacaggcacgcgccaccatgctcggctaattttgtatttttagtagagatggggtttctccatgttggtcgggctggtctagaactcctgacctcaggtgatccgtccgcctcggcctcccaaagtgctgggattacaggcgtgagccaccgcgcccggcctgaaactgctctttagggaggttaatctgtcagcaaagcgtgggctggcttggcgtggcaggaccaggttggcggcggaagtggaggttaggaagaaattaggatttgagctagggctctgggagaggtattcggaccagctggcccgactccctttctcacttcccctctcctgctgacctgaagtgctttccccacctctgtcacaggcacgtggtctcttagcttctttgtatacctctcctgtggcacttgacacacattttgtaagtcacttccctgtgtcccccactggcttgggggctgcattttgtcatgtttgtctttttgtccttggcacccagcacagtgcctggcacccaggatgtgcctgggtagtgctgctgagtgagtggtgataaccgggcttcaagtggaagtgagtaggagacagggctctggtgagcggggaggggaggggcagtgggggtgcaggagggagggagtcattgaggccggattaggcagagcatgagggatgggcagggctttgtcccgcaggcagttggagtgtggttctggagctcagggtgaatgctctgcttggagacagaaattcaagccactctcctccaagtgcttgtggaaatcaaggagaatataaaagtttgaaaggccactaggagctattagtgggttgggagaaggaaagagctgccatcgaagggaggggagaaacgagagaaacaagttggatgacctaacatcctgttagagactggctggaagaggaacccagaagtagactgcactgtttgaccctcaccggtcggtcgtatgcagagtggttgtgttcttgagctgaggaatgccggccttgttgcctgtttggctttgattacagtatttgtagcagaatgttgctatggagattcatgccagacacagaatgttcagcttaacaaagaaatgacacttgccagcaaccggagcctggcagaaggaaaccttttgtaccagccccagctggacacgttgaaagcacgcttgacccagaaataccaggaactccaggttctctttgaagcctatcagataaagaagaccaaattagacagacagtctagcagtgcttccttggagaccctgttagcacttcttcaggcagaaggggccaagattgaggaagacactgagaacatggcagagaagtttctggatggagaacttcctctggattccttcattgatgtctatcagagcaaacggaaactggcccacatgcgacgggtgaaaatcgagaagctccaggagatggtcctaaaggggcagagactcccacaggccctggccccgctgccccccaggctgcccgaactggcacctaccg

SEQ ID NO: 23020 - DNA, 1457 bp, Homo sapiens
  misc_feature 1..1457: note = ENST00000543590
  source 1..1457: mol_type = unassigned DNA; mol_type = unassigned DNA
ccctcttcccccagcttttggtcggctttgctcacccaccaacagctaggagctggaaggctcagaagagctggggtgggcatgggagagacagaggaaccccggtggctggaaacacagttccttcccagggtctcttcagcttgctggttggacctcttagcctgcttatgaagcctgaattgacatcatgccaactggtctcctgctgataagtgattccttaacttcctcgggagcagcagaaacttgttttgaaaaaaatcagattctaaatctttacagctgtttacttctgcaagcacaatggccgtagtaaggaattcaagtcacagcgcagccgtggcagggaaggctctgcatggagtcacaggacaaagcctgtcctggaaacgtgctggaaggaagtcggcctcattctttacgacgggcagcagctccaaatgagaaaccaaggggcttggctctggacacagaatgttcagcttaacaaagaaatgacacttgccagcaaccggagcctggcagaaggaaaccttttgtaccagccccagctggacacgttgaaagcacgcttgacccagaaataccaggaactccaggttctctttgaagcctatcagataaagaagaccaaattaggtaactttttaagggtgatcattcgagaataaagagttgagagaaggacacattttcaagctattgccctaccaggaaagaaatattacggaaaaatttcaggttaagatagcgactctactgcaatgaacaaatagcttatgtatattatttatttatttttagagacagggtcttgctctgtcagactggagtgcagtggcgcaaccatggctcagcacgacctcctgggctcaggtgatcctcctgtctcagcctcctgagtagctgggaccacaggtgtgcactaccccaagcaggctagtttttcatttttttgcagagaggttgtcttgctatgttgcccaggctggtcttgaactcaagccatcctcctgcctttgcctcacaaagtgctgctattacagacatgagccactgtattggactagtttatgtatggaatatggagggcccccagacctgcggcctctctgcacttgcggttcgagagggcagggtgtatagcaggactgccccctcctcccagtggccctgactggtggcggtgactgctgaggtcagcccaggtccacacgcacctccagggtctgcagtgtgaagcaggttgcagaaacgtgggtacctcggggcagttaccagaaaaggggctggagattaggaggaagccagccagtttagcagtcaccagtttagaagaggagacttaaccactttttaaattcaagaccccaccttctctaaacagcatagaaaaagctttctgaattatgatattaaacagatgtcttatgacgtttgcccgtttgtcttat

SEQ ID NO: 23021 - DNA, 1148 bp, Homo sapiens
  misc_feature 1..1148: note = ENST00000326621
  source 1..1148: mol_type = unassigned DNA; mol_type = unassigned DNA
gcccgggcggctgcccttgggtgctcccttccctgcccgacacccagaccgaccttgaccgcccacctggcaggagcaggacaggacggccggacgcggccatggccgagctcccggggccctttctctgcggggccctgctaggcttcctgtgcctgagtgggctggccgtggaggtgaaggtacccacagagccgctgagcacgcccctggggaagacagccgagctgacctgcacctacagcacgtcggtgggagacagcttcgccctggagtggagctttgtgcagcctgggaaacccatctctgagtcccatccaatcctgtacttcaccaatggccatctgtatccaactggttctaagtcaaagcgggtcagcctgcttcagaacccccccacagtgggggtggccacactgaaactgactgacgtccacccctcagatactggaacctacctctgccaagtcaacaacccaccagatttctacaccaatgggttggggctaatcaaccttactgtgctggttccccccagtaatcccttatgcagtcagagtggacaaacctctgtgggaggctctactgcactgagatgcagctcttccgagggggctcctaagccagtgtacaactgggtgcgtcttggaacttttcctacaccttctcctggcagcatggttcaagatgaggtgtctggccagctcattctcaccaacctctccctgacctcctcgggcacctaccgctgtgtggccaccaaccagatgggcagtgcatcctgtgagctgaccctctctgtgaccgaaccctcccaaggccgagtggccggagctctgattggggtgctcctgggcgtgctgttgctgtcagttgctgcgttctgcctggtcaggttccagaaagagagggggaagaagcccaaggagacatatgggggtagtgaccttcgggaggatgccatcgctcctgggatctctgagcacacttgtatgagggctgattctagcaaggggttcctggaaagaccctcgtctgccagcaccgtgacgaccaccaagtccaagctccctatggtcgtgtgacttctcccgatccctgagggcggtgagggggaatatcaataattaaagtctgtgggtaccata

SEQ ID NO: 23022 - DNA, 1191 bp, Homo sapiens
  misc_feature 1..1191: note = ENST00000403470
  source 1..1191: mol_type = unassigned DNA; mol_type = unassigned DNA
agaccgaccttgaccgcccacctggcaggagcaggacaggacggccggacgcggccatggccgagctcccggggccctttctctgcggggccctgctaggcttcctgtgcctgagtgggctggccgtggaggtgaaggtacccacagagccgctgagcacgcccctggggaagacagccgagctgacctgcacctacagcacgtcggtgggagacagcttcgccctggagtggagctttgtgcagcctgggaaacccatctctgagtcccatccaatcctgtacttcaccaatggccatctgtatccaactggttctaagtcaaagcgggtcagcctgcttcagaacccccccacagtgggggtggccacactgaaactgactgacgtccacccctcagatactggaacctacctctgccaagtcaacaacccaccagatttctacaccaatgggttggggctaatcaaccttactgtgctggttccccccagtaatcccttatgcagtcagagtggacaaacctctgtgggaggctctactgcactgagatgcagctcttccgagggggctcctaagccagtgtacaactgggtgcgtcttggaacttttcctacaccttctcctggcagcatggttcaagatgaggtgtctggccagctcattctcaccaacctctccctgacctcctcgggcacctaccgctgtgtggccaccaaccagatgggcagtgcatcctgtgagctgaccctctctgtgaccgaaccctcccaaggccgagtggccggagctctgattggggtgctcctgggcgtgctgttgctgtcagttgctgcgttctgcctggtcaggttccagaaagagagggggaagaagcccaaggagacatatgggggtagtgaccttcggtgagcaggagggctggggggtggcgcaaggagggaggaaagggcttgagttaaaagcgggtgcctgcaaccctcaaactccgacatcattcagtgtgtttaggggcaggaggtgttgttcagccgtggaatttgctggtggcagcagtgtaacctgtgtatttgagggtacaggcaagcggtacagggtggagtggctggtccacaagctgtggcagggaagctgtttgcaggactgccctgcccctcctcatatttaataaagtttacttttctgttccgaa

SEQ ID NO: 23023 - DNA, 1818 bp, Homo sapiens
  misc_feature 1..1818: note = ENST00000368100
  source 1..1818: mol_type = unassigned DNA; mol_type = unassigned DNA
actcattgcaccttcctgccaccccaggcagtgtctgggccctcagctccccctccctccacctaccccctcacacccaccactacgaccccacgggatacccagcccagacggaggaaacaccgagcctagagacatgagagttggaggagcattccaccttctactcgtgtgcctgagcccagcactgctgtctgctgtgcggatcaacggggatggacaggaggtcctgtacctggcagaaggtgataatgtgaggctgggctgcccctacgtcctggaccctgaggactatggtcccaatgggctggacatcgagtggatgcaggtcaactcagaccccgcccaccaccgagagaacgtgttccttagttaccaggacaagaggatcaaccatggcagccttccccatctgcagcagagggtccgctttgcagcctcagacccaagccagtacgatgcctccatcaacctcatgaacctgcaggtatctgatacagccacttatgagtgccgggtgaagaagaccaccatggccacccggaaggtcattgtcactgtccaagcacgacctgcagtgcccatgtgctggacagagggccacatgacatatggcaacgatgtggtgctgaagtgctatgccagtgggggctcccagcccctctcctacaagtgggccaagatcagtgggcaccattacccctatcgagctgggtcttacacctcccagcacagctaccactcagagctgtcctaccaggagtccttccacagctccataaaccaaggcctgaacaatggggacctggtgttgaaggatatctccagagcagatgatgggctgtatcagtgcacagtggccaacaacgtgggctacagtgtttgtgtggtggaggtgaaggtctcagactcccggcgtataggcgtgatcatcggcatcgtcctgggctctctgctcgcgctgggctgcctggccgtaggcatctgggggctcgtctgctgctgctgcgggggctccggggctggcggcgcccgcggtgccttcggctacggcaacggcggcggggtcggcggaggggcctgcggcgacttggctagtgagatcagagaggacgccgtggcgcccgggtgcaaggccagcgggcgcggcagccgcgtcacccacctcctggggtacccgacgcagaacgtcagccgctccctgcgccgcaagtacgcgcctcccccctgcggcggccccgaggacgtggccctggcgccctgcaccgccgccgccgcctgcgaagcgggcccctccccggtctacgtcaaggtcaagagcgcggagccggctgactgcgccgaggggccggtgcagtgcaagaacggcctcttggtgtgagcgcgcgcgccgggccgggctgcgccccagccaggaggagggcgcggggctctctgtctgcagctggggacacgtcggggctggggacgacctcgctcgccccaggctgccaggcggctgggggtgaaggcatttccctaaggaaatgcgtagggaggcagagcctcctccccaaaagtgggaaggggcgggcgagggcggaggaaggcgatcctgagccttctccgcacccccgggaccgaaggcttgggggagagggagggaggaggaggctgagtgtcctagagcggctgaggccggaggcctggtgtccccagcctaagcagagggccccgggggccgggtgggtgggggtctgtctggacgaattgttctgtgtgtgaggtctgagctctgaggcagcagtgttagcacaataaagaaacattgagacgtga

SEQ ID NO: 23024 - DNA, 992 bp, Homo sapiens
  misc_feature 1..992: note = ENST00000404666
  source 1..992: mol_type = unassigned DNA; mol_type = unassigned DNA
caaccttcccgaggcgtcctgcccgggaagccagttcctgggttctgggctggctaggttggcagcgaatgaggcttaggcatcactgcctgaggccctcacttagcatgtcgacagccacagacttgtctggcggagtttctcctggtgcccacttaagtagtctcaagtttgttcaaagctggactcctcgacttggaaccaggagcagctggagatttgtcaatttagagctcatttgccacgggagacgctcttggtgtccccagcaccgaaggcaggatggggaagcagaatagcaaactggcccctgaagtgatggaggacctggtgaagagcacagagtttaatgagcatgaactcaagcagtggtacaaaggatttctcaaggactgtccaagtgggaggctaaatctcgaggaatttcagcagctctatgtgaagttctttccttatggagacgcctccaagtttgcccagcatgccttccgaaccttcgacaagaatggggacggcaccattgacttccgagagttcatctgcgctctgtccatcacctccaggggcagctttgagcagaagctgaactgggccttcaatatgtatgacctggatggtgatggcaagatcacccgagtggagatgctggagatcatcgaggctatctacaaaatggtaggcactgtgatcatgatgaaaatgaatgaggatggcctgacgcctgagcagcgagtagacaagattttcagcaagatggataagaacaaagatgaccagattacactggatgaattcaaagaagctgcaaagagcgacccttccattgtattacttctgcagtgcgacatccagaaatgagctgatgtcaatgctatggactgcacaaaagtctcaatgttccattcagtctgcagctattcacacacacacacacacacacacacacacacacacacacacacacaaatattgcttggactacctataaatgg

SEQ ID NO: 23025 - DNA, 576 bp, Homo sapiens
  misc_feature 1..576: note = ENST00000457525
  source 1..576: mol_type = unassigned DNA; mol_type = unassigned DNA
agtgcatacagaaggcgcttggctcagggtacacagggcaagaagcctcggatcccagctccctttaacacacattttttcaacgccgttctggaccgagactgtccggggcactgggtgctgcaggacccggctcccagtactcctagcagaagaccctctgatgaaatggcccatgacaaaatgaccaccataaccgttccttcagtaagccaggcaggatggggaagcagaatagcaaactggcccctgaagtgatggaggacctggtgaagagcacagagtttaatgagcatgaactcaagcagtggtacaaaggatttctcaaggactgtccaagtgggaggctaaatctcgaggaatttcagcagctctatgtgaagttctttccttatggagacgcctccaagtttgcccagcatgccttccgaaccttcgacaagaatggggacggcaccattgacttccgagagttcatctgcgctctgtccatcacctccaggggcagctttgagcagaagctgaactgggccttcaatatgtatgacctggatggtgatggcaagatcacccgag

SEQ ID NO: 23026 - DNA, 1892 bp, Homo sapiens
  misc_feature 1..1892: note = ENST00000295156
  source 1..1892: mol_type = unassigned DNA; mol_type = unassigned DNA
gcgcatccagctccagggaccctaggttttctatgggattcccaatctgcagcagagatttacccgagcgtgttgcggcagcggctgggcttgcaaggcgcgatccaagagggatttaagcagcccagagctccagagaaaaagagagcgagagagaaccacacacagagacggcttaagcgtttacccgaattaaatatatatttttaaaaagaactgttgagttttatcattttcgttaagtgaccgtgcgcagcgctgtaactgcaggatggggaagcagaatagcaaactggcccctgaagtgatggaggacctggtgaagagcacagagtttaatgagcatgaactcaagcagtggtacaaaggatttctcaaggactgtccaagtgggaggctaaatctcgaggaatttcagcagctctatgtgaagttctttccttatggagacgcctccaagtttgcccagcatgccttccgaaccttcgacaagaatggggacggcaccattgacttccgagagttcatctgcgctctgtccatcacctccaggggcagctttgagcagaagctgaactgggccttcaatatgtatgacctggatggtgatggcaagatcacccgagtggagatgctggagatcatcgaggctatctacaaaatggtaggcactgtgatcatgatgaaaatgaatgaggatggcctgacgcctgagcagcgagtagacaagattttcagcaagatggataagaacaaagatgaccagattacactggatgaattcaaagaagctgcaaagagcgacccttccattgtattacttctgcagtgcgacatccagaaatgagctgatgtcaatgctatggactgcacaaaagtctcaatgttccattcagtctgcagctattcacacacacacacacacacacacacacacacacacacacacacacaaatattgcttggactacctataaatggacttgcttcttgtgtttgaaacactcgtgtgcatgagaatgtcatttgctaatgaattttaaaagcatatataaaacaaaacaaacaacctgccacaatgtgatatgtgtaatatcatttcataaaaatccctcttcctccaaagcctgggcagaaatgtgctgcaaagagttatatgacttcttgttcatgttttgctaatgctcgtatctccttgattacataatgttagtagcactgagacccccatggtaatgtaacttaattataagctatgtcactaccctcctgtaaaatactattggacagacacagagggacccttggctcctgtgtctggtccacacaccacagaagcttgtattatcagtgaatataaatgtactacatttgcatgccttttgggtttgccttaattcttacctcatttgcatcctatcgatctggaaagagctgttttggatgaatgcagtataaaatgtaaaaaccctgctaaatgacttattgattaagtatatctatctatatatacatatacacaaagatattatttatcgaaagtaaaaaagatggaagtgtattggtttctgtttgaattttcaaaggcttccaatgtggtggcaataaatgtcccaaataaatttataacaattgattttccccctaattcttattttataattttaaaattgcagcagttgctagcaacaacttactaaatctactcttaaatatacaactttggaatttgaagaattaatgacaacaaaagggaaaaaagcaactttccaacttttcatccaggctcccaaaagagggacaacgaacatggcatgtgaaaagtaaaacagatttgttcattccgaaaaaaaaatgttcattctatgacaataaattttatctcagtgtga

SEQ ID NO: 23027 - DNA, 562 bp, Homo sapiens
  misc_feature 1..562: note = ENST00000451533
  source 1..562: mol_type = unassigned DNA; mol_type = unassigned DNA
aatctgcagcagagatttacccgagcgtgttgcggcagcggctgggcttgcaaggcgcgatccaagagggatttaagcagcccagagctccagagaaaaagagagcgagagagaaccacacacagagacggcttaagcgtttacccgaattaaatatatatttttaaaaagaactgttgagttttatcattttcgttaagtgaccgtgcgcagcgctgtaactgacttactggattatttccaggcaggatggggaagcagaatagcaaactggcccctgaagtgatggaggacctggtgaagagcacagagtttaatgagcatgaactcaagcagtggtacaaaggatttctcaaggactgtccaagtgggaggctaaatctcgaggaatttcagcagctctatgtgaagttctttccttatggagacgcctccaagtttgcccagcatgccttccgaaccttcgacaagaatggggacggcaccattgacttccgagagttcatctgcgctctgtccatcacctccaggggcagctttgagcagaagctgaactgggcct

SEQ ID NO: 23028 - DNA, 561 bp, Homo sapiens
  misc_feature 1..561: note = ENST00000483921
  source 1..561: mol_type = unassigned DNA; mol_type = unassigned DNA
gagatttacccgagcgtgttgcggcagcggctgggcttgcaaggcgcgatccaagagggatttaagcagcccagagctccagagaaaaagagagcgagagagaaccacacacagagacggcttaagcgtttacccgaattaaatatatatttttaaaaagaactgttgagttttatcattttcgttaagtgaccgtgcgcagcgctgtaactgacttactggattatttccagaaggagtctgcctctgtcgcccaggctggagtgcggtggcgcgatctcggccccctgcaagctccgcctcccgagttcactccattctcctgcctcagcctccggagtagctgggactacaggcggccgccactacgccaggctaattttttttgtatttttagtagagacggggtttcactgtgttagccaggatggtctcgctctcctgacctcgtgatccgcctgcctcggcctcccaaagtgctgggattacaggcgtgagccaccatgaccggcccaagtctcacttttttaacgtcactttgctataggttttttggtatga

SEQ ID NO: 23029 - DNA, 2725 bp, Homo sapiens
  misc_feature 1..2725: note = ENST00000406397
  source 1..2725: mol_type = unassigned DNA; mol_type = unassigned DNA
agactagatttaagacaggtgaaactgagatgctttcttagtttgtcttagacagatttaagtagctaattgaccgattgtgaagttttccggttgctgataaaactattgagcgggtacagtcgagtagcaacctgtcatccgtgggattggtgcaccatttttctcactgtggaagggcagcaaaggtgtttgctaagtaaaactgagtggatgagattggtatggaaatcatggttgatctctgagcgggatgttagtgtttaagatccacggagtcaggcgcaaaatgagcacatttctctcagtattcagaaatgagtagataatttttttcgtctttgatttttgtcacaatggtgaatgggcagaaaagggaaagatgctctactgcactgtcgattttgaacggagtcacaggctcggtcgctgaatggggactgtcagacccaaactagttacctgcctttgcattccgtgttcgccatccggaatctggggttaaaaaatgtaaatcaaggcaggatggggaagcagaatagcaaactggcccctgaagtgatggaggacctggtgaagagcacagagtttaatgagcatgaactcaagcagtggtacaaaggatttctcaaggactgtccaagtgggaggctaaatctcgaggaatttcagcagctctatgtgaagttctttccttatggagacgcctccaagtttgcccagcatgccttccgaaccttcgacaagaatggggacggcaccattgacttccgagagttcatctgcgctctgtccatcacctccaggggcagctttgagcagaagctgaactgggccttcaatatgtatgacctggatggtgatggcaagatcacccgagtggagatgctggagatcatcgaggctatctacaaaatggtaggcactgtgatcatgatgaaaatgaatgaggatggcctgacgcctgagcagcgagtagacaagattttcagcaagatggataagaacaaagatgaccagattacactggatgaattcaaagaagctgcaaagagcgacccttccattgtattacttctgcagtgcgacatccagaaatgagctgatgtcaatgctatggactgcacaaaagtctcaatgttccattcagtctgcagctattcacacacacacacacacacacacacacacacacacacacacacacaaatattgcttggactacctataaatggacttgcttcttgtgtttgaaacactcgtgtgcatgagaatgtcatttgctaatgaattttaaaagcatatataaaacaaaacaaacaacctgccacaatgtgatatgtgtaatatcatttcataaaaatccctcttcctccaaagcctgggcagaaatgtgctgcaaagagttatatgacttcttgttcatgttttgctaatgctcgtatctccttgattacataatgttagtagcactgagacccccatggtaatgtaacttaattataagctatgtcactaccctcctgtaaaatactattggacagacacagagggacccttggctcctgtgtctggtccacacaccacagaagcttgtattatcagtgaatataaatgtactacatttgcatgccttttgggtttgccttaattcttacctcatttgcatcctatcgatctggaaagagctgttttggatgaatgcagtataaaatgtaaaaaccctgctaaatgacttattgattaagtatatctatctatatatacatatacacaaagatattatttatcgaaagtaaaaaagatggaagtgtattggtttctgtttgaattttcaaaggcttccaatgtggtggcaataaatgtcccaaataaatttataacaattgattttccccctaattcttattttataattttaaaattgcagcagttgctagcaacaacttactaaatctactcttaaatatacaactttggaatttgaagaattaatgacaacaaaagggaaaaaagcaactttccaacttttcatccaggctcccaaaagagggacaacgaacatggcatgtgaaaagtaaaacagatttgttcattccgaaaaaaaaatgttcattctatgacaataaattttatctcagtgtgactttggtgctaacaacgtatgttcagtgcaactacgtggagctgtgcacacacagcaggtaggctgcaggtgtcccccaacataagtcagtaggaaagaagacatctgtcttcccaaatctaaagtaggcaaaaaataacagaagtagctatttttaataacagaacagaactctgactcttttgatcttgaaggaggcagaagagattccatcaaaacctctaaaagcaggtttgcattttcagaacatgcccccctagagagttgagttttttacacagcactacccggtagtactttctctgatgatgggaaggtctacatctgcacagcacgctagctataactgcacatatggctactgagcacttcaagtatggctagcgtgactaaggaactgaattttatactgtaattaagtgtaatttgccacatatagctagtggctttagtaacagacagtttagtgctatattatttattcaagtactttttatcaaattcgttttttaccgaattcgttttttaccattctttatttgtcttaggatcattacataacactaaactagggtctaa

SEQ ID NO: 23030 - DNA, 1488 bp, Homo sapiens
  misc_feature 1..1488: note = ENST00000335523
  source 1..1488: mol_type = unassigned DNA; mol_type = unassigned DNA
agcccgagccggagccgatccgagcccacgcggccgccgcctctccgctcccgggcccccgccgccaccgcgccccccgcgggagatggaacagcggaaccggctcggtgccctcggatacctgccgcctctgctgctgcatgccctgctgctcttcgtggccgacgctgcattcacagaagtccccaaagatgtgacagtacgggagggagacgacatcgaaatgccctgcgcgttccgggccagcggagccacctcgtattcgctggagattcagtggtggtacctcaaggagccaccccgggagctgctgcacgagctggcgctcagcgtgccgggcgcccggagcaaggtaacaaataaggatgcaactaaaatcagcaccgtacgcgtccagggcaatgacatctcacaccggcttcggctgtctgccgtgcggctgcaggacgagggcgtgtacgagtgccgcgtgtcggactacagcgacgacgacacgcaggagcacaaggcccaggcgatgctgcgcgtgctctcgcgcttcgcgccgcccaacatgcaggccgccgaggccgtgtcccacatccagagcagcggcccgcgtcgccacggcccagccagcgccgccaacgccaacaacgcgggcgccgcgagccgtaccacctccgagcccggccgcggcgacaagagcccgccgcccgggagccctcccgccgccatcgatcccgcagtccccgaggccgcggcagcctcggcggcccacacgcccaccaccacagtcgcggcagctgctgctgcctcgtcagcgtcgccgccatcgggacaggcggtcctgctgcgccagaggcacggctcgggcaccggccgtagctacaccacagacccactcttgtccctgctcctgttagctctgcataagttcctgcgcctgctcttgggacattgacagacaagaccaacccgagcatctcagaggccgcacatgacctgcccggggccctcggtgaggaccatgtcgctggatggacacagagagactgagagacgcatgaaaaagtccacatggaaaataaataaatcatatttttgggaaagttacacaaatgtagaacacctaaaataatgcatctagtttccaaataatttggagtttggcccatgcagtctgcatgggaatcaatgatttctctacttcaatgtagttttcttttctacactttccctccaagtcttcattttgcacgaactgttgagcagttatctttaggataatatgtacaaatgttggggtcaaagccttttgacaaagcaaaatatttttagtagattattgtgtttaggatttttttttaatttactttttttctttgggggcttttcttttttattaaattatttcttttgaggcattttgattaaaaaagacacatcttatcataattaaaattcactgtcaataatatttatttttaaataaagattggaaacaag

SEQ ID NO: 23031 - DNA, 2149 bp, Homo sapiens
  misc_feature 1..2149: note = ENST00000226218
  source 1..2149: mol_type = unassigned DNA; mol_type = unassigned DNA
ctttgttcttttatgctaaaaaataaaattccccagagtgcttacaatctctcctcccactccctttttcctgccctaaataaataatggcgaatgagcacccagccagggatgtgtctgatcaaacaatcatggatcaatagctatgtttggagaaggaatttgtggctgctccagctactgggcattttgtctggtccagttcatgtaatctcccaacaccccatgaagcaaggctttgttaatcctattttactgaaaatgaactaagactcagagagataaagctgttgcccaatgagccttctttctgccctccagatccacggtgctaattccccttccgatgacctaatgattctgagcttggcaaaggtcttatctcccagctcgcccaggcccagtgttccaggaatgtgacctttgctgcagcagccgctggagggggcagaggggatgggctggaggttgagcaaacagagcagcagaaaaggcagttcctcttctccagtgccctccttccctgtctctgcctctccctcccttcctcaggcatcagagcggagacttcagggagaccagagcccagcttgccaggcactgagctagaagccctgccatggcacccctgagaccccttctcatactggccctgctggcatgggttgctctggctgaccaagagtcatgcaagggccgctgcactgagggcttcaacgtggacaagaagtgccagtgtgacgagctctgctcttactaccagagctgctgcacagactatacggctgagtgcaagccccaagtgactcgcggggatgtgttcactatgccggaggatgagtacacggtctatgacgatggcgaggagaaaaacaatgccactgtccatgaacaggtggggggcccctccctgacctctgacctccaggcccagtccaaagggaatcctgagcagacacctgttctgaaacctgaggaagaggcccctgcgcctgaggtgggcgcctctaagcctgaggggatagactcaaggcctgagacccttcatccagggagacctcagcccccagcagaggaggagctgtgcagtgggaagcccttcgacgccttcaccgacctcaagaacggttccctctttgccttccgagggcagtactgctatgaactggacgaaaaggcagtgaggcctgggtaccccaagctcatccgagatgtctggggcatcgagggccccatcgatgccgccttcacccgcatcaactgtcaggggaagacctacctcttcaagggtagtcagtactggcgctttgaggatggtgtcctggaccctgattacccccgaaatatctctgacggcttcgatggcatcccggacaacgtggatgcagccttggccctccctgcccatagctacagtggccgggagcgggtctacttcttcaaggggaaacagtactgggagtaccagttccagcaccagcccagtcaggaggagtgtgaaggcagctccctgtcggctgtgtttgaacactttgccatgatgcagcgggacagctgggaggacatcttcgagcttctcttctggggcagaacctctgctggtaccagacagccccagttcattagccgggactggcacggtgtgccagggcaagtggacgcagccatggctggccgcatctacatctcaggcatggcaccccgcccctccttggccaagaaacaaaggtttaggcatcgcaaccgcaaaggctaccgttcacaacgaggccacagccgtggccgcaaccagaactcccgccggccatcccgcgccacgtggctgtccttgttctccagtgaggagagcaacttgggagccaacaactatgatgactacaggatggactggcttgtgcctgccacctgtgaacccatccagagtgtcttcttcttctctggagacaagtactaccgagtcaatcttcgcacacggcgagtggacactgtggaccctccctacccacgctccatcgctcagtactggctgggctgcccagctcctggccatctgtaggagtcagagcccacatggccgggccctctgtagctccctcctcccatctccttcccccagcccaataaaggtcccttagccccgagtttaaaa

SEQ ID NO: 23032 - DNA, 609 bp, Homo sapiens
  misc_feature 1..609: note = ENST00000539746
  source 1..609: mol_type = unassigned DNA; mol_type = unassigned DNA
tggatgcagccttggccctccctgcccatagctacagtggccgggagcgggtctacttcttcaagggtactcagggggtggtgggagactgagcaggcagtggagcagtcttggattcctttcacatttcactggggacaggcctcagcatgtgcccacccctgacccccacctcatgctgggagatcctaacttcaacagcctctgggatctccagtcttgccctggcccagccctcctaatgcccaccaccctgctcctcagggaaacagtactgggagtaccagttccagcaccagcccagtcaggaggagtgtgaaggcagctccctgtcggctgtgtttgaacactttgccatgatgcagcgggacagctgggaggacatcttcgagcttctcttctggggcagaacctctgctggtaccagacagccccagttcattagccgggactggcacggtgtgccagggcaagtggacgcagccatggctggccgcatctacatctcaggcatggcaccccgcccctccttggccaagaaacaaaggtttaggcatcgcaaccgcaaaggctaccgttcacaacgaggccacagccgtggccgcaacc

SEQ ID NO: 23033 - DNA, 501 bp, Homo sapiens
  misc_feature 1..501: note = ENST00000542029
  source 1..501: mol_type = unassigned DNA; mol_type = unassigned DNA
agaatgagatcatgtctggcctgttgcaagaaccagaatgaaggatggagcagaagttggattggggcggcaagaagggagcatcagagcggagacttcagggagaccagagcccagcttgccaggcactgagctagaagccctgccatggcacccctgagaccccttctcatactggccctgctggcatgggttgctctggctgaccaagagtcatgcaagggccgctgcactgagggcttcaacgtggacaagaagtgccagtgtgacgagctctgctcttactaccagagctgctgcacagactatacggctgagtgcaagccccaagtgactcgcggggatgtgttcactatgccggaggatgagtacacggtctatgacgatggcgaggagaaaaacaatgccactgtccatgaacaggtggggggcccctccctgacctctgacctccaggcccagtccaaagggaatcctgagcagacacctgttctgaaacct

SEQ ID NO: 23034 - DNA, 4388 bp, Homo sapiens
  misc_feature 1..4388: note = ENST00000456829
  source 1..4388: mol_type = unassigned DNA; mol_type = unassigned DNA
agtcttgtagtcgctactttataaccggtccctagaagggggcggttctttccggaaattatgactgcagctgttttcactccgctgtgactcagagcgctccgggctgcaggagaggaagcccagcctgttctaccagagaacttgcccaggtcagaggtctgcgtagaagcccttttctgagcatcctctcctctcctcacacctgccactgtcctctgcgttgctgtcgaattaaatcttgcatcaccatggtgcacttctgtggcctactcaccctccaccgggagccagtgccgctgaagagtatctctgtgagcgtgaacatttacgagtttgtggctggtgtgtctgcaactttgaactacgagaatgaggagaaagttcctttggaggccttctttgtgttccccatggatgaagactctgctgtttacagctttgaggccttggtggatgggaagaaaattgtagcagaattacaagacaagatgaaggcccgcaccaactatgagaaagccatctcccagggccaccaggccttcttattggagggggacagcagctccagggatgtcttctcttgcaatgtgggtaacctccaacctgggtcgaaggcggcagtcaccctgaagtatgtgcaggagctgcctctggaagcagatggggctctgcgctttgtgctcccagctgtcctgaatcctagataccagttctctgggtcgtctaaggacagttgccttaatgtgaagactcctatagtccctgtggaggacctgccctacacactcagcatggtcgccaccatagattcccagcatggcattgagaaggtccaatccaactgccccttgagtcctaccgagtacctaggagaggacaagacttctgctcaggtttccctggctgctggacacaagtttgatcgggacgtggaactcctgatttactacaatgaggtgcatacccccagcgtggttttggagatggggatgcctaacatgaagccaggtcatttgatgggagatccatctgcaatggtgagtttctatccaaatatcccagaagatcaaccatcaaatacctgtggagagtttatctttctcatggaccgctcgggaagtatgcagagccccatgagtagccaggatacatctcagctgcgaatacaggcagccaaggaaacactgattttgctgctgaagagtttacctataggctgttatttcaacatctatggatttggctcttcctatgaggcatgctttccggagagtgtgaagtacactcagcaaacaatggaggaggctctggggagagtgaagcttatgcaggccgacctagggggcactgaaatcttggcaccactccagaacatttacaggggaccctccatcccaggccaccccctacagctttttgtctttacagatggagaagttacagacacgtttagtgtaattaaagaagttaggatcaacagacagaaacacaggtgtttctcatttggtattggagaaggcacctccaccagcctaataaaaggtattgcccgggcatcagggggcacctcagaatttatcacaggcaaagacaggatgcagtccaaggctctcaggactctgaaacgctctctgcagcctgtggtagaggatgtctctctgagctggcatttgcctcctggtctgtctgctaaaatgctttccccagaacagactgtcatctttaggggtcagagattaatcagctatgcccagctgaccgggaggatgccagcagcagagacaacaggagaagtatgcctcaaatatacactccagggcaagacttttgaggataaggtgacatttcctctacaacccaagcctgatgtcaacctcaccattcaccgccttgctgccaagtccttgctccagaccaaggacatgggcctcagggagactccagcaagtgataaaaaagatgcattgaaccttagccttgagtctggtgtcataagctccttcacagctttcattgctatcaataaggagctcaacaagccggttcaggggcctctggctcatagggacgtcccaaggccaattctgttgggtgcttctgccccattgaagataaaatgccaatcaggttttcgaaaggccttacactctgaccgtcctccttctgcatctcagcccagaggggaacttatgtgttataaggccaagacattccagatggacgattacagtctctgtgggttgataagtcacaaggaccagcacagtccaggctttggagagaatcaccttgtgcagctgatttaccaccaaaatgcaaatggttcctgggatctgaatgaagatctagccaagatcctaggtatgagtttggaagaaataatggctgcacagcctgccgagcttgtggattcctcaggctgggccaccatcctggccgtgatctggctgcacagcaatggtaaggacttgaagtgtgaatgggagcttctggaaaggaaggccgtggcctggatgcgtgcccatgcaggctccaccatgccttcggttgtgaaagctgctattactttcctgaagtcatctgtggatcctgctatctttgccttttgaagataccatccagaaaaagaagtgcctttaatttgctactgtcatttcctctagtatcacttttgctgtgatgatgtgttcttgtgtattataactctttattttttgccataaaagtaaaggatgcttactccacttcgcttctctgctccaggttcactttggatatgatctttcttttcccaacatatgccctcagaaaagtgacagtggtcccagaacctattccctttcttgagggagttcaaaacattcataggcagtaatgttcctcccagggtttccagggaaacaacatgaaaaacaggtgacatgaactacagactaaagattgcagcatttatgttagagaatgcttgaattagagaattttctgcattatctttgtctgttcactttctatcttatatacttatcagggccatactggtaagcttgcgtaggaggagttagagggaagttgaaagccaacatctggatcaatgtaatgtcaagatcacaaagacagagactgcaggggtccactgtgagaggtgacactgttggggaccttcctgattcattcttcttgggctttgctagcctgtacaacctacatgtcttttcttccactgcctgaaagacttgggttgaactataactgttggagagagatgttcctctttaatcatgaaacaccttaagaagtctataatgcaatccttagtcctaccctgaacctatgtgtcctctaagtcaggccctgatctagtgcagtaaagggaagggtgggcttaatgggagctttgcctgggacctgaacctggagcacttaccgcattaggaagaaaggagctccccgtaatcgttcctgacccttgtgtctcatataccctatcctggtggaaatgaccctatttgatatgctgtcccttaaaataacttgtatcaatattaaaatgactatttctaccctttgatgagtaaatgcagtggttcttaaagtggtctcgtctccctaccccacaatattttggtactgccactttgggaagccaaactaggatagtaaattgaccggaacacagttgtggaaatttgacctgaagttagtgaaataaaacttagtagggaaaaaaagcttagcaagaggtctactcctccatagattcatttattgaacttacattggttttattgtcccttgttttctgttccagcttttctgatgcctccactgttcccatggtatcctgaccctctatcttctgttgtaggctgacttcttttatatgaagcaagtaaaggatactaataagaataccactgtagaatcctgaccatacccttaaatagttatgtgatgatgggcaaatgatttcaccctcaggcacttaatatcctcatctgtaaaactaagggattaaactagaactttattaacactttcgagttccactcagaattcctagaggaacatcggtgacttttcactcagaaagtgggtggactaggcctgagtttctttaagttgttgagttacctggtattaggaagacttgtgtgacttgcatagtggactctaatctctcagtctttcttccaagtttgtttatgctgaatgtgatctgcggaacagggttgttagaaatgcagctttttagaaatgcagaattttaatcgataccaggaactactttatttaacaaggctcccaggtatcatgcatgcacattgaagtttgaaaagtaaaggcttaatattttcatgaaataggcttatatccaagcctgccat

SEQ ID NO: 23035 - DNA, 1863 bp, Homo sapiens
  misc_feature 1..1863: note = ENST00000361352
  source 1..1863: mol_type = unassigned DNA; mol_type = unassigned DNA
cggttctttccggaaattatgactgcagctgttttcactccgctgtgactcagagcgctccgggctgcaggagaggaagaaatcttgcatcaccatggtgcacttctgtggcctactcaccctccaccgggagccagtgccgctgaagagtatctctgtgagcgtgaacatttacgagtttgtggctggtgtgtctgcaactttgaactacgagaatgaggagaaagttcctttggaggccttctttgtgttccccatggatgaagactctgctgtttacagctttgaggccttggtggatgggaagaaaattgtagcagaattacaagacaagatgaaggcccgcaccaactatgagaaagccatctcccagggccaccaggccttcttattggagggggacagcagctccagggatgtcttctcttgcaatgtgggtaacctccaacctgggtcgaaggcggcagtcaccctgaagtatgtgcaggagctgcctctggaagcagatggggctctgcgctttgtgctcccagctgtcctgaatcctagataccagttctctgggtcgtctaaggacagttgccttaatgtgaagactcctatagtccctgtggaggacctgccctacacactcagcatggtcgccaccatagattcccagcatggcattgagaaggtccaatccaactgccccttgagtcctaccgagtacctaggagaggacaagacttctgctcaggtttccctggctgctggacacaagtttgatcgggacgtggaactcctgatttactacaatgaggtgcatacccccagcgtggttttggagatggggatgcctaacatgaagccaggtcatttgatgggagatccatctgcaatggtgagtttctatccaaatatcccagaagatcaaccatcaaatacctgtggagagtttatctttctcatggaccgctcgggaagtatgcagagccccatgagtagccaggatacatctcagctgcgaatacaggcagccaaggaaacactgattttgctgctgaagagtttacctataggctgttatttcaacatctatggatttggctcttcctatgaggcatgctttccggagagtgtgaagtacactcagcaaacaatggaggaggctctggggagagtgaagcttatgcaggccgacctagggggcactgaaatcttggcaccactccagaacatttacaggggaccctccatcccaggccaccccctacagctttttgtctttacagatggagaagttacagacacgtttagtgtaattaaagaagttaggatcaacagacagaaacacaggtaggaagaaaatgtgatttccgggtgattggtgctgagtagtgacacacagactctagtgctacatgatgccggtgttgaccttccttcaagaggaccaaatgatttcagaatttagttttagcagctgaaaatttatttctccctgtaaacgttaaaaacagttttccaaataacatcaacaacacagcaaaaccattgtttcttattctttctaaactacaacgaacacaagaattgaatagtaagatgttaattttttttactataaacatttttagagaagtaaaacatgctgaaaactacacaaattataagcatacaactggactcattatcacagtgaatgcactgtgtgatcgccacataggtaaaaactggaatggtcgtaggcctctccatctgtacccttttccatcatgtcctattccctgtcactacacactaaaactttcctgacttacaataccatgggttatttatgcttgtttttgaatgaaaataaataagttatacagtatgctt

SEQ ID NO: 23036 - DNA, 1978 bp, Homo sapiens
  misc_feature 1..1978: note = ENST00000449321
  source 1..1978: mol_type = unassigned DNA; mol_type = unassigned DNA
cggttctttccggaaattatgactgcagctgttttcactccgctgtgactcagagcgctccgggctgcaggagaggaagcccagcctgttctaccagagaacttgcccaggtcagaggtctgcgtagaagcccttttctgagcatcctctcctctcctcacacctgccactgtcctctgcgttgctgtcgaattaaatcttgcatcaccatggtgcacttctgtggcctactcaccctccaccgggagccagtgccgctgaagagtatctctgtgagcgtgaacatttacgagtttgtggctggtgtgtctgcaactttgaactacgagaatgaggagaaagttcctttggaggccttctttgtgttccccatggatgaagactctgctgtttacagctttgaggccttggtggatgggaagaaaattgtagcagaattacaagacaagatgaaggcccgcaccaactatgagaaagccatctcccagggccaccaggccttcttattggagggggacagcagctccagggatgtcttctcttgcaatgtgggtaacctccaacctgggtcgaaggcggcagtcaccctgaagtatgtgcaggagctgcctctggaagcagatggggctctgcgctttgtgctcccagctgtcctgaatcctagataccagttctctgggtcgtctaaggacagttgccttaatgtgaagactcctatagtccctgtggaggacctgccctacacactcagcatggtcgccaccatagattcccagcatggcattgagaaggtccaatccaactgccccttgagtcctaccgagtacctaggagaggacaagacttctgctcaggtttccctggctgctggacacaagtttgatcgggacgtggaactcctgatttactacaatgaggtgcatacccccagcgtggttttggagatggggatgcctaacatgaagccaggtcatttgatgggagatccatctgcaatggtgagtttctatccaaatatcccagaagatcaaccatcaaatacctgtggagagtttatctttctcatggaccgctcgggaagtatgcagagccccatgagtagccaggatacatctcagctgcgaatacaggcagccaaggaaacactgattttgctgctgaagagtttacctataggctgttatttcaacatctatggatttggctcttcctatgaggcatgctttccggagagtgtgaagtacactcagcaaacaatggaggaggctctggggagagtgaagcttatgcaggccgacctagggggcactgaaatcttggcaccactccagaacatttacaggggaccctccatcccaggccaccccctacagctttttgtctttacagatggagaagttacagacacgtttagtgtaattaaagaagttaggatcaacagacagaaacacaggtaggaagaaaatgtgatttccgggtgattggtgctgagtagtgacacacagactctagtgctacatgatgccggtgttgaccttccttcaagaggaccaaatgatttcagaatttagttttagcagctgaaaatttatttctccctgtaaacgttaaaaacagttttccaaataacatcaacaacacagcaaaaccattgtttcttattctttctaaactacaacgaacacaagaattgaatagtaagatgttaattttttttactataaacatttttagagaagtaaaacatgctgaaaactacacaaattataagcatacaactggactcattatcacagtgaatgcactgtgtgatcgccacataggtaaaaactggaatggtcgtaggcctctccatctgtacccttttccatcatgtcctattccctgtcactacacactaaaactttcctgacttacaataccatgggttatttatgcttgtttttgaatgaaaataaataagttatacagtatgctt

SEQ ID NO: 23037 - DNA, 2691 bp, Homo sapiens
  misc_feature 1..2691: note = ENST00000392744
  source 1..2691: mol_type = unassigned DNA; mol_type = unassigned DNA
gactcagagcgctccgggctgcaggagaggaaggtaggggaccaagctaccggtgcagggcctggatccaacccctgctctggaagactgagagctccacattctagctccctttccccagtccccaaatttgtaggggctccttgaattgcacgccccatgggtggaggatttcatcctgatgtatgatccccaggaaggttcctgcaagtttggcagtttaggggaatcttttggaggttgaaggagggatttagccatctcctaatctcaaggcccttcttcctactttccttctcttttactttactttttttcccgctttctttctttgatatagacaattgatgttttctcagtttcaggatagtgtaagctgaggaaatgaggctgtaagcctcatctactccaatcagttgcagcccctaagcccttctctatagaaatgtaagagaccgacgcagtctcttctgtaaatacgtggacattggaaatctaggactgaatggaaaggttaaatcaatctctgattttatccaagccccacttcttaccccaaatctcctccttgtctggttccgagttctccacttcacccctgccacaggccgcaggggtgtgtgtggccggtggtgccacccagctcccctcccaccctcctagctgctgagcggctggtgctgggactctgcattcctgaagcagctacctggctaggccggaagccttgtattctcccagctgcctcagattcatggctttcagcttggtggccagtctctacctaagccttgcaagttgcctttctgaagtgccatcctgagagacagaactaattctgacccaaactaattttgtttgtactgggaagagtgggggcaagggtgcagaatagcaagttttcctcaacggaggatttgttctgagcttagaatcaggaagcgaaggctatttccttgtaggggtgccctttgcgtctctctctcttttactctagccaccttggtgagtattgcccagcctgagagcttctctttcagctgttttactcctgtgtgagtctcctgctttaggctctctgcttaatgtgttattagaaattcttccctcccccagcccagcctgttctaccagagaacttgcccaggtcagaggtctgcgtagaagcccttttctgagcatcctctcctctcctcacacctgccactgtcctctgcgttgctgtcgaattgttccaacttcctaactccaacattaaccctttgaatgtattcttatgccagagaaaggcacataaagtactggtgtttgaacagataacttccaacatgtcctctgtttgtgatatgtcttttctgcagaaatcttgcatcaccatggtgcacttctgtggcctactcaccctccaccgggagccagtgccgctgaagagtatctctgtgagcgtgaacatttacgagtttgtggctggtgtgtctgcaactttgaactacgagaatgaggagaaagttcctttggaggccttctttgtgttccccatggatgaagactctgctgtttacagctttgaggccttggtggatgggaagaaaattgtagcagaattacaagacaagatgaaggcccgcaccaactatgagaaagccatctcccagggccaccaggccttcttattggagggggacagcagctccagggatgtcttctcttgcaatgtgggtaacctccaacctgggtcgaaggcggcagtcaccctgaagtatgtgcaggagctgcctctggaagcagatggggctctgcgctttgtgctcccagctgtcctgaatcctagataccagttctctgggtcgtctaaggacagttgccttaatgtgaagactcctatagtccctgtggaggacctgccctacacactcagcatggtcgccaccatagattcccagcatggcattgagaaggtccaatccaactgccccttgagtcctaccgagtacctaggagaggacaagacttctgctcaggtttccctggctgctggacacaagtttgatcgggacgtggaactcctgatttactacaatgaggtgcatacccccagcgtggttttggagatggggatgcctaacatgaagccaggtcatttgatgggagatccatctgcaatggtgagtttctatccaaatatcccagaagatcaaccatcaaatacctgtggagagtttatctttctcatggaccgctcgggaagtatgcagagccccatgagtagccaggatacatctcagctgcgaatacaggcagccaaggaaacactgattttgctgctgaagagtttacctataggctgttatttcaacatctatggatttggctcttcctatgaggcatgctttccggagagtgtgaagtacactcagcaaacaatggaggaggctctggggagagtgaagcttatgcaggccgacctagggggcactgaaatcttggcaccactccagaacatttacaggggaccctccatcccaggccaccccctacagctttttgtctttacagatggagaagttacagacacgtttagtgtaattaaagaagttaggatcaacagacagaaacacaggtaggaagaaaatgtgatttccgggtgattggtgctgagtagtgacacacagactctagtgctacatgatg

SEQ ID NO: 23038 - DNA, 540 bp, Homo sapiens
  misc_feature 1..540: note = ENST00000533623
  source 1..540: mol_type = unassigned DNA; mol_type = unassigned DNA
agaaatcttgcatcaccatggtgcacttctgtggcctactcaccctccaccgggagccagtgccgctgaagagtatctctgtgagcgtgaacatttacgagtttgtggctggtgtgtctgcaactttgaactacgagaatgaggagaaagttcctttggaggccttctttgtgttccccatggatgaagactctgctgtttacagctttgaggccttggtggatgggaagaaaattgtagcagaattacaagacaagatgaaggtagtagagattacctcctcccttcttattacattacctcctcccttcttatttccttaatgcatactctttatgatctctactaaatgtaccttcacaaaacatgctgatgttgaaagctctttcttccactcttttctaactgccatttttctaaaatcatttggggaaagaaatcaatcagaggcattcagagtatagctgtgattagacaagaccaatcacacagtcgctctgcactgctcgtctctttttcagccatgtcaccttggatgtt

SEQ ID NO: 23039 - DNA, 3419 bp, Homo sapiens
  misc_feature 1..3419: note = ENST00000392748
  source 1..3419: mol_type = unassigned DNA; mol_type = unassigned DNA
cggttctttccggaaattatgactgcagctgttttcactccgctgtgactcagagcgctccgggctgcaggagaggaagaaatcttgcatcaccatggtgcacttctgtggcctactcaccctccaccgggagccagtgccgctgaagagtatctctgtgagcgtgaacatttacgagtttgtggctggtgtgtctgcaactttgaactacgagaatgaggagaaagttcctttggaggccttctttgtgttccccatggatgaagactctgctgtttacagctttgaggccttggtggatgggaagaaaattgtagcagaattacaagacaagatgaaggcccgcaccaactatgagaaagccatctcccagggccaccaggccttcttattggagggggacagcagctccagggatgtcttctcttgcaatgtgggtaacctccaacctgggtcgaaggcggcagtcaccctgaagtatgtgcaggagctgcctctggaagcagatggggctctgcgctttgtgctcccagctgtcctgaatcctagataccagttctctgggtcgtctaaggacagttgccttaatgtgaagactcctatagtccctgtggaggacctgccctacacactcagcatggtcgccaccatagattcccagcatggcattgagaaggtccaatccaactgccccttgagtcctaccgagtacctaggagaggacaagacttctgctcaggtttccctggctgctggacacaagtttgatcgggacgtggaactcctgatttactacaatgaggtgcatacccccagcgtggttttggagatggggatgcctaacatgaagccaggtcatttgatgggagatccatctgcaatggtgagtttctatccaaatatcccagaagatcaaccatcaaatacctgtggagagtttatctttctcatggaccgctcgggaagtatgcagagccccatgagtagccaggatacatctcagctgcgaatacaggcagccaaggaaacactgattttgctgctgaagagtttacctataggctgttatttcaacatctatggatttggctcttcctatgaggcatgctttccggagagtgtgaagtacactcagcaaacaatggaggaggctctggggagagtgaagcttatgcaggccgacctagggggcactgaaatcttggcaccactccagaacatttacaggggaccctccatcccaggccaccccctacagctttttgtctttacagatggagaagttacagacacgtttagtgtaattaaagaagttaggatcaacagacagaaacacaggtgtttctcatttggtattggagaaggcacctccaccagcctaataaaaggtattgcccgggcatcagggggcacctcagaatttatcacaggcaaagacaggatgcagtccaaggctctcaggactctgaaacgctctctgcagcctgtggtagaggatgtctctctgagctggcatttgcctcctggtctgtctgctaaaatgctttccccagaacagactgtcatctttaggggtcagagattaatcagctatgcccagctgaccgggaggatgccagcagcagagacaacaggagaagtatgcctcaaatatacactccagggcaagacttttgaggataaggtgacatttcctctacaacccaagcctgatgtcaacctcaccattcaccgccttgctgccaagtccttgctccagaccaaggacatgggcctcagggagactccagcaagtgataaaaaagatgcattgaaccttagccttgagtctggtgtcataagctccttcacagctttcattgctatcaataaggagctcaacaagccggttcaggggcctctggctcatagggacgtcccaaggccaattctgttgggtgcttctgccccattgaagataaaatgccaatcaggttttcgaaaggccttacactctgaccgtcctccttctgcatctcagcccagaggggaacttatgtgttataaggccaagacattccagatggacgattacagtctctgtgggttgataagtcacaaggaccagcacagtccaggctttggagagaatcaccttgtgcagctgatttaccaccaaaatgcaaatggttcctgggatctgaatgaagatctagccaagatcctaggtatgagtttggaagaaataatggctgcacagcctgccgagcttgtggattcctcaggctgggccaccatcctggccgtgatctggctgcacagcaatggtaaggacttgaagtgtgaatgggagcttctggaaaggaaggccgtggcctggatgcgtgcccatgcaggctccaccatgccttcggttgtgaaagctgctattactttcctgaagtcatctgtggatcctgctatctttgccttttgaagataccatccagaaaaagaagtgcctttaatttgctactgtcatttcctctagtatcacttttgctgtgatgatgtgttcttgtgtattataactctttattttttgccataaaagtaaaggatgcttactccacttcgcttctctgctccaggttcactttggatatgatctttcttttcccaacatatgccctcagaaaagtgacagtggtcccagaacctattccctttcttgagggagttcaaaacattcataggcagtaatgttcctcccagggtttccagggaaacaacatgaaaaacaggtgacatgaactacagactaaagattgcagcatttatgttagagaatgcttgaattagagaattttctgcattatctttgtctgttcactttctatcttatatacttatcagggccatactggtaagcttgcgtaggaggagttagagggaagttgaaagccaacatctggatcaatgtaatgtcaagatcacaaagacagagactgcaggggtccactgtgagaggtgacactgttggggaccttcctgattcattcttcttgggctttgctagcctgtacaacctacatgtcttttcttccactgcctgaaagacttgggttgaactataactgttggagagagatgttcctctttaatcatgaaacaccttaagaagtctataatgcaatccttagtcctaccctgaacctatgtgtcctctaagtcaggccctgatctagtgcagtaaagggaagggtgggcttaatgggagctttgcctgggacctgaacctggagcacttaccgcattaggaagaaaggagctccccgtaatcgttcctgacccttgtgtctcatataccctatcctggtggaaatgaccctatttgatatgctgtcccttaaaataacttgtatcaatattaaaatgactatttctaccctttgatgagt

SEQ ID NO: 23040 - DNA, 4120 bp, Homo sapiens
  misc_feature 1..4120: note = ENST00000426955
  source 1..4120: mol_type = unassigned DNA; mol_type = unassigned DNA
gtgagactctcgcgctggcctctggagcgcggggtgggcgtcccgtcaccctgcgcccagcttccccggcccgttcccgcagggccggcctcccggcgccatgcccggcctgtactgcccctccagctggacgccgctgccgctcacggactcctgggtccgggcctgcgccaacggcccctgcctcagcgtgcgggcccggctcacctaccgcaacccgcagccgcagccggtggacggcgtgttcgtgtacccgctggccgaggccgaggtggtgtccggcttcgaggccgaggccgccggacggcgcgtctccttccagctgcagagccggcgccgctcgcaggccgcctgctgccgcgctctgggcccggggctggggaccccgacgccccgccgctgcgcgcagggtcatcttgtcttggatctggcccaggcccggtccacgttggtgctgcccacaggcattatcgccgcggctggcaccatgacggtgaccctgcacagcagccgggagctgccctcaaggcctgacggggtgctgcatgtggccctgcccactgtgctcaccccgctggccccgccaggcccgccggggccccccaggcctccggggctctgtgacgacagccccaccagctgcttcggggtgggcagccttcaggaggaagggctggcctgggaggagctggctgcccctcgggacgtgttctcaggccctgcccgctgccctgccccatataccttctccttcgagatgctggtgactgggccatgcctgcttgcaggcctggagagcccctctcatgctctgcgggcagatgccccccctcatgccagctctgcagccaccatctgtgtcacactggcagagggccaccactgtgaccgggccttggagatcctgctgcaccccagtgagccccatcagccacacctgatgctggagggcggcagcctgagctcagcagaatatgaggcccgggtgagggcccgccgagattttcagaggctacagcgaagggacagtgatggggaccggcaggtgtggttcctgcagcgacgcttccacaaggacatcctgctgaaccccgtgctggcgctgagcttctgcccagacctgagctccaagcccggacacctggggacagctactcgggagctactcttccttttggatagcagcagcgtggcacacaaggatgccattgttttggctgtgaagtccctcccgccccagacgcttatcaacctggccgtgtttgggacgttggtgcagccactcttcccagagagccggccttgcagtgatgatgctgtgcagctgatctgcgagagcattgagaccctgcaggttccgagtgggcccccagacgtgctggctgctctggactgggccgtggggcagccccagcacagggcctaccctcggcagctgttcctgctcactgctgcctcacccatggccgccactacccaccgaaccctggagctcatgaggtggcacagggggacagccagatgcttctcctttgggctggggcccacctgccaccagctgctccagggtttatctgccctcagcagaggccaggcctacttcctgaggcctgggcagaggctgcagcccatgctggtacaggctctgcggaaggcactggagcctgctttgagtgacatctctgtggactggtttgtgcccgacactgtggaggcactgctgaccccccgggagatcccagcactctaccctggggaccagctgctcggttactgctcactcttcagggtggatggcttccggtcccgcccaccagggggccaagagcctggctggcagagctcgggtgggtccgtgtttccatccccagaagaggccccgtctgctgccagccctggcactgagcccactggcacctcagagccactgggaacaggcactgtctcagcagaactgtccagcccatgggctgccagggactcggagcagagtactgatgctctgacagacccagtcacggatcctggacccaacccctctgacacagccatatggcgccgcatctttcagtcctcgtacattcgggagcagtatgtgctcacccactgctctgccagccccgagccaggcccaggctccacaggcagcagtgagtccccaggctcacagggccctggctcccccgaaggtagtgctcccttggagcccccttctcagcagggctgccgcagtctggcctggggagaacctgcaggctcccgctcctgtcccctgcctgcacccacaccagctccattcaaggtgggggccttgagtactgaggtgctgggccgtcagcacagagcggctctggctggccgaagcctctcatcccctccaggccgggcaaaccaagtccccggccgaccccggaaaccctctttgggtgcaatactagatggcccaagtcctgagccaggccaacagttgggacaaggcctggatgactcaggaaacctgctctccccagcccctatggactgggacatgctgatggaaccacccttcttattcacggctgtgcctcctagtggggagttggcccctccagcagtgcctccccaggctccacgctgccatgtggtgatccggggcctgtgtggggagcagcccatgtgctgggaggtgggtgttgggctggagacactgtggggacctggagatggctcacagcctccctcacctcctgtaagagaagctgcttgggaccaagcactccatcggctgacagcagcctctgtggtccgggacaatgagcagctggccctccgaggaggggcagagaccacagctgaccggggccatgcccggaggtgctggcttcgagcccttcagacaagtaaggtcagctctgccccctcctgcttcacttgccctgtagctgtggatgctactactagggaggtcctgcctggggccctgcaggtgtgcagctcagagcccgctgagcccccaggaacccctcctgcctctcacagccatctagatgcagctcctctgcccactgttgtctactctaaaggacttcagagaggctctccagcaggcgcctgggactcggaccaaaatggcaactccaagcgtgctttgggggaccctgccactcccacggaaggtcctcgccgcccacctccccgtcctccctgtcggctcagcatgggccgccgtcacaaactctgtagccctgacccgggccaggccaacaacagtgaaggcagcgaccatgactacctgcccttggtgcggctgcaggaggcaccaggctccttccgcctggacgcgcccttctgcgccgctgtgcgcatctcgcaggagcgcctctgccgtgcctcgccctttgccgtgcaccgcgccagcctcagccccacctcggcctcattgccctgggcacttctgggccctggtgttggccagggtgacagtgccacggcctcctgcagcccgtcccccagctcgggctctgaggggccaggccaggtggacagtgggcggggctcagacaccgaggcctccgagggggcggaagggctgggcggcaccgacctgcggggccggacctgggccactgccgtagcactcgcctggctggagcaccgatgcgccgctgccttcgacgagtgggaactgacagcggccaaggctgattgctggctgcgggcccagcacttgcctgacggccttgacctggccgccctcaaggccgcagcccgagggctcttcctgctactgcgccactgggaccaaaacctgcagctacacctgctgtgctacagcccagcgaacgtgtgaaggctgccccctgctgcttgggctggcgccccacccaacacactcaagtcactgccgcccagggctggcctcttggtgctgggaaagtgtaggctggtgccagcctgtcccccactgcttcttactccctccctagagccctcttgcccccacaaaaagtgcctgcctgtgctctctccctctcctcccaccccactcacactcccctccatcctctgagctccctgcaacacagtggaagggtagagagccacagtccccaaatcctatgcaataaagtgcctcttagga

SEQ ID NO: 23041 - DNA, 1633 bp, Homo sapiens
  misc_feature 1..1633: note = ENST00000497229
  source 1..1633: mol_type = unassigned DNA; mol_type = unassigned DNA
cagtccccaaacaaacctaggagctaaataaaacagtgtgtgcagtgtgcaaatggagctttatgtcctccagcctgcttcctgcttctctattcctcctgcccgggaggagtagagaattctggagccaccttagtgggcaatgggggagctcctgatggttcaggagcaggaaatttatgagcagagtggggtcccaggccacagggagatgtctatccacaagggatggtggccaagggttgaatggaaagaggcaggcagggggagaggggcagagggtgtgggtattcccagggccttgagagtggacatggccccttctcctcagccttccattagcaaggatgtcactgctgctcttgcctgatgacagccagatctgttcacagttagtctgcctctcctgccatcattcatctcatgcctccatcctgcgtcaccaatgcattagcctagtgccaacacgcaaagtcccccttgcccaggctccctgacccaatgcctgcttccacatctagcttcctccctctcctctgcttccagcatgctctgaccccatttctcacccatcataggtcatcttgtcttggatctggcccaggcccggtccacgttggtgctgcccacaggcattatcgccgcggctggcaccatgacggtgaccctgcacagcagccgggagctgccctcaaggcctgacggggtgctgcatgtggccctgcccactgtgctcaccccgctggccccgccaggcccgccggggccccccaggcctccggggctctgtgacgacaggttgggcctatggtgattctcttcgtccctccctcggcttctctgggtctagtgcgggtgagggggcactggcagggtacccagggatgggaagggtgaggaagggctggggccagtcagccggagggtttaggggccttcacagtggcccagtgaccctcctcatgctcccttccagccccaccagctgcttcggggtgggcagccttcaggaggaagggctggcctgggaggagctggctgcccctcgggacgtgttctcaggccctgcccgctgccctgccccatataccttctccttcgagatgctggtgactgggccatgcctgcttgcaggcctggagagcccctctcatgctctgcgggcagatgccccccctcatgccagctctgcagccaccatctgtgtcacactggcagagggccaccactgtgaccgggccttggagatcctgctgcaccccagtgagccccatcagccacacctgatgctggagggcggcagcctgagctcagcagaatatgaggcccgggtgagggcccgccgagattttcagaggctacagcgaagggacagtgatggggaccggcaggtaccgccataggagcctggcctggcccctggccttggctgcatttgtgcacaaggagcaggcaagcaggcttacattggaatgggtgcggggaggcctcttttctcggtaagatctctccacagctgccaccaaccatcacagaggacagatgagtattgtcattggagggccgatgtgaatctctctggggtgtgtctcagaggatggaggctaggtctgatataaacagaagacagcca

SEQ ID NO: 23042 - DNA, 3486 bp, Homo sapiens
  misc_feature 1..3486: note = ENST00000273794
  source 1..3486: mol_type = unassigned DNA; mol_type = unassigned DNA
ctcttcgtccctccctcggcttctctgggtctagtgcggccccaccagctgcttcggggtgggcagccttcaggaggaagggctggcctgggaggagctggctgcccctcgggacgtgttctcaggccctgcccgctgccctgccccatataccttctccttcgagatgctggtgactgggccatgcctgcttgcaggcctggagagcccctctcatgctctgcgggcagatgccccccctcatgccagctctgcagccaccatctgtgtcacactggcagagggccaccactgtgaccgggccttggagatcctgctgcaccccagtgagccccatcagccacacctgatgctggagggcggcagcctgagctcagcagaatatgaggcccgggtgagggcccgccgagattttcagaggctacagcgaagggacagtgatggggaccggcaggtgtggttcctgcagcgacgcttccacaaggacatcctgctgaaccccgtgctggcgctgagcttctgcccagacctgagctccaagcccggacacctggggacagctactcgggagctactcttccttttggatagcagcagcgtggcacacaaggatgccattgttttggctgtgaagtccctcccgccccagacgcttatcaacctggccgtgtttgggacgttggtgcagccactcttcccagagagccggccttgcagtgatgatgctgtgcagctgatctgcgagagcattgagaccctgcaggttccgagtgggcccccagacgtgctggctgctctggactgggccgtggggcagccccagcacagggcctaccctcggcagctgttcctgctcactgctgcctcacccatggccgccactacccaccgaaccctggagctcatgaggtggcacagggggacagccagatgcttctcctttgggctggggcccacctgccaccagctgctccagggtttatctgccctcagcagaggccaggcctacttcctgaggcctgggcagaggctgcagcccatgctggtacaggctctgcggaaggcactggagcctgctttgagtgacatctctgtggactggtttgtgcccgacactgtggaggcactgctgaccccccgggagatcccagcactctaccctggggaccagctgctcggttactgctcactcttcagggtggatggcttccggtcccgcccaccagggggccaagagcctggctggcagagctcgggtgggtccgtgtttccatccccagaagaggccccgtctgctgccagccctggcactgagcccactggcacctcagagccactgggaacaggcactgtctcagcagaactgtccagcccatgggctgccagggactcggagcagacaggtactgatgctctgacagacccagtcacggatcctggacccaacccctctgacacagccatatggcgccgcatctttcagtcctcgtacattcgggagcagtatgtgctcacccactgctctgccagccccgagccaggcccaggctccacaggcagcagtgagtccccaggctcacagggccctggctcccccgaaggtagtgctcccttggagcccccttctcagcagggctgccgcagtctggcctggggagaacctgcaggctcccgctcctgtcccctgcctgcacccacaccagctccattcaaggtgggggccttgagtactgaggtgctgggccgtcagcacagagcggctctggctggccgaagcctctcatcccctccaggccgggcaaaccaagtccccggccgaccccggaaaccctctttgggtgcaatactagatggcccaagtcctgagccaggccaacagttgggacaaggcctggatgactcaggaaacctgctctccccagcccctatggactgggacatgctgatggaaccacccttcttattcacggctgtgcctcctagtggggagttggcccctccagcagtgcctccccaggctccacgctgccatgtggtgatccggggcctgtgtggggagcagcccatgtgctgggaggtgggtgttgggctggagacactgtggggacctggagatggctcacagcctccctcacctcctgtaagagaagctgcttgggaccaagcactccatcggctgacagcagcctctgtggtccgggacaatgagcagctggccctccgaggaggggcagagaccacagctgaccggggccatgcccggaggtgctggcttcgagcccttcagacaagtaaggtcagctctgccccctcctgcttcacttgccctgtagctgtggatgctactactagggaggtcctgcctggggccctgcaggtgtgcagctcagagcccgctgagcccccaggaacccctcctgcctctcacagccatctagatgcagctcctctgcccactgttgtctactctaaaggacttcagagaggctctccagcaggcgcctgggactcggaccaaaatggcaactccaagcgtgctttgggggaccctgccactcccacggaaggtcctcgccgcccacctccccgtcctccctgtcggctcagcatgggccgccgtcacaaactctgtagccctgacccgggccaggccaacaacagtgaaggcagcgaccatgactacctgcccttggtgcggctgcaggaggcaccaggctccttccgcctggacgcgcccttctgcgccgctgtgcgcatctcgcaggagcgcctctgccgtgcctcgccctttgccgtgcaccgcgccagcctcagccccacctcggcctcattgccctgggcacttctgggccctggtgttggccagggtgacagtgccacggcctcctgcagcccgtcccccagctcgggctctgaggggccaggccaggtggacagtgggcggggctcagacaccgaggcctccgagggggcggaagggctgggcggcaccgacctgcggggccggacctgggccactgccgtagcactcgcctggctggagcaccgatgcgccgctgccttcgacgagtgggaactgacagcggccaaggctgattgctggctgcgggcccagcacttgcctgacggccttgacctggccgccctcaaggccgcagcccgagggctcttcctgctactgcgccactgggaccaaaacctgcagctacacctgctgtgctacagcccagcgaacgtgtgaaggctgccccctgctgcttgggctggcgccccacccaacacactcaagtcactgccgcccagggctggcctcttggtgctgggaaagtgtaggctggtgccagcctgtcccccactgcttcttactccctccctagagccctcttgcccccacaaaaagtgcctgcctgtgctctctccctctcctcccaccccactcacactcccctccatcctctgagctccctgcaacacagtggaagggta

SEQ ID NO: 23043 - DNA, 3311 bp, Homo sapiens
  misc_feature 1..3311: note = ENST00000461141
  source 1..3311: mol_type = unassigned DNA; mol_type = unassigned DNA
gcctgtggtgcaggaaggctggacctgcaggctcctcctggacagtgaaactgggcacttggggtccagaggcagggccttccttgacagaattgtgtcctctcctctcagagccccatcagccacacctgatgctggagggcggcagcctgagctcagcagaatatgaggcccgggtgagggcccgccgagattttcagaggctacagcgaagggacagtgatggggaccggcaggtgtggttcctgcagcgacgcttccacaaggacatcctgctgaaccccgtgctggcgctgagcttctgcccagacctgagctccaagcccggacacctggggacagctactcgggagctactcttccttttggatagcagcagcgtggcacacaaggatgccattgttttggctgtgaagtccctcccgccccagacgcttatcaacctggccgtgtttgggacgttggtgcagccactcttcccagagagccggccttgcagtgatgatgctgtgcagctgatctgcgagagcattgagaccctgcaggttccgagtgggcccccagacgtgctggctgctctggactgggccgtggggcagccccagcacagggcctaccctcggcagctgttcctgctcactgctgcctcacccatggccgccactacccaccgaaccctggagctcatgaggtggcacagggggacagccagatgcttctcctttgggctggggcccacctgccaccagctgctccagggtttatctgccctcagcagaggccaggcctacttcctgaggcctgggcagaggctgcagcccatgctggtacaggctctgcggaaggcactggagcctgctttgagtgacatctctgtggactggtttgtgcccgacactgtggaggcactgctgaccccccgggagatcccagcactctaccctggggaccagctgctcggttactgctcactcttcagggtggatggcttccggtcccgcccaccagggggccaagagcctggctggcagagctcgggtgggtccgtgtttccatccccagaagaggccccgtctgctgccagccctggcactgagcccactggcacctcagagccactgggaacaggcactgtctcagcagaactgtccagcccatgggctgccagggactcggagcagagtactgatgctctgacagacccagtcacggatcctggacccaacccctctgacacagccatatggcgccgcatctttcagtcctcgtacattcgggagcagtatgtgctcacccactgctctgccagccccgagccaggcccaggctccacaggcagcagtgagtccccaggctcacagggccctggctcccccgaaggtagtgctcccttggagcccccttctcagcagggctgccgcagtctggcctggggagaacctgcaggctcccgctcctgtcccctgcctgcacccacaccagctccattcaaggtgggggccttgagtactgaggtgctgggccgtcagcacagagcggctctggctggccgaagcctctcatcccctccaggccgggcaaaccaagtccccggccgaccccggaaaccctctttgggtgcaatactagatggcccaagtcctgagccaggccaacagttgggacaaggcctggatgactcaggaaacctgctctccccagcccctatggactgggacatgctgatggaaccacccttcttattcacggctgtgcctcctagtggggagttggcccctccagcagtgcctccccaggctccacgctgccatgtggtgatccggggcctgtgtggggagcagcccatgtgctgggaggtgggtgttgggctggagacactgtggggacctggagatggctcacagcctccctcacctcctgtaagagaagctgcttgggaccaagcactccatcggctgacagcagcctctgtggtccgggacaatgagcagctggccctccgaggaggggcagagaccacagctgaccggggccatgcccggaggtgctggcttcgagcccttcagacaagtaaggtcagctctgccccctcctgcttcacttgccctgtagctgtggatgctactactagggaggtcctgcctggggccctgcaggtgtgcagctcagagcccgctgagcccccaggaacccctcctgcctctcacagccatctagatgcagctcctctgcccactgttgtctactctaaaggacttcagagaggctctccagcaggcgcctgggactcggaccaaaatggcaactccaagcgtgctttgggggaccctgccactcccacggaaggtcctcgccgcccacctccccgtcctccctgtcggctcagcatgggccgccgtcacaaactctgtagccctgacccgggccaggccaacaacagtgaaggcagcgaccatgactacctgcccttggtgcggctgcaggaggcaccaggctccttccgcctggacgcgcccttctgcgccgctgtgcgcatctcgcaggagcgcctctgccgtgcctcgccctttgccgtgcaccgcgccagcctcagccccacctcggcctcattgccctgggcacttctgggccctggtgttggccagggtgacagtgccacggcctcctgcagcccgtcccccagctcgggctctgaggggccaggccaggtggacagtgggcggggctcagacaccgaggcctccgagggggcggaagggctgggcggcaccgacctgcggggccggacctgggccactgccgtagcactcgcctggctggagcaccgatgcgccgctgccttcgacgagtgggaactgacagcggccaaggctgattgctggctgcgggcccagcacttgcctgacggccttgacctggccgccctcaaggccgcagcccgagggctcttcctgctactgcgccactgggaccaaaacctgcagctacacctgctgtgctacagcccagcgaacgtgtgaaggctgccccctgctgcttgggctggcgccccacccaacacactcaagtcactgccgcccagggctggcctcttggtgctgggaaagtgtaggctggtgccagcctgtcccccactgcttcttactccctccctagagccctcttgcccccacaaaaagtgcctgcctgtgctctctccctctcctcccaccccactcacactcccctccatcctctgagctccctgcaacacagtggaagggtagagagccacagtccccaaatcctatgcaataaagtgcctcttagga

SEQ ID NO: 23044 - DNA, 619 bp, Homo sapiens
  misc_feature 1..619: note = ENST00000474580
  source 1..619: mol_type = unassigned DNA; mol_type = unassigned DNA
attcgaattactacaaaaagatgtcccctctgggtggatcagacagaaaaaggccccagagccagtcccactgcccaccctcaacaaagtagcactaagccttgcccaggctgacttgggactcccccgctcaggtgtggttcctgcagcgacgcttccacaaggacatcctgctgaaccccgtgctggcgctgagcttctgcccagacctgagctccaagcccggacacctggggacagctactcgggagctactcttccttttggatagcagcagcgtggcacacaaggatgccattgttttggctgtgaagtccctcccgccccagacgcttatcaacctggccgtgtttgggacgttggtgcagccactcttcccagagagccggccttgcagtgatgatgctgtgcagctgatctgcgagagcattgagaccctgcaggttccgagtgggcccccagacgtgctggctgctctggactgggccgtggggcagccccagcacagggcctaccctcggcagctgttcctgctcactgctgcctcacccatggccgccactacccaccgaaccctggagctcatgaggtggcacagggggacagccagatgcttctc

SEQ ID NO: 23045 - DNA, 804 bp, Homo sapiens
  misc_feature 1..804: note = ENST00000493493
  source 1..804: mol_type = unassigned DNA; mol_type = unassigned DNA
ctcaatagtcaaatgtgactagtggctaccacattggatcatgaagagagagaacatttccaagttttattagtgcagaagcaggtggaggaaaatgtgccagctaatgcttcctctgggtgttgtccagagtgctgaatttctgggcagccagggggctcttgctctgctatgggttgaagattcagcctgatcacttcttgtcaaagttggggagtctgagctggttctgggcctagcaaggcaatctactctgttaaagtcgatagagggagaagctggggagaacactgcaattttttctatgagccctctgtagagggtgggtggtgggggctccacagactgctccttggttccacaggccatgcccggaggtgctggcttcgagcccttcagacaagtaaggtcagctctgccccctcctgcttcacttgccctgtagctgtggatgctactactagggaggtcctgcctggggccctgcaggtgtgcagctcagagcccgctgagcccccaggaacccctcctgcctctcacagccatctagatgcagctcctctgcccactgttgtctactctaaaggacttcagagaggctctccagcaggcgcctgggactcggaccaaaatggcaactccaagcgtgctttgggggaccctgccactcccacggaaggtcctcgccgcccacctccccgtcctccctgtcggctcagcatgggccgccgtcacaaactctgtagccctgacccgggccaggccaacaacagtgaaggcagcgaccatgactacctgcccttg

SEQ ID NO: 23046 - DNA, 11299 bp, Homo sapiens
  misc_feature 1..11299: note = ENST00000340652
  source 1..11299: mol_type = unassigned DNA; mol_type = unassigned DNA
ggtgccactcgcgcgccggccgcgctccgggcttctcttttccctccgacgcgccacggctgcccagacattccggctgccgggtctggagagctccccgaacccctccgcggagaggagcgaggcggcgccagggtggcccccggggcgcgcttggtctcggagaagcggggacgaggccggaggatgagcgactgagggcgacgcgggcactgacgcgagttggggccgcgactaccggcagctgacagcgcgatgagcgactccccagagacgccctagcccggtgtgcgcgccaggcggagcgcgcaggtggggctgggctgttagtggtccgccccacgcgggtcgccggccggcccaggatgggcgctggcaacccgggcccgcgcccgccgctgctacccctgcgcccgctgcgagcccggcgtccggcccgcgccctgcgctcatggacggcggctcccggctggcggcggcgcgcccccgggctgtgaatgcgactcgcccctcggccgcgctccccgcccgcccgcccgccgggacgtggtaggggatgcccagctccactgcgatggcagttggcgcgctctccagttccctcctggtcacctgctgcctgatggtggctctgtgcagtccgagcatcccgctggagaagctggcccaggcaccagagcagccgggccaggagaagcgtgagcacgcctctcgggacggcccggggcgggtgaacgagctcgggcgcccggcgagggacgagggcggcagcggccgggactggaagagcaagagcggccgtgggctcgccggccgtgagccgtggagcaagctgaagcaggcctgggtctcccagggcgggggcgccaaggccggggatctgcaggtccggccccgcggggacaccccgcaggcggaagccctggccgcagccgcccaggacgcgattggcccggaactcgcgcccacgcccgagccacccgaggagtacgtgtacccggactaccgtggcaagggctgcgtggacgagagcggcttcgtgtacgcgatcggggagaagttcgcgccgggcccctcggcctgcccgtgcctgtgcaccgaggaggggccgctgtgcgcgcagcccgagtgcccgaggctgcacccgcgctgcatccacgtcgacacgagccagtgctgcccgcagtgcaaggagaggaagaactactgcgagttccggggcaagacctatcagactttggaggagttcgtggtgtctccatgcgagaggtgtcgctgtgaagccaacggtgaggtgctatgcacagtgtcagcgtgtccccagacggagtgtgtggaccctgtgtacgagcctgatcagtgctgtcccatctgcaaaaatggtccaaactgctttgcagaaaccgcggtgatccctgctggcagagaagtgaagactgacgagtgcaccatatgccactgtacttatgaggaaggcacatggagaatcgagcggcaggccatgtgcacgagacatgaatgcaggcaaatgtagacgcttcccagaacacaaactctgactttttctagaacattttactgatgtgaacattctagatgactctgggaactatcagtcaaagaagacttttgatgaggaataatggaaaattgttggtacttttccttttcttgataacagttactacaacagaaggaaatggatatatttcaaaacatcaacaagaactttgggcataaaatccttctctaaataaatgtgctattttcacagtaagtacacaaaagtacactattatatatcaaatgtatttctataatccctccattagagagcttatataagtgttttctatagatgcagattaaaaatgctgtgttgtcaaccgtcctcaccgtgtacctgcatatctttttcagttctgattccatcacccaggaatgttccccctgcacattttcacagggcagagtcacgcatgaatggatcataagatattaggaccaatttccactgaaaccctgtttaaattctatttaattacagacatatctctaatgttgatgtctacttcacataaatatatttcctttttataataatatatggcttttatctgcttcattctcagtcacttgtgaaatgcaggtgtaaagatcactaactcacactttctcagttctttcccctaagctcctgtattgtacaccataggtaagcacatacatatatttcattcttatttacattattttctcttctaaggataactttaattcattccctaaactgaggaataaagtaggctggaaaatttgcattactgttccatcaagctgaagcagacaacaaaataggggaggagtccttcgattctcctaggatagttaaggaaaatcaaactcctaaacaagtttatatacctgaaatctaaatgtgctacagataactcagctgtcagttcagtggaatcatatttgtcatcagacttgagtcatctatcctccataaactacacagtaaaatcttgactgataaccttgaattagccacccttcacaagcagagtgaggaagcagttattttgttaaaacaaagctgaagaccaagtgcactccacaactttcctatagttataattccaaaccaacttcttttctcttcatttgaacagagaacataaaaagccactgcaaagtcctgctaatctaattaatgcataatagaaaatagttctacctttatcaatcatatcagcatgcggtgtgttgatgaaagaggtaattggagtcttaataggtgtaggataaaaaaagcaaaactataatcactattaatgtctttaaaggattaaaatatatataatcattatttgaagcctctaaaggtatttttcatatttttgtttattctgaaattttgcattaagaacctattaagtacaaagcattgacaacaagggaataaggcttgatttcttgccttcttggactttcggtctctggcataagaagtatatgaaatcataatgtattgtattaggagccaaactagagaccagcaaatggagattagaaagccttcctaatgagaagatggagaacatgaaaaaatcattatataaaaaataattcaatcattaaagactgaataacattcaagaaaaatggatacatctatcataattgaaaaattaaactattgtgaaccttagtaagtataaagatgccactgactgagtcatcaaaacactacatatagtcatttaatttttgtcttgttcataaagaacaccttgagccaaaggaactaccagtacatagatttcatgaaaatactcaggggaattattagctaattgttctcaggtgtaatcagctttccaaaatttaacctttgtattaaagactggtagacattggccatccctcctttattcaaggatggattgtttgagacacagttatttaaagttgtcgttttgctaataaatggccctagcccccatgggtaggtgggccattagtaacctcttctctctccatcaggcatgatgcagttagagactcagtccatgcagctcaaagtcttcctgtttcccttaataataattcctaccagaatggatgatgagctctgaaataattgcaatggtgttttcaatgctgtgagaatttcagaaaacctagtattttgttgcatatagagagaatgaacccagtatcatcttgggaagttaactgactcacttgctctaaacttagtttgacctgcagggtcaccagcacacactcctaagagctaaagctcaatggctgttattacaccaaagtaactcccctccccatctctgatttcaaccccctcattcctctctcctcatagaaataatgcataaaccaaacacatggaagaacttggatttttgacactgtatatactcattaataataatggcattatttgcatttttgtccaagatcaacttcttcttgcagttagactttcacaaatacatagctatctcagattgacattctattttcctcccctctgttgtcagagaactctttgctgagattgtcaacaacaaactgttctattcaataaataacctgaataactgcccaataaaaaaggaaagtataagttactcaatttcaaaataatatggtttggagatagcacagaaaagggggcctcagaattcaagtatagaagttctggaaaagccataatcactaaaattcaaataggcctgctctataagtacctaataattgttaaatgatttgttcaagttaataaactaaatcgtgcttacaaatgtattaatgaatttatttcaaattttcaacccatatttagatctgaaagtataaagctacttatgtaagcaatagaatggttctggaaattatctgatgtcttagaggttttcaagttaaattcattctttcagtgataggatatttacttgttgggtggattaacaatactttttattgacatttcccagaagtcttgagaaaagtcatttcaaaaacttgtatttcatccctgcatgcaagaagtattagatgcactccagtccaggcaagtcctgctataatgttgcagctagtgcagatggagaggcacagtgtccttgacatcaaggggtctgtaagccttgaaactaatttaggtttgattataatacttttaatcttttgatacttagaatttcatcacctgctttgtgcagtaaaacatgctaagaagaattatcatgcagttttaagttcataacatcaataatatgtttaataaactttcttccctcgttctccaacataaatgttgcatttatataaggttaaaagtcctaaaaaatcataaaattcagatgtttaatttttgtttttaagcagtgaaatgggtttttaaatgtatacattatctgaaacttacaaaatatacactgtttcaaacaagcattgttggaaactaaatccattattttaaatgtggactatttaaacatgtagaaaacaaaattatagacataaactatgattttaaaaatattaacaatttgctaaatttgcttcaatgggcaagagatcaatcctacttttcattgttatttttaatatcatatttttccccaacataatgttattatgaagagtatcagatgtacaaataagcatcattggtaaaaacatacatgcttctttggccaacataatttgtaactgtcttactgaacctacttacctactatattttttttcctcactagtagcatctgatggttgatacagtcagtaactattctgaagaatcagattaagagagaacaatttacttattcaggaataagtgcatttttacagtacatatttttcacatttcagctgcaacttccaaagatcaggttctcattgctccgtagcacagattaaacagcctacttatgtcatatcctcacttcacaccaacttcttcagtctattattttagttttctaaatgtagatctagttttcaactgaattctttgaggatcgcaatcacacacaaaataacatccaaactcctcaacatggaagactggtgtcttcacaattagatcatggacaacaccatgacccaggcccctgtggctggtgagacttctgggccctgggtaccacagactatactctaaacatggtctttactatctcagatcctgccctgagtgtcctttgcagcatgttgagtattagccattttcaatgtccagttcaagtgccattgctggtaaggcttctgtagttcttattggaagaattgtcactctatgtcccagtaatagtactaatttggtttcttattttaacatatcatttaggaatcataccatagtttgcataatggttaattttatgcctgcttcttctattatttacaaatccctttagtttgggctgtgaaatattcaattcccaaaacatcacccaatatctatatgttaaaggcttgttgaattgtattccatctattagttcagagttatttgctattcttgtttaaggacaatgtatgtattaaagagcaactaaaaactcccattactgtttgccaacccagttgtcttttgatttctctgtcaacttacaagtatcaaatatctaagtcacagaacccagagacacatcaaataccccaaataccccatggtagttttcggatgaactctgacagctattggccatttctggtgcaagtcagaaaaaaattgcttttagtgtgaaatttttgatgctgaagaaagttgattgtattgaagagacactggccctttatgataaaggaagtcaagtttacagttttgatatttgtttactttcttatttctaatttttggaaaacaattttcttagactttcatttgtgatattgatcatttctgtgtgttttaatctttctacataacataattaaacacctcagtaggtatctagtgaactgatacaataatgagctgagtcatttgtacagaaatatagtagcttccataatctgaatgataaccatttaaaagtgatggttgttgaaattttactgtagtgtcaaatttcactttaaattttgcaaagcacctgctattctagccttaacacaaagatttggctaatttttaaatgaacaaatcccattgaatattaagtgacactgacaatcaccctgaaaagtattcagccaaagtttcaatagaattaggaaacttaaatgaaaatgtgctctcagtgcttggcccatgagcagtttatgatttaagacgtgcatactgtttaactctttcctttaaagttcagaaaagtacataaaacctctggctgacctattatataggcacagaattatcaaaagcaatcaaagtatgtacctaaagtcaatttagtatattatgaatacagcctgatgactaaacacaattgcaaatattgcgactttagtttttaattcaattttcagcaagtagaaatatttctcaattttatttggtatctaattatattaagaccaacatatacattaaagtgtatttagatgattaatatttaatgatcattattttatttaatgattaatattttctattatttgaatttctgtaatttatgttttagaaagaactgtttccaaacacattttatggaaagatttcatttttccattccctttacttttatatttacattgtcaaataaatacaattctattttcatttctattagttttcagggtttattcttttcctaagcatataattcttataatggaaaaaagtgaaaagtatccagtaagtaatatacacctatgaaactattaatgttctttatactaccaagtagtttcatagttttaaaaagccattcttaagcagtcggtgaatgtatatcatcggccaaaagttatgctaggtttccttcacttattatcacatttaacctcacagttctcccaaattgtgggtaatgctatcccctttgttgcagaaaagtaaatataggctcagggaaatttaaaaactgccttaagattcagtctagtgaatgagaggctgagttaagaatccaaatctgctttatatcagagcccgtgatttgaagtcttatcatttgtgtttaggtcagggacctctagaaaatagacagaaatttccaaaatggtcttttaccccactccccataaataagataatgaatagcaacactgatccctaattctagaatatcaatcttgatacttgtcaaagtaaatagtagctcgtcacaaaaatgttgtagcctccctagtctaaatgcttatgctatattttgtttcctaaatctagagatctctttttaaaaatagtattgaagcatcaggttgttcaggtatgattctcatattgaaatttacaaaatataaccaaatattgtgacccagtttttctggagccaagagaagtaaactgccatttattaggtgatgattatagggcaaacactacaatttcaaatttcatattcttttatctgatttattcattttatcaactctgctatattgatgaagaagtcaacatatggtgggtaacttatccaaatttcagtgatgggctgggcgtggtggctcacgcctataatcccagcactttgggaggctgaggcaggtggatcaggagtttgaggccaacctgaccaacatgtgaaaccccatctctactaaaaatacaaaaaaattacctgggcatggtggcacatgcctgtaatctactcgggaggctgaggcaggagaatcccttaaaccgagggggtggaggttgcttgagccgagatcgcgtcactgcactccagcctgggtaacagagcaagactctgtttaaaaaaaaaaaaaaaatcagtgatggaactgaggccaaatctgtctggttccaaagctatcctacatggggcacagtcaggactggaatggatagctctacctgcttccaaatattcttccctggggagcagctgtgagtcttactgaatcgatttattcattgcattctatgtgtcaactgcaatttagacctgggtgatagagtcatatatggtctttggacccatgaagctctgagtcaaggataccagcagatatccttaaactaataaaaaaagcgatggcatcacatgccattttgaacttttgcattaaagtcataaacttacatcagtattatgatttatacttttaagcaaaattttgccattttctgatacatagtagctagctagtgataaaattatgaagttaccattgtatgttccaatgacataaaaaactaagtgcctgcttgggctagttatactctgcagtataccctggtttattgtgaggattaaataaaaaatcctcacaaaccccaatttaatttaatatagattaattataaaaataatctacccatgttacataatgttaaatctgtagtttcaaggtgtatgctatttcttaaaacaaaaacaaagattgtccccactccaaacaataacagcaatggtgaaggttgtgggtggacagaggtagtcccactcatccccagggggctcagctgccaccggccaggtctatctattgctcccacctgctctgactgttttctctcaagaaaaagattttcattttaagataggcatcagtgcaataaaggagcttgatacaaaaatcattatgttctatatatgtttttgtaggttttagattaattatggccaactgataccttaaaatatttgttacaaataacactgaagtgagattcaaaattgtgccttctattgaagccaagaaagtaaatgtctttaaaataaacataatggtgtttttttttggtacaataaacagcatacctacatttcagaggacaaatcatgttattataataaccaggagagaaaataaaaggagacattaatttggatatggaagcaaaatggaacagagcaatatagagcaaaacagaggtttgtctgaaacatttaaaatattaagaagtatgactaaaaaactcaaacattttaatacacgatgaatccttttcttaaggaaaaaatgaaaataataaaagtggtatttggatgagataattttcctttaaatttattcctcagaatgatgtaaattttccagctggaaggtcatctttctatacatgcatgcatctatacaaatggttaaacagttactctctcaatttgctgtgataggaaaggtggatataaatataagcaagggtctgattaaaacaaaacaaaacaaacaaaagacaagagaagcactgcattgttggcaagaaattccttttaagtcagacttaagtccacggaaagctggacctaagcagtgaaggatgtaagggaacagagagagactctgcttggccgagtttgctattctcatttgtctatgtcaatacggctacataaagttcacaactatttgcacatagctataaatatagcatgaataaaacacatatgtatttaattgtgttatttactatttataatttgaattgtttaaaataattttaaatacttattccataaactcagtatttgaaaacttaaaaaaaaagtcattttaaataacatcatttaccaagtctgtgtgatgctttacaaggtacctgatgaatgtaaaattatagctttttgtcttcatttctaatagactgttataggggaaatgtactaaaatgttgtacttattacatttatgaatttctgacagtttctatagactgagaataatgatatgcttttataaattatttggtgaaagttttccagtaagtgttcatgtcctgtacaaatttattaaacaacatcaattttacctaacaactgtaaccactaataaatcatcagtcaccacctttcctgcatatctgacagatggagaacactgtgcttagtgttgaagataccaaagggaattcaagtgaggggaaaagaggagagcaaactgatcaaaagggaatgcccatgatgctttcaggaaaccagggtgagaacatgctggctggaggatgggtctggtttccagcagagatgataggagttaaaaggcataggtgagttgttcccatccctggcctgagccttactccatagctatagagacatagtctctagaaacaaaggccagagcatccttttaacatttatatcataagtattctcaataaacgtttgcaatttatttgctttaatgtaacttggcagtaaagactttggcctttggaggtctgattctaatcccagttctaccacttactggttatttatcaggtacacgttacctacctctctgtaactcagattgctcatcagtaacatggggagagtggtatcaaccactaagaggattaaatgagtgaatatttgtaaaacacgtagcctagaatagatatttataaagcacaagatctatgtaaagtgtttataacataatacattggaatatgagacttgaacattttgaagattctaataaatgaataatttaatttagtgctcatttgaaaaatattttatcctcatgtttacatttaacacatataatttatatcttagtttttatcccatttatatatatatttaccagaaaaatgttttgtaataccttaattttatgtggagttgaatttaaataattaggccgaatttgtatgtattgttggatgggtatgtgtattgacctgatttataaaataaagtatttattaaactga

SEQ ID NO: 23047 - DNA, 1351 bp, Homo sapiens
  misc_feature 1..1351: note = ENST00000488147
  source 1..1351: mol_type = unassigned DNA; mol_type = unassigned DNA
atgggagccgtgtgcacgtcgggagctcggagtgagcgcaccatgactcctgtgaggatgcagcactccctggcaggtcagacctatgccgtgcccttcatccagccagacctgcggcgagaggaggccgtccagcagatggcggatgccctgcagtacctgcagaaggtctctggagacatcttcagcaggtagagcagagccggagccaggtgcaggccattggagagaaggtctccttggcccaggccaagattgagaagatcaagggcagcaagaaggccatcaaggtgttctccagtgccaagtaccctgctccagggcgcctgcaggaatatggctccatcttcacgggcgcccaggaccctggcctgcagagacgcccccgccacaggatccagagcaagcaccgccccctggacgagcgggccctgcaggagaagctgaaggactttcctgtgtgcgtgagcaccaagccggagcccgaggacgatgcagaagagggacttgggggtcttcccagcaacatcagctctgtcagctccttgctgctcttcaacaccaccgagaacctgtagaagaagtatgtcttcctggaccccctggctggtgctgtaacaaagacccatgtgatgctgggggcagagacagaggagaagctgtttgatgcccccttgtccatcagcaagagagagcagctggaacagcaggtcccagagaactacttctatgtgccagacctgggccaggtgcctgagattgatgttccatcctacctgcctgacctgcccggcattgccaacgacctcatgtacattgccgacctgggccccggcattgccccctctgcccctggcaccattccagaactgcccaccttccacactgaggtagccgagcctctcaagacctacaagatggggtactaacaccacccccaccgcccccaccaccacccccagctcctgaggtgctggccagtgcacccccactcccaccctcaaccgcggcccctgtaggccaaggcgccaggcaggacgacagcagcagcagcgcgtctccttcagtccagggagctcccagggaagtggttgacccctccggtggctggccactctgctagagtccatccgccaagctgggggcatcggcaaggccaagctgcgcagcatgaaggagcgaaagctggagaagcagcagcagaaggagcaggagcaagtgagagccacgagccaaggtgggcacttgatgtcgctccatggggggacggctccacccagcctgcgccactgtgttcttaagaggcttccagagaaaacggcacaccaatcaataaagaactgagcagaaa

SEQ ID NO: 23048 - DNA, 3884 bp, Homo sapiens
  misc_feature 1..3884: note = ENST00000333538
  source 1..3884: mol_type = unassigned DNA; mol_type = unassigned DNA
tggaggatgcgggctccccgagcgggcttcccctctgcccggcgcgatggagcgggtcggtgagcggaacaaaggcgcctgcccgggggagcgggtcttccgctgaagagcgcgggtggcgcgccgcgacggccgcctgcgggccaaggtgggaggctgtgcggccccaggcgcggcgcgctccgccgtgggcgggcggcgatccctgagtccggcacctgtgcgccgctccctctgtgcctcccgggcagccccgcctgccggcctcggagtccgcggcgccggcggctagaggtccagaggcgaaccacttgctggtgcagaagagaaaccctcaaatccctggcctttcgcggagacgcctggacggggccgtgcgccgtggactgagcaggcgtctcggggagcacttctgcagagcgaggacttccatgtgagcgattccgttctccccaccaccaatccgacctcccagccgtctccgccgcccgagcatccttgaggtgggacgagcaggggcttggatccctgccggccgtctggtgtgtgaggcttgcacggcccctggctgccccgcgcctcgccggagcccgagggggcgcaggtccggggcgagggccggccgggctgtttgatggcttcactgagaagagtcaaagtgctgttggtgttgaacttgatcgcggtagccggcttcgtgctcttcctggccaagtgccggcccatcgcggtgcgcagcggagacgccttccacgagatccggccgcgcgccgaggtggccaacctcagcgcgcacagcgccagccccatccaggatgcggtcctgaagcgcctgtcgctgctggaggacatcgtgtaccggcagctgaatggcttatccaaatcccttgggctcattgaaggttatggtgggcggggtaaagggggccttccggctactctttccccggctgaagaagaaaaggctaagggaccccatgagaagtatggctacaattcatacctcagtgaaaaaatttcactggaccgttccattccggattatcgtcccaccaagtgtaaggagctcaagtactccaaggacctgccccagatatccatcatattcatcttcgtgaacgaggccctgtcggtgatcctgcggtccgtgcacagtgccgtcaatcacacgcccacacacctgctgaaggaaatcattctggtggatgacaacagcgacgaagaggagctgaaggtccccctagaggagtatgtccacaaacgctaccccgggctggtgaaggtggtaagaaatcagaagagggaaggcctgatccgcgctcgcattgagggctggaaggtggctaccgggcaggtcactggcttctttgatgcccacgtggaattcaccgctggctgggctgagccggttctatcccgcatccaggaaaaccggaagcgtgtgatcctcccctccattgacaacatcaaacaggacaactttgaggtgcagcggtacgagaactcggcccacgggtacagctgggagctgtggtgcatgtacatcagccccccaaaagactggtgggacgccggagacccttctctccccatcaggaccccagccatgataggctgctcgttcgtggtcaacaggaagttcttcggtgaaattggtcttctggatcctggcatggatgtatacggaggagaaaatattgaactgggaatcaaggtatggctctgtgggggcagcatggaggtccttccttgctcacgggtggcccacattgagcggaagaagaagccatataatagcaacattggcttctacaccaagaggaatgctcttcgcgttgctgaggtctggatggacgattacaagtctcatgtgtacatagcgtggaacctgccgctggagaatccgggaattgacatcggtgatgtctccgaaagaagagcattaaggaaaagtttaaagtgtaagaatttccagtggtacctggaccatgtttacccagaaatgagaagatacaataataccgttgcttacggggagcttcgcaacaacaaggcaaaagacgtctgcttggaccaggggccgctggagaaccacacagcaatattgtatccgtgccatggctggggaccacagcttgcccgctacaccaaggaaggcttcctgcacttgggtgccctggggaccaccacactcctccctgacacccgctgcctggtggacaactccaagagtcggctgccccagctcctggactgcgacaaggtcaagagcagcctgtacaagcgctggaacttcatccagaatggagccatcatgaacaagggcacgggacgctgcctggaggtggagaaccggggcctggctggcatcgacctcatcctccgcagctgcacaggtcagaggtggaccattaagaactccatcaagtagagggagggagctggggcactggagcctggcccccaggacatggctgctccccccaacatctggaccagctgccctggcggagagacagcaaggggccggcaggtgctcgatgggccccccagggcttctccagggcagcacagggaccccggatgaagactctgtcccccctcaggcattcagctgcccacaagtttcctgcaccctggaaaagccccccacccttcctctgggaaactgacagctgtcttccacagcctctgatgtggacctggtactgaggagcaagactgtccagttctcctccacatctcccatcccagaatcaggatctgggactggcagggtcccctcctgtgtctcatctcttgcagcagcagctgctgaactccagccatcaacacggtgggaggcagcgggggcttcagccatgtcctagctccccgccctaaaaggaggcagtgaggaccaggcactatttcctccgaggttacttctacccagatgacacctgcctgttcacgccccaaggcagctactgcccctaacccttcccaccagggtagctttgggcactgcagctctggacttttctggcccctcctgagatgacctgatggagctgatgctttctctcctaatccctgggcactaggctcttatcagtgtgcttgggccagctctcctgcctgtgtctagaggaagccagagacagaaataggctaagcctgcagtaggatctcagccacaagggccccgcaggatggagctgggtcaaggaccagggagccctgactcccagaggctgccaccggggagaagcagcggtcctccatccagaacctaagggctgaagcaaaggctgccaggacccttgaagatgcttttggctcacctcatttcaccccacgctctgctggctggcagaggagaaggcagtcgtttcctctctgaagagtatttttttcgattgccctctggttagggtgcacatataaatcagagttaatatatgaacgcgtgtgcatgcacaagtgtgtgtgtgcctgcgtgctgtgcgtggcagggtgtgtgtgtgtgtgtctggctgtgcgttccggagtgtgtgacgatgctgacctagctgtgtggccttgggcttgctgcttcattactcacctggatggggacgagggatgagaagggtgtgggtttggccccatgtcactggccggaaggatgtgtctcagccctgccctgtggggtgcccccgatgggaggctgtcccatctcccagtccccatctctttttccccacactgtccctggccaagccctgcccagagctgaaccctgtagctgcccccttgccctgtgtgggattcgcagtgtctcatttggtgacgtcttactggtgatcatctcctcaccccatctcccaccttgtggaataaatacatgttagcacttccca

SEQ ID NO: 23049 - DNA, 3653 bp, Homo sapiens
  misc_feature 1..3653: note = ENST00000498380
  source 1..3653: mol_type = unassigned DNA; mol_type = unassigned DNA
aggacatgggcggggacaaataagggaataaaagctggcggcagggaagcccgcagctgcaaccggctctggttcttttcggtgctgtggaagctttgttttttcgctcttcacagtaaatcttgctgctgtatattctttgggtccacgccgcctttgagatgtaacactcataacactcaccctgaaagtccgtggcttcattcttgaagtcagcgagaccacgaacccaccggaaggaaccaactctggacacagtggcatgatctcggctctctgcagcctctgcctcttgggttcaaacgattctcctgcctcagcctcccaagtagctgggactacaggtgtgtgctagcacacccggctaagttttgtatgtttagtagaaacgggtttcaccatattggccaggctggtcttgaactccagacctcaactgatccaccggcctcagcaccccaaagtgctgggattacaggcgtgagccaccacaccaggctgagatctgacggttttataaggggcttttcccccttctgcttggcacttctccttagtgccaccatgtgaagaaggatgtgtttgcttttccctccgccatgattgtaagtttcctgaggcctcccagccctgcagaactgcttatccaaatcccttgggctcattgaaggttatggtgggcggggtaaagggggccttccggctactctttccccggctgaagaagaaaaggctaagggaccccatgagaagtatggctacaattcatacctcagtgaaaaaatttcactggaccgttccattccggattatcgtcccaccaagtgtaaggagctcaagtactccaaggacctgccccagatatccatcatattcatcttcgtgaacgaggccctgtcggtgatcctgcggtccgtgcacagtgccgtcaatcacacgcccacacacctgctgaaggaaatcattctggtggatgacaacagcgacgaagaggagctgaaggtccccctagaggagtatgtccacaaacgctaccccgggctggtgaaggtggtaagaaatcagaagagggaaggcctgatccgcgctcgcattgagggctggaaggtggctaccgggcaggtcactggcttctttgatgcccacgtggaattcaccgctggctgggctgagccggttctatcccgcatccaggaaaaccggaagcgtgtgatcctcccctccattgacaacatcaaacaggacaactttgaggtgcagcggtacgagaactcggcccacgggtacagctgggagctgtggtgcatgtacatcagccccccaaaagactggtgggacgccggagacccttctctccccatcaggaccccagccatgataggctgctcgttcgtggtcaacaggaagttcttcggtgaaattggtcttctggatcctggcatggatgtatacggaggagaaaatattgaactgggaatcaaggtatggctctgtgggggcagcatggaggtccttccttgctcacgggtggcccacattgagcggaagaagaagccatataatagcaacattggcttctacaccaagaggaatgctcttcgcgttgctgaggtctggatggacgattacaagtctcatgtgtacatagcgtggaacctgccgctggagaatccgggaattgacatcggtgatgtctccgaaagaagagcattaaggaaaagtttaaagtgtaagaatttccagtggtacctggaccatgtttacccagaaatgagaagatacaataataccgttgcttacggggagcttcgcaacaacaaggcaaaagacgtctgcttggaccaggggccgctggagaaccacacagcaatattgtatccgtgccatggctggggaccacagcttgcccgctacaccaaggaaggcttcctgcacttgggtgccctggggaccaccacactcctccctgacacccgctgcctggtggacaactccaagagtcggctgccccagctcctggactgcgacaaggtcaagagcagcctgtacaagcgctggaacttcatccagaatggagccatcatgaacaagggcacgggacgctgcctggaggtggagaaccggggcctggctggcatcgacctcatcctccgcagctgcacaggtcagaggtggaccattaagaactccatcaagtagagggagggagctggggcactggagcctggcccccaggacatggctgctccccccaacatctggaccagctgccctggcggagagacagcaaggggccggcaggtgctcgatgggccccccagggcttctccagggcagcacagggaccccggatgaagactctgtcccccctcaggcattcagctgcccacaagtttcctgcaccctggaaaagccccccacccttcctctgggaaactgacagctgtcttccacagcctctgatgtggacctggtactgaggagcaagactgtccagttctcctccacatctcccatcccagaatcaggatctgggactggcagggtcccctcctgtgtctcatctcttgcagcagcagctgctgaactccagccatcaacacggtgggaggcagcgggggcttcagccatgtcctagctccccgccctaaaaggaggcagtgaggaccaggcactatttcctccgaggttacttctacccagatgacacctgcctgttcacgccccaaggcagctactgcccctaacccttcccaccagggtagctttgggcactgcagctctggacttttctggcccctcctgagatgacctgatggagctgatgctttctctcctaatccctgggcactaggctcttatcagtgtgcttgggccagctctcctgcctgtgtctagaggaagccagagacagaaataggctaagcctgcagtaggatctcagccacaagggccccgcaggatggagctgggtcaaggaccagggagccctgactcccagaggctgccaccggggagaagcagcggtcctccatccagaacctaagggctgaagcaaaggctgccaggacccttgaagatgcttttggctcacctcatttcaccccacgctctgctggctggcagaggagaaggcagtcgtttcctctctgaagagtatttttttcgattgccctctggttagggtgcacatataaatcagagttaatatatgaacgcgtgtgcatgcacaagtgtgtgtgtgcctgcgtgctgtgcgtggcagggtgtgtgtgtgtgtgtctggctgtgcgttccggagtgtgtgacgatgctgacctagctgtgtggccttgggcttgctgcttcattactcacctggatggggacgagggatgagaagggtgtgggtttggccccatgtcactggccggaaggatgtgtctcagccctgccctgtggggtgcccccgatgggaggctgtcccatctcccagtccccatctctttttccccacactgtccctggccaagccctgcccagagctgaaccctgtagctgcccccttgccctgtgtgggattcgcagtgtctcatttggtgacgtcttactggtgatcatctcctcaccccatctcccaccttgtggaataaatacatgttagcacttcccag

SEQ ID NO: 23050 - DNA, 566 bp, Homo sapiens
  misc_feature 1..566: note = ENST00000447516
  source 1..566: mol_type = unassigned DNA; mol_type = unassigned DNA
ttgttggatttcaaaaccaagacgacaccacctcttggtgtgctggcagacacagagagaggactgtctgtcttccctcctgtgtccctctctgccacagctgaaatggctgatcttttcagaatcactgactgggggatgttcatgagcttggacaggataacaaatggaggcttatccaaatcccttgggctcattgaaggttatggtgggcggggtaaagggggccttccggctactctttccccggctgaagaagaaaaggctaagggaccccatgagaagtatggctacaattcatacctcagtgaaaaaatttcactggaccgttccattccggattatcgtcccaccaagtgtaaggagctcaagtactccaaggacctgccccagatatccatcatattcatcttcgtgaacgaggccctgtcggtgatcctgcggtccgtgcacagtgccgtcaatcacacgcccacacacctgctgaaggaaatcattctggtggatgacaacagcgacgaagaggagctgaaggtccccctagaggagtatgtccacaaacgcta

SEQ ID NO: 23051 - DNA, 3183 bp, Homo sapiens
  misc_feature 1..3183: note = ENST00000467723
  source 1..3183: mol_type = unassigned DNA; mol_type = unassigned DNA
gtctcctctcagctaggactttctgtttgcacagccgaggcctgcagggtacattccagaggtggacttggggctggccttgaacttccagaccctctctcccctctctggccggggctggggaaatgtcagctattctgagggccttggaagctggactcagttattttcggcttatccaaatcccttgggctcattgaaggttatggtgggcggggtaaagggggccttccggctactctttccccggctgaagaagaaaaggctaagggaccccatgagaagtatggctacaattcatacctcagtgaaaaaatttcactggaccgttccattccggattatcgtcccaccaagtgtaaggagctcaagtactccaaggacctgccccagatatccatcatattcatcttcgtgaacgaggccctgtcggtgatcctgcggtccgtgcacagtgccgtcaatcacacgcccacacacctgctgaaggaaatcattctggtggatgacaacagcgacgaagaggagctgaaggtccccctagaggagtatgtccacaaacgctaccccgggctggtgaaggtggtaagaaatcagaagagggaaggcctgatccgcgctcgcattgagggctggaaggtggctaccgggcaggtcactggcttctttgatgcccacgtggaattcaccgctggctgggctgagccggttctatcccgcatccaggaaaaccggaagcgtgtgatcctcccctccattgacaacatcaaacaggacaactttgaggtgcagcggtacgagaactcggcccacgggtacagctgggagctgtggtgcatgtacatcagccccccaaaagactggtgggacgccggagacccttctctccccatcaggaccccagccatgataggctgctcgttcgtggtcaacaggaagttcttcggtgaaattggtcttctggatcctggcatggatgtatacggaggagaaaatattgaactgggaatcaaggtatggctctgtgggggcagcatggaggtccttccttgctcacgggtggcccacattgagcggaagaagaagccatataatagcaacattggcttctacaccaagaggaatgctcttcgcgttgctgaggtctggatggacgattacaagtctcatgtgtacatagcgtggaacctgccgctggagaatccgggaattgacatcggtgatgtctccgaaagaagagcattaaggaaaagtttaaagtgtaagaatttccagtggtacctggaccatgtttacccagaaatgagaagatacaataataccgttgcttacggggagcttcgcaacaacaaggcaaaagacgtctgcttggaccaggggccgctggagaaccacacagcaatattgtatccgtgccatggctggggaccacagcttgcccgctacaccaaggaaggcttcctgcacttgggtgccctggggaccaccacactcctccctgacacccgctgcctggtggacaactccaagagtcggctgccccagctcctggactgcgacaaggtcaagagcagcctgtacaagcgctggaacttcatccagaatggagccatcatgaacaagggcacgggacgctgcctggaggtggagaaccggggcctggctggcatcgacctcatcctccgcagctgcacaggtcagaggtggaccattaagaactccatcaagtagagggagggagctggggcactggagcctggcccccaggacatggctgctccccccaacatctggaccagctgccctggcggagagacagcaaggggccggcaggtgctcgatgggccccccagggcttctccagggcagcacagggaccccggatgaagactctgtcccccctcaggcattcagctgcccacaagtttcctgcaccctggaaaagccccccacccttcctctgggaaactgacagctgtcttccacagcctctgatgtggacctggtactgaggagcaagactgtccagttctcctccacatctcccatcccagaatcaggatctgggactggcagggtcccctcctgtgtctcatctcttgcagcagcagctgctgaactccagccatcaacacggtgggaggcagcgggggcttcagccatgtcctagctccccgccctaaaaggaggcagtgaggaccaggcactatttcctccgaggttacttctacccagatgacacctgcctgttcacgccccaaggcagctactgcccctaacccttcccaccagggtagctttgggcactgcagctctggacttttctggcccctcctgagatgacctgatggagctgatgctttctctcctaatccctgggcactaggctcttatcagtgtgcttgggccagctctcctgcctgtgtctagaggaagccagagacagaaataggctaagcctgcagtaggatctcagccacaagggccccgcaggatggagctgggtcaaggaccagggagccctgactcccagaggctgccaccggggagaagcagcggtcctccatccagaacctaagggctgaagcaaaggctgccaggacccttgaagatgcttttggctcacctcatttcaccccacgctctgctggctggcagaggagaaggcagtcgtttcctctctgaagagtatttttttcgattgccctctggttagggtgcacatataaatcagagttaatatatgaacgcgtgtgcatgcacaagtgtgtgtgtgcctgcgtgctgtgcgtggcagggtgtgtgtgtgtgtgtctggctgtgcgttccggagtgtgtgacgatgctgacctagctgtgtggccttgggcttgctgcttcattactcacctggatggggacgagggatgagaagggtgtgggtttggccccatgtcactggccggaaggatgtgtctcagccctgccctgtggggtgcccccgatgggaggctgtcccatctcccagtccccatctctttttccccacactgtccctggccaagccctgcccagagctgaaccctgtagctgcccccttgccctgtgtgggattcgcagtgtctcatttggtgacgtcttactggtgatcatctcctcaccccatctcccaccttgtggaataaatacatgttagcacttccc

SEQ ID NO: 23052 - DNA, 3012 bp, Homo sapiens
  misc_feature 1..3012: note = ENST00000618959
  source 1..3012: mol_type = unassigned DNA; mol_type = unassigned DNA
ggcttatccaaatcccttgggctcattgaaggttatggtgggcggggtaaagggggccttccggctactctttccccggctgaagaagaaaaggctaagggaccccatgagaagtatggctacaattcatacctcagtgaaaaaatttcactggaccgttccattccggattatcgtcccaccaagtgtaaggagctcaagtactccaaggacctgccccagatatccatcatattcatcttcgtgaacgaggccctgtcggtgatcctgcggtccgtgcacagtgccgtcaatcacacgcccacacacctgctgaaggaaatcattctggtggatgacaacagcgacgaagaggagctgaaggtccccctagaggagtatgtccacaaacgctaccccgggctggtgaaggtggtaagaaatcagaagagggaaggcctgatccgcgctcgcattgagggctggaaggtggctaccgggcaggtcactggcttctttgatgcccacgtggaattcaccgctggctgggctgagccggttctatcccgcatccaggaaaaccggaagcgtgtgatcctcccctccattgacaacatcaaacaggacaactttgaggtgcagcggtacgagaactcggcccacgggtacagctgggagctgtggtgcatgtacatcagccccccaaaagactggtgggacgccggagacccttctctccccatcaggaccccagccatgataggctgctcgttcgtggtcaacaggaagttcttcggtgaaattggtcttctggatcctggcatggatgtatacggaggagaaaatattgaactgggaatcaaggtatggctctgtgggggcagcatggaggtccttccttgctcacgggtggcccacattgagcggaagaagaagccatataatagcaacattggcttctacaccaagaggaatgctcttcgcgttgctgaggtctggatggacgattacaagtctcatgtgtacatagcgtggaacctgccgctggagaatccgggaattgacatcggtgatgtctccgaaagaagagcattaaggaaaagtttaaagtgtaagaatttccagtggtacctggaccatgtttacccagaaatgagaagatacaataataccgttgcttacggggagcttcgcaacaacaaggcaaaagacgtctgcttggaccaggggccgctggagaaccacacagcaatattgtatccgtgccatggctggggaccacagcttgcccgctacaccaaggaaggcttcctgcacttgggtgccctggggaccaccacactcctccctgacacccgctgcctggtggacaactccaagagtcggctgccccagctcctggactgcgacaaggtcaagagcagcctgtacaagcgctggaacttcatccagaatggagccatcatgaacaagggcacgggacgctgcctggaggtggagaaccggggcctggctggcatcgacctcatcctccgcagctgcacaggtcagaggtggaccattaagaactccatcaagtagagggagggagctggggcactggagcctggcccccaggacatggctgctccccccaacatctggaccagctgccctggcggagagacagcaaggggccggcaggtgctcgatgggccccccagggcttctccagggcagcacagggaccccggatgaagactctgtcccccctcaggcattcagctgcccacaagtttcctgcaccctggaaaagccccccacccttcctctgggaaactgacagctgtcttccacagcctctgatgtggacctggtactgaggagcaagactgtccagttctcctccacatctcccatcccagaatcaggatctgggactggcagggtcccctcctgtgtctcatctcttgcagcagcagctgctgaactccagccatcaacacggtgggaggcagcgggggcttcagccatgtcctagctccccgccctaaaaggaggcagtgaggaccaggcactatttcctccgaggttacttctacccagatgacacctgcctgttcacgccccaaggcagctactgcccctaacccttcccaccagggtagctttgggcactgcagctctggacttttctggcccctcctgagatgacctgatggagctgatgctttctctcctaatccctgggcactaggctcttatcagtgtgcttgggccagctctcctgcctgtgtctagaggaagccagagacagaaataggctaagcctgcagtaggatctcagccacaagggccccgcaggatggagctgggtcaaggaccagggagccctgactcccagaggctgccaccggggagaagcagcggtcctccatccagaacctaagggctgaagcaaaggctgccaggacccttgaagatgcttttggctcacctcatttcaccccacgctctgctggctggcagaggagaaggcagtcgtttcctctctgaagagtatttttttcgattgccctctggttagggtgcacatataaatcagagttaatatatgaacgcgtgtgcatgcacaagtgtgtgtgtgcctgcgtgctgtgcgtggcagggtgtgtgtgtgtgtgtctggctgtgcgttccggagtgtgtgacgatgctgacctagctgtgtggccttgggcttgctgcttcattactcacctggatggggacgagggatgagaagggtgtgggtttggccccatgtcactggccggaaggatgtgtctcagccctgccctgtggggtgcccccgatgggaggctgtcccatctcccagtccccatctctttttccccacactgtccctggccaagccctgcccagagctgaaccctgtagctgcccccttgccctgtgtgggattcgcagtgtctcatttggtgacgtcttactggtgatcatctcctcaccccatctcccaccttgtggaataaatacatgttagcacttccc

SEQ ID NO: 23053 - DNA, 854 bp, Homo sapiens
  misc_feature 1..854: note = ENST00000320531
  source 1..854: mol_type = unassigned DNA; mol_type = unassigned DNA
gcttctcccagctggagtaggtgggggaggccagacatggaggcccttcctccagtcagatccagccttttggggatcctgttgcaggttacgaggctctcagtgctgttggttcagaaccgagatcacctctataatttcctgctcctcaagatcaacctcttcaaccactgggtgtcagggctggcccaggaggcccgggggtcctgtaactggcaggcccacctacccctgggagctgcagcctgccccctgggccaggctctctgggctgggctggctctgatacaggtccccgtatggctggtgctacagggacccaggctgatgtgggctggcatgtggggcagcaccaagggcctgggcctggccttgctcagtgcctgggagcagctgggcctgtctgtggccatctggacagatctgtttttgtcatgtctgcacggcctgatgttggtggccttgctcttggtggtagtgacctggagggtgtgtcagaagtcccactgcttccgactgggcaggcagctcagtaaggccttgcaagtgaactgcgtggtaaggaagctcctggtacagctgagacgtctgtattggtgggtggagactatgactgccctcacctcctggcacctggcctatctcatcacctggaccacctgcctggcctcccacctgctgcaggctgcctttgagcacacgacccagctggccgaggcccaggaggttgaaccccaggaggtctcagggtcttccttgctgccctcactgtctgcgtcctcggactcagagtctggaacagttttgccagagcaagaaactcccagagaataaatgtatccccatctgcctct

SEQ ID NO: 23054 - DNA, 961 bp, Homo sapiens
  misc_feature 1..961: note = ENST00000426490
  source 1..961: mol_type = unassigned DNA; mol_type = unassigned DNA
ggagtaggtgggggaggccagacatggaggcccttcctccagtcagatccagccttttggggatcctgttgcaggttacgaggctctcagtgctgagacagggtctcgctctgtcgcccagcctggagcgcagtggtgccggctcagctcgttgcagcctccaactcccggtctcaagcaatcctcccccctcagcctccaagtagccgggactatagttggttcagaaccgagatcacctctataatttcctgctcctcaagatcaacctcttcaaccactgggtgtcagggctggcccaggaggcccgggggtcctgtaactggcaggcccacctacccctgggagctgcagcctgccccctgggccaggctctctgggctgggctggctctgatacaggtccccgtatggctggtgctacagggacccaggctgatgtgggctggcatgtggggcagcaccaagggcctgggcctggccttgctcagtgcctgggagcagctgggcctgtctgtggccatctggacagatctgtttttgtcatgtctgcacggcctgatgttggtggccttgctcttggtggtagtgacctggagggtgtgtcagaagtcccactgcttccgactgggcaggcagctcagtaaggccttgcaagtgaactgcgtggtaaggaagctcctggtacagctgagacgtctgtattggtgggtggagactatgactgccctcacctcctggcacctggcctatctcatcacctggaccacctgcctggcctcccacctgctgcaggctgcctttgagcacacgacccagctggccgaggcccaggaggttgaaccccaggaggtctcagggtcttccttgctgccctcactgtctgcgtcctcggactcagagtctggaacagttttgccagagcaagaaactcccagagaataaatgtatccccatctgcc

SEQ ID NO: 23055 - DNA, 4294 bp, Homo sapiens
  misc_feature 1..4294: note = ENST00000508596
  source 1..4294: mol_type = unassigned DNA; mol_type = unassigned DNA
gcctctggggcagaccctggagatcgggctcgcggcgccttccatcgtggctccgcgctggggcttgcggagcacgcttcccgcccctcggagcccgcgggcccggccgccccgcccccgggcgccctgagcgagcaggcggggagggcggggagggtccgcgcgttggtggtgctcgcctcgcagctgcgcccgccggcttcagcaccttccgctgtccgccgctgcagccgcctcctcctccaggcaaacatgtcccaggtaaggcaagtgggattgctggctgctggatgtcagccatggaacaaggatgtatgtgctgccagtggagacaggtttgcatattgtgcgaccctggctatctatatttatcagttggatcaccgttataatgaattcaaacttcacgcaattatgtctgaacataaaaaaacaatcacagcaatttcttggtgtccacataatcctgatctgtttgcaagtggcagtactgataatttagtgatcatttggaatgttgcagaacaaaaagtcattgctaaactcgacagtacaaaagggatccctgcttctcttagttggtgctggaatgcagaggatgtggtggcatttgtttcccacagaggcccactgttcatttggaccatctcaggaccagatagtggagtgattgtacacaaagatgctcatagcttcttgtctgatatctgtatgttcagatggcatacacaccaaaaggggaaagttgtgtttggtcatattgatggaagtctatcaatttttcatccaggtaataaaaatcagaaacatgttttgagaccagaatctcttgaagggacagatgaagaggatccagttacggccttggaatgggacccactatctactgattatcttctagtggttaatttgcattatggaattcgcctggtagattctgaatcactttcttgcataacaacatttaatcttcccagtgcagcagcttctgtacagtgcttagcctgggttcccagtgctcctgggatgtttataactggagattctcaagtgggtgttttacgcatttggaatgtttcaagaacaacacctattgataatcttaaattaaagaaaacaggatttcactgcttacatgtacttaattctcctccaagaaaaaagttttcagtccaatctccaaccaaaaatcattatacatcctcaacaagcgaagcagttccacccccaactttaacacagaatcaagcattttctcttcctcctggtcatgcagtgtgttgtttcttggatggtggagttggactttatgatatgggagctaagaagtgggattttcttagagacttgggacatgtggaaactatctttgactgcaaattcaaacctgacgatcctaatcttttagcaacagcttcatttgatggcactataaaagtctgggatataaacacattaacagcagtgtacacatccccgggtaatgaaggtgttatttattccctttcttgggctccaggtggtttaaattgtattgctgggggaacttcccgaaatggtgcttttatttggaatgttcaaaagggcaaaattatacaacgatttaatgagcatggaacaaatggaatattctgcattgcctggagtcataaagattctaaaagaatagcaacctgcagcagtgatggtttctgtattattcgaacaattgatggtaaagtgctacacaaatataaacatccagctgcagtgtttggttgtgattggagccaaaacaataaagacatgatagccactggctgtgaagacacaaatgttcgtgtttattatgtagccaccagctcagatcaaccattgaaagtatttagtgggcatacagcaaaagtgtttcatgttaaatggtctcctctgagagagggaattctttgcagtggttctgatgatggtaccgttcgaatctgggattatactcaggatgcttgcatcaatattcttaatggacacactgcacctgtgagaggattaatgtggaatactgagattccatatctgctcatatctggcagctgggactatactataaaagtatgggacactcgagaaggaacttgtgtggatactgtgtatgatcacggtgcagatgtatatggtttaacctgccatcccagtcgccccttcactatggcctcttgctcccgtgactctacagtgagactctggtcattaacagccttagtcactcctgtacaaataaatattctggcagacagatcttgggaagaaattattgggaacactgattatgctatagaaccaggcactcctcctctactgtgtggtaaagtgtcaagagatattagacaggaaatagaaaaactaactgctaattctcaagtgaaaaaactaagatggttctcagaatgtttatctcctccaggtggcagtgacaatttatggaacttggttgctgtgataaaaggacaggatgatagcttacttcctcagaactactgcaaaggaataatgcacttgaaacatctgattaaatttagaacatctgaagctcaagaactaacaacagtcaagatgtctaaatttggtggtggtattggtgtacctgctaaagaggaaagactgaaggaagctgctgaaatccacttgagattaggacaaattcagagatactgtgaacttatggttgaacttggagagtgggacaaagccctgtcaattgcaccaggagtctctgtgaaatactggaagaagttaatgcagaggagagctgaccaattaatccaggaagataaggatgatgtcattccatactgcatagccattggtgatgtgaaaaagctagtccattttttcatgtcaagaggtcagcttaaagaagctctgcttgttgcacaggctgcttgtgaaggaaatatgcagcccttacatgtttccgtgcctaaaggagcttcatattctgatgatatctacaaggaagactttaatgaactcctgcacaaagtcagtaaagaactggcagaatggtattttcaagatggtcgagcagtactagccgcatgttgccatcttgccatagataatattgagcttgctatggcatacctgattcgcggaaatgaactggagttggcagtctgtgtgggcacagtactaggagagtctgcagcaccagcaacccactatgccttagaattactggcgagaaagtgcatgatgatttcagtatggaatttggcagctgatcttcttctgatgattcctgataatgaactacatttaataaaactctgtgctttctacccaggatgtactgaagagataaatgaccttcatgataagtgtaagctacccacagtggaagaatgtatgcagttagctgagacagcccgtgcagatgacaatatatttgaaactgtaaaatattacttgttaagtcaagaacctgaaaaagcccttcctattggtattagctttgttaaagaatacatcagtagctcagactggactttggataccatataccctgttcttgacctactgagctatattcgtactgaaaaattactcttgcatacgtgtactgaagctcgaaatgagttgctgatattatgtggttacattggtgcattactggctatcagaagacagtaccaaagcattgttccagcactttatgagtacacaagtcagctattaaaacgtcgggaggtgtcagtacctttaaaaattgaatatctttctgaggaattggatgcatggagagcttgcacacagtccaccaacagatcattagaagactctccgtatacacccccttctgattcacaaagaatgatttatgcaactttattaaagagactaaaagaagagtcactgaaaggaattattggaccagattatgtgactggatcaaatcttccaagtcattctgatattcacatttcttgtcttacgggattaaaaatccagggccctgtgtttttccttgaagacgggaaatctgctatctccttgaatgatgctttgatgtgggcaaaggtgaatccattctcacctttagggactggaatacgactcaatccattctgatagaagatttttgtccatgcttgatttttttttttaaagaaaaactttcatgggttagcattaccttaatctttgttgctcaagtgccagaggttgggagaaggattgcaggttgggagaggtgggaaatagcagtgaattttagtcattaacttcaaaatatatatatatatataatttaaaggaaaaa

SEQ ID NO: 23056 - DNA, 456 bp, Homo sapiens
  misc_feature 1..456: note = ENST00000509792
  source 1..456: mol_type = unassigned DNA; mol_type = unassigned DNA
atcgtggctccgcgctggggcttgcggagcacgcttcccgcccctcggagcccgcgggcccggccgccccgcccccgggcgccctgagcgagcaggcggggagggcggggagggtccgcgcgttggtggtgctcgcctcgcagctgcgcccgccggcttcagcaccttccgctgtccgccgctgcagccgcctcctcctccagatggaaatattaaagtgaagtcatgtatcttccagtacgtcttcaggaacagagatttcatcgaaattatattaatttatagaaatcatatgaggataggctgcgtgcggtggctcatacctgtaatcccggcactttgggaggctgaggcaggcggatcacctgaggaagttccataaatcttgcaacatgggatggccttcttcagtgatactattaatatagcatgtgcaatttctatttcactggagtt

SEQ ID NO: 23057 - DNA, 4705 bp, Homo sapiens
  misc_feature 1..4705: note = ENST00000280190
  source 1..4705: mol_type = unassigned DNA; mol_type = unassigned DNA
gcggggagggtccgcgcgttggtggtgctcgcctcgcagctgcgcccgccggcttcagcaccttccgctgtccgccgctgcagccgcctcctcctccaggtgctgactattctgatgccgagtttccaattgccttgattaaagtagaaacattctatggcttggatgacttacatttcaaattggtttgagcaagatgattggtatgaaggactacaaagagcaaacatgtcccaggtaaggcaagtgggattgctggctgctggatgtcagccatggaacaaggatgtatgtgctgccagtggagacaggtttgcatattgtgcgaccctggctatctatatttatcagttggatcaccgttataatgaattcaaacttcacgcaattatgtctgaacataaaaaaacaatcacagcaatttcttggtgtccacataatcctgatctgtttgcaagtggcagtactgataatttagtgatcatttggaatgttgcagaacaaaaagtcattgctaaactcgacagtacaaaagggatccctgcttctcttagttggtgctggaatgcagaggatgtggtggcatttgtttcccacagaggcccactgttcatttggaccatctcaggaccagatagtggagtgattgtacacaaagatgctcatagcttcttgtctgatatctgtatgttcagatggcatacacaccaaaaggggaaagttgtgtttggtcatattgatggaagtctatcaatttttcatccaggtaataaaaatcagaaacatgttttgagaccagaatctcttgaagggacagatgaagaggatccagttacggccttggaatgggacccactatctactgattatcttctagtggttaatttgcattatggaattcgcctggtagattctgaatcactttcttgcataacaacatttaatcttcccagtgcagcagcttctgtacagtgcttagcctgggttcccagtgctcctgggatgtttataactggagattctcaagtgggtgttttacgcatttggaatgtttcaagaacaacacctattgataatcttaaattaaagaaaacaggatttcactgcttacatgtacttaattctcctccaagaaaaaagttttcagtccaatctccaaccaaaaatcattatacatcctcaacaagcgaagcagttccacccccaactttaacacagaatcaagcattttctcttcctcctggtcatgcagtgtgttgtttcttggatggtggagttggactttatgatatgggagctaagaagtgggattttcttagagacttgggacatgtggaaactatctttgactgcaaattcaaacctgacgatcctaatcttttagcaacagcttcatttgatggcactataaaagtctgggatataaacacattaacagcagtgtacacatccccgggtaatgaaggtgttatttattccctttcttgggctccaggtggtttaaattgtattgctgggggaacttcccgaaatggtgcttttatttggaatgttcaaaagggcaaaattatacaacgatttaatgagcatggaacaaatggaatattctgcattgcctggagtcataaagattctaaaagaatagcaacctgcagcagtgatggtttctgtattattcgaacaattgatggtaaagtgctacacaaatataaacatccagctgcagtgtttggttgtgattggagccaaaacaataaagacatgatagccactggctgtgaagacacaaatgttcgtgtttattatgtagccaccagctcagatcaaccattgaaagtatttagtgggcatacagcaaaagtgtttcatgttaaatggtctcctctgagagagggaattctttgcagtggttctgatgatggtaccgttcgaatctgggattatactcaggatgcttgcatcaatattcttaatggacacactgcacctgtgagaggattaatgtggaatactgagattccatatctgctcatatctggcagctgggactatactataaaagtatgggacactcgagaaggaacttgtgtggatactgtgtatgatcacggtgcagatgtatatggtttaacctgccatcccagtcgccccttcactatggcctcttgctcccgtgactctacagtgagactctggtcattaacagccttagtcactcctgtacaaataaatattctggcagacagatcttgggaagaaattattgggaacactgattatgctatagaaccaggcactcctcctctactgtgtggtaaagtgtcaagagatattagacaggaaatagaaaaactaactgctaattctcaagtgaaaaaactaagatggttctcagaatgtttatctcctccaggtggcagtgacaatttatggaacttggttgctgtgataaaaggacaggatgatagcttacttcctcagaactactgcaaaggaataatgcacttgaaacatctgattaaatttagaacatctgaagctcaagaactaacaacagtcaagatgtctaaatttggtggtggtattggtgtacctgctaaagaggaaagactgaaggaagctgctgaaatccacttgagattaggacaaattcagagatactgtgaacttatggttgaacttggagagtgggacaaagccctgtcaattgcaccaggagtctctgtgaaatactggaagaagttaatgcagaggagagctgaccaattaatccaggaagataaggatgatgtcattccatactgcatagccattggtgatgtgaaaaagctagtccattttttcatgtcaagaggtcagcttaaagaagctctgcttgttgcacaggctgcttgtgaaggaaatatgcagcccttacatgtttccgtgcctaaaggagcttcatattctgatgatatctacaaggaagactttaatgaactcctgcacaaagtcagtaaagaactggcagaatggtattttcaagatggtcgagcagtactagccgcatgttgccatcttgccatagataatattgagcttgctatggcatacctgattcgcggaaatgaactggagttggcagtctgtgtgggcacagtactaggagagtctgcagcaccagcaacccactatgccttagaattactggcgagaaagtgcatgatgatttcagtatgctttccatgtgttggatacagtgtccccttttgttacgttaacaggaatttggcagctgatcttcttctgatgattcctgataatgaactacatttaataaaactctgtgctttctacccaggatgtactgaagagataaatgaccttcatgataagtgtaagctacccacagtggaagaatgtatgcagttagctgagacagcccgtgcagatgacaatatatttgaaactgtaaaatattacttgttaagtcaagaacctgaaaaagcccttcctattggtattagctttgttaaagaatacatcagtagctcagactggactttggataccatataccctgttcttgacctactgagctatattcgtactgaaaaattactcttgcatacgtgtactgaagctcgaaatgagttgctgatattatgtggttacattggtgcattactggctatcagaagacagtaccaaagcattgttccagcactttatgagtacacaagtcagctattaaaacgtcgggaggtgtcagtacctttaaaaattgaatatctttctgaggaattggatgcatggagagcttgcacacagtccaccaacagatcattagaagactctccgtatacacccccttctgattcacaaagaatgatttatgcaactttattaaagagactaaaagaagagtcactgaaaggaattattggaccagattatgtgactggatcaaatcttccaagtcattctgatattcacatttcttgtcttacgggattaaaaatccagggccctgtgtttttccttgaagacgggaaatctgctatctccttgaatgatgctttgatgtgggcaaaggtgaatccattctcacctttagggactggaatacgactcaatccattctgatagaagatttttgtccatgcttgatttttttttttaaagaaaaactttcatgggttagcattaccttaatctttgttgctcaagtgccagaggttgggagaaggattgcaggttgggagaggtgggaaatagcagtgaattttagtcattaacttcaaaatatatatatatatataatttaaaggaaaaataggtgcctcctttataaacagtaatagctacgtttgggaaggaggaaacatttaaattataaaggactgaataatctaaaaagcatataaaagtttcacacagcataaaagataccaaaatatcatatggttgaaatattgaaacatattaaattgtgcaacacctagaatagtgctagacatacagtaagtacttaatggatatttgaatgattgaatatcttgaaatgttgaaatgtaaggtgtgcacagtgatcttcaacttaacaaacacttacgttctcctttataaaatgcatagtaaaccactaacgttagctgttttaataaaagttttcagttataagtttagtaaatattaataaatggatacacattcaaaatacttt

SEQ ID NO: 23058 - DNA, 4119 bp, Homo sapiens
  misc_feature 1..4119: note = ENST00000507824
  source 1..4119: mol_type = unassigned DNA; mol_type = unassigned DNA
gtttccaattgccttgattaaagtagaaacattctatggcttggatgacttacatttcaaattggtttgagcaagatgattggtatgaaggactacaaagagcaaacatgtcccaggtaaggcaagtgggattgctggctgctggatgtcagccatggaacaaggatgtatgtgctgccagtggagacaggtttgcatattgtgcgaccctggctatctatatttatcagttggatcaccgttataatgaattcaaacttcacgcaattatgtctgaacataaaaaaacaatcacagcaatttcttggtgtccacataatcctgatctgtttgcaagtggcagtactgataatttagtgatcatttggaatgttgcagaacaaaaagtcattgctaaactcgacagtacaaaagggatccctgcttctcttagttggtgctggaatgcagaggatgtggtggcatttgtttcccacagaggcccactgttcatttggaccatctcaggaccagatagtggagtgattgtacacaaagatgctcatagcttcttgtctgatatctgtatgttcagatggcatacacaccaaaaggggaaagttgtgtttggtcatattgatggaagtctatcaatttttcatccagatgaagaggatccagttacggccttggaatgggacccactatctactgattatcttctagtggttaatttgcattatggaattcgcctggtagattctgaatcactttcttgcataacaacatttaatcttcccagtgcagcagcttctgtacagtgcttagcctgggttcccagtgctcctgggatgtttataactggagattctcaagtgggtgttttacgcatttggaatgtttcaagaacaacacctattgataatcttaaattaaagaaaacaggatttcactgcttacatgtacttaattctcctccaagaaaaaagttttcagtccaatctccaaccaaaaatcattatacatcctcaacaagcgaagcagttccacccccaactttaacacagaatcaagcattttctcttcctcctggtcatgcagtgtgttgtttcttggatggtggagttggactttatgatatgggagctaagaagtgggattttcttagagacttgggacatgtggaaactatctttgactgcaaattcaaacctgacgatcctaatcttttagcaacagcttcatttgatggcactataaaagtctgggatataaacacattaacagcagtgtacacatccccgggtaatgaaggtgttatttattccctttcttgggctccaggtggtttaaattgtattgctgggggaacttcccgaaatggtgcttttatttggaatgttcaaaagggcaaaattatacaacgatttaatgagcatggaacaaatggaatattctgcattgcctggagtcataaagattctaaaagaatagcaacctgcagcagtgatggtttctgtattattcgaacaattgatggtaaagtgctacacaaatataaacatccagctgcagtgtttggttgtgattggagccaaaacaataaagacatgatagccactggctgtgaagacacaaatgttcgtgtttattatgtagccaccagctcagatcaaccattgaaagtatttagtgggcatacagcaaaagtgtttcatgttaaatggtctcctctgagagagggaattctttgcagtggttctgatgatggtaccgttcgaatctgggattatactcaggatgcttgcatcaatattcttaatggacacactgcacctgtgagaggattaatgtggaatactgagattccatatctgctcatatctggcagctgggactatactataaaagtatgggacactcgagaaggaacttgtgtggatactgtgtatgatcacggtgcagatgtatatggtttaacctgccatcccagtcgccccttcactatggcctcttgctcccgtgactctacagtgagactctggtcattaacagccttagtcactcctgtacaaataaatattctggcagacagatcttgggaagaaattattgggaacactgattatgctatagaaccaggcactcctcctctactgtgtggtaaagtgtcaagagatattagacaggaaatagaaaaactaactgctaattctcaagtgaaaaaactaagatggttctcagaatgtttatctcctccaggtggcagtgacaatttatggaacttggttgctgtgataaaaggacaggatgatagcttacttcctcagaactactgcaaaggaataatgcacttgaaacatctgattaaatttagaacatctgaagctcaagaactaacaacagtcaagatgtctaaatttggtggtggtattggtgtacctgctaaagaggaaagactgaaggaagctgctgaaatccacttgagattaggacaaattcagagatactgtgaacttatggttgaacttggagagtgggacaaagccctgtcaattgcaccaggagtctctgtgaaatactggaagaagttaatgcagaggagagctgaccaattaatccaggaagataaggatgatgtcattccatactgcatagccattggtgatgtgaaaaagctagtccattttttcatgtcaagaggtcagcttaaagaagctctgcttgttgcacaggctgcttgtgaaggaaatatgcagcccttacatgtttccgtgcctaaaggagcttcatattctgatgatatctacaaggaagactttaatgaactcctgcacaaagtcagtaaagaactggcagaatggtattttcaagatggtcgagcagtactagccgcatgttgccatcttgccatagataatattgagcttgctatggcatacctgattcgcggaaatgaactggagttggcagtctgtgtgggcacagtactaggagagtctgcagcaccagcaacccactatgccttagaattactggcgagaaagtgcatgatgatttcagtatgctttccatgtgttggatacaggaatttggcagctgatcttcttctgatgattcctgataatgaactacatttaataaaactctgtgctttctacccaggatgtactgaagagataaatgaccttcatgataagtgtaagctacccacagtggaagaatgtatgcagttagctgagacagcccgtgcagatgacaatatatttgaaactgtaaaatattacttgttaagtcaagaacctgaaaaagcccttcctattggtattagctttgttaaagaatacatcagtagctcagactggactttggataccatataccctgttcttgacctactgagctatattcgtactgaaaaattactcttgcatacgtgtactgaagctcgaaatgagttgctgatattatgtggttacattggtgcattactggctatcagaagacagtaccaaagcattgttccagcactttatgagtacacaagtcagctattaaaacgtcgggaggtgtcagtacctttaaaaattgaatatctttctgaggaattggatgcatggagagcttgcacacagtccaccaacagatcattagaagactctccgtatacacccccttctgattcacaaagaatgatttatgcaactttattaaagagactaaaagaagagtcactgaaaggaattattggaccagattatgtgactggatcaaatcttccaagtcattctgatattcacatttcttgtcttacgggattaaaaatccagggccctgtgtttttccttgaagacgggaaatctgctatctccttgaatgatgctttgatgtgggcaaaggtgaatccattctcacctttagggactggaatacgactcaatccattctgatagaagatttttgtccatgcttgatttttttttttaaagaaaaactttcatgggttagcattaccttaatctttgttgctcaagtgccagaggttgggagaaggattgcaggttgggagaggtgggaaatagcagtgaattttagtcattaacttcaaaatatatatatatatataatttaaaggaaaaa

SEQ ID NO: 23059 - DNA, 466 bp, Homo sapiens
  misc_feature 1..466: note = ENST00000513261
  source 1..466: mol_type = unassigned DNA; mol_type = unassigned DNA
gaaacattctatggcttggatgacttacatttcaaattggtttgagcaagatgattggtatgaaggactacaaagagcaaacatgtcccaggtaaggcaagtgggattgctggctgctggatgtcagccatggaacaaggatgtatgtgctgccagtggagacaggtttgcatattgtgcgaccctggctatctatatttatcagggatccctgcttctcttagttggtgctggaatgcagaggatgtggtggcatttgtttcccacagaggcccactgttcatttggaccatctcaggaccagatagtggagtgattgtacacaaagatgctcatagcttcttgtctgatatctgtatgttcagatggcatacacaccaaaaggggaaagttgtgtttggtcatattgatggaagtctatcaatttttcatccaggtaataaaaatcagaaacatgttttgagac

SEQ ID NO: 23060 - DNA, 677 bp, Homo sapiens
  misc_feature 1..677: note = ENST00000505894
  source 1..677: mol_type = unassigned DNA; mol_type = unassigned DNA
ggatccctgcttctcttagttggtgctggaatgcagaggatgtggtggcatttgtttcccacagaggcccactgttcatttggaccatctcaggaccagatagtggagtgattgtacacaaagatgctcatagcttcttgtctgatatctgtatgttcagatggcatacacaccaaaaggggaaagttgtgtttggtcatattgatggaagtctatcaatttttcatccagtttcagtccaatctccaaccaaaaatcattatacatcctcaacaagcgaagcagttccacccccaactttaacacagaatcaagcattttctcttcctcctggtcatgcagtgtgttgtttcttggatggtggagttggactttatgatatgggagctaagaagtgggattttcttagagacttgggacatgtggaaactatctttgactgcaaattcaaacctgacgatcctaatcttttagcaacagcttcatttgatggcactataaaagtctgggatataaacacattaacagcagtgtacacatccccgggtaatgaaggtgttatttattccctttcttgggctccaggtggtttaaattgtattgctgggggaacttcccgaaatggtgcttttatttggaatgttcaaaagggcaaaattatacaacgatttaatgag

SEQ ID NO: 23061 - DNA, 4911 bp, Homo sapiens
  misc_feature 1..4911: note = ENST00000443118
  source 1..4911: mol_type = unassigned DNA; mol_type = unassigned DNA
atggaacttggttgctgtgataaaaggacaggatgatagcttacttcctcagaactactgcaaaggaataatgcacttgaaacatctgattaaatttagaacatctgaagctcaagaactaacaacagtcaagatgtctaaatttggtggtggtattggtgtacctgctaaagaggaaagactgaaggaagctgctgaaatccacttgagattaggacaaattcagagatactgtgaacttatggttgaacttggagagtgggacaaagccctgtcaattgcaccaggagtctctgtgaaatactggaagaagttaatgcagaggagagctgaccaattaatccaggaagataaggatgatgtcattccatactgcatagccattggtgatgtgaaaaagctagtccattttttcatgtcaagaggtcagcttaaagaagctctgcttgttgcacaggctgcttgtgaaggaaatatgcagcccttacatgtttccgtgcctaaaggagcttcatattctgatgatatctacaaggaagactttaatgaactcctgcacaaagtcagtaaagaactggcagaatggtattttcaagatggtcgagcagtactagccgcatgttgccatcttgccatagataatattgagcttgctatggcatacctgattcgcggaaatgaactggagttggcagtctgtgtgggcacagtactaggagagtctgcagcaccagcaacccactatgccttagaattactggcgagaaagtgcatgatgatttcagtatgctttccatgtgttggatacaggaatttggcagctgatcttcttctgatgattcctgataatgaactacatttaataaaactctgtgctttctacccaggatgtactgaagagataaatgaccttcatgataagtgtaagctacccacagtggaagaatgtatgcagttagctgagacagcccgtgcagatgacaatatatttgaaactgtaaaatattacttgttaagtcaagaacctgaaaaagcccttcctattggtattagctttgttaaagaatacatcagtagctcagactggactttggataccatataccctgttcttgacctactgagctatattcgtactgaaaaattactcttgcatacgtgtactgaagctcgaaatgagttgctgatattatgtggttacattggtgcattactggctatcagaagacagtaccaaagcattgttccagcactttatgagtacacaagtcagctattaaaacgtcgggaggtgtcagtacctttaaaaattgaatatctttctgaggaattggatgcatggagagcttgcacacagtccaccaacagatcattagaagactctccgtatacacccccttctgattcacaaagaatgatttatgcaactttattaaagagactaaaagaagagtcactgaaaggaattattggaccagattatgtgactggatcaaatcttccaagtcattctgatattcacatttcttgtcttacgggattaaaaatccagggccctgtgtttttccttgaagacgggaaatctgctatctccttgaatgatgctttgatgtgggcaaaggtgaatccattctcacctttagggactggaatacgactcaatccattctgatagaagatttttgtccatgcttgatttttttttttaaagaaaaactttcatgggttagcattaccttaatctttgttgctcaagtgccagaggttgggagaaggattgcaggttgggagaggtgggaaatagcagtgaattttagtcattaacttcaaaatatatatatatatataatttaaaggaaaaataggtgcctcctttataaacagtaatagctacgtttgggaaggaggaaacatttaaattataaaggactgaataatctaaaaagcatataaaagtttcacacagcataaaagataccaaaatatcatatggttgaaatattgaaacatattaaattgtgcaacacctagaatagtgctagacatacagtaagtacttaatggatatttgaatgattgaatatcttgaaatgttgaaatgtaaggtgtgcacagtgatcttcaacttaacaaacacttacgttctcctttataaaatgcatagtaaaccactaacgttagctgttttaataaaagttttcagttataagtttagtaaatattaataaatggatacacattcaaaatacttttaaaaaaaagaaaatgttaccagtttttttatctgaagtttaactgtcccattgtaaaggtgtaagttatataggcttgaaaaaaattggcgggtaaaaatcacaaaatgcagtcgaatatatatatgaaaacttgcattaggtgataaagtgactattttaagagattcagcatgcatggatattagttttgattaatgtgtacaataatttacacagtatactctagtcaatttatgttaactttatttaaaacacaatttatttggccgggcacggtggctcacacctgtaatctcagcactttggcaggccaaggcaggtggatcacctgaggtcaggagttcatgaccagcctggccagcatggtaaaaccctgtctccactaaaaatacaaaaattagccaggcatggtggcgggcacctgtaatcccagttacttgggaagctgaggcaggagaatcccttgaacctgggaggcagaggttccagtgagccaagatcgcaccactgcactccagcctgggcaacaaagagcgaaactctgtctcaaaaaacaaaccaacaaaaaccacaattgatttgatgaaaattagttttaagtaaatgtttgtaaatagatattggttgaatttttggatatattatgttgatttaacttttaaaatgttgtttaaaagtgtgaagctatgaaaagcctgataatgtgactacagatatttcagttggactagaattctgactttgaaacttattaaattaatgcatactggaagtactttgatactcaagttgtttcacaagatttataatatagatggttttgtttgactaaagaataatctcatataactagaatacttgtggcttttattatctttaaacttgttgcatttaaaatatttttaaaaccttcttaacaaaacttcttaaaactggaaaaaatatatattatgtatctatgtatcatatttatcacatgaccacttttgattccttaaaaagacattacaggcttaaattccattttattaaaaaaaaaaaattgcctgtaatcccagcacttcaggaggccgagatgggcagatcttgaggtcggtagatggagaccatcctggccaacatggtgaaaccctgtctctactaaaaatacaaaaattagctgggtgtggtggtgtgtacctgtagtcccagctacccaggaagctaaggcaggagaatcgcttgaatccaggaggcggaggttgcagtgagctgagatcgcactactgcactccagcctgggcgacagagcaagaccaccatctccaaaaattatatatataaaaataattaatattatagaagagaatatacacaactcagagatgcaatggataatataaaaagagtacctgagatgtatttttttaaactcttagagatatctgtaactcaaatttttcttaggtgaggaggattattaactggcacatatgtactaaaaacccctcacttaaaaatggcagtctcaatcctactgtcattctttttattttaaaataaataaataagcctatctttttgtgcttacatacttaaaaggatatcattaagtatataaacaatcattacttctgtatttttaatgaatgcaggaaaataatatttttatgtataaaagatgaagaaaaaattttgcaagtctttaagcacataaatacaacagaatagccacccaatttctgtctgaaatctaaattggatggatttgaccatcattctattatctttgatttctacaatgtctatatcttattacctataactattaatttttcatagaattataaatgtcatttgactatgtcaatctgtatatattgtaccttaatatgaaaaacaaattttttaattcataaaagtatttttattagatttcatatgcatgaaacccaagcaaattatatgaatttattttactatttgaaaatgttcatattaccaataatgtggacaaattactttgcaggtttaaatatgcctctgtaaaggaagagtctcattagacaatgatttttaaagcattggaaaaatattttgcctgtaaaagttagtaactaggtggttcacaaaattacaacatcaaaatagttacatcttgtgaaaatatatgatttttatgtcaatcaagacaaatgaaatatatatgtatgtgtatatatatacatgtatgtatgaaatatatatatgtgcgtgtgtgtgtgtatatatatatatatatatatatatttctatgaaattgtccagatgtgttcaggaacatgattgcattagagcaatgactgtattttgttgtccttataacatttatattatttcagttttaagtcaaaaggtattctgaatataataaaagcctcacaaattatttgtaaaatttagtagttcatatttagtatatcagtaatatagaagacatctttatagtcaactcttaattaatgcttattgtaccaaatctttgagatatttgtacataaatgaaatatgtactttcatgctaaaattatatatcatgactgtgctataatttggcatgtcattatctagatttatatgtatgtacgtatttcaggtccttgaaattttaataaatattacagttaaatcctgatat

SEQ ID NO: 23062 - DNA, 485 bp, Homo sapiens
  misc_feature 1..485: note = ENST00000508773
  source 1..485: mol_type = unassigned DNA; mol_type = unassigned DNA
gtttgaattttagtaacattgttttcaaatcaattattttctagtgtaagctacccacagtggaagaatgtatgcagttagctgagacagcccgtgcagatgacaatatatttgaaactgtaaaatattacttgttaagtcaagaacctgaaaaagcccttcctattggtattagctttgttaaagaatacatcagtagctcagactggactttggataccatataccctgttcttgacctactgagctatattcgtactgaaaaattactcttgcatacgtgtactgaagctcgaaatgagttgctgatattatgtggttacattggtgcattactggctatcagaagacagtaccaaagcattgttccagcactttatgagtacacaagtcagctattaaaacgtcgggaggtgtcagtacctttaaaaattgaatatctttctgaggaattggatgcatggagagcttgcacacagtccacc

SEQ ID NO: 23063 - DNA, 2587 bp, Homo sapiens
  misc_feature 1..2587: note = ENST00000392325
  source 1..2587: mol_type = unassigned DNA; mol_type = unassigned DNA
gtggggcgcgggcgcgcgcacggacgtccagcacgcacgcacgcacgtccagcacacacgcacatccagcacgcacgcacgtacgtccggcacttccggccgcggcggcctcagcgccggcccgaagggaccaggccgccgtccccagcgagaggcatgcagcgctgaggagcggcgacccagcacggcggcgccatgaacctcctgccgtgtaaccctcacggcaacgggctgctctacgccggcttcaaccaggaccacggatgctttgcgtgtgggatggaaaatggattccgagtctataacactgatccactaaaagaaaaagagaaacaagaatttctagaaggaggagttggccatgttgaaatgttatttcgctgcaactatttagctttagttggtggtggaaaaaagccgaaataccctcccaacaaagtaatgatctgggatgacctgaagaagaagactgttattgaaatagaattttctacagaagtcaaggcagtcaagctgcggcgagatagaattgtggtggttttggactccatgattaaggtgttcacattcacacacaatccccatcagttgcacgtcttcgaaacctgctataaccccaaaggcctctgtgtcctttgtcccaatagtaacaactccctcctggcctttccgggcacgcacacgggccatgtgcagcttgtggacctggccagcacggagaagccacccgtggacattcctgcacacgagggtgtcctgagctgcattgcactcaacctgcagggaacaagaattgcaactgcatccgagaaagggacgcttataagaatatttgatacttcatcagggcatttaatccaggaactgcgaagaggatctcaagcagccaatatttactgcatcaacttcaatcaggatgcgtccctcatctgcgtatccagcgaccacggcacagtgcatatttttgcagctgaagatccaaaaaggaataaacagtccagtttggcctcagccagtttccttccaaaatacttcagttccaagtggagtttctccaagtttcaggttccctcaggctctccgtgcatttgtgcctttggaacagagccaaacgccgtcattgcaatttgtgcagacggcagctactacaaattcctgttcaaccccaagggggagtgcatccgagatgtctacgcgcagtttctagagatgaccgatgacaagctgtgactccagctgggggcgccacagcacccaccacctgccgccttcagactctcggggctggtgccagtgccccaggggcctcctgggccacgggctggaggggctgcccagggaccttggtctcgaagccatacgtggttgtctgctttcctaaggactcccatttccagtattaaagagagaatcatcatcaaggcaccgtaggtaactcagtggctgtgaccagctcgactggcggccactggctgttcccatgagttcagctgtgacgttagcttcagtggctccgccgcatcctcacactgacgggggctccatacggacctggggactgggctgagagggtggacgagttcaggtttgtttttgcagcagattccgtcgttcttactgagtctgcagcgggggagtgaacaagtgtgcagatgtaagttcttacatgataagcagattgaatacaacaccagcagcttgccttagaaaaggagaaaggaattccttttcccgcccgaacatgaagaaaaatgacctgaccctgtagagagaacacagtgtgaatgtttcccctcgtgtgagcccagcctgtggtcttctccgtacccgcaacgtggtcatctgtgcccgtgacgtcacctgtgcccgtgcgtggcgtccccgtctccgttggggccattagaatgaggcagacaccaggccactctagaagccgagccgtcacacctcaggcgtgtgcggggcggggacggggggtctcctggttacattttggattaaacctgtttcccggttatgtgtagggaacagcagagtgatgcacgaactttgaacattcgttatggggaaaacatcctttaacttcggggtcgtctgccagagcagggtctgggagggtccatgcagttcccgctggtgtggagggaaatgccctggtctggcctccgagcccccaggtccaccgtctcccctcccctcatttgtaagaatagctacacactaacattttgggaaggagaggcacataactttttttaacatttggtaactaggttatgggctctacattgtcagctacttgggatatatatttaattttcttaaattcccgttaaactctattttatggttttgatttcagattgcaaacatgtaaaacctgcatagcagcgagttctcggttttgccggtttctttagttctttactgtcactgtcatgtaatcagctaattctctgtggatgttgctgtaaagtatgcatgttcctttcatgtgtatttaatcatgatgtttaattttgcacacttatttgtaatgtttcttttaaataaaagtgactaattttgttgtagtctggacctgtaa

SEQ ID NO: 23064 - DNA, 2322 bp, Homo sapiens
  misc_feature 1..2322: note = ENST00000572583
  source 1..2322: mol_type = unassigned DNA; mol_type = unassigned DNA
ctcacggcaacgggctgctctacgccggcttcaaccaggaccacggatgctttgcgtgtgggatggaaaatggattccgagtctataacactgatccactaaaagaaaaagagaaacaagaatttctagaaggaggagttggccatgttgaaatgttatttcgctgcaactatttagctttagttggtggtggaaaaaagccgaaataccctcccaacaaagtaatgatctgggatgacctgaagaagaagactgttattgaaatagaattttctacagaagtcaaggcagtcaagctgcggcgagatagaattgtggtggttttggactccatgattaaggtgttcacattcacacacaatccccatcagttgcacgtcttcgaaacctgctataaccccaaaggcctctgtgtcctttgtcccaatagtaacaactccctcctggcctttccgggcacgcacacgggccatgtgcagcttgtggacctggccagcacggagaagccacccgtggacattcctgcacacgagggtgtcctgagctgcattgcactcaacctgcagggaacaagaattgcaactgcatccgagaaaggcatttaatccaggaactgcgaagaggatctcaagcagccaatatttactgcatcaacttcaatcaggatgcgtccctcatctgcgtatccagcgaccacggcacagtgcatatttttgcagctgaagatccaaaaaggaataaacagtccagtttggcctcagccagtttccttccaaaatacttcagttccaagtggagtttctccaagtttcaggttccctcaggctctccgtgcatttgtgcctttggaacagagccaaacgccgtcattgcaatttgtgcagacggcagctactacaaattcctgttcaaccccaagggggagtgcatccgagatgtctacgcgcagtttctagagatgaccgatgacaagctgtgactccagctgggggcgccacagcacccaccacctgccgccttcagactctcggggctggtgccagtgccccaggggcctcctgggccacgggctggaggggctgcccagggaccttggtctcgaagccatacgtggttgtctgctttcctaaggactcccatttccagtattaaagagagaatcatcatcaaggcaccgtaggtaactcagtggctgtgaccagctcgactggcggccactggctgttcccatgagttcagctgtgacgttagcttcagtggctccgccgcatcctcacactgacgggggctccatacggacctggggactgggctgagagggtggacgagttcaggtttgtttttgcagcagattccgtcgttcttactgagtctgcagcgggggagtgaacaagtgtgcagatgtaagttcttacatgataagcagattgaatacaacaccagcagcttgccttagaaaaggagaaaggaattccttttcccgcccgaacatgaagaaaaatgacctgaccctgtagagagaacacagtgtgaatgtttcccctcgtgtgagcccagcctgtggtcttctccgtacccgcaacgtggtcatctgtgcccgtgacgtcacctgtgcccgtgcgtggcgtccccgtctccgttggggccattagaatgaggcagacaccaggccactctagaagccgagccgtcacacctcaggcgtgtgcggggcggggacggggggtctcctggttacattttggattaaacctgtttcccggttatgtgtagggaacagcagagtgatgcacgaactttgaacattcgttatggggaaaacatcctttaacttcggggtcgtctgccagagcagggtctgggagggtccatgcagttcccgctggtgtggagggaaatgccctggtctggcctccgagcccccaggtccaccgtctcccctcccctcatttgtaagaatagctacacactaacattttgggaaggagaggcacataactttttttaacatttggtaactaggttatgggctctacattgtcagctacttgggatatatatttaattttcttaaattcccgttaaactctattttatggttttgatttcagattgcaaacatgtaaaacctgcatagcagcgagttctcggttttgccggtttctttagttctttactgtcactgtcatgtaatcagctaattctctgtggatgttgctgtaaagtatgcatgttcctttcatgtgtatttaatcatgatgtttaattttgcacacttatttgtaatgtttcttttaaataaaagtgactaattttgttgta

SEQ ID NO: 23065 - DNA, 779 bp, Homo sapiens
  misc_feature 1..779: note = ENST00000576517
  source 1..779: mol_type = unassigned DNA; mol_type = unassigned DNA
ccaggaactgcgaagaggatctcaagcagccaatatttactgcatcaacttcaatcaggatgcgtccctcatctgcgtatccagcgaccacggcacagtgcatatttttgcagctgaagatccaaaaaggaataaacagtccagtttggcctcagccagtttccttccaaaatacttcagttccaagtggagtttctccaagtttcaggttccctcaggctctccgtgcatttgtgcctttggaacagagccaaacgccgtcattgcaatttgtgcagacggcagctactacaaattcctgttcaaccccaagggggagtgcatccgagatgtctacgcgcagtttctagagatgaccgatgacaagctgtgactccagctgggggcgccacagcacccaccacctgccgccttcagactctcggggctggtgccagtgccccaggggcctcctgggccacgggctggaggggctgcccagggaccttggtctcgaagccatacgtggttgtctgctttcctaaggactcccatttccagtattaaagagagaatcatcatcaaggcaccgtagattgcaaacatgtaaaacctgcatagcagcgagttctcggttttgccggtttctttagttctttactgtcactgtcatgtaatcagctaattctctgtggatgttgctgtaaagtatgcatgttcctttcatgtgtatttaatcatgatgtttaattttgcacacttatttgtaatgtttcttttaaataaaagtgactaatttt

SEQ ID NO: 23066 - DNA, 654 bp, Homo sapiens
  misc_feature 1..654: note = ENST00000573656
  source 1..654: mol_type = unassigned DNA; mol_type = unassigned DNA
gtttgggtttgactcttgaggaaagcaactctgatcatgtttttctttccagaattgtggtggttttggactccatgattaaggtgttcacattcacacacaatccccatcagttgcacgtcttcgaaacctgctataaccccaaaggcctctgtgtcctttgtcccaatagtaacaactccctcctggcctttccgggcacgcacacgggccatgtgcagcttgtggacctggccagcacggagaagccacccgtggacattcctgcacacgagggtgtcctgagctgcattgcactcaacctgcagggaacaagaattgcaactgcatccgagaaaggcatttaatccaggaactgcgaagaggatctcaagcagccaatatttactgcatcaacttcaatcaggatgcgtccctcatctgcgtatccagcgaccacggcacagtgcatatttttgcagctgaagatccaaaaaggaataaacagtccagtttggcctcagccagtttccttccaaaatacttcagttccaagtggagtttctccaagtttcaggttccctcaggctctccgtgcatttgtgcctttggaacagagccaaacgccgtcattgcaatttgtgcagacggcagctactacaaattcctgttcaa

SEQ ID NO: 23067 - DNA, 869 bp, Homo sapiens
  misc_feature 1..869: note = ENST00000571835
  source 1..869: mol_type = unassigned DNA; mol_type = unassigned DNA
aacatagaaagctctgaatgtaaccctggtctttctgtggggagaccctttccccctcttcagctgcaggagaatttctagaaggaggagttggccatgttgaaatgttatttcgctgcaactatttagctttagttggtggtggaaaaaagccgaaataccctcccaacaaagtaatgatctgggatgacctgaagaagaagactgttattgaaatagaattttctacagaagtcaaggcagtcaagctgcggcgagatagaattgtggtggttttggactccatgattaaggtgttcacattcacacacaatccccatcagttgcacgtcttcgaaacctgctataaccccaaaggcctctgtgtcctttgtcccaatagtaacaactccctcctggcctttccgggcacgcacacgggccatgtgcagcttgtggacctggccagcacggagaagccacccgtggacattcctgcacacgagggtgtcctgagctgcattgcactcaacctgcagggaacaagaattgcaactgcatccgagaaagggacgcttataagaatatttgatacttcatcagggcatttaatccaggaactgcgaagaggatctcaagcagccaatatttactgcatcaacttcaatcaggatgcgtccctcatctgcgtatccagcgaccacggcacagtgcatatttttgcagctgaagatccaaaaaggaataaacagtccagtttggcctcagccagtttccttccaaaatacttcagttccaagtggagtttctccaagtttcaggttccctcaggctctccgtgcatttgtgcctttggaacagagccaaacgccgtcattgcaatttgtgca

SEQ ID NO: 23068 - DNA, 896 bp, Homo sapiens
  misc_feature 1..896: note = ENST00000573616
  source 1..896: mol_type = unassigned DNA; mol_type = unassigned DNA
acttccggccgcggcggcctcagcgccggcccgaagggaccaggccgccgtccccagcgagaggcatgcagcgctgaggagcggcgacccagcacggcggcgccatgaacctcctgccgtgtaaccctcacggcaacgggctgctctacgccggcttcaaccaggaccacggatgctttgcgtgtgggatggaaaatggattccgagtctataacactgatccactaaaagaaaaagagaaacaagtaatgatctgggatgacctgaagaagaagactgttattgaaatagaattttctacagaagtcaaggcagtcaagctgcggcgagatagaattgtggtggttttggactccatgattaaggtgttcacattcacacacaatccccatcagttgcacgtcttcgaaacctgctataaccccaaaggcctctgtgtcctttgtcccaatagtaacaactccctcctggcctttccgggcacgcacacgggccatgtgcagcttgtggacctggccagcacggagaagccacccgtggacattcctgcacacgagggtgtcctgagctgcattgcactcaacctgcagggaacaagaattgcaactgcatccgagaaaggcatttaatccaggaactgcgaagaggatctcaagcagccaatatttactgcatcaacttcaatcaggatgcgtccctcatctgcgtatccagcgaccacggcacagtgcatatttttgcagctgaagatccaaaaaggaataaacagtccagtttggcctcagccagtttccttccaaaatacttcagttccaagtggagtttctccaagtttcaggttccctcaggctctccgtgcatttgtgcctttggaacagagccaaacgccgtcattg

SEQ ID NO: 23069 - DNA, 252 bp, Homo sapiens
  misc_feature 1..252: note = ENST00000577774
  source 1..252: mol_type = unassigned DNA; mol_type = unassigned DNA
gaattggcacctccagagtgggaatgttgaggtgttccacagtgtcgacaagtgctgtgggttaagtctctggactcctccacatccacacaaggcctgagctgtgctggttttctctgcagcatcaacttcaatcaggatgcgtccctcatctgcgtatccagcgaccacggcacagtgcatatttttgcagctgaagatccaaaaaggaataaacagtccagtttggcctcagccagtttccttccaaaa

SEQ ID NO: 23070 - DNA, 789 bp, Homo sapiens
  misc_feature 1..789: note = ENST00000571767
  source 1..789: mol_type = unassigned DNA; mol_type = unassigned DNA
tgagctgaggttgtgccactgcactccagcctgagcgacagagtgagactccatctataaaaaaaaagtaataataataataatgcaaacgcttgagccagatcgaggatattctactttcagacttttcttattttttccagacacagtagcataaaaatatcacttctgtctgttttgctcggttctgaacctagatggagtgtttgatgatgtctctctgaacctcagagacgtctcttaggctgaccttcacccaggcgagaagcactccctcagcagagccagcccacgtgcactcgccgagctccaggcctggcgctggctacctgcctccagagctttttcttcaggaacactccttttctgtgtgaattgtggtggttttggactccatgattaaggtgttcacattcacacacaatccccatcagttgcacgtcttcgaaacctgctataaccccaaaggcctctgtgtcctttgtcccaatagtaacaactccctcctggcctttccgggcacgcacacgggccatgtgcagcttgtggacctggccagcacggagaagccacccgtggacattcctgcacacgagggtgtcctgagctgcattgcactcaacctgcagggaacaagaattgcaactgcatccgagaaagggacgcttataagaatatttgatacttcatcagggcatttaatccaggaactgcgaagaggatctcaagcagccaatatttactgcatcaacttcaatcaggatgcgtccctcatctgcgtatccagcg

SEQ ID NO: 23071 - DNA, 889 bp, Homo sapiens
  misc_feature 1..889: note = ENST00000571817
  source 1..889: mol_type = unassigned DNA; mol_type = unassigned DNA
cggcacttccggccgcggcggcctcagcgccggcccgaagggaccaggccgccgtccccagcgagaggcatgcagcgctgaggagcggcgacccagcacggcggcgccatgaacctcctgccgtgtaaccctcacggcaacgggctgctctacgccggcttcaaccaggaccacggatgctttgcgtgtgggatggaaaatggattccgagtctataacactgatccactaaaagaaaaagagaaacaagaatttctagaaggaggagttggccatgttgaaatgttatttcgctgcaactatttagctttagttggtggtggaaaaaagccgaaataccctcccaacaaaggaacagagaaatgaaatgggaagagattatcggtaggaaaaacagtggaagacagggcttgagatcttggcctttgagcggttctgtaatctcacaagtaatgatctgggatgacctgaagaagaagactgttattgaaatagaattttctacagaagtcaaggcagtcaagctgcggcgagatagaattgtggtggttttggactccatgattaaggtgttcacattcacacacaatccccatcagttgcacgtcttcgaaacctgctataaccccaaaggcctctgtgtcctttgtcccaatagtaacaactccctcctggcctttccgggcacgcacacgggccatgtgcagcttgtggacctggccagcacggagaagccacccgtggacattcctgcacacgagggtgtcctgagctgcattgcactcaacctgcagggaacaagaattgcaactgcatccgagaaagggacgcttataagaatatttgatacttcatcagggcatttaatccaggaactgcgaagaggatc

SEQ ID NO: 23072 - DNA, 765 bp, Homo sapiens
  misc_feature 1..765: note = ENST00000574828
  source 1..765: mol_type = unassigned DNA; mol_type = unassigned DNA
cgctccataggctccctggtggggcgcgggcgcgcgcacggacgtccagcacgcacgcacgcacgtccagcacacacgcacatccagcacgcacgcacgtacgtccggcacttccggccgcggcggcctcagcgccggcccgaagggaccaggccgccgtccccagcgagaggcatgcagcgctgaggagcggcgacccagcacggcggcgccatgaacctcctgccgtgtaaccctcacggcaacgggctgctctacgccggcttcaaccaggaccacggatgctttgcgtgtgggatggaaaatggattccgagtctataacactgatccactaaaagaaaaagagaaacaagaatttctagaaggaggagttggccatgttgaaatgttatttcgctgcaactatttagctttagttggtggtggaaaaaagccgaaataccctcccaacaaagtaatgatctgggatgacctgaagaagaagactgttattgaaatagaattttctacagaagtcaaggcagtcaagctgcggcgagatagggctccgctggaggtaagtaggtggtggcgtggatgacgtgcgccacagtggaccagccagtgggtctcaccgtggtgagttatgtcccattccgacatgtgcagagctgaggacatgagttttgagccttgaattaccctgggcttttagcccctgctttgccaaatgctgcctctcaataaaggttttcggtttgaaggtaaaggaaaattgaatttt

SEQ ID NO: 23073 - DNA, 2594 bp, Homo sapiens
  misc_feature 1..2594: note = ENST00000308378
  source 1..2594: mol_type = unassigned DNA; mol_type = unassigned DNA
aggcacctgttgaaggaaaaagaagatccatccttatagaaatagttgaaggcaactgagaaaaggtgaagccattatgagttgccagaaagctgtacttgagttaaacatagggtcacagcttgggccaaagagtcctgagagaacagaaggtgtaactgcatttgaagactatggcacaggcctgcttgaaaaccaactcagcgtgggtgactttgtaaaaatacagaaggcctttgagttacttacaatgcatctttagacgctatcatttccagtacaaccagcaatacaaatagtgtggtgatggcttggagagagaaatcaaaaaagcgtcttaatatgacatccttcaacattgcccagggcattcatgcttttgattatcactctcggctcaatttaattgcaactgctggcattaacaataaagtttgcctttggaatccctatgttgtctctaaaccagtgggtgtcctttggggccactcagccagtgtaatagccgtccaattctttgtggaaagaaaacaacttttcagcttctccaaggataaagttttgagactctgggatattcaacaccagctgtccatccagaggatagcttgttctttccccaaaagtcaggacttcagatgtctcttccactttgatgaagcccatggacgacttttcatctcgtttaataaccagctagcattgttggcaatgaaaagtgaagccagcaagagggtgaaaagccatgagaaagcagtcacttgtgttctttacaattctatcttgaagcaggtaatcagctctgatacagggtctactgtttccttctggatgatagacactgggcagaaaatcaaacagtttactggttgccacggcaacgcagaaatcagcactatggcccttgatgcaaatgagactcggcttttgactggcagcacagatgggactgtaaagatatgggacttcaatggatattgtcaccatacactaaatgttgggcaagatggagctgtggatatttcacaaatcctcattcttaagaagaaaatactggttacaggctgggagagggctattactgtgtttcgaccccaaaacttcaatcaatttttcatccagcctgaagaatggaaaggaggtatacagcaccatgatgacatcttgtgtgctgcgtttttacctccacaaactcttgttacggggagttatgatggagaaattgttctatggaacaatagcacagagaatgctcaccatgttcttcaccctgattaccagaggttgctaaagtcaaaattagatacaaaacctcaaaaacttctcagtgctgggagaagccaaccctcccaccccatggcagaccattctaccacgggagtccgcaactttgagattgacactgagggcaaaaatgctgttatgagactttgctttcttaaagcaagaaaaaacactgcagtgacaggaggagctaacctggtatcatgtggaggatctggttatgtcagattttgggatatatataagaagcaacttctggctgaatttttggctcatagtggagttggatcgattattatgtctactgataagatgaatcgataccttaccacaggagatcttgatggatggttgaaaatctggaatatagaggagtactgtcttaactccagtaagaacaaaatcaccaaggccccaactctgataagatcattccaacctcatgaggaccgaataagttccttagagatgtgtgagccaggtggtcagttactgattatctcctcctctgcagactgcagtatttgtgtgactggtgtctgcaatgctcctgtttggatctttggtcaggcaaagcactggcatattgaaaactgccttttccttcctaaaagagatactaatttagtggaaagtgagattcaaaaggaaatttctttattttctaaggaggaatcttgtttagacccaacagaacattctctacttaataagaaaaacaaagatgactcaacatacaatgtcagaccatcagaagatataaatttagatataaaatataaggaaagaagtacctgcatgaaagaaacacaaaaaccttattatggtgaagttataaaaaaatcattcagtacatttaggtcattaaacattggagccctggaagagctgcctgaagtgaataaacctgctttccttctagaccctgagaaatactttaggaaagaaccagaggaagagcgtccccaaattctggaggccccgtcactttttaaaactttgaaagctgtatttgatgagaaaaacctgtttcccaaggaaattctgcatcatgaacgaaaagccaagcaattatgccaagaaaaaagttgtgaagtgaagaaaaataagaagtaattacaacagaaaaaccttcactgttacataaggtacagatataaaatgcagaaaaagcatcaagaattctgccttttattttattttatatttaaacttcaggaagttttctcttcatgggataatttagtactgcttttatctatcatctgtcaatttctctgtattcttaataaaataaatattgaactaaa

SEQ ID NO: 23074 - DNA, 1996 bp, Homo sapiens
  misc_feature 1..1996: note = ENST00000476376
  source 1..1996: mol_type = unassigned DNA; mol_type = unassigned DNA
agcctgtgggtatcatgaagggagcaagcaacatcagaggttagcctgctgcagtgatcccgtcaggcctgatggtaacagcacagcaggagccaagcagaagcaagtctccagcttacagccaattaaacaccttctcaatgtgaagacgacacgaatgaagacccttatgataattgacttccactcaataaatagtaatcagctctgatacagggtctactgtttccttctggatgatagacactgggcagaaaatcaaacagtttactggttgccacggcaacgcagaaatcagcactatggcccttgatgcaaatgagactcggcttttgactggcagcacagatgggactgtaaagatatgggacttcaatggatattgtcaccatacactaaatgttgggcaagatggagctgtggatatttcacaaatcctcattcttaagaagaaaatactggttacaggctgggagagggctattactgtgtttcgaccccaaaacttcaatcaatttttcatccagcctgaagaatggaaaggaggtatacagcaccatgatgacatcttgtgtgctgcgtttttacctccacaaactcttgttacggggagttatgatggagaaattgttctatggaacaatagcacagagaatgctcaccatgttcttcaccctgattaccagaggttgctaaagtcaaaattagatacaaaacctcaaaaacttctcagtgctgggagaagccaaccctcccaccccatggcagaccattctaccacgggagtccgcaactttgagattgacactgagggcaaaaatgctgttatgagactttgctttcttaaagcaagaaaaaacactgcagtgacaggaggagctaacctggtatcatgtggaggatctggttatgtcagattttgggatatatataagaagcaacttctggctgaatttttggctcatagtggagttggatcgattattatgtctactgataagatgaatcgataccttaccacaggagatcttgatggatggttgaaaatctggaatatagaggagtactgtcttaactccagtaagaacaaaatcaccaaggccccaactctgataagatcattccaacctcatgaggaccgaataagttccttagagatgtgtgagccaggtggtcagttactgattatctcctcctctgcagactgcagtatttgtgtgactggtgtctgcaatgctcctgtttggatctttggtcaggcaaagcactggcatattgaaaactgccttttccttcctaaaagagatactaatttagtggaaagtgagattcaaaaggaaatttctttattttctaaggaggaatcttgtttagacccaacagaacattctctacttaataagaaaaacaaagatgactcaacatacaatgtcagaccatcagaagatataaatttagatataaaatataaggaaagaagtacctgcatgaaagaaacacaaaaaccttattatggtgaagttataaaaaaatcattcagtacatttaggtcattaaacattggagccctggaagagctgcctgaagtgaataaacctgctttccttctagaccctgagaaatactttaggaaagaaccagaggaagagcgtccccaaattctggaggccccgtcactttttaaaactttgaaagctgtatttgatgagaaaaacctgtttcccaaggaaattctgcatcatgaacgaaaagccaagcaattatgccaagaaaaaagttgtgaagtgaagaaaaataagaagtaattacaacagaaaaaccttcactgttacataaggtacagatataaaatgcagaaaaagcatcaagaattctgccttttattttattttatatttaaacttcaggaagttttctcttcatgggataatttagtactgcttttatctatcatctgtcaatttctctgtattcttaataaaataaatattgaact

SEQ ID NO: 23075 - DNA, 2215 bp, Homo sapiens
  misc_feature 1..2215: note = ENST00000472600
  source 1..2215: mol_type = unassigned DNA; mol_type = unassigned DNA
ggcctgctagtgcatgtgaagatggagaagccactatgaccattaactgggcagagctgctctctggatgtcacaaatgttgccatatattagagcataaacttcatcaaggagattgggtcaggcaagttacttacaatgcatctttagacgctatcatttccagtacaaccagcaatacaaatagtgtggtgatggcttggagagagaaatcaaaaaagcgtcttaatatgacatccttcaacattgcccagggcattcatgcttttgattatcactctcggctcaatttaattgcaactgctggcattaacaataaagtttgcctttggaatccctatgttgtctctaaaccagtgggtgtcctttggggccactcagccagtgtaatagccgtccaattctttgtggaaagaaaacaacttttcagcttctccaaggataaagttttgagactctgggatattcaacaccagctgtccatccagaggatagcttgttctttccccaaaagtcaggacttcagatgtctcttccactttgatgaagcccatggacgacttttcatctcgtttaataaccagctagcattgttggcaatgaaaagtgaagccagcaagagggtgaaaagccatgagaaagcagtcacttgtgttctttacaattctatcttgaagcaggtaatcagctctgatacagggtctactgtttccttctggatgatagacactgggcagaaaatcaaacagtttactggttgccacggcaacgcagaaatcagcactatggcccttgatgcaaatgagactcggcttttgactggcagcacagatgggactgtaaagatatgggacttcaatggatattgtcaccatacactaaatgttgggcaagatggagctgtggatatttcacaaatcctcattcttaagaagaaaatactggttacaggctgggagaggtatgattatgcctcatggaaaactataggaagggctattactgtgtttcgaccccaaaacttcaatcaatttttcatccagcctgaagaatggaaaggaggtatacagcaccatgatgacatcttgtgtgctgcgtttttacctccacaaactcttgttacggggagttatgatggagaaattgttctatggaacaatagcacagagaatgctcaccatgttcttcaccctgattaccagaggttgctaaagtcaaaattagatacaaaacctcaaaaacttctcagtgctgggagaagccaaccctcccaccccatggcagaccattctaccacgggagtccgcaactttgagattgacactgagggcaaaaatgctgttatgagactttgctttcttaaagcaagaaaaaacactgcagtgacaggaggagctaacctggtatcatgtggaggatctggttatgtcagattttgggatatatataagaagcaacttctggctgaatttttggctcatagtggagttggatcgattattatgtctactgataagatgaatcgataccttaccacaggagatcttgatggatggttgaaaatctggaatatagaggaggaatcttgtttagacccaacagaacattctctacttaataagaaaaacaaagatgactcaacatacaatgtcagaccatcagaagatataaatttagatataaaatataaggaaagaagtacctgcatgaaagaaacacaaaaaccttattatggtgaagttataaaaaaatcattcagtacatttaggtcattaaacattggagccctggaagagctgcctgaagtgaataaacctgctttccttctagaccctgagaaatactttaggaaagaaccagaggaagagcgtccccaaattctggaggccccgtcactttttaaaactttgaaagctgtatttgatgagaaaaacctgtttcccaaggaaattctgcatcatgaacgaaaagccaagcaattatgccaagaaaaaagttgtgaagtgaagaaaaataagaagtaattacaacagaaaaaccttcactgttacataaggtacagatataaaatgcagaaaaagcatcaagaattctgccttttattttattttatatttaaacttcaggaagttttctcttcatgggataatttagtactgcttttatctatcatctgtcaatttctctgtattcttaataaaataaatattgaact

SEQ ID NO: 23076 - DNA, 2108 bp, Homo sapiens
  misc_feature 1..2108: note = ENST00000479765
  source 1..2108: mol_type = unassigned DNA; mol_type = unassigned DNA
agaacagatgaaacaaacaactccacattgctgggaaggtggcattcagagtcaagtacttcattggtagggaaactctgcagctttgtcatctaactcttccagacaagaaagtggaattgaaaactacaacatgttaatggaagcaaggcacctgttgaaggaaaaagaagatccatccttatagaaatagttgaaggcaactgagaaaaggtgaagccattatgagttgccagaaagctgtacttgagttaaacatagggtcacagcttgggccaaagagtcctgagagaacagaaggtgtaactgcatttgaagactatggcacaggcctgcttgaaaaccaactcagcgtgggtgactttgtaaaaatacagaaggcctttgagtccccacagccaaggaaaatcatttgtatgtccagagaagacttcacgcagaagatgacagagattgttggttggggcacgaaggaagaatatggggagctctttgacaaagtggatgtggcccaagatggcttcattaattgggacaagctgacttcatttatactgctagagctttatgagcaagatgaacgagcaaaggcaactgtggtgccccagtggaaggaccttgaattcctcccagtaaaacacaaggacaccattcaaaaagtaattttcttaaaaaattcaagtcattatctgacaattagtaaagaaggtttattggcaatctggggagagcatttaaagctgcaagaaacattccccatcacttcagatgccaccaagctcaaacacctgtgggtgacaagtctggtttctctggaaaatgtaaacaagatagcagtggcttttacaagtaaagaggtttgtttctatgatctgctgtccaaagaagaatttgcttgccaatacaaactccaaggcctgaaaggaacaccaatttgcatggattattggtatgatcctcttgatgccaatgaatcaattctttcttttggggatataactggaaaggttcaagcaattgctttcaccgcagccttgatttccctgtttgaacggcctgctagtgcatgtgaagatggagaagccactatgaccattaactgggcagagctgctctctggatgtcacaaatgttgccatatattagagcataaacttcatcaaggagattgggtcaggcaagttacttacaatgcatctttagacgctatcatttccagtacaaccagcaatacaaatagtgtggtgatggcttggagagagaaatcaaaaaagcgtcttaatatgacatccttcaacattgcccagggcattcatgcttttgattatcactctcggctcaatttaattgcaactgctggcattaacaataaagtttgcctttggaatccctatgttgtctctaaaccagtgggtgtcctttggggccactcagccagtgtaatagccgtccaattctttgtggaaagaaaacaacttttcagcttctccaaggataaagttttgagactctgggatattcaacaccagctgtccatccagaggatagcttgttctttccccaaaagtcaggacttcagatgtctcttccactttgatgaagcccatggacgacttttcatctcgtttaataaccagctagcattgttggcaatgaaaagtgaagccagcaagagggtgaaaagccatgagaaagcagtcacttgtgttctttacaattctatcttgaagcagccttctcaatgtgaagacgacacgaatgaagacccttatgataattgacttccactcaataaatactttgaaagctgtatttgatgagaaaaacctgtttcccaaggaaattctgcatcatgaacgaaaagccaagcaattatgccaagaaaaaagttgtgaagtgaagaaaaataagaagtaattacaacagaaaaaccttcactgttacataaggtacagatataaaatgcagaaaaagcatcaagaattctgccttttattttattttatatttaaacttcaggaagttttctcttcatgggataatttagtactgcttttatctatcatctgtcaatttctctgtattcttaataaaataaatattgaact

SEQ ID NO: 23077 - DNA, 416 bp, Homo sapiens
  misc_feature 1..416: note = ENST00000493061
  source 1..416: mol_type = unassigned DNA; mol_type = unassigned DNA
agattgacactgagggcaaaaatgctgttatgagactttgctttcttaaagcaagaaaaaacactgcagtgacaggaggagctaacctggtatcatgtggaggatctggttatgtcagattttgggatatatataagaagcaacttctggctgaatttttggctcatagtggagttggatcgattattatgtctactgataagatgaatcgataccttaccacaggagatcttgatggatggttgaaaatctggaatatagaggcaaagcactggcatattgaaaactgccttttccttcctaaaagagatactaatttagtggaaagtgagattcaaaaggaaatttctttattttctaaggaggaatcttgtttagacccaacagaacattctctacttaataagaaaaacaaa

SEQ ID NO: 23078 - DNA, 1108 bp, Homo sapiens
  misc_feature 1..1108: note = ENST00000460448
  source 1..1108: mol_type = unassigned DNA; mol_type = unassigned DNA
cttcattggtagggaaactctgcagctttgtcatctaactcttccagacaagaaagtggaattgaaaactacaacatgttaatggaagcaaggcacctgttgaaggaaaaagaagatccatccttatagaaatagttgaaggcaactgagaaaaggtgaagccattatgagttgccagaaagctgtacttgagttaaacatagggtcacagcttgggccaaagagtcctgagagaacagaaggtgtaactgcatttgaagactatggcacaggcctgcttgaaaaccaactcagcgtgggtgactttgtaaaaatacagaaggcctttgagttacttacaatgcatctttagacgctatcatttccagtacaaccagcaatacaaatagtgtggtgatggcttggagagagaaatcaaaaaagcgtcttaatatgacatccttcaacattgcccagggcattcatgcttttgattatcactctcggctcaatttaattgcaactgctggcattaacaataaagtttgcctttggaatccctatgttgtctctaaaccagtgggtgtcctttggggccactcagccagtgtaatagccgtccaattctttgtggaaagaaaacaacttttcagcttctccaaggataaagttttgagactctgggatattcaacaccagctgtccatccagaggatagcttgttctttccccaaaagtcaggacttcagatgtctcttccactttgatgaagcccatggacgacttttcatctcgtttaataaccagctagcattgttggcaatgaaaagtgaagccagcaagagggtgaaaagccatgagaaagcagtcacttgtgttctttacaattctatcttgaagcagggctattactgtgtttcgaccccaaaacttcaatcaatttttcatccagcctgaagaatggaaaggaggtatacagcaccatgatgacatcttgtgtgctgcgtttttacctccacaaactcttgttacggggagttatgatggagaaattgttctatggaacaatagcacagagaatgctcaccatgttcttcaccctgattaccagaggttgctaaagtcaaaa

SEQ ID NO: 23079 - DNA, 575 bp, Homo sapiens
  misc_feature 1..575: note = ENST00000466760
  source 1..575: mol_type = unassigned DNA; mol_type = unassigned DNA
agatgaaacaaacaactccacattgctgggaaggtggcattcagagtcaagtacttcattggtagggaaactctgcagctttgtcatctaactcttccagacaagaaagtggaattgaaaactacaacatgttaatggaagcaaggcacctgttgaaggaaaaagaagatccatccttatagaaatagttgaaggcaactgagaaaaggtgaagccattatgagttgccagaaagctgtacttgagttaaacatagggtcacagcttgggccaaagagtcctgagagaacagaaggtgtaactgcatttgaagactatggcacaggcctgcttgaaaaccaactcagcgtgggtgactttgtaaaaatacagaaggcctttgaggtaatcagctctgatacagggtctactgtttccttctggatgatagacactgggcagaaaatcaaacagtttactggttgccacggcaacgcagaaatcagcactatggcccttgatgcaaatgagactcggcttttgactggcagcacagatgggactgtaaagatatgggacttcaatggatattgtca

SEQ ID NO: 23080 - DNA, 521 bp, Homo sapiens
  misc_feature 1..521: note = ENST00000488012
  source 1..521: mol_type = unassigned DNA; mol_type = unassigned DNA
attcagagtcaagtacttcattggtagggaaactctgcagctttgtcatctaactcttccagacaagaaagtggaattgaaaactacaacatgttaatggaagcaaggcacctgttgaaggaaaaagaagatccatccttatagaaatagttgaaggcaactgagaaaaggtgaagccattatgagttgccagaaagctgtacttgagttaaacatagggtcacagcttgggccaaagagtcctgagagaacagaaggtgtaactgcatttgaagactatggcacaggcctgcttgaaaaccaactcagcgtgggtgactttgtaaaaatacagaaggcctttgagatagcagtggcttttacaagtaaagaggtttgtttctatgatctgctgtccaaagaagaatttgcttgccaatacaaactccaaggcctgaaaggaacaccaatttgcatggattattggtatgatcctcttgatgccaatgaatcaattctttcttttggggatataactggaa

SEQ ID NO: 23081 - DNA, 570 bp, Homo sapiens
  misc_feature 1..570: note = ENST00000471198
  source 1..570: mol_type = unassigned DNA; mol_type = unassigned DNA
agacaagaaagtggaattgaaaactacaacatgttaatggaagcaaggcacctgttgaaggaaaaagaagatccatccttatagaaatagttgaaggcaactgagaaaaggtgaagccattatgagttgccagaaagctgtacttgagttaaacatagggtcacagcttgggccaaagagtcctgagagaacagaaggtgtaactgcatttgaagactatggcacaggcctgcttgaaaaccaactcagcgtgggtgactttgtaaaaatacagaaggcctttgaggatggggatatttggctcacagagcagcactacgagtggctaaagacaagacagaagctgggattactcacatggatgaaatgtcgctcttgtatatgtgaaagagccatggttctgggaacagtccccacagccaaggaaaatcatttgtatgtccagagaagacttcacgcagaagatgacagagattgttggttggggcacgaaggaagaatatggggagctctttgacaaagtggatgtggcccaagatggcttcattaattgggacaagctgacttcat

SEQ ID NO: 23082 - DNA, 4467 bp, Homo sapiens
  misc_feature 1..4467: note = ENST00000288912
  source 1..4467: mol_type = unassigned DNA; mol_type = unassigned DNA
tttatcctttcttttttattttaagatgtatgcatattaatcaatttaccatcactggggcatggcagtgtgggcggggagaattattcacattctcctaaaatgacagcagcagagagccttctgcctcagtggctctggctggtttcctgcaggggtcccagtggaaacccgtgtggccacctgttgccgtcttccatgagatgttagtggagagccactttgacgtggaatgatcctaatagatatagccagaccggttttgcggaaacgctttgtgctgagaaccgcaagctggtgcaccctgtgtcatatctgcccccagccagctggaattgtctgcaacacgcggtgcccggtgaggaggcaggcaggacggttgtgtgctgcatccatgagacctggaaattcagtttgcttttggaaaagagcattgtatccgagttcatacttctccaccccatcttgccaaggttgcggaaagtaaaaattggcagtattggccgctgcagcttcttaggggacgggaccatgtgaaaaggtgggatcgtgcgagcggaggaaggacagaaaagcgaggaaagtctatgccgccagcgaccggcaggaggcacgtcgggcacgctcgtcaccgtttcctggcacgtgaccaccgccctgccctgtcgctttagggcctgtcgcttccggcggtggcggttgccatggggacggagcttgggtggcaaccagaactagggagctggtggagaaggtggcggccgctggaaggaggcccgggaggtggctgaggggtccaggcggcgggacgactctggccttttgaagaccgggaggaaactctacagagaagaatgtcagatgcagcagaagctccccgagaagcaacaggagaaaatggagaaacagaaatgaaagaagaggaggaacctaatccaaattataaagaagtagaagatccacaacaggaatcaaaagatgacacaatagcatggagagagtctcaggaggaggagaggaaaacgggcgaggaggaaggggaggaggaggggaaggaggacaaaaagattgtcatggaagaaactgaggaaaaggctggagaagtccaagagaaggaggcttcaggaatacaggaagaaaccacagtagagccccaagaagtcacagcgtccatgatccgtttggagacacagattactgattcccagtcaatcacatcaggaattttcccaaaaacccaaagaggtagcaagtcaaagctttccttacaattggaggatgcagaaacagatgagcttttaagagacctgagcacacaaattgaatttcttgatttggatcaaatcagtcctgaggaacaacagattagttcccctgaaaggcagccctcaggagagcttgaggagaaaaccgaccggatgccccaagatgaactgggacaagaaagaagggacttggagccagaaaacagagaggagggacaagaaaggagagtatccgacatccagtccaaagcagggatctcccgggagtcactggtgtccagcaccacagaggacattctgtttcaaaaggataaaagcaccccggtgtatcccttgaccatgacctggtcgtttggatggaacagttctcttcctgtttactatattcgagaggaaaggcagagagttcttctgtatgtttgtgctcacactgcgatcatctacaacgtgttcaggaacaatcaataccaccttcagggccacgccaatattatctcctgcctctgcgtcagtgaagacaggcggtggatcgccacagcagacaaagggccagactgcctggtgattatatgggactccttcacaggtattcctgtgcacacaatatttgacagctgccctgaagggaatggcatcatggccatggccatgacccacgacgccaagtatctggcaaccatctcagatgctgaagtccagaaggtatgcatctggaagtggactttggcagtggaaacgccagcatgcactctcgaactccccacagagtacggtgttcagaactacgttacttttaacccaacaaataataaagaattggtgagcaatagtaaaacacgggcaatatattatgcatggtatgaagagagggatacactggctcacagtgccccacttttaactgaaaaaaccttcaacaagcttgtgggaaagtttagccagtccatctttcacttgaatttaacacaaatactctcagccacaatggaagggaagctggttgtctgggacatacaccgcccaccctcatctgcctccacctttttgggctttccctatatcaagccttgtaaattggttcatttgcagaaagagggtatcacggtacttaccacaattgatagctacattgtcacaggtgacattaaggggaacattaagttctatgatcacaccctgtctattgttaactggtacagtcacttgaaactgggcgccataagaactctgtccttttcaaagaccccagcaactcctcctactgaaaaatcaaactatcctcctgactgcactttaaaaggtgacctttttgtcttaaggaattttatcattggaacatctgatgccgcggtgtaccacttaacaacagatgggaccaaacttgagaagttatttgtagagcccaaggatgccatttgtgccatctcctgccacccatatcaacccctcattgccatcgggagcatctgtgggatgatcaaagtgtggaattatgaaaacaaacaatatcttttcagcagggtttttgagaaggggcttggagtccagagtctgacctacaaccccgaaggagcccttcttggagctggctttacagaggggacagtttacattcttgatgcaatgtctttagaaaatgaaagcccagagcctttcaaatattccagaaccagtgtgactcatataagcttttcccatgactcccagtatatggcaactgctgatagaagttttactgtggctgtttacatgctggtggtcagaaatggacagagggtctgggagtacttagcaagacttcgctctcatcgcaaaagcattcgaagtctcctgtttggggtttacctggacagcaatgagcctagactgctgagccttgggacagacaggctcttgatagagtatgatcttctcaggagctacaaagaccacctggaagtcctggacattcaccacaccgaccagggctgctatcccacctgcatggtctggtacccaccactcaccagggaactcttcctgcttatttgcaacagtggctacaaagtgaagctttttaatgctactaccaaaatgtgcagaaagacgcttctggggccagcttatggttcccctattgagcagacacaagtcctcccagtgagaagcatggcggagctacagaaacgctacttggtgtttattaacagagacaaggtgggacttcagatcttaccagttgacggcaatccacataagacatctgctattgtttgccacccgaacggggtggccggcatggccgtttcctatgatggctgctacgccttcactgcgggagggcacgatcgctcggtggtgcagtggaaaatcaccttaagtgtcctggaggcagcggtttctcttgggggtgaagacttgaccccattctatggtctgctgtctggtggccgggaaggaaaattctacagggagctagaagactacttctactattctcagctccgcagtcaaggcatcgacacaatggagaccagaaaggtgtcagaacacatttgcctgtcagagcttccttttgtcatgagagcaattggcttttacccatctgaagagaagattgatgatatatttaacgaaatcaaatttggtgaatatgtggacactggaaagctaatcgacaagatcaacttaccagatttcctaaaagtgtaccttaaccacaagccaccttttggtaacaccatgagtggcatccacaagagctttgaggtgctcggttataccaactccaaagggaaaaaggccattcgaagagaggacttcctgagactgctcgttactaaaggtgagcatatgacggaggaggagatgttggattgctttgcttcactgtttggcctgaatcccgagggatggaaatccgagcctgcaacctgctccgtcaaaggttcagaaatttgccttgaagaagaacttccagacgaaatcactgcagaaatattcgcgactgaaattcttggcttaaccatttcagaagattccggccaggatggtcagtgaagttaccaggaatgtttaaagcacaaaggactttgggtgtgtgtgcatgcacatgtgtgtgttttccatgaggcactgctttttatgcatttccctcccccctctcatctttagaacatttagacattaaagcaagtttctggtgagcaatggaattcacaaa

SEQ ID NO: 23083 - DNA, 3420 bp, Homo sapiens
  misc_feature 1..3420: note = ENST00000397454
  source 1..3420: mol_type = unassigned DNA; mol_type = unassigned DNA
agaactagggagctggtggagaaggtggcggccgctggaaggaggcccgggaggtggctgaggggtccaggcggcgggacgactctggccttttgaagaccggggtgggtgctctctaggaaactctacagagaagaatgtcagatgcagcagaagctccccgagaagcaacaggagaaaatggagaaacagaaatgaaagaagaggaggaacctaatccaaattataaagaagtagaagatccacaacaggaatcaaaagatgacacaatagcatggagagagtctcaggaggaggagaggaaaacgggcgaggaggaaggggaggaggaggggaaggaggacaaaaagattgtcatggaagaaactgaggaaaaggctggagaagtccaagagaaggaggcttcaggaatacaggaagaaaccacagtagagccccaagaagtcacagcgtccatgatccgtttggagacacagattactgattcccagtcaatcacatcaggaattttcccaaaaacccaaagaggtagcaagtcaaagctttccttacaattggaggatgcagaaacagatgagcttttaagagacctgagcacacaaattgaatttcttgatttggatcaaatcagtcctgaggaacaacagattagttcccctgaaaggcagccctcaggagagcttgaggagaaaaccgaccggatgccccaagatgaactgggacaagaaagaagggacttggagccagaaaacagagaggagggacaagaaaggagagtatccgacatccagtccaaagcagggatctcccgggagtcactggtgtccagcaccacagaggacattctgtttcaaaaggataaaagcaccccggtgtatcccttgaccatgacctggtcgtttggatggaacagttctcttcctgtttactatattcgagaggaaaggcagagagttcttctgtatgtttgtgctcacactgcgatcatctacaacgtgttcaggaacaatcaataccaccttcagggccacgccaatattatctcctgcctctgcgtcagtgaagacaggcggtggatcgccacagcagacaaagggccagactgcctggtgattatatgggactccttcacaggtattcctgtgcacacaatatttgacagctgccctgaagggaatggcatcatggccatggccatgacccacgacgccaagtatctggcaaccatctcagatgctgaagtccagaaggtatgcatctggaagtggactttggcagtggaaacgccagcatgcactctcgaactccccacagagtacggtgttcagaactacgttacttttaacccaacaaataataaagaattggtgagcaatagtaaaacacgggcaatatattatgcatggtatgaagagagggatacactggctcacagtgccccacttttaactgaaaaaaccttcaacaagcttgtgggaaagtttagccagtccatctttcacttgaatttaacacaaatactctcagccacaatggaagggaagctggttgtctgggacatacaccgcccaccctcatctgcctccacctttttgggctttccctatatcaagccttgtaaattggttcatttgcagaaagagggtatcacggtacttaccacaattgatagctacattgtcacaggtgacattaaggggaacattaagttctatgatcacaccctgtctattgttaactggtacagtcacttgaaactgggcgccataagaactctgtccttttcaaagaccccagcaactcctcctactgaaaaatcaaactatcctcctgactgcactttaaaaggtgacctttttgtcttaaggaattttatcattggaacatctgatgccgcggtgtaccacttaacaacagatgggaccaaacttgagaagttatttgtagagcccaaggatgccatttgtgccatctcctgccacccatatcaacccctcattgccatcgggagcatctgtgggatgatcaaagtgtggaattatgaaaacaaacaatatcttttcagcagggtttttgagaaggggcttggagtccagagtctgacctacaaccccgaaggagcccttcttggagctggctttacagaggggacagtttacattcttgatgcaatgtctttagaaaatgaaagcccagagcctttcaaatattccagaaccagtgtgactcatataagcttttcccatgactcccagtatatggcaactgctgatagaagttttactgtggctgtttacatgctggtggtcagaaatggacagagggtctgggagtacttagcaagacttcgctctcatcgcaaaagcattcgaagtctcctgtttggggtttacctggacagcaatgagcctagactgctgagccttgggacagacaggctcttgatagagtatgatcttctcaggagctacaaagaccacctggaagtcctggacattcaccacaccgaccagggctgctatcccacctgcatggtctggtacccaccactcaccagggaactcttcctgcttatttgcaacagtggctacaaagtgaagctttttaatgctactaccaaaatgtgcagaaagacgcttctggggccagcttatggttcccctattgagcagacacaagtcctcccagtgagaagcatggcggagctacagaaacgctacttggtgtttattaacagagacaaggtgggacttcagatcttaccagttgacggcaatccacataagacatctgctattgtttgccacccgaacggggtggccggcatggccgtttcctatgatggctgctacgccttcactgcgggagggcacgatcgctcggtggtgcagtggaaaatcaccttaagccatcctgggagccaggcaccaatattatccccatcagacacatcaagaagctaactccaaggggtctgatgactgcccaagcaatggaggaggcagtggagctgggattcacagccagggctttctaagtccaccccacaccttaacaaacattcattacaggaggaaaataaaggacttttgtctccaatctttgtgatatggtttggctctgtgttcctacccaaatctcatcttgaattgtactccgataattcccgtgtatggtgggagggacctggtgggagatggttggatggtgggggagcagggggtggtttcccccatgttgttctcgtggtagtgaataagtctcacaagatctgatggtttgataaggggaaacctgtttcacttggctctcattctctcttgccactgccatgtgagacgtgcctttcaccttccgccatgattgtgaggcctccccagccacatgaaactgtaacaataaacctctttcttttgtaaa

SEQ ID NO: 23084 - DNA, 2555 bp, Homo sapiens
  misc_feature 1..2555: note = ENST00000540779
  source 1..2555: mol_type = unassigned DNA; mol_type = unassigned DNA
gatccacaacaggaatcaaaagatgacacaatagcatggagagagtctcaggaggaggagaggaaaacgggcgaggaggaaggggaggaggaggggaaggaggacaaaaagattgtcatggaagaaactgaggaaaaggctggagaagtccaagagaaggaggcttcaggaatacaggaagaaaccacagtagagccccaagaagtcacagcgtccatgatccgtttggagacacagattactgattcccagtcaatcacatcaggaattttcccaaaaacccaaagaggtagcaagtcaaagctttccttacaattggaggatgcagaaacagatgagcttttaagagacctgagcacacaaattgaatttcttgatttggatcaaatcagtcctgaggaacaacagattagttcccctgaaaggcagccctcaggagagcttgaggagaaaaccgaccggatgccccaagatgaactgggacaagaaagaagggacttggagccagaaaacagagaggagggacaagaaaggagagtatccgacatccagtccaaagcagggatctcccgggagtcactggtgtccagcaccacagaggacattctgtttcaaaaggataaaagcaccccggtgtatcccttgaccatgacctggtcgtttggatggaacagttctcttcctgtttactatattcgagaggaaaggcagagagttcttctgtatgtttgtgctcacactgcgatcatctacaacgtgttcaggaacaatcaataccaccttcaggtatgcagggatttccttcctacaggtgggggagttgtctttaacgtgcgtgtggtattttgttttgtatctcaagggctgacttcattctatcactgtcgtattttcccactctccttggaactaaaagcaagcctgtctttagaaacacatggtattgtttattgtctctctgtttctaatcagaatcaacttacaaaacagcagttgatattaattttatagtgagaatttaaaacatctgtattttttacacttctgcaaaaatgtggacagcgtagatcatatctccacagatataacacaaagggcagctattcagcagggtgccgacctcacggacacttacacacatctctagttttcaaagggctttcatcttataactgtaccgagaagtgggtattcatatatccattttacagaagaagaaactgaggctcagagtgttttaagtgacttgcccaagactgtactagtaaacaatgactctacatctcctgtcttgaaagtgttaagtaggtcagttgtccttttatccctccctcctctcagcagctttgctcattttcacccctctctgagcctcccccatttgtccttcatgcctgccctcctcacagcactctgcctcctttgttcctgatatttgggacccacttcattttcatcatttacctttccaagcatcctattccttggtgtctgactttccactcgttggcctggtcaactgttccacatcaccctttcagttgacgtgtgttgttacaggagtgtccttagctgatgcctagatcaaaaacaccacgaggtatttaccaaggacccagtcagtactcagtgttgtgccagggactcaagatgtctgggtgcaacttaaggaattcactctctagaagtccagaaatacgcaggcagaaatcagcaggcagctccccttggagcttcattgaatgcatggcactgaacacagtggtgatggcagagagagaaggagagattgctgtgggcaggctcagatagtcaggggaagcaggatgcgcagatgggctggggtggaaggaggcaggagtccagcctcactagggccagagggctgggagtggccttgaccatccattcgtttcacaaatagttatagctgctatgtttcacagtataggtctgtagtaatgaacaaaacagatgtattccctgctctcatggagcttacagtctagaacagagacagatgttaaacaagtgaacacataaatgattacaaattgtaaccagtgcttgaaaggagatgtgaaaacgctctaagggagaaaaatcagggtaagagaagacttaactttagattgagtgggcagggattgaagaggtgctgtttctgctgagacctggaggatgcgaatgagccagccaaagacagtctgggggagaacattccaaacagagggagcaacaagtgttcaggcctgtgtgtggggcctggaaagaaggctggtgtggctgctgcaccatgagggagacagagaaggaaggagggaagaggggccatttcccagcagggagtgctgccatttgtgttcccagaagattcctctcttgtgtgcataaaaggattgtaagaagataagagtggaagcagaggccgagcatggtggctcatgcctgtaatttcagcacaggctgtggccaaggaggctgaggtgggtatatcgcttgagcccaggagtttgaggccagcctgggcaacatggcaagacccttgtctctac

SEQ ID NO: 23085 - DNA, 528 bp, Homo sapiens
  misc_feature 1..528: note = ENST00000546044
  source 1..528: mol_type = unassigned DNA; mol_type = unassigned DNA
cacgccaatattatctcctgcctctgcgtcagtgaagacaggcggtggatcgccacagcagacaaagggccagactgcctggtgattatatgggactccttcacaggtattcctgtgcacacaatatttgacagctgccctgaagggaatggcatcatggccatggccatgacccacgacgccaagtatctggcaaccatctcagatgctgaagtccagaaggtatgcatctggaagtggactttggcagtggaaacgccagcatgcactctcgaactccccacagagtacggtgttcagaactacgttacttttaacccaacaaataataaagaattggtgagcaatagtaaaacacgggcaatatattatgcatgggtaagcagaaatattttgatttgttttaaatgtgggtagaagtatgtgttcattctttgagtacaaatgtttcagtaatgtaacaatatagtatctctacttaggaagcaatgaatatatattaaaatgtttttatttaactgtagtatt

SEQ ID NO: 23086 - DNA, 4675 bp, Homo sapiens
  misc_feature 1..4675: note = ENST00000543211
  source 1..4675: mol_type = unassigned DNA; mol_type = unassigned DNA
gaggcttgagatgacttcgtccaaagaagactgacttctgctccttaaaggcacttagcagagtggtcagcttaatctaatcagagcttgaggtcgtttgaggctgattttcaggctttgtgaagtctgcctcatgcacttgcttttgccagttccttaccctacccaggcttttgtgctgttctgatatgaattctcaaacactggcattagtagtttacacccctgtggtatgtaacattcataaaatgttcagaaaatgataggtaaggaataggcgtggagacggggtggaaatggcagaaatggaacttaaaaagcttttttccagcctgtccctcagtgctgtctcctgcagcccttctccccaggctgtagccacccacctcccatgcacatttcaaacacataccccatggctccccaggaagagcttgctttgttgttcttgctgtggctgtttggtttctgtatttaaaactttccgtcacttccatagtttctgcagggttggtttttgggaagggagccagcagcccatgctattcaccatcttggcaggaattagaatccccttccaatatcttgcattcattccaagatattgtgtggccctgtcaaatttagaaatgtatacgcagcagtctttatctaaaaggatacagaataaaggttattggtgaatactggtttacttttgcttgttccaatttattttattattattattgttattattttaaattgaccactatcagaaaagcttgttatagccaggcgcagtggcccacacctgtaatcccagcactttgggaggctgaggcaggtggatcgcttgaggtagggttcaaaaccagcctggccaacatggtgaaaccccatctctactaaaaatataaaaattagctgggtgtgggggcacatgctggtagtcccaactactcaggaggctgaggcaggagaattacttgaacccaggagatagaggctgcagtgagctgagatggcgccactgcactccagcctaggcgacagagcaagactctggctcaaaaaaaaaaaaagaaaagcttattctaatttatagatgatgaattataatagatcaaactggaaagggaacacatttgacactgtttattttaatcaccagtatttaaatgatattcctatttttttttacgaaatgcggtatcttttctgttttatattcctactcatttgttttaattaaaattattatttaattttaacattcagcttaaccagaaacagaaaatttatcattaatgtattttcatactttatatttcagaactacgttacttttaacccaacaaataataaagaattggtgagcaatagtaaaacacgggcaatatattatgcatgggtaagcagaaatattttgatttgttttaaatgtgggtagaagtatgtgttcattctttgagtacaaatgtttcagtaatgtaacaatatagtatctctacttaggaagcaatgaatatatattaaaatgtttttatttaactgtagtatttagtcctattagaaattagcatattaaatcaaaagcaaataatccaattttatttattaaattttattgaagtaatgaggcaaatgtttatttgaatttatttaacaagactaaaatacaagttttatggtttttttggagatgaggtctcactatgttgcccaggctggcctcaaattcctgggctcaagtgatcttcccgcttaatcctctcaagtagctgggattagaggggtgagccggccacacctggctctaaaatacagcaggttttttttttttttttttttgagaccttggtcttttttcccttttagaaaggaattagcaaacagattagtgatacatatactgacacagggcaaaatcatgagaataaaaaacattgaggctgagcacagtggctcatgactgtacttccagcaccatgggaggccaaggcaggaggatcacttgaggccaggagtttaagactagcctgagcaacataacaagacctcatctctacaaaaaattatttaaaaaaatttaacagtgcatggtgatgcatgcctgtagtcccagctgctcagaaggctgaggctggaggattgcttgagcccaggagtttgagactgcaatgagctgtgatggtgatggtgccactgcactatagcctgggcaacagagtgagactctgtctcaacaaaacaaaacacaacaaaacaaaaaacgtttcaagttaaacatggaatagctatgtgactcagcaattccaaggtaagatgtaaaagaattgaaaagaagcattcaaacaaatacttctacacaaatgttcacagcagcagcagcagcactatttgtaataaccaaaaggtagaaacaagccaagtgttcatcaactgatgagtaggtaaacaaaatgtggtctatccatacaatggaatgttattgtatgaagtgctgatacatgctgtgacatggatcagccttgaaagtatgatgctaaatgaaagacaccagacacgaaagtcacgtgttgtatgatgccatttctatggaatgtccagcataggcaagtccacagatacagagtaaactggtggttttcaaggcctggagagagacggagtggctgcttaataggtaggagatttccttttggggttatgaaaatgtcttggatctagatggttgctcagcattgtgaatgtatgaaacaccgctgaattgcacactttaacatggttatgattaattttatgttaagtggattttacctcaataaaaaattgtagaacaaaaccaaaacacattgagtcactgattgtgagtgatagtcattatttaagatatttattatagctttattttattttatttttgagatggggtctcactctgtcatccaggctgcagtgcagtggtgcgatctcagctcactgcaacctctgcctctcaggttcaagcaattctcctgcctcagcttcctgggtagctgggattacaggaacctgccaccacacctggctaatttttgtatttttagtagagacggggtttctccatgttggccaggcttgtctcaaactcctaacctcaagtgatctgcccgcctcagcctcccaaagtgctgagattataggcgtgagccaccgtgcccagccgattgtgactttacatagtacttaatgcaaattcgaattctctattaataagcctttaaaactttaataaataccttaaggtcggccgcagtggctcacgcctgtaatcccaacactttgggaggctgaggtgggcggatcacctgaggtcaggagttcgagaccagcctggccaacatggcaaaaccccatctctactaaaaaaaaaaaaaaattagctgggcatggtagtgcgctcctgtaatcccagctactcaggaggctgaggcaggagaattgcttgaacccaggaggcggagtttgccgtgagctgagatcgcgccactgcactccaggctgggcgatagatgtgtttctgcttgaagacaccttatttaatatagaactccatctcaagaaaaaaaaagtcataatcatttgtggcattttttatattttttatgtatttgcttttctttcagaatgtttttagatatttcccaagacagcaagttctcttacctgtagaaactgcaaatttctgaccttgtttagatgtatttgttttgcttttattattaatgccgttcttcctttggaaactgggtctttttgagtagtgattattttttcctcttatcagtatgaagagagggatacactggctcacagtgccccacttttaactgaaaaagggaacaatgaggtcttgacatggttttacaaagagaaatgcaaattgtcaccctcactcagtggagcgagaagataggagaactgcagttggccatgcaatcaacctttaatcggttggggtttaggatccagtggagaccaggcctgggttctccaagttaataaaacccagtcaggacctgggagtccaagaaggaaaaggtctctggaaatacttgctacattgtcacaggtgacattaaggggaacattaagttctatgatcacaccctgtctattgttaactggtacagtcacttgaaactgggcgccataagaactctgtccttttcaaagaccccagcaactcctcctactgaaaaatcaaactatcctcctgactgcactttaaaaggtgacctttttgtcttaaggaattttatcattggaacatctgatgccgcggtgtaccacttaacaacagatgggaccaaacttgagaagttatttgtagagcccaaggatgccatttgtgccatctcctgccacccatatcaacccctcattgccatcgggagcatctgtgggatgatcaaagtgtggaattatgaaaacaaacaatatcttttcagcagggtttttgagaaggggcttggagtccagagtctgacctacaaccccgaaggagcccttcttggagctggctttacagaggggacagtttacattcttgatgcaatgtctttagaaaatgaaagcccagagcctttcaaatattccagaaccagtgtgactcatataagcttttcccatgactcccagtatatggcaa

SEQ ID NO: 23087 - DNA, 2883 bp, Homo sapiens
  misc_feature 1..2883: note = ENST00000535257
  source 1..2883: mol_type = unassigned DNA; mol_type = unassigned DNA
gttttctgcatacttgcttctctctcggtatgatttgtagaaatttatttaagagggcatgccaaaagacaaaaacaaaaaataaaaagttgagatggatgggcacaatgagattattctgtctgcagacttgtttttcataaatgaaagtactaaaaaataccatcagttctcattattgttggtagttatgttatataaagtctctgtaaacaccaaattagcagatacttaactattgctcttaagggaaatataggggtaggtttctgtgagcctctggtcacattttcaccaattgatcaatacataagcttgttttatgtgtatttctatttaaagacactttatttaatatataacattgattcattaacattgaactcatggccaacagcactataactcatgacttgaacaaaactcatctaacctacatattttctccataaagcacatcacagcattcttttgcttaggaacactagccagcacttcagcactatgtttcagggtcaatttaaatactaaaatcaccaagaaaaatgcaaacaaccaaaaatgcaaacaacatggcactaaatagaccatgaaaaggacacttgtttatagtcagagctgagacaagaaggcggagcattgccctgcctgccctcaactggaaatgtgcatgttgagtgagtaaaattatttgtcacactgcacatgcacttctgcaaatgaccgtgagagtgctgcaagtattgattttgggattacaaatcaattcttaaagtaggtaaattcgcaaatacagaatccacaaataatgagccatttgaaatgataaaaatgtattgaaacagtgctgctcttagaaagaacttggtgctcttgtttgactaatcattattttactattcctcttgtgttcaagtcagaagaggtaaaccttaggatcttctctgtattattagagaatcgggcagcatagagaatagggcatttctatgtacagtgcttaaatattttctactgatgggaaaataccttatgataaaaggaggctgggataattattttatgctattttataaccagagcatgctttgactcacaacaggcattagtttcttcaccagtctctgaaacctccataagagaagtttaacaggtataaacagtgattaaccactctctcgtttgctttaaacaaacaatgtaattgaacagagtacataacccttcacttgctcttagcaaacttccagaggttcagaactgcctggaccatggcaattcatgggagacggttttagtgattgttttctttttctttctctttttctcactatatttcagcatagcattataaaatatcgtattgataaatgctttgttttatatttattaccaacagtaactataacctttcttttgaaacagaccttcaacaagcttgtgggaaagtttagccagtccatctttcacttgaatttaacacaaatactctcagccacaatggaagggaagctggttgtctgggacatacaccgcccaccctcatctgcctccacctttttgggctttccctatatcaagccttgtaaattggttcatttgcagaaagagggtatcacggtacttaccacaattgatagctacattgtcacaggtgacattaaggggaacattaagttctatgatcacaccctgtctattgttaactggtacagtcacttgaaactgggcgccataagaactctgtccttttcaaagaccccagcaactcctcctactgaaaaatcaaactatcctcctgactgcactttaaaaggtgacctttttgtcttaaggaattttatcattggaacatctgatgccgcggtgtaccacttaacaacagatgggaccaaacttgagaagttatttgtagagcccaaggatgccatttgtgccatctcctgccacccatatcaacccctcattgccatcgggagcatctgtgggatgatcaaagtgtggaattatgaaaacaaacaatatcttttcagcagggtttttgagaaggggcttggagtccagagtctgacctacaaccccgaaggagcccttcttggagctggctttacagaggggacagtttacattcttgatgcaatgtctttagaaaatgaaagcccagagcctttcaaatattccagaaccagtgtgactcatataagcttttcccatgactcccagtatatggcaactgctgtaagtattttcatggacaacccatccagtggcttagcaattttatttgaaaccaaaagaggccagacatagtagctaacacctgtaatcccaatgatttgggaggccgaggtgggaggatcattggaggacaggaattcaagaccagcctaggaaacacagcaggaccccactgctacaaaaacactttttaaaaattagccaggccttgtggcacacatctgtagccccagttatccaggaggctgaggcgggaggacccctgcgggccaggagtttgaggttacagtgagctataaggcaggtatgttggtctgcctttatgttgggagggaaaagcagtggtcttcgctaaactcctgtcccttccggcgctctccatccccacactggtgcggccactcctccggtttgtgtacacaacgcttctgaagccaaagctgtctcagcatactgtgggtgcacacagtccagcttctgtgtcccctcaggccaggctctcccactccaactgggttcacttgcagccttcatacctttcaaaaacacatagcttttttattatatgtagctggacaaagaaaagggaggacgaaggcacaaagagtcaggcttttggctttccacagacagcgagggggcacc

SEQ ID NO: 23088 - DNA, 733 bp, Homo sapiens
  misc_feature 1..733: note = ENST00000545752
  source 1..733: mol_type = unassigned DNA; mol_type = unassigned DNA
tcaggagctacaaagaccacctggaagtcctggacattcaccacaccgaccagggctgctatcccacctgcatggtctggtacccaccactcaccagggaactcttcctgcttatttgcaacagtggctacaaagtgaagctttttaatgctactaccaaaatgtgcagaaagacgcttctggggccagcttatggttcccctattgagcagacacaagtcctcccagtgagaagcatggcggagctacagaaacgctacttggtgtttattaacagagacaaggtgggacttcagatcttaccagttgacggcaatccacataagacatctgctattgtttgccacccgaacggggtggccggcatggccgtttcctatgatggctgctacgccttcactgcgggagggcacgatcgctcggtggtgcagtggaaaatcaccttaagagtcacaccaagcctaggctggtcttgaactcatgggctcaagccttgggcacctaaagtgttgggattacagatgtgagccactgcacccagctagaaccttccttctgaaatgtttgtcttcttctcagtcgtcgtgggatctggaatggtagaaatttaagaagaagaaaaaaaggcctctgctttccaatagctttcgcctggccagagtccaggcttctgagaatttcaatttaatctgtggtggggacaaaggatcattataaactaattatcacttca

SEQ ID NO: 23089 - DNA, 3317 bp, Homo sapiens
  misc_feature 1..3317: note = ENST00000428465
  source 1..3317: mol_type = unassigned DNA; mol_type = unassigned DNA
ctggagggtgtttttaagttcttgcagtgacaagttgtcacattttctttttgcttcatccagatgcatgaatcaaagcaactgaagtctgaaagggaatgaaatgccatgagccagtatctgtaacctgcgggtgacaactcgagagcaacaagtgactgggtttaagatgatctccttttaaaggcgtctttaaagcaaaaggaagcatgtgtgttagggatccacgcgcatgtgatgaaccacatagagcagtgaagtggtgcaaatggaaaattcagtagccagtacatggggcgaggaggtagtgagatggcacgagggaacagcacatgcgtgaatgcaaaggcgtacgccacaacacccggctcatttttgtattttttgtagagacagagtttcaccaggttgtgcaggctggtctctagttcctgggttcaagcagttctcctgtcccagcctcccaaaatgctgagatggcaaggtgtgagtcaccgttcctgaccatcatctctcaaaaaaaaaaaaaaaaaaaaggcatgcatgatggctcactcctgcatccctacactttgggaggcagctgtgctgcagcctgggtgatagagcgagattctgtctcttaaagaaaaaaaatttaagtcttccaatccctgaatatggaaagtctttccatttacttatgttttctttagttttttttttttttacaatattttgtagcttttagagcacaaatcttgcatttttgttaaattgattcctaagtactttattcttcttaatcctattataattggaattgttttattaatttattataattattgtgctgttcactgctagtgtgtaaagaaatacaatagtttgtttttttttttttgagttagagttttgcacttgtcacccaggctggagtgtaatggcgccatctcagctcactacagcctccacctccccagttcaagcgattctcctgcctcagccccccgagtagctgggactataggcatacgctaccacgccgggctaatttcgtatttttagtggagacagattttcaccgtgttggccaggctggtcttgaactcctgacctcaggtgatctacccaccttggcctcccagagtgctggaattacaagcctgagccaccatgcccggcctcaattgattttttttttaagacagggtctcactttgtgtcccaggctggagtgcagtggcatgatcatgggctcactgcagcctcgaacttgtgggctcaagcagtcctcccacctcagccccctgagtagctggaaccataggtgcatgccacatgcctgattaattttttgttttctgtagaagcagggtcttttaatatgttgcccaagctggtctcgaactcctggcctcaagcaatcctccagcctcagcctcccaaagtgatgggattacaggggtgagccactgcacctggcctataattgatgtttatattattgatcttataccctgcaaccttgctgaagttgtttaccagttctaatagtttttagtgtaatatatatatatatatatatatatatatatatatatatatatatatatatatatatgattgtgttatctgcaaatagagatagttttgcttctcccattcaattctgggtgccttttatcttcttttcctgcctaatttccctggctagaacctccaggacagtgtggaatggaagtggtgccaggtggctcatgcctgtaatcccagcacattgggagaccaaggtgggcagattgcttgagcccaggagtttgagaccagcctgggcaacatggtgaaaccccgtctctaaaaaaaaatacaaaaattagccaggcatggtcaagcatgcctatagtcccaggaactctggaggctgaggtgagaggatcgcctgaacctgagaggtcaaggctacagtgagcagaggttgcctcactgcactccagtctgggtcaaagagtgagaccctgtatcaaaaaaaaaaaaaaaaaaaaaaaaaaaaagggggaagtggtgagagtggacatccttgtctttttttctgatcttaggaggagaaagcatttagtccttcatcattaagtatgatgttagctgtgggtttttcacacatgcccgttattgggttgaggaagcttctttctattcctagtttgttgagtgtttttaccatgtaaagttgttagattttgttaaatgctttttttctatgtctgtttagatgatcatgtggtttctgtcctttattctgttaataataatgtattatattaattgaggttgacatgttaaaccaaccttgcattcttgggataaatcccacttgatcatggtgcacaatcattttgtatgctcctggatttaatttcttgtattttctggaggatttttccatctaaaataattggaaagtattcctttttcctctatttttgtgcagtttgtggaaaattagtattctttttttttccccccgccgagacagagtttcactctgttgcccaggctggagtgcagtggcacgttcttggctcactgtaacctcaacttccagggttcaagtgattctcatactgtgccaggctaatttttgtatttttagtagagacagggtttcaccatgttggccaggctggtctcaaactcctggcctcaagtgatcctttggccacggcctcccaaagtgctaggattacaggcatgagccgctgcaccagccctactgtccaatttttagaaatctatcctggtgccttttctatttactgtggtcttttttttttccccatctttcccctagattgatgatatatttaacgaaatcaaatttggtgaatatgtggacactggaaagctaatcgacaagatcaacttaccagatttcctaaaagtgtaccttaaccacaagccaccttttggtaacaccatgagtggcatccacaagagctttgaggtgctcggttataccaactccaaagggaaaaaggccattcgaagagaggacttcctgagactgctcgttactaaaggtgagcatatgacggaggaggagatgttggattgctttgcttcactgtttggcctgaatcccgagggatggaaatccgagcctgcaacctgctccgtcaaaggttcagaaatttgccttgaagaagaacttccagacgaaatcactgcagaaatattcgcgactgaaattcttggcttaaccatttcagaagattccggccaggatggtcagtgaagttaccaggaatgtttaaagcacaaaggactttgggtgtgtg

SEQ ID NO: 23090 - DNA, 492 bp, Homo sapiens
  misc_feature 1..492: note = ENST00000545988
  source 1..492: mol_type = unassigned DNA; mol_type = unassigned DNA
ctgcacataacaaagcatgtctgttgggaatcccacatgaataagttatgaaaagaacagtgagtggtggcttttgttcccgcgctctgtccgtccttttgtttcttctgggcttattttccctttgttccactgacctgtcatcttgccggcttgggtgggtgaatattggccacccgtagaggatccagtttgacagctgtttcaggagaataggttcagaaatttgccttgaagaagaacttccagacgaaatcactgcagaaatattcgcgactgaaattcttggcttaaccatttcagaagattccggccaggatggtcagtgaagttaccaggaatgtttaaagcacaaaggactttgggtgtgtgtgcatgcacatgtgtgtgttttccatgaggcactgctttttatgcatttccctcccccctctcatctttagaacatttagacattaaagcaagtttctggtgagcaatggaattcacaaa

SEQ ID NO: 23091 - DNA, 1534 bp, Homo sapiens
  misc_feature 1..1534: note = ENST00000219454
  source 1..1534: mol_type = unassigned DNA; mol_type = unassigned DNA
gacaggccactcccggccacgtctccaagcaagccggtgccccctcctcctgctgccaccgcccactgagctgcctgggctgcagacgccctggttggagcgtctggggccagatgttatagggcaagctaaaaataaccgggcaggccagccaccatcgaggaaggggcatgtgctggacgcggacacatgatccgagggaccctgctgggtggaactaagaaagtccagcagactgtgcacgctcctgtccccactcacaggcccacgcagcgaggggggcccctcttctgtgtgcgtctggaaggtcgctgcccagggaggaaatgcctttaaccggcgtggggccgggcagctgcaggaggcagatcatccgggctctgtgcctcttgctacttctcctccacgccggctctgccaagaatatctggaaacgggcattgcctgcgaggctggccgagaaatcccgtgccgaggaggcgggcgcgcccggcggcccccggcagccccgagcagaccgctgcccgccgcctccgcggacgctgccccccggcgcctgccaggccgcgcgctgtcaggcggactccgagtgcccgcggcaccggcgctgctgctacaacggatgcgcctacgcctgcctagaagctgtgccgcccccgccagtcttagactggctggtgcagccgaaacctcgatggcttggtggcaatggctggctcctggatggccctgaggaggtgttacaagcagaggcgtgcagcaccacggaggatggggccgaacccctgctctgtccctcgggctatgagtgccacatcctgagcccaggtgacgtggccgaaggtatccccaaccgtgggcagtgcgtcaagcagcgccggcaagcagatgggcgaatcctacgacacaaactttacaaagaatatccagaaggtgactcaaagaatgtggcagaacctggaaggggacaacagaagcactttcagtaaagcaacggcaagcagctaggttgcaagaacattcctctactttctgctaagccttggaaacagttgggaaaagtagtttgaccctcacagttcacattcagctcagcagagcaagaccccagagatgcttagagacaggacacctggccatcaaacccagtttggcccagcctggttgggtgactttgtgggagccacttaacagctctgggtccctgttttaccatcctgggagcaaggccctgcagctccacgagacctttaccccgggaagaagccgccacccatgaaagcatttctgaagcccctttctaagacaaggctcagcatcttgatatttttgacagattcctcccaagtctggctctgggaggtatgtacccatctcaaatgttcccaagataaattcatccttcaggaaatggaaatgaacttgcttactaatgtgtgattcctagttgtagccaccggatgtgctgaggcctaaatgttagcaggtgggaggaggccacagaacaataaaaacaaccaaataagatgccgag

SEQ ID NO: 23092 - DNA, 1319 bp, Homo sapiens
  misc_feature 1..1319: note = ENST00000568638
  source 1..1319: mol_type = unassigned DNA; mol_type = unassigned DNA
gaccctgctgggtggaactaagaaagtccagcagactgtgcacgctcctgtccccactcacaggcccacgcagcgaggggggcccctcttctgtgtgcgtctggaaggtcgctgcccagggaggaaatgcctttaaccggcgtggggccgggcagctgcaggaggcagatcatccgggctctgtgcctcttgctacttctcctccacgccggctctgccaagaatatctggaaacgggcattgcctgcgaggctggccgagaaatcccgtgccgaggaggcgggcgcgcccggcggcccccggcagccccgagcagaccgctgcccgccgcctccgcggacgctgccccccggcgcctgccaggccgcgcgctgtcaggcggactccgagtgcccgcggcaccggcgctgctgctacaacggatgcgcctacgcctgcctagaagctgtgccgcccccgccagtcttagactggctggtgcagccgaaacctcgatggcttggtggcaatggctggctcctggatggccctgaggaggtgttacaagcagaggcgtgcagcaccacggaggatggggccgaacccctgctctgtccctcgggctatgagtgccacatcctgagcccaggtgacgtggccgaaggtatccccaaccgtgggcagtgcgtcaagcagcgccggcaagcagatgggcgaatcctacgacacaaactttacaaagaatatccagaaggtgactcaaagaatgtggcagaacctggaaggggacaacagaagcactttcagtaaagcaacggcaagcaggttgcaagaacattcctctactttctgctaagccttggaaacagttgggaaaagtagtttgaccctcacagttcacattcagctcagcagagcaagaccccagagatgcttagagacaggacacctggccatcaaacccagtttggcccagcctggttgggtgactttgtgggagccacttaacagctctgggtccctgttttaccatcctgggagcaaggccctgcagctccacgagacctttaccccgggaagaagccgccacccatgaaagcatttctgaagcccctttctaagacaaggctcagcatcttgatatttttgacagattcctcccaagtctggctctgggaggtatgtacccatctcaaatgttcccaagataaattcatccttcaggaaatggaaatgaacttgcttactaatgtgtgattcctagttgtagccaccggatgtgctgaggcctaaatgttagcaggtgggaggaggccacagaacaataaaaacaaccaaat

SEQ ID NO: 23093 - DNA, 549 bp, Homo sapiens
  misc_feature 1..549: note = ENST00000613603
  source 1..549: mol_type = unassigned DNA; mol_type = unassigned DNA
gtctggaaggtcgctgcccagggaggaaatgcctttaaccggcgtggggccgggcagctgcaggaggcagatcatccgggctctgtgcctcttgctacttctcctccacgccggctctgccaagaatatctggaaacgggcattgcctgcgaggctggccgagaaatcccgtgtaagtgcctgggatggggaggctggggcagcctgtgtgggtgggagtcagccttgaggagaggcgatccctagacactgccttctcctgtaagtgctcccccaaaacgtggcaaggcaggcgtcttcctatccgtgtgtgtctgagttgtgtggtgggcagatggggctcacccccaaaaaaggacccttatctgtgaatcaagaggcaaaagacacatcacaaatgtgccaaagaatcgtgccttacttttgccttgttacaaaagtatgcttgctcctgaaagacagcatctcatttcggaaccccaggatttaaacggagcattccgtctccctgatcagtaccaaatgtttgtgaaatacacttatgcattc

SEQ ID NO: 23094 - DNA, 4148 bp, Homo sapiens
  misc_feature 1..4148: note = ENST00000567056
  source 1..4148: mol_type = unassigned DNA; mol_type = unassigned DNA
gagaatacaaacagcacatattactacgtttcccacctgaaaatgtttcctaacacgtggtctgatgtggtggtggaaaggagggaagaaccgaaaggttgcgtatagaggctgaagaaccatcgcgtcattcctgttttggaggtcacagactgctggctcctttctctgctgttccaacttccatgtcattataatcagtataatcagcgagtgctcctttacagaaaaagctaaccagcatttttaccagtacccatcaatatactttaaaagatgctaattatttttctattctctttataaagataaatattagtaatttttatttttgtcttactttggagtcaaacgaatgcagaggtcacaagcaaatgtgatcccagaacagttttgatctccaacatgcttaaagttttctgcccaggcacggtggctcacacctgtaatcccagcactttgggaggccaaagcaggaggatcacgcgaggccaggagtttgggaccagcctgggcaacatagggagaccgcctatctctgtagaataatcatcatcatcatcattagtaaaaaaagttttaaaattacttgtcaacacttaaaaaccagaagatttctatttttaaaaatacagacttggccgggtgtggtggctcatgcctgtgataccagcactttgggagggcaaggcgggtagatcacctgaggtcaggagttctagaccaccctggccaacatggcaaaaacccgtctctactaaaaatacaaaaattagccaggcatggtgatgcgtgcctgtaatcccagctacttgggagactgaggcaggagactcgcttgaacccggaaggcagaggttgcaatgagccaagattgcgccattgcactccagcctgggcgacaagagtgaaactttgtctcaaaaaaaaaaaagaaaaaaatacagacttacagtccgggtgcagtggctcactcctgtaatcccagcactttgggaggccgaagggggtggatcacttgaggccaggagttcaagaccagcctgggcaacatggcaaaaccccatctctactaaaaatacaaaaattagccaggcgtggtggcacatgcctgtaatcccagctactcgggagactgagagaggagaactgcctgaacctgggaggcagaggttgcaatgagctgagatcgtgccactacccttcagcctgggtgacagaacaagactctgtctcaaaataaataaataaataaataaataaataaataaataaataaataagaagtaaataaataaatagaataagaacttacagtaagaaaaaaaataaaacagtctgggagcattggaaatgactggtcagggctaaccagcagctgattcatccaggcaggaggcactctctgctttgctgtggccctgcctggtctgttttcctgtcccctagaggcatttgagttttcgacccctgccttttgaaggccttcccataaactgtgtgggtgactctttctgttaaaaccaggtatattggttatacctgggtgatgggatcacctgtacaccaaacttcacccatacaccaaacttcagtgacatacaatttacctgtgcaacaaacctgcatgtgtacccccgaacctaaaaattaaaaaaataaagtattagttagagaacaggctatgctgctgcaacaaaaagacccataaatacagggacccaacctgtgaggcattttcttctctctcagctattagtgcagagacagacatttgtggtaggcaggtagctctgctcgcaaagccatctagggacccagcttccttccttcttgccactctgcagtctgactgatgtccttgtccacatggtcagaatggcccccagcctgcaggaaggaaaagagggagggagaggagcagagagccccgattggagggtgagacaggaagttgcatggtcactgctgctcacatctttgtagctgcaagggaggcagggaaggctagtccccagctttgtggcccagtgcccagcccacagtgaaaggttctatcactaaaagcaaagggtgaaggtgtgccaggaaccatagttatttctcccatggggagcctctgtgctgtcatgaagttggggtgcccccagcccccaagcctgggcgtttctcagctgcttgaggagggccctgatctgaccccgtattgtgttagtcttagactggctggtgcagccgaaacctcgatggcttggtggcaatggctggctcctggatggccctgaggaggtgttacaaggtacctgccgggtaaagcccagaccctacatccaagcctcgatccctccttctcagctgcttccagaaagctggcagcaccaggccggctgtcccccatgcacgggcccttcagccaaacactcagccctctttgatcctccccaccccagcgaagaagggctgatggctgggggcttggccagaatcaaagcccagtacagaataagggcttcgactctccccaagaatggagcctcctcctggatggagaattgaaggggagggggcttagggttggttttcaaattcctagaattctagggggttcaccgctctctaatgatgaagcctccctgggggtgggggaggtaccaggaggcagagggcaatttctggaaggaacagcatgcaggtcgggggcctggaggcctaggaggtgcgagcgggcacccttgcacacctgcggctgtgcttctgactccacgtccatctgtgtgttgtgtgactgtgtccgctagagtgtgcggccgtatatgcaactgtgtggctgtccttgtgcctgtggctgaatatttgtgtgtgtgtgtgtgtgtgtgtgtgtgtgtgcatgcaaaagtgtgtgactgtattgtgagtgtacatgtgtgggtaagcgtgtgtgtatgtgggtgtggatatgtgtgtgcaggatttgtgtgtggggatgcgtgcgtatatgtctgtgtgtatttgtgcgtctgacttgcttgtgtaaatgtctgtgtccccatgcgactgtagggctgagtgtgtgtttcagggtgtatccgtgaacatgtctatatggatgttgctgagcctgtgagagtatgtttgggatcaggtgagcttggactgcctgtgtttgtgtgcgtgtttgtgggtgtgcacgtgtgccacatgccgctgagtgagacccagggcctagcctggaacctggggtacagaggcgaggccgcctctctgggtgaggtgcgttccctgcacccgtcccgggagtctgccttctagaccctagcatgtgcacctgtcctgggagtcggccttctagaccccagcgtgtgtccctcctgcagcagaggcgtgcagcaccacggaggatggggccgaacccctgctctgtccctcgggctatgagtgccacatcctgagcccaggtgacgtggccgaaggtatccccaaccgtgggcagtgcgtcaagcagcgccggcaagcagatgggcgaatcctacgacacaaactttacaaagaatatccagaaggtgactcaaagaatgtggcagaacctggaaggggacaacagaagcactttcagtaaagcaacggcaagcaggttgcaagaacattcctctactttctgctaagccttggaaacagttgggaaaagtagtttgaccctcacagttcacattcagctcagcagagcaagaccccagagatgcttagagacaggacacctggccatcaaacccagtttggcccagcctggttgggtgactttgtgggagccacttaacagctctgggtccctgttttaccatcctgggagcaaggccctgcagctccacgagacctttaccccgggaagaagccgccacccatgaaagcatttctgaagcccctttctaagacaaggctcagcatcttgatatttttgacagattcctcccaagtctggctctgggaggtatgtacccatctcaaatgttcccaagataaattcatccttcaggaaatggaaatgaacttgcttactaatgtgtgattcctagttgtagccaccggatgtgctgaggcctaaatgttagcaggtgggaggaggccacagaacaataaaaacaaccaaataa

SEQ ID NO: 23095 - DNA, 4177 bp, Homo sapiens
  misc_feature 1..4177: note = ENST00000622779
  source 1..4177: mol_type = unassigned DNA; mol_type = unassigned DNA
aagcatgcatccatccatccattcctccatcgatctattcatccatctgttcattcttccatctatccatctatatattcatctatcttttcatctacccatctattattttatccacccttctattcctttatccctccatccaaccatccttatatccactcatctatttgcccgtacatccattcacccaaccatccatccatctgcccattcatccattcatgcacatatccttgcattcattcatctatctcttctttcatccattcatacatccatccatccacccatccacccatctacccatccatccattcacctatgtatccattcatccatccacccatatatccatctatctattcagccatccagccagccactatccatccatctatccatccatccatatatccatccgtccatccacccacccatctatccatccatccatccatccatccattcatctacccatctatccatctatccacccacccatatatccatgcatccatccatccatcatttatccattcacccattcacccatccatccatccatcatttatccattcacccatccatccatccattctcccatccatctgatatgtctttatcaataatttacagcacatattttctaagtattactcatcagtctgtgctgggggttggagctacatttgtgaacatgacagacccagtcgctgctgtcatgcagctaatatcaagcagaaaattcagacatgaatatagcccaagtggttattttatgagaatagtgacaagccttcctgacatcacatgctggatactatgaggacaccttagtccaggttgtgagaaaaggcttcctaaggaggagacatgaaagctcagcctaaagaataagaaatagtgggcagcagaatggcatgtgtgaagctcttgaggtcggaagcaatttggccatccccaaagctggagtgtgtggtgagctgtggaggtggtgggaggtaagaccagaaacatagacagagctggtgacaccagctggggggcctggggagggagaggaggcactgcaggtggggactgagtgacctcagctgggggagggaggagagggccaggtcaccaggcttcatttggcagttcctggtgagccacggggggcattagagcaggaatagatacatctaccccaacagagctgtgttcttttcacagaaggtgactcaaagaatgtggcagaacctggaaggggacaacagaagcactttcagtaaagcaacggcaagcaggtgagtgggcagagagcaagagtcatggccagggtaaatgtgggcagccagtgtcctggcagctttcaccaccaggttgaggagcaggagggtgagagtagcgctttccctactggtagaatttgaaattcccttctgcagtaagtcctcacctaacgtcatcaataggttcttggaaactgactttaaatgcaacgacatactatatgcactgtatgccatagaagcttaactcatttgtttgtttttttaagagatggggtctcactctgtcacccaggctggagtgcactggcacaatcattgttcactgcagcctcagactcctaggctcaagccatcctcctgcctcagctttagtctcagtagctgggactacagacatacaccacctcacctggctaattttttttttgtattttttgtagagatgagttctcactatgttactcaggctggtcttgaactcctggcctcaagcagtcctcccactttggcctcccaaagtgctgggattgcaggcatgagtcactgtgcctggccttaactcttgtttatatccattagcctatggtaaaattgtttttgttatatagtaggtcattttgcttaaagttgcagtttccaataagctatccatgatgttaaatgaggacctactgcaatttcaaggcaggaacgtaggagaactttgtgtgtgatcagaagcagaagcaattctgtatccctctgaatcaaaaatccaagaccagactaggtcgcaactttccttttcattcctttgccttgatgtctccaggaagtcttgtctatctcttctcatttctgtcaaacaattctgttgggtgccaactatctgatagtcatggttccagcctcttggttgctcagcggtagttcatgccagggtggtatagtgaacaaatcccacagagccgctgccctcagggaggccacatcctggtaggggacggctacacaagccaacagatcaatcaatacaaagacaggtgtggtgaagaagtgaacaggcaatgtggggcagagtccctgggcaggagcagagcctggggcaggggctgcttcgtttggggtcagggaaggccctgtgggggttgaagtctgagccaagatccaaggtgagaaggtgctgcttggggagggtctggaggataggcgcccaggtggagggagttggaagagtgaaagtactgaggcaggagggacgctggctttggggagccaaagaaggcccctggggtagacgcaggaaggtggcagggaggctgactccagaggaggccgcaggtgaggcacaggcttgccctcacgtgccctcaaaggtgaggcgtaggtgcatgcaaagggctgtggagttgcagccctaaacctgaaaatctacccagcccctgtgaatgctggatagccacagagggcaaaaaggagcccctaaaagcaggtgacagcctcccaggacgtcgctgaaacgcaaatgtcagattgcaggttccagaatcctcccggaaaatctggagcccgtagggactgatgccagcacgtctgttacctgctgatgacaggagccgtccctggagtaggtcagatgcagctgaggactgagcttctaacagggaagaaggaggccagtggatgaggacgagaccttgggaggcagttgaggatggcagtttggaagttgaggcttttgggtgggcgcagcagctcccgcctgtaatctcaacattttgggagaccgaagcaggcatatggtataatcccaggagttcaagcccagcctggcctggccaacatggtgaaaccctatctctacaaaaaaaaatacaaaactacccaggcatggtggtgtgcacctgtggtcccagctacttgggaggctgtggtgggaggatcacctgagcctagggaggttaaggctgcagtgagccatgtttgcaccattgcactccagcctgggtgacagagtgagaccctgtttcaagaaaaaaaaaaagtacagcctttggagcaagctaggtctgggtttaaattcttgttccagcactgtggatttagtaaataatttcggctctccaagcctcagcctcctcatctataaaatggaactgatggtaggggaggagttaggaactaaataagatgatgccgtgaagacgtcacagtgagttcagaattgggtcttctcagaaaggggcatcttcctggtgtttctgatggtggcggtggcggcggggagacgaaagatttgtgactctgtggtctgccctgcagtggttcaccctgacccttctttgtctctggtctgccctgcagcggttcaccctgatccttctttgcttgctttccagctaggttgcaagaacattcctctactttctgctaagccttggaaacagttgggaaaagtagtttgaccctcacagttcacattcagctcagcagagcaagaccccagagatgcttagagacaggacacctggccatcaaacccagtttggcccagcctggttgggtgactttgtgggagccacttaacagctctgggtccctgttttaccatcctgggagcaaggccctgcagctccacgagacctttaccccgggaagaagccgccacccatgaaagcatttctgaagcccctttctaagacaaggctcagcatcttgatatttttgacagattcctcccaagtctggctctgggaggtatgtacccatctcaaatgttcccaagataaattcatccttcaggaaatggaaatgaacttgcttactaatgtgtgattcctagttgtagccaccggatgtgctgaggcctaaatgttagcaggtgggaggaggccacagaacaataaaaacaaccaaat

SEQ ID NO: 23096 - DNA, 3255 bp, Homo sapiens
  misc_feature 1..3255: note = ENST00000503569
  source 1..3255: mol_type = unassigned DNA; mol_type = unassigned DNA
cgtgcagaaggccgcgctagccggctcttcagcagcgagtgcagattgctcccccgcggccgcagatctcccgtttgcgccgcgttcagctgctcccgaacaacttttctgccggcccagaggccccagggcgtcgcagcgccgcgtgcggcccactcacgggccggatggactccaacactgctccgctgggcccctcctgcccacagcccccgccagcaccgcagccccaggcgcgttcccgactcaatgccacagcctcgttggagcaggagaggagcgaaaggccccgagcacccggaccccaggctggccctggccctggtgttagagacgcagcggcccccgctgaaccccaggcccagcataccaggagccgggaaagagcagacggcaccgggcctacaaagggagacatggaaatcccctttgaagaagtcctggagagggccaaggccggggaccccaaggcacagactgaggtggggaagcactacctgcagttggccggcgacacggatgaagaactcaacagctgcaccgctgtggactggctggtcctcgccgcgaagcagggccgtcgcgaggctgtgaagctgcttcgccggtgcttggcggacagaagaggcatcacgtccgagaacgaacgggaggtgaggcagctctcctccgagaccgacctggagagggccgtgcgcaaggcagccctggtcatgtactggaagctcaaccccaagaagaagaagcaggtggccgtggcggagctgctggagaatgtcggccaggtcaacgagcacgatggaggggcgcagccaggccccgtgcccaagtccctgcagaagcagaggcgcatgctggagcgcctggtcagcagcgagtccaagaactacatcgcgctggatgactttgtggagatcactaagaagtacgccaagggcgtcatccccagcagcctgttcctgcaggacgacgaagatgatgacgagctggcggggaagagccctgaggacctgccactgcgtctgaaggtggtcaagtaccccctgcacgccatcatggagatcaaggagtacctgattgacatggcctccagggcaggcatgcactggctgtccaccatcatccccacgcaccacatcaacgcgctcatcttcttcttcatcgtcagcaacctcaccatcgacttcttcgccttcttcatcccgctggtcatcttctacctgtccttcatctccatggtgatctgcaccctcaaggtgttccaggacagcaaggcctgggagaacttccgcaccctcaccgacctgctgctgcgcttcgagcccaacctggatgtggagcaggccgaggtcaacttcggctggaaccacctggagccctatgcccatttcctgctctctgtcttcttcgtcatcttctccttccccatcgccagcaaggactgcatcccctgctcggagctggctgtcatcaccggcttctttaccgtgaccagctacctgagcctgagcacccatgcagagccctacacgcgcagggccctggccaccgaggtcaccgccggcctgctatcgctgctgccctccatgcccttgaattggccctacctgaaggtccttggccagaccttcatcaccgtgcctgtcggccacctggtcgtcctcaacgtcagcgtcccgtgcctgctctatgtctacctgctctatctcttcttccgcatggcacagctgaggaatttcaagggcacctactgctaccttgtgccctacctggtgtgcttcatgtggtgtgagctctccgtggtcatcctgctggagtccaccggcctggggctgctccgcgcctccatcggctacttcctcttcctctttgccctccccatcctggtggccggcctggccctggtgggcgtgctgcagttcgcccggtggttcacgtctctggagctcaccaagatcgcagtcaccgtggcggtctgtagtgtgcccctgctgttgcgctggtggaccaaggccagcttctctgtggtggggatggtgaagtccctgacgcggagctccatggtcaagctcatcctggtgtggctcacggccatcgtgctgttctgctggttctatgtgtaccgctcagagggcatgaaggtctacaactccacactgacctggcagcagtatggtgcgctgtgcgggccacgcgcctggaaggagaccaacatggcgcgcacccagatcctctgcagccacctggagggccacagggtcacgtggaccggccgcttcaagtacgtccgcgtgactgacatcgacaacagcgccgagtctgccatcaacatgctcccgttcttcatcggcgactggatgcgctgcctctacggcgaggcctaccctgcctgcagccctggcaacacctccacggccgaggaggagctctgtcgccttaagctgctggccaagcacccctgccacatcaagaagttcgaccgctacaagtttgagattaccgtgggcatgccattcagcagcggcgctgacggctcgcgcagccgcgaggaggacgacgtcaccaaggacatcgtgctgcgggccagcagcgagttcaagagcgtgctgctcagcctgcgccagggcagcctcatcgagttcagcaccatcctggagggccgcctgggcagcaagtggcctgtcttcgagctcaaggccatcagctgcctcaactgcatggcccagctctcacccaccaggcggcacgtgaagatcgagcacgactggcgcagcaccgtgcatggcgccgtgaagttcgccttcgacttctttttcttcccattcctgtcggcggcctgaggatggtccgccacgaggagcttccagtgcatgttgccatgaggcctttccccagtgtggccccagcccgacaggcatgcaccagtgccgcctgtgcccacgtgtgcagactgtggctgcagagaccttgcgaccatgtgtagattgcgtggaccccgacaaagggaaggctgctgtgtagctctgtccactctgaataccaagtgtgttgggaattgcatgccatctccaccctgagcctgacctttctgagtgacatgggtgtgccaggctagactaggaggttccggtgtctggaaaagcactttacagatgagattccctctcctcccccaccttcaagcaccctgttccctctttctttcttttgtgttggatttgtttaaaaaccaaataagcatctgtgtaacctcca

SEQ ID NO: 23097 - DNA, 587 bp, Homo sapiens
  misc_feature 1..587: note = ENST00000506588
  source 1..587: mol_type = unassigned DNA; mol_type = unassigned DNA
gtgcagaaggccgcgctagccggctcttcagcagcgagtgcagattgctcccccgcggccgcagatctcccgtttgcgccgcgttcagctgctcccgaacaacttttctgccggcccagaggccccagggcgtcgcagcgccgcgtgcggcccactcacgggccggcaggatggactccaacactgctccgctgggcccctcctgcccacagcccccgccagcaccgcagccccaggcgcgttcccgactcaatgccacagcctcgttggagcaggagaggagcgaaaggccccgagcacccggaccccaggctggccctggccctggtgttagagacgcagcggcccccgctgaaccccaggcccagcataccaggagccgggaaagagcagacggcaccgggcctacaaagggagacatggaaatcccctttgaagaagtcctggagagggccaaggccggggaccccaaggcacagactgaggtgaggactgcggtgccggcagggacttcgggacgcggcccccggcacaacaggcctggccacgagctccacagcccacagagaagtgtcggtgcctgagat

SEQ ID NO: 23098 - DNA, 3640 bp, Homo sapiens
  misc_feature 1..3640: note = ENST00000226760
  source 1..3640: mol_type = unassigned DNA; mol_type = unassigned DNA
gtgcagaaggccgcgctagccggctcttcagcagcgagtgcagattgctcccccgcggccgcagatctcccgtttgcgccgcgttcagctgctcccgaacaacttttctgccggcccagaggccccagggcgtcgcagcgccgcgtgcggcccactcacgggccggcaggatggactccaacactgctccgctgggcccctcctgcccacagcccccgccagcaccgcagccccaggcgcgttcccgactcaatgccacagcctcgttggagcaggagaggagcgaaaggccccgagcacccggaccccaggctggccctggccctggtgttagagacgcagcggcccccgctgaaccccaggcccagcataccaggagccgggaaagagcagacggcaccgggcctacaaagggagacatggaaatcccctttgaagaagtcctggagagggccaaggccggggaccccaaggcacagactgaggtggggaagcactacctgcagttggccggcgacacggatgaagaactcaacagctgcaccgctgtggactggctggtcctcgccgcgaagcagggccgtcgcgaggctgtgaagctgcttcgccggtgcttggcggacagaagaggcatcacgtccgagaacgaacgggaggtgaggcagctctcctccgagaccgacctggagagggccgtgcgcaaggcagccctggtcatgtactggaagctcaaccccaagaagaagaagcaggtggccgtggcggagctgctggagaatgtcggccaggtcaacgagcacgatggaggggcgcagccaggccccgtgcccaagtccctgcagaagcagaggcgcatgctggagcgcctggtcagcagcgagtccaagaactacatcgcgctggatgactttgtggagatcactaagaagtacgccaagggcgtcatccccagcagcctgttcctgcaggacgacgaagatgatgacgagctggcggggaagagccctgaggacctgccactgcgtctgaaggtggtcaagtaccccctgcacgccatcatggagatcaaggagtacctgattgacatggcctccagggcaggcatgcactggctgtccaccatcatccccacgcaccacatcaacgcgctcatcttcttcttcatcgtcagcaacctcaccatcgacttcttcgccttcttcatcccgctggtcatcttctacctgtccttcatctccatggtgatctgcaccctcaaggtgttccaggacagcaaggcctgggagaacttccgcaccctcaccgacctgctgctgcgcttcgagcccaacctggatgtggagcaggccgaggtcaacttcggctggaaccacctggagccctatgcccatttcctgctctctgtcttcttcgtcatcttctccttccccatcgccagcaaggactgcatcccctgctcggagctggctgtcatcaccggcttctttaccgtgaccagctacctgagcctgagcacccatgcagagccctacacgcgcagggccctggccaccgaggtcaccgccggcctgctatcgctgctgccctccatgcccttgaattggccctacctgaaggtccttggccagaccttcatcaccgtgcctgtcggccacctggtcgtcctcaacgtcagcgtcccgtgcctgctctatgtctacctgctctatctcttcttccgcatggcacagctgaggaatttcaagggcacctactgctaccttgtgccctacctggtgtgcttcatgtggtgtgagctctccgtggtcatcctgctggagtccaccggcctggggctgctccgcgcctccatcggctacttcctcttcctctttgccctccccatcctggtggccggcctggccctggtgggcgtgctgcagttcgcccggtggttcacgtctctggagctcaccaagatcgcagtcaccgtggcggtctgtagtgtgcccctgctgttgcgctggtggaccaaggccagcttctctgtggtggggatggtgaagtccctgacgcggagctccatggtcaagctcatcctggtgtggctcacggccatcgtgctgttctgctggttctatgtgtaccgctcagagggcatgaaggtctacaactccacactgacctggcagcagtatggtgcgctgtgcgggccacgcgcctggaaggagaccaacatggcgcgcacccagatcctctgcagccacctggagggccacagggtcacgtggaccggccgcttcaagtacgtccgcgtgactgacatcgacaacagcgccgagtctgccatcaacatgctcccgttcttcatcggcgactggatgcgctgcctctacggcgaggcctaccctgcctgcagccctggcaacacctccacggccgaggaggagctctgtcgccttaagctgctggccaagcacccctgccacatcaagaagttcgaccgctacaagtttgagattaccgtgggcatgccattcagcagcggcgctgacggctcgcgcagccgcgaggaggacgacgtcaccaaggacatcgtgctgcgggccagcagcgagttcaagagcgtgctgctcagcctgcgccagggcagcctcatcgagttcagcaccatcctggagggccgcctgggcagcaagtggcctgtcttcgagctcaaggccatcagctgcctcaactgcatggcccagctctcacccaccaggcggcacgtgaagatcgagcacgactggcgcagcaccgtgcatggcgccgtgaagttcgccttcgacttctttttcttcccattcctgtcggcggcctgaggatggtccgccacgaggagcttccagtgcatgttgccatgaggcctttccccagtgtggccccagcccgacaggcatgcaccagtgccgcctgtgcccacgtgtgcagactgtggctgcagagaccttgcgaccatgtgtagattgcgtggaccccgacaaagggaaggctgctgtgtagctctgtccactctgaataccaagtgtgttgggaattgcatgccatctccaccctgagcctgacctttctgagtgacatgggtgtgccaggctagactaggaggttccggtgtctggaaaagcactttacagatgagattccctctcctcccccaccttcaagcaccctgttccctctttctttcttttgtgttggatttgtttaaaaaccaaataagcatctgtgtaacctccacagtagcatttcttatttgtttggtcactgctacaccttagcagctcttcccctttcctgggggatgtgcacggcagcttgagcctgtcacgtggtcaaggcccggccccatcagaggctgggggaggcggcacattggcagtgtgtcacactgagctgggcaccacaggctgcctcatgaccctcctgtccagcaggtagtgggtgaatgtgtgaaggtcttgcctgaatccatcaggacttgggaaacagagaaccctgtgggggcggctgtgggggaggtccctgccagtgtttagaagagcctgactgtgttcagtgccttggagcagaaagccagggtcctgagtggctgaaataaaagcctctggtggaacctgca

SEQ ID NO: 23099 - DNA, 3655 bp, Homo sapiens
  misc_feature 1..3655: note = ENST00000507765
  source 1..3655: mol_type = unassigned DNA; mol_type = unassigned DNA
cgtaaaagcagcatggacaacatgtaaatgaatggttatggttgtatttcaataaaactttatttgcaaaaacaggcagtgggccagtgctaacccttggttagctggcgtctctccagccctggctttctatggtcccctgactgttttgagaggtgtaaaggacccagtcatggttctgatttccatgcattgatggtgagccttggcaggcaggagcaactcaaggaagagaacctgtaccagtaccagtcggagcccgtgtctccctcgccgtgtggatggggtggccacaccttcctcaccgtgttttgaggagcgagtggccggaggctcagtagggcctagcctagtggacatgcctggtgtgaccccatttctgccccttccttcctggcctgggtgacaaagggaagtgggtgaaaggaggtgggctggcagggagcatggggtgggagagggtcggagaatctggaggctgactggtgtctggcttgcaggtggggaagcactacctgcagttggccggcgacacggatgaagaactcaacagctgcaccgctgtggactggctggtcctcgccgcgaagcagggccgtcgcgaggctgtgaagctgcttcgccggtgcttggcggacagaagaggcatcacgtccgagaacgaacgggaggtgaggcagctctcctccgagaccgacctggagagggccgtgcgcaaggcagccctggtcatgtactggaagctcaaccccaagaagaagaagcaggtggccgtggcggagctgctggagaatgtcggccaggtcaacgagcacgatggaggggcgcagccaggccccgtgcccaagtccctgcagaagcagaggcgcatgctggagcgcctggtcagcagcgagtccaagaactacatcgcgctggatgactttgtggagatcactaagaagtacgccaagggcgtcatccccagcagcctgttcctgcaggacgacgaagatgatgacgagctggcggggaagagccctgaggacctgccactgcgtctgaaggtggtcaagtaccccctgcacgccatcatggagatcaaggagtacctgattgacatggcctccagggcaggcatgcactggctgtccaccatcatccccacgcaccacatcaacgcgctcatcttcttcttcatcgtcagcaacctcaccatcgacttcttcgccttcttcatcccgctggtcatcttctacctgtccttcatctccatggtgatctgcaccctcaaggtgttccaggacagcaaggcctgggagaacttccgcaccctcaccgacctgctgctgcgcttcgagcccaacctggatgtggagcaggccgaggtcaacttcggctggaaccacctggagccctatgcccatttcctgctctctgtcttcttcgtcatcttctccttccccatcgccagcaaggactgcatcccctgctcggagctggctgtcatcaccggcttctttaccgtgaccagctacctgagcctgagcacccatgcagagccctacacgcgcagggccctggccaccgaggtcaccgccggcctgctatcgctgctgccctccatgcccttgaattggccctacctgaaggtccttggccagaccttcatcaccgtgcctgtcggccacctggtcgtcctcaacgtcagcgtcccgtgcctgctctatgtctacctgctctatctcttcttccgcatggcacagctgaggaatttcaagggcacctactgctaccttgtgccctacctggtgtgcttcatgtggtgtgagctctccgtggtcatcctgctggagtccaccggcctggggctgctccgcgcctccatcggctacttcctcttcctctttgccctccccatcctggtggccggcctggccctggtgggcgtgctgcagttcgcccggtggttcacgtctctggagctcaccaagatcgcagtcaccgtggcggtctgtagtgtgcccctgctgttgcgctggtggaccaaggccagcttctctgtggtggggatggtgaagtccctgacgcggagctccatggtcaagctcatcctggtgtggctcacggccatcgtgctgttctgctggttctatgtgtaccgctcagagggcatgaaggtctacaactccacactgacctggcagcagtatggtgcgctgtgcgggccacgcgcctggaaggagaccaacatggcgcgcacccagatcctctgcagccacctggagggccacagggtcacgtggaccggccgcttcaagtacgtccgcgtgactgacatcgacaacagcgccgagtctgccatcaacatgctcccgttcttcatcggcgactggatgcgctgcctctacggcgaggcctaccctgcctgcagccctggcaacacctccacggccgaggaggagctctgtcgccttaagctgctggccaagcacccctgccacatcaagaagttcgaccgctacaagtttgagattaccgtgggcatgccattcagcagcggcgctgacggctcgcgcagccgcgaggaggacgacgtcaccaaggacatcgtgctgcgggccagcagcgagttcaagagcgtgctgctcagcctgcgccagggcagcctcatcgagttcagcaccatcctggagggccgcctgggcagcaagtggcctgtcttcgagctcaaggccatcagctgcctcaactgcatggcccagctctcacccaccaggcggcacgtgaagatcgagcacgactggcgcagcaccgtgcatggcgccgtgaagttcgccttcgacttctttttcttcccattcctgtcggcggcctgaggatggtccgccacgaggagcttccagtgcatgttgccatgaggcctttccccagtgtggccccagcccgacaggcatgcaccagtgccgcctgtgcccacgtgtgcagactgtggctgcagagaccttgcgaccatgtgtagattgcgtggaccccgacaaagggaaggctgctgtgtagctctgtccactctgaataccaagtgtgttgggaattgcatgccatctccaccctgagcctgacctttctgagtgacatgggtgtgccaggctagactaggaggttccggtgtctggaaaagcactttacagatgagattccctctcctcccccaccttcaagcaccctgttccctctttctttcttttgtgttggatttgtttaaaaaccaaataagcatctgtgtaacctccacagtagcatttcttatttgtttggtcactgctacaccttagcagctcttcccctttcctgggggatgtgcacggcagcttgagcctgtcacgtggtcaaggcccggccccatcagaggctgggggaggcggcacattggcagtgtgtcacactgagctgggcaccacaggctgcctcatgaccctcctgtccagcaggtagtgggtgaatgtgtgaaggtcttgcctgaatccatcaggacttgggaaacagagaaccctgtgggggcggctgtgggggaggtccctgccagtgtttagaagagcctgactgtgttcagtgccttggagcagaaagccagggtcctgagtggctgaaataaaagcctctggtggaacctgca

SEQ ID NO: 23100 - DNA, 755 bp, Homo sapiens
  misc_feature 1..755: note = ENST00000506362
  source 1..755: mol_type = unassigned DNA; mol_type = unassigned DNA
agcagggccgtcgcgaggctgtgaagctgcttcgccggtgcttggcggacagaagaggcatcacgtccgagaacgaacgggaggtgaggcagctctcctccgagaccgacctggagagggccgtgcgcaaggcagccctggtcatgtactggaagctcaaccccaagaagaagaagcaggtggccgtggcggagctgctggagaatgtcggccaggtcaacgagcacgatggaggggcgcagccaggccccgtgcccaagtccctgcagaagcagaggcgcatgctggagcgcctggtcagcagcgagttgtggggcgcccatgctgttttctctcatgcttcagccaagaactacatcgcgctggatgactttgtggagatcactaagaagtacgccaagggcgtcatccccagcagcctgttcctgcaggacgacgaagatgatgacgagctggcggggaagagccctgaggacctgccactgcgtctgaaggtggtcaagtaccccctgcacgccatcatggagatcaaggagtacctgattgacatggcctccagggcaggcatgcactggctgtccaccatcatccccacgcaccacatcaacgcgctcatcttcttcttcatcgtcagcaacctcaccatcgacttcttcgccttcttcatcccgctggtcatcttctacctgtccttcatctccatggtgatctgcaccctcaaggtgttccaggacagcaaggcctgggagaacttc

SEQ ID NO: 23101 - DNA, 570 bp, Homo sapiens
  misc_feature 1..570: note = ENST00000513395
  source 1..570: mol_type = unassigned DNA; mol_type = unassigned DNA
gcagagagggacacttggggtgggggacagcacacccaggggccgggggccaggagtggaggctggcacttggcaaacctgcccccttcctcctcacccagcctggtcctcaaccctcaggccgcccagggaagggtttcctccacctgaacccactcagctcctttcttagcttggccccacgccaccgtccccagcccattgctctgtgtgagggtggcagtggggctgcagtgtggggcgcccatgctgttttctctcatgcttcagccaagaactacatcgcgctggatgactttgtggagatcactaagaagtacgccaagggcgtcatccccagcagcctgttcctgcaggacgacgaagatgatgacgagctggcggggaagagccctgaggacctgccactgcgtctgaaggtggtcaagtaccccctgcacgccatcatggagatcaaggagtacctgattgacatggcctccagggcaggcatgcactggctgtccaccatcatccccacgcaccacatcaacgcgctcatcttcttcttcatcgtcagcaacctcacca

SEQ ID NO: 23102 - DNA, 2238 bp, Homo sapiens
  misc_feature 1..2238: note = ENST00000286574
  source 1..2238: mol_type = unassigned DNA; mol_type = unassigned DNA
gccccactcctcgctcgcacctcgctcgcgccagcccttcccgctcttctgttctcgctctatttgccccgctgactgctggcctcgccagctttgccagtcttacgtctctgccgcccccactcccgcccgcgccccatcttcttgcgcgactcgcgcccgctggtccccccctcctcctcccgcgtcctgcctgccccctcctcctgctctcgcaggctccttggcacccaggccgggaggcgacgcgcccagccgtctaaacgggaacagccctggctgagggagctgcagcgcagcagagtatctgacggcgccaggttgcgtaggtgcggcacgaggagttttcccggcagcgaggaggtcctgagcagcatggcccggaggagcgccttccctgccgccgcgctctggctctggagcatcctcctgtgcctgctggcactgcgggcggaggccgggccgccgcaggaggagagcctgtacctatggatcgatgctcaccaggcaagagtactcataggatttgaagaagatatcctgattgtttcagaggggaaaatggcaccttttacacatgatttcagaaaagcacaacagagaatgccagctattcctgtcaatatccattccatgaattttacctggcaagctgcagggcaggcagaatacttctatgaattcctgtccttgcgctccctggataaaggcatcatggcagatccaaccgtcaatgtccctctgctgggaacagtgcctcacaaggcatcagttgttcaagttggtttcccatgtcttggaaaacaggatggggtggcagcatttgaagtggatgtgattgttatgaattctgaaggcaacaccattctccaaacacctcaaaatgctatcttctttaaaacatgtcaacaagctgagtgcccaggcgggtgccgaaatggaggcttttgtaatgaaagacgcatctgcgagtgtcctgatgggttccacggacctcactgtgagaaagccctttgtaccccacgatgtatgaatggtggactttgtgtgactcctggtttctgcatctgcccacctggattctatggagtgaactgtgacaaagcaaactgctcaaccacctgctttaatggagggacctgtttctaccctggaaaatgtatttgccctccaggactagagggagagcagtgtgaaatcagcaaatgcccacaaccctgtcgaaatggaggtaaatgcattggtaaaagcaaatgtaagtgttccaaaggttaccagggagacctctgttcaaagcctgtctgcgagcctggctgtggtgcacatggaacctgccatgaacccaacaaatgccaatgtcaagaaggttggcatggaagacactgcaataaaaggtacgaagccagcctcatacatgccctgaggccagcaggcgcccagctcaggcagcacacgccttcacttaaaaaggccgaggagcggcgggatccacctgaatccaattacatctggtgaactccgacatctgaaacgttttaagttacaccaagttcatagcctttgttaacctttcatgtgttgaatgttcaaataatgttcattacacttaagaatactggcctgaattttattagcttcattataaatcactgagctgatatttactcttccttttaagttttctaagtacgtctgtagcatgatggtatagattttcttgtttcagtgctttgggacagattttatattatgtcaattgatcaggttaaaattttcagtgtgtagttggcagatattttcaaaattacaatgcatttatggtgtctgggggcaggggaacatcagaaaggttaaattgggcaaaaatgcgtaagtcacaagaatttggatggtgcagttaatgttgaagttacagcatttcagattttattgtcagatatttagatgtttgttacatttttaaaaattgctcttaatttttaaactctcaatacaatatattttgaccttaccattattccagagattcagtattaaaaaaaaaaaaattacactgtggtagtggcatttaaacaatataatatattctaaacacaatgaaatagggaatataatgtatgaactttttgcattggcttgaagcaatataatatattgtaaacaaaacacagctcttacctaataaacattttatactgtttgtatgtataaaataaaggtgctgctttagttttctga

SEQ ID NO: 23103 - DNA, 429 bp, Homo sapiens
  misc_feature 1..429: note = ENST00000543094
  source 1..429: mol_type = unassigned DNA; mol_type = unassigned DNA
ggagtgaactgtgacaaagcaaactgctcaaccacctgctttaatggagggacctgtttctaccctggaaaatgtatttgccctccaggactagagggagagcagtgtgaaatcagcaaatgcccacaaccctgtcgaaatggaggtaaatgcattggtaaaagcaaatctgtctgcgagcctggctgtggtgcacatggaacctgccatgaacccaacaaatgccaatgtcaagaaggttggcatggaagacactgcaataaaaggtacgaagccagcctcatacatgccctgaggccagcaggcgcccagctcaggcagcacacgccttcacttaaaaaggccgaggagcggcgggatccacctgaatccaattacatctggtgaactccgacatctgaaacgttttaagttacaccaagttcatag

SEQ ID NO: 23104 - DNA, 568 bp, Homo sapiens
  misc_feature 1..568: note = ENST00000546001
  source 1..568: mol_type = unassigned DNA; mol_type = unassigned DNA
gtactgaaggcagatgcttgtgaacagaaatgacccacactaattctttggttttctttttgcttgaaacttctgatttagatgatttcaagtctacctggtttgatcgttttattattttaaaaaccaggatttgaagaagatatcctgattgtttcagaggggaaaatggcaccttttacacatgatttcagaaaagcacaacagagaatgccagctattcctgtcaatatccattccatgaattttacctggcaagctgcagggcaggcagaatacttctatgaattcctgtccttgcgctccctggataaaggcatcatggcagatccaaccgtcaatgtccctctgctgggaacagtgcctcacaaggcatcagttgttcaagttggtttcccatgtcttggaaaacaggatggggtggcagcatttgaagtggatgtgattgttatgaattctgaaggcaacaccattctccaaacacctcaaaatgctatcttctttaaaacatgtcaacaagctgagtgcccaggcgggtgccgaaatggaggcttttgtaatgaaagac

SEQ ID NO: 23105 - DNA, 624 bp, Homo sapiens
  misc_feature 1..624: note = ENST00000592645
  source 1..624: mol_type = unassigned DNA; mol_type = unassigned DNA
agaagagaataaagaaaatgacctcagaccttccttacctcagtcttatgcagcgaccgtagccagaccaagtgcatcttcagcctccacggtgccaggttattctgaggacggcggggcgctgcgaggagaagttattcctgaacatgagtttgcgacgggaccagtgtgtcttgatgatgagaatgagtttcctcctataatcttgtgccgtggaaatcagaagggcaaaacgaagcagtcatgatgagaagcacacctcagaaatcaggacatcccccctatcaggtggttttggagaaaacaaggaaggcggaagaatggagtgcaattgtgggacaggaggaactctttaacttcttttaaatgcagtcatttcacccttaaaaggagaggaaggggattgggccacagacttatccatggactcgtctgctctgagatctggaaaacgacctaactttggtctaaatctgtgctcctcaaggcattgtttgatagaaatgtaggatttcaggatctactcgagccctactgagacggaatccggattctcacaagatcccaggtgatttgtttgcatattaaagatggagaccagtgagtacactggtttgtggaagg

SEQ ID NO: 23106 - DNA, 1832 bp, Homo sapiens
  misc_feature 1..1832: note = ENST00000262139
  source 1..1832: mol_type = unassigned DNA; mol_type = unassigned DNA
atggaggccgaggccgcggacgctcccccgggcggggttgagtcggcgctcagctgcttctctttcaaccaggactgcacatccctagcaactggaactaaagccgggtataagctgttttctctgagttctgtggagcagctggatcaagtccacggaagcaatgaaatcccggacgtctacatcgtggagcgcctcttctccagcagcctggtggtggtagtcagtcacacaaaaccacggcagatgaacgtgtatcacttcaagaaaggcacagagatctgtaattacagctactccagcaacatcttgtccataaggctgaaccggcaaaggctgctggtttgcctagaagagtccatttatattcacaacattaaagacatgaagctgttgaagaccctcctggatattcctgcaaacccaacaggtctatgtgctctctctatcaaccattccaattcttacctggcctatcctggaagcctgacttcaggggagattgtgctttatgatggaaactccctgaaaacagtctgcactattgctgcccatgagggaacactagctgccatcaccttcaatgcctcaggctccaaactagcaagtgcgtctgaaaaaggcacagtcatccgggtgttctctgtccctgatgggcaaaagctctatgagttccggagagggatgaaaaggtatgtgacaatcagctctctagtgttcagtatggattcacaattcctctgcgcctccagtaacaccgagacggtacacatcttcaagctggaacaggtcaccaacagtcgaccagaagagccttcgacctggagtggctacatgggaaagatgtttatggctgctaccaactacctccctacccaggtgtcagacatgatgcatcaggacagggcttttgccactgcacgcttgaacttctccggacagaggaacatctgtaccctctcaacgatccagaagttgccacggctgctagttgcgtcatccagtggacacctttatatgtacaatttggatcctcaggatggaggagagtgtgtcttaatcaaaacccacagcttgcttggctcaggaacaacagaagagaataaagaaaatgacctcagaccttccttacctcagtcttatgcagcgaccgtagccagaccaagtgcatcttcagcctccacggtgccaggttattctgaggacggcggggcgctgcgaggagaagttattcctgaacatgagtttgcgacgggaccagtgtgtcttgatgatgagaatgagtttcctcctataatcttgtgccgtggaaatcagaagggcaaaacgaagcagtcatgatgagaagcacacctcagaaatcaggacatcccccctatcaggtggttttggagaaaacaaggaaggcggaagaatggagtgcaattgtgtgagcagaaaggggggcaggaatcccgggtgctccactgcttaaaccacaggacctggttaactcctcaccaagcttcccacgaccctggttgccaatgggcgcgggagacattgtatacacatcatgctatttaaaatacgttcaaactatagtgtaaatgctaattaaccatattggtatataaccggaattttatattaaaaggggcctcctttttaaatatatgccgtgtaaaaaatgtacttataggaacatctctttgaattgtatttcttgtatattacatacttagagagagactcttttagccaggcaaagtcttttttggctgtggctggaataaatcatttattacttgggagtcccattttggacactaataataaaatcatggcaatgc

SEQ ID NO: 23107 - DNA, 1804 bp, Homo sapiens
  misc_feature 1..1804: note = ENST00000589459
  source 1..1804: mol_type = unassigned DNA; mol_type = unassigned DNA
cccgtggagccggcgcgggcgggctgctgaggtggctgtcgccggctccgagctgcggcttcccgggccgagcccccgatggaggccgaggccgcggacgctcccccgggcggggttgagtcggcgctcagctgcttctctttcaaccaggactgcacatgaaatcccggacgtctacatcgtggagcgcctcttctccagcagcctggtggtggtagtcagtcacacaaaaccacggcagatgaacgtgtatcacttcaagaaaggcacagagatctgtaattacagctactccagcaacatcttgtccataaggctgaaccggcaaaggctgctggtttgcctagaagagtccatttatattcacaacattaaagacatgaagctgttgaagaccctcctggatattcctgcaaacccaacaggtctatgtgctctctctatcaaccattccaattcttacctggcctatcctggaagcctgacttcaggggagattgtgctttatgatggaaactccctgaaaacagtctgcactattgctgcccatgagggaacactagctgccatcaccttcaatgcctcaggctccaaactagcaagtgcgtctgaaaaaggcacagtcatccgggtgttctctgtccctgatgggcaaaagctctatgagttccggagagggatgaaaaggtatgtgacaatcagctctctagtgttcagtatggattcacaattcctctgcgcctccagtaacaccgagacggtacacatcttcaagctggaacaggtcaccaacaggcaatcgaccagaagagccttcgacctggagtggctacatgggaaagatgtttatggctgctaccaactacctccctacccaggtgtcagacatgatgcatcaggacagggcttttgccactgcacgcttgaacttctccggacagaggaacatctgtaccctctcaacgatccagaagttgccacggctgctagttgcgtcatccagtggacacctttatatgtacaatttggatcctcaggatggaggagagtgtgtcttaatcaaaacccacagcttgcttggctcaggaacaacagaagagaataaagaaaatgacctcagaccttccttacctcagtcttatgcagcgaccgtagccagaccaagtgcatcttcagcctccacggtgccaggttattctgaggacggcggggcgctgcgaggagaagttattcctgaacatgagtttgcgacgggaccagtgtgtcttgatgatgagaatgagtttcctcctataatcttgtgccgtggaaatcagaagggcaaaacgaagcagtcatgatgagaagcacacctcagaaatcaggacatcccccctatcaggtggttttggagaaaacaaggaaggcggaagaatggagtgcaattgtgtgagcagaaaggggggcaggaatcccgggtgctccactgcttaaaccacaggacctggttaactcctcaccaagcttcccacgaccctggttgccaatgggcgcgggagacattgtatacacatcatgctatttaaaatacgttcaaactatagtgtaaatgctaattaaccatattggtatataaccggaattttatattaaaaggggcctcctttttaaatatatgccgtgtaaaaaatgtacttataggaacatctctttgaattgtatttcttgtatattacatacttagagagagactcttttagccaggcaaagtcttttttggctgtggctggaataaatcatttattacttgggagtcccattttgg

SEQ ID NO: 23108 - DNA, 1886 bp, Homo sapiens
  misc_feature 1..1886: note = ENST00000589316
  source 1..1886: mol_type = unassigned DNA; mol_type = unassigned DNA
cccgtggagccggcgcgggcgggctgctgaggtggctgtcgccggctccgagctgcggcttcccgggccgagcccccgatggaggccgaggccgcggacgctcccccgggcggggttgagtcggcgctcagctgcttctctttcaaccaggactgcacatccctagcaactggaactaaagccgggtataagctgttttctctgagttctgtggagcagctggatcaagtccacggaagcaatgaaatcccggacgtctacatcgtggagcgcctcttctccagcagcctggtggtggtagtcagtcacacaaaaccacggcagatgaacgtgtatcacttcaagaaaggcacagagatctgtaattacagctactccagcaacatcttgtccataaggctgaaccggcaaaggctgctggtttgcctagaagagtccatttatattcacaacattaaagacatgaagctgttgaagaccctcctggatattcctgcaaacccaacaggtctatgtgctctctctatcaaccattccaattcttacctggcctatcctggaagcctgacttcaggggagattgtgctttatgatggaaactccctgaaaacagtctgcactattgctgcccatgagggaacactagctgccatcaccttcaatgcctcaggctccaaactagcaagtgcgtctgaaaaaggcacagtcatccgggtgttctctgtccctgatgggcaaaagctctatgagttccggagagggatgaaaaggtatgtgacaatcagctctctagtgttcagtatggattcacaattcctctgcgcctccagtaacaccgagacggtacacatcttcaagctggaacaggtcaccaacaggcaatcgaccagaagagccttcgacctggagtggctacatgggaaagatgtttatggctgctaccaactacctccctacccaggtgtcagacatgatgcatcaggacagggcttttgccactgcacgcttgaacttctccggacagaggaacatctgtaccctctcaacgatccagaagttgccacggctgctagttgcgtcatccagtggacacctttatatgtacaatttggatcctcaggatggaggagagtgtgtcttaatcaaaacccacagcttgcttggctcaggaacaacagaagagaataaagaaaatgacctcagaccttccttacctcagtcttatgcagcgaccgtagccagaccaagtgcatcttcagcctccacggtgccaggttattctgaggacggcggggcgctgcgaggagaagttattcctgaacatgagtttgcgacgggaccagtgtgtcttgatgatgagaatgagtttcctcctataatcttgtgccgtggaaatcagaagggcaaaacgaagcagtcatgatgagaagcacacctcagaaatcaggacatcccccctatcaggtggttttggagaaaacaaggaaggcggaagaatggagtgcaattgtgtgagcagaaaggggggcaggaatcccgggtgctccactgcttaaaccacaggacctggttaactcctcaccaagcttcccacgaccctggttgccaatgggcgcgggagacattgtatacacatcatgctatttaaaatacgttcaaactatagtgtaaatgctaattaaccatattggtatataaccggaattttatattaaaaggggcctcctttttaaatatatgccgtgtaaaaaatgtacttataggaacatctctttgaattgtatttcttgtatattacatacttagagagagactcttttagccaggcaaagtcttttttggctgtggctggaataaatcatttattacttgggagtcccattttg

SEQ ID NO: 23109 - DNA, 494 bp, Homo sapiens
  misc_feature 1..494: note = ENST00000585393
  source 1..494: mol_type = unassigned DNA; mol_type = unassigned DNA
cgtagccagaccaagtgcatcttcagcctccacggtgccaggttattctgaggacggcggggcgctgcgaggagaagttattcctgaacatgagtttgcgacgggaccagtgtgtcttgatgatgagaatgagtttcctcctgtgagcattaggaacccataatcttgtgccgtggaaatcagaagggcaaaacgaagcagtcatgatgagaagcacacctcagaaatcaggacatcccccctatcaggtggttttggagaaaacaaggaaggcggaagaatggagtgcaattgtgtgagcagaaaggggggcaggaatcccgggtgctccactgcttaaaccacaggacctggttaactcctcaccaagcttcccacgaccctggttgccaatgggcgcgggagacattgtatacacatcatgctatttaaaatacgttcaaactatagtgtaaatgctaattaaccatattggtatataaccggaattttat

SEQ ID NO: 23110 - DNA, 1575 bp, Homo sapiens
  misc_feature 1..1575: note = ENST00000546360
  source 1..1575: mol_type = unassigned DNA; mol_type = unassigned DNA
gggctgctgaggtggctgtcgccggctccgagctgcggcttcccgggccgagcccccgatggaggccgaggccgcggacgctcccccgggcggggttgagtcggcgctcagctgcttctctttcaaccaggactgcacatgaaatcccggacgtctacatcgtggagcgcctcttctccagcagcctggtggtggtagtcagtcacacaaaaccacggcagatgaacgtgtatcacttcaagaaaggcacagagatctgtaattacagctactccagcaacatcttgtccataaggctgaaccggcaaaggctgctggtttgcctagaagagtccatttatattcacaacattaaagacatgaagctgttgaagaccctcctggatattcctgcaaacccaacaggtctatgtgctctctctatcaaccattccaattcttacctggcctatcctggaagcctgacttcaggggagattgtgctttatgatggaaactccctgaaaacagtctgcactattgctgcccatgagggaacactagctgccatcaccttcaatgcctcaggctccaaactagcaagtgcgtctgaaaaaggcacagtcatccgggtgttctctgtccctgatgggcaaaagctctatgagttccggagagggatgaaaaggtatgtgacaatcagctctctagtgttcagtatggattcacaattcctctgcgcctccagtaacaccgagacggtacacatcttcaagctggaacaggtcaccaacagtcgaccagaagagccttcgacctggagtggctacatgggaaagatgtttatggctgctaccaactacctccctacccaggtgtcagacatgatgcatcaggacagggcttttgccactgcacgcttgaacttctccggacagaggaacatctgtaccctctcaacgatccagaagttgccacggctgctagttgcgtcatccagtggacacctttatatgtacaatttggatcctcaggatggaggagagtgtgtcttaatcaaaacccacagcttgcttggctcaggaacaacagaagagaataaagaaaatgacctcagaccttccttacctcagtcttatgcagcgaccgtagccagaccaagtgcatcttcagcctccacggtgccaggttattctgaggacggcggggcgctgcgaggagaagttattcctgaacatgagtttgcgacgggaccagtgtgtcttgatgatgagaatgagtttcctcctataatcttgtgccgtggaaatcagaagggcaaaacgaagcagtcatgatgagaagcacacctcagaaatcaggacatcccccctatcaggtggttttggagaaaacaaggaaggcggaagaatggagtgcaattgtgtgagcagaaaggggggcaggaatcccgggtgctccactgcttaaaccacaggacctggttaactcctcaccaagcttcccacgaccctggttgccaatgggcgcgggagacattgtatacacatcatgctatttaaaatacgttcaaactatagtgtaaatgctaattaa

SEQ ID NO: 23111 - DNA, 685 bp, Homo sapiens
  misc_feature 1..685: note = ENST00000590402
  source 1..685: mol_type = unassigned DNA; mol_type = unassigned DNA
gcctggccaacatggtgaaacccagtctctactaaaaatacaaaaattagccaggcgctgtggtgggtgcctgtagtcgcagctactcgggaggctgaggcaggagaatcgcttgaacccaggaggcggaggttgcagtgagccgagattgcgccactgcactccagcctgggcaatagagcaagaccctgcctcaaaaataaataaataacccacagagctgagcacaggcttcttcatgcttttcctttggaaggtgtcctagatatatgatgatttcttttttctttcacctcctcttgattgtcacaagtagcttgcttggctcaggaacaacagaagagaataaagaaaatgacctcagaccttccttacctcagtcttatgcagcgaccgtagccagaccaagtgcatcttcagcctccacggtgccaggttattctgaggacggcggggcgctgcgaggagaagttattcctgaacatgagtttgcgacgggaccagtgtgtcttgatgatgagaatgagtttcctcctgtgagcattaggaacccgtaactgggcggctcagtctgtgtgcttagaaggaaaccttcgcctcatacgagaggcagagtccctttccctgttttctaatctataacaactaattctctgctctagtatttggaaagccataggatatt

SEQ ID NO: 23112 - DNA, 742 bp, Homo sapiens
  misc_feature 1..742: note = ENST00000591744
  source 1..742: mol_type = unassigned DNA
gtgacaatcagctctctagtgttcagtatggattcacaattcctctgcgcctccagtaacaccgagacggtacacatcttcaagctggaacaggtcaccaacagtcgaccagaagagccttcgacctggagtggctacatgggaaagatgtttatggctgctaccaactacctccctacccaggtgtcagacatgatgcatcaggacagggcttttgccactgcacgcttgaacttctccggacagaggaacatctgtaccctctcaacgatccagaagttgccacggctgctagttgcgtcatccagtggacacctttatatgtacaatttggatcctcaggatggaggagagtgtgtcttaatcaaaacccacagcttgcttggctcaggaacaacagaagagaataaagaaaatgacctcagaccttccttacctcagtcttatgcagcgaccgtagccagaccaagtgcatcttcagcctccacggtgccaggttattctgaggacggcggggcgctgcgaggagaagttattcctgaacatgagtttgcgacgggaccagtgtgtcttgatgatgagaatgagtttcctcctgtgagcattaggaacccgtaactgggcggctcagtctgtgtgcttagaaggaaaccttcgcctcatacgagaggcagagtccctttccctgttttctaatctataacaactaattctctgctctagtatttggaaagccatagga

SEQ ID NO: 23113 - DNA, 829 bp, Homo sapiens
  misc_feature 1..829: note = ENST00000587731
  source 1..829: mol_type = unassigned DNA
ggctacatgggaaagatgtttatggctgctaccaactacctccctacccaggtgtcagacatgatgcatcaggacagggcttttgccactgcacgcttgaacttctccggacagaggaacatctgtaccctctcaacgatccagaagttgccacggctgctagttgcgtcatccagtggacacctttatatgtacaatttggatcctcaggatggaggagagtgtgtcttaatcaaaacccacaggtgaagagactgcttttcaaaagacagcctttcgagagctggtcgtgtagagttgtcccttcgccaagaacgacaagcttcagtgcccttgcattgatttgttcttcactggcagtctcagtggcaaacctctagtgggcaagtgctctgcaccgggctctgtgtcaggtgccctcagcatgtggtaatcatctggaaaagtgccaggattaataacacacaagatggtctccccctcagcctatgctcctaacacagccctgagctcacagtgggtgttcaaaaatattccctgccaccaggtgtggcggctcacacctgtaatcccggcactttgggaggccgaagcgggtggatggcttgagtccaggtgttcaagaccagcctgggcaacatggtgaaaccccatctataccaaaaacaaatacaaaaattagccggttgtggtggcacacacctgtagtcccagctactcaggaggctgaggtgggagaatcacctgagcctggagaggttgaggcagtgagccatgatcacaccattgcactccagcctggacaacagagtgagaccctgtctcaaaa

SEQ ID NO: 23114 - DNA, 828 bp, Homo sapiens
  misc_feature 1..828: note = ENST00000591494
  source 1..828: mol_type = unassigned DNA
cacgaaccaagatctaacagttctcggaaccaagatctaacgtcggaaccaagatgagcatcggttcattggaaccaatatctaagagttctcccttcctttacatttcttctccgacaagaatgatttgaaacagaggctgctggtttgcctagaagagtccatttatattcacaacattaaagacatgaagctgttgaagaccctcctggatattcctgcaaacccaacaggtctatgtgctctctctatcaaccattccaattcttacctggcctatcctggaagcctgacttcaggggagattgtgctttatgatggaaactccctgaaaacagtctgcactattgctgcccatgagggaacactagctgccatcaccttcaatgcctcaggctccaaactagcaagtgcgtctgaaaaaggcacagtcatccgggtgttctctgtccctgatgggcaaaagctctatgagttccggagagggatgaaaaggtatgtgacaatcagctctctagtgttcagtatggattcacaattcctctgcgcctccagtaacaccgagacggtacacatcttcaagctggaacaggtcaccaacagtcgaccagaagagccttcgacctggagtggctacatgggaaagatgtttatggctgctaccaactacctccctacccaggtgtcagacatgatgcatcaggacagggcttttgccactgcacgcttgaacttctccggacagaggaacatctgtaccctctcaacgatccagaagttgccacggctgctagttgcgtcatccagtggacacctttatatgtacaa

SEQ ID NO: 23115 - DNA, 780 bp, Homo sapiens
  misc_feature 1..780: note = ENST00000586815
  source 1..780: mol_type = unassigned DNA; mol_type = unassigned DNA
gaccggcgacccggcccgtggagccggcgcgggcgggctgctgaggtggctgtcgccggctccgagctgcggcttcccgggccgagcccccgatggaggccgaggccgcggacgctcccccgggcggggttgagtcggcgctcagctgcttctctttcaaccaggactgcacatccctagcaactggaactaaagccgggtataagctgttttctctgagttctgtggagcagctggatcaagtccacggaagcaatgaaatcccggacgtctacatcgtggagcgcctcttctccagcagcctggtggtggtagtcagtcacacaaaaccacggcagatgaacgtgtatcacttcaagaaaggcacagagatctgtaattacagctactccagcaacatcttgtccataaggctgaaccggcaaaggctgctggtttgcctagaagagtccatttatattcacaacattaaagacatgaagctgttgaagaccctcctggatattcctgcaaacccaacaggtctatgtgctctctctatcaaccattccaattcttacctggcctatcctggaagcctgacttcaggggagattgtgctttatgatggaaactccctgaaaacagtctgcactattgctgcccatgagggaacactagctgccatcaccttcaatgcctcaggctccaaactagcaagtgcgtctgaaaaagtatgtgacaatcagctctctagtgttcagtatggattcacaattcctctgcgcctccagtaacacc

SEQ ID NO: 23116 - DNA, 2037 bp, Homo sapiens
  misc_feature 1..2037: note = ENST00000354777
  source 1..2037: mol_type = unassigned DNA; mol_type = unassigned DNA
gtccacaggcggcggagcggccacaatcacagctccgggcattgggggaacccgagccggctgcgccgggggaatccgtgcgggcgccttccgtcccggtcccatcctcgccgcgctccagcacctctgaagttttgcagcgcccagaaaggaggcgaggaaggagggagtgtgtgagaggagggagcaaaaagctcaccctaaaacatttatttcaaggagaaaagaaaaagggggggcgcaaaaatggctggggcaattatagaaaacatgagcaccaagaagctgtgcattgttggtgggattctgctcgtgttccaaatcatcgcctttctggtgggaggcttgattgggcccacaacggcagtgtcctacatgtcggtgaaatgtgtggatgcccgtaagaaccatcacaagacaaaatggttcgtgccttggggacccaatcattgtgacaagatccgagacattgaagaggcaattccaagggaaattgaagccaatgacatcgtgttttctgttcacattcccctcccccacatggagatgagtccttggttccaattcatgctgtttatcctgcagctggacattgccttcaagctaaacaaccaaatcagagaaaatgcagaagtctccatggacgtttccctggcttaccgtgatgacgcgtttgctgagtggactgaaatggcccatgaaagagtaccacggaaactcaaatgcaccttcacatctcccaagactccagagcatgagggccgttactatgaatgtgatgtccttcctttcatggaaattgggtctgtggcccataagttttaccttttaaacatccggctgcctgtgaatgagaagaagaaaatcaatgtgggaattggggagataaaggatatccggttggtggggatccaccaaaatggaggcttcaccaaggtgtggtttgccatgaagaccttccttacgcccagcatcttcatcattatggtgtggtattggaggaggatcaccatgatgtcccgacccccagtgcttctggaaaaagtcatctttgcccttgggatttccatgacctttatcaatatcccagtggaatggttttccatcgggtttgactggacctggatgctgctgtttggtgacatccgacagggcatcttctatgcgatgcttctgtccttctggatcatcttctgtggcgagcacatgatggatcagcacgagcggaaccacatcgcagggtattggaagcaagtcggacccattgccgttggctccttctgcctcttcatatttgacatgtgtgagagaggggtacaactcacgaatcccttctacagtatctggactacagacattggaacagagctggccatggccttcatcatcgtggctggaatctgcctctgcctctacttcctgtttctatgcttcatggtatttcaggtgtttcggaacatcagtgggaagcagtccagcctgccagctatgagcaaagtccggcggctacactatgaggggctaatttttaggttcaagttcctcatgcttatcaccttggcctgcgctgccatgactgtcatcttcttcatcgttagtcaggtaacggaaggccattggaaatggggcggcgtcacagtccaagtgaacagtgcctttttcacaggcatctatgggatgtggaatctgtatgtctttgctctgatgttcttgtatgcaccatcccataaaaactatggagaagaccagtccaatggaatgcaactcccatgtaaatcgagggaagattgtgctttgtttgtttcggaactttatcaagaattgttcagcgcttcgaaatattccttcatcaatgacaacgcagcttctggtatttgagtcaacaaggcaacacatgtttatcagctttgcatttgcagttgtcacagtcacattgattgtacttgtatacgcacacaaatacactcatttagcctttatctcaaaatgttaaatataaggaaaaaagcgtcaacaataaatattctttgagtattg

SEQ ID NO: 23117 - DNA, 2748 bp, Homo sapiens
  misc_feature 1..2748: note = ENST00000262348
  source 1..2748: mol_type = unassigned DNA; mol_type = unassigned DNA
ctttaagcgtccacaggcggcggagcggccacaatcacagctccgggcattgggggaacccgagccggctgcgccgggggaatccgtgcgggcgccttccgtcccggtcccatcctcgccgcgctccagcacctctgaagttttgcagcgcccagaaaggaggcgaggaaggagggagtgtgtgagaggagggagcaaaaagctcaccctaaaacatttatttcaaggagaaaagaaaaagggggggcgcaaaaatggctggggcaattatagaaaacatgagcaccaagaagctgtgcattgttggtgggattctgctcgtgttccaaatcatcgcctttctggtgggaggcttgattgctccagggcccacaacggcagtgtcctacatgtcggtgaaatgtgtggatgcccgtaagaaccatcacaagacaaaatggttcgtgccttggggacccaatcattgtgacaagatccgagacattgaagaggcaattccaagggaaattgaagccaatgacatcgtgttttctgttcacattcccctcccccacatggagatgagtccttggttccaattcatgctgtttatcctgcagctggacattgccttcaagctaaacaaccaaatcagagaaaatgcagaagtctccatggacgtttccctggcttaccgtgatgacgcgtttgctgagtggactgaaatggcccatgaaagagtaccacggaaactcaaatgcaccttcacatctcccaagactccagagcatgagggccgttactatgaatgtgatgtccttcctttcatggaaattgggtctgtggcccataagttttaccttttaaacatccggctgcctgtgaatgagaagaagaaaatcaatgtgggaattggggagataaaggatatccggttggtggggatccaccaaaatggaggcttcaccaaggtgtggtttgccatgaagaccttccttacgcccagcatcttcatcattatggtgtggtattggaggaggatcaccatgatgtcccgacccccagtgcttctggaaaaagtcatctttgcccttgggatttccatgacctttatcaatatcccagtggaatggttttccatcgggtttgactggacctggatgctgctgtttggtgacatccgacagggcatcttctatgcgatgcttctgtccttctggatcatcttctgtggcgagcacatgatggatcagcacgagcggaaccacatcgcagggtattggaagcaagtcggacccattgccgttggctccttctgcctcttcatatttgacatgtgtgagagaggggtacaactcacgaatcccttctacagtatctggactacagacattggaacagagctggccatggccttcatcatcgtggctggaatctgcctctgcctctacttcctgtttctatgcttcatggtatttcaggtgtttcggaacatcagtgggaagcagtccagcctgccagctatgagcaaagtccggcggctacactatgaggggctaatttttaggttcaagttcctcatgcttatcaccttggcctgcgctgccatgactgtcatcttcttcatcgttagtcaggtaacggaaggccattggaaatggggcggcgtcacagtccaagtgaacagtgcctttttcacaggcatctatgggatgtggaatctgtatgtctttgctctgatgttcttgtatgcaccatcccataaaaactatggagaagaccagtccaatggcgatctgggtgtccatagtggggaagaactccagctcaccaccactatcacccatgtggacggacccactgagatctacaagttgacccgcaaggaggcccaggagtaggaggctgcagcgcccggctgggacggtctctccataccccagcccctctaactagagtggggagcatgccagagagagctcaatgtacaaatgaatgcctcatggctcttagctgtggtttcttggaccagcggcatggacatttgtcagtttgccttctgacggtagcttttggaggaagattcctgcagccactaatgcattgtgtatgataacaaaaactctggtatgacacattttctgtgatcattgttaattagtgacatagtaacatctgtagcagctggttagtaaacctcatgtgggggtggggtgggggtgtattccttgggggatggtttgggccgaatggggagtggaatatttgacatttttcctgttttaaattctaggatagattttaacatcctttgcggtcccagtccaaggtaggctggtgtcatagtcttctcactcctaatccatgaccactgtttttttcctatttatatcaccaggtagcccactgagttaatatttaagttgtcaatagataagtgtccctgttttgtggcataatataactgaatttcatgagaagatttattccaccaggggtatttcagctttgaaaccaaatctgtgtatctaatactaaccaatctgttggatgtgggttttaaaaaatgtttgctaaactacccaagtaagatttactgtattaaatggccttcgggtctgaaaagcttttttaacttcttgcttaaaatgcgttttattttgataagatacttcaaatagcctccaaaagtgtagatccaatcatttaaataaacctgtatgtatatgcatatgtgtacatgcatatcccctcctgctaaaactcata

SEQ ID NO: 23118 - DNA, 2332 bp, Homo sapiens
  misc_feature 1..2332: note = ENST00000370976
  source 1..2332: mol_type = unassigned DNA; mol_type = unassigned DNA
tccacaggcggcggagcggccacaatcacagctccgggcattgggggaacccgagccggctgcgccgggggaatccgtgcgggcgccttccgtcccggtcccatcctcgccgcgctccagcacctctgaagttttgcagcgcccagaaaggaggcgaggaaggagggagtgtgtgagaggagggagcaaaaagctcaccctaaaacatttatttcaaggagaaaagaaaaagggggggcgcaaaaatggctggggcaattatagaaaacatgagcaccaagaagctgtgcattgttggtgggattctgctcgtgttccaaatcatcgcctttctggtgggaggcttgattggagaaaatgcagaagtctccatggacgtttccctggcttaccgtgatgacgcgtttgctgagtggactgaaatggcccatgaaagagtaccacggaaactcaaatgcaccttcacatctcccaagactccagagcatgagggccgttactatgaatgtgatgtccttcctttcatggaaattgggtctgtggcccataagttttaccttttaaacatccggctgcctgtgaatgagaagaagaaaatcaatgtgggaattggggagataaaggatatccggttggtggggatccaccaaaatggaggcttcaccaaggtgtggtttgccatgaagaccttccttacgcccagcatcttcatcattatggtgtggtattggaggaggatcaccatgatgtcccgacccccagtgcttctggaaaaagtcatctttgcccttgggatttccatgacctttatcaatatcccagtggaatggttttccatcgggtttgactggacctggatgctgctgtttggtgacatccgacagggcatcttctatgcgatgcttctgtccttctggatcatcttctgtggcgagcacatgatggatcagcacgagcggaaccacatcgcagggtattggaagcaagtcggacccattgccgttggctccttctgcctcttcatatttgacatgtgtgagagaggggtacaactcacgaatcccttctacagtatctggactacagacattggaacagagctggccatggccttcatcatcgtggctggaatctgcctctgcctctacttcctgtttctatgcttcatggtatttcaggtgtttcggaacatcagtgggaagcagtccagcctgccagctatgagcaaagtccggcggctacactatgaggggctaatttttaggttcaagttcctcatgcttatcaccttggcctgcgctgccatgactgtcatcttcttcatcgttagtcaggtaacggaaggccattggaaatggggcggcgtcacagtccaagtgaacagtgcctttttcacaggcatctatgggatgtggaatctgtatgtctttgctctgatgttcttgtatgcaccatcccataaaaactatggagaagaccagtccaatggcgatctgggtgtccatagtggggaagaactccagctcaccaccactatcacccatgtggacggacccactgagatctacaagttgacccgcaaggaggcccaggagtaggaggctgcagcgcccggctgggacggtctctccataccccagcccctctaactagagtggggagcatgccagagagagctcaatgtacaaatgaatgcctcatggctcttagctgtggtttcttggaccagcggcatggacatttgtcagtttgccttctgacggtagcttttggaggaagattcctgcagccactaatgcattgtgtatgataacaaaaactctggtatgacacattttctgtgatcattgttaattagtgacatagtaacatctgtagcagctggttagtaaacctcatgtgggggtggggtgggggtgtattccttgggggatggtttgggccgaatggggagtggaatatttgacatttttcctgttttaaattctaggatagattttaacatcctttgcggtcccagtccaaggtaggctggtgtcatagtcttctcactcctaatccatgaccactgtttttttcctatttatatcaccaggtagcccactgagttaatatttaagttgtcaatagataagtgtccctgttttgtggcataatataactgaatttcatgagaagatttattccaccaggggtatttcagctttgaaaccaaatctgtgtatctaatactaaccaatctgttggatgtgggttttaaaaaatgtttgctaaactacccaagtaagatttactgtattaaatggccttcgggtctgaaaagcttttttaa

SEQ ID NO: 23119 - DNA, 745 bp, Homo sapiens
  misc_feature 1..745: note = ENST00000498615
  source 1..745: mol_type = unassigned DNA; mol_type = unassigned DNA
gggcaaggtaaggaccactgactgtgcctgacagaaagctagagaaccttcagttgaccttaatttacaccgaaatgattcagattaaaagatggagtcttacatggcccttcatgtttcccacatgtagaagagacttggttttcatgttggttggttcctttattggtgttatgtttcttctgtttcttctctgtttcaattgaatatcaccatcctttctccgcaggtaacggaaggccattggaaatggggcggcgtcacagtccaagtgaacagtgcctttttcacaggcatctatgggatgtggaatctgtatgtctttgctctgatgttcttgtatgcaccatcccataaaaactatggagaagaccagtccaatggcgatctgggtgtccatagtggggaagaactccagctcaccaccactatcacccatgtggacggacccactgagatctacaagttgacccgcaaggaggcccaggagtaggaggctgcagcgcccggctgggacggtctctccataccccagcccctctaactagagtggggagcatgccagagagagctcaatgtacaaatgaatgcctcatggctcttagctgtggtttcttggaccagcggcatggacatttgtcagtttgccttctgacggtagcttttggaggaagattcctgcagccactaatgcattgtgtatgataacaaaaactctggtatgacacattttctgtgatcattg

SEQ ID NO: 23120 - DNA, 1041 bp, Homo sapiens
  misc_feature 1..1041: note = ENST00000491811
  source 1..1041: mol_type = unassigned DNA; mol_type = unassigned DNA
tttaccttttaaacatccggctgcctgtgaatgagaagaagaaaatcaatgtgggaattggggagataaaggatatccggttggtggggatccaccaaaatggaggcttcaccaaggtgtggtttgccatgaagaccttccttacgcccagcatcttcatcattatggtgtggtattggaggaggatcaccatgatgtcccgacccccagtgcttctggaaaaagtcatctttgcccttgggatttccatgacctttatcaatatcccagtggaatggttttccatcgggtttgactggacctggatgctgctgtttggtgacatccgacagggcatcttctatgcgatgcttctgtccttctggatcatcttctgtggcgagcacatgatggatcagcacgagcggaaccacatcgcagggtattggaagcaagtcggacccattgccgttggctccttctgcctcttcatatttgacatgtgtgagagaggggtacaactcacgaatcccttctacagtatctggactacagacattggaacagagctggccatggccttcatcatcgtggctggaatctgcctctgcctctacttcctgtttctatgcttcatggtatttcaggtgtttcggaacatcagtgggaagcagtccagcctgccagctatgagcaaagtccggcggctacactatgaggggctaatttttaggttcaagttcctcatgcttatcaccttggcctgcgctgccatgactgtcatcttcttcatcgttagtcagtttatggaccccttgaattctatccaaggacacccaagaggaccccaagtttggagcctctagagccctgttgttggctctgccactggggagtgttagtgttgctagctctgctgaggttgaaatgaacgtggaaaaaataaactgatacacatatatgtctttgtaagttctgttcaccacatctgctttgacctacaacactgctgtgtttatatcaggttgtttataaaaccttggaaacttcgctttccactcc

SEQ ID NO: 23121 - DNA, 747 bp, Homo sapiens
  misc_feature 1..747: note = ENST00000497187
  source 1..747: mol_type = unassigned DNA; mol_type = unassigned DNA
aatgggagaagtcatcaagctgggttagggctgtgctcccagggctggcttcggaggcaggagaaaatgcagaagtctccatggacgtttccctggcttaccgtgatgacgcgtttgctgagtggactgaaatggcccatgaaagagtaccacggaaactcaaatgcaccttcacatctcccaagactccagagcatgagggccgttactatgaatgtgatgtccttcctttcatggaaattgggtctgtggcccataagttttaccttttaaacatccggctgcctgtgaatgagaagaagaaaatcaatgtgggaattggggagataaaggatatccggttggtggggatccaccaaaatggaggcttcaccaaggtgtggtttgccatgaagaccttccttacgcccagcatcttcatcattatggtgtggtattggaggaggatcaccatgatgtcccgacccccagtgcttctggaaaaagtcatctttgcccttgggatttccatgacctttatcaatatcccagtggaatggttttccatcgggtttgactggacctggatgctgctgtttggtgacatccgacagggcatcttctatgcgatgcttctgtccttctggatcatcttctgtggcgagcacatgatggatcagcacgagcggaaccacatcgcagggtattggaagcaagtcggacccattgccgttggctccttctgcctcttcatatttgacatgtgtg

SEQ ID NO: 23122 - DNA, 600 bp, Homo sapiens
  misc_feature 1..600: note = ENST00000534713
  source 1..600: mol_type = unassigned DNA; mol_type = unassigned DNA
aaaacatgagcaccaagaagctgtgcattgttggtgggattctgctcgtgttccaaatcatcgcctttctggtgggaggcttgattggagaaaatgcagaagtctccatggacgtttccctggcttaccgtgatgacgcgtttgctgagtggactgaaatggcccatgaaagagtaccacggaaactcaaatgcaccttcacatctcccaagactccagagcatgagggccgttactatgaatgtgatgtccttcctttcatggaaattgggtctgtggcccataagttttaccttttaaacatccggctgcctgtgaatgagaagaagaaaatcaatgtgggaattggggagataaaggatatccggttggtggggatccaccaaaatggaggcttcaccaaggtgtggtttgccatgaagaccttccttacgcccagcatcttcatcattatggtgtggtattggaggaggatcaccatgatgtcccgacccccagtgcttctggaaaaagtcatctttgcccttgggatttccatgacctttatcaatatcccagtggaatggttttccatcgggtttgactggacctggatgctgc

SEQ ID NO: 23123 - DNA, 524 bp, Homo sapiens
  misc_feature 1..524: note = ENST00000533537
  source 1..524: mol_type = unassigned DNA; mol_type = unassigned DNA
ggtcgtctttgctaggggctgagggtttgcaatttggggtcccgaccttcgcgccctctgctttcccgccgcactccaccccacgctctgccgtggacaggagaaaatgcagaagtctccatggacgtttccctggcttaccgtgatgacgcgtttgctgagtggactgaaatggcccatgaaagagtaccacggaaactcaaatgcaccttcacatctcccaagactccagagcatgagggccgttactatgaatgtgatgtccttcctttcatggaaattgggtctgtggcccataagttttaccttttaaacatccggctgcctgtgaatgagaagaagaaaatcaatgtgggaattggggagataaaggatatccggttggtggggatccaccaaaatggaggcttcaccaaggtgtggtttgccatgaagaccttccttacgcccagcatcttcatcattatggtgtggtattggaggaggatcaccatgatgtcccgacccccagtgcttctggaaaa

SEQ ID NO: 23124 - DNA, 1056 bp, Homo sapiens
  misc_feature 1..1056: note = ENST00000530486
  source 1..1056: mol_type = unassigned DNA; mol_type = unassigned DNA
agaaagaagtcgagctgagactttattccgcatctctgtgttttgacttaggcatctattgggtccttttaaaaaaaattctcctcctctttcctaaagagagttctagcagttgggggtggggtggggaccatttcctaaagtcaacgcgtaagttaaaggtctgcaaggcggtccaccggtgatttaaatctcgcacttcggaaaccagaaaaggaaacctgtgagaagctgggcagggggaacccgcttaacatcaacagcaacccctaaatggcatcagaccttggagagacaggttgcaggccagactcgggagccaggcgccagcacccgccagagctctgagccccgaactgctccagggcccacaacggcagtgtcctacatgtcggtgaaatgtgtggatgcccgtaagaaccatcacaagacaaaatggttcgtgccttggggacccaatcattgtgacaagatccgagacattgaagaggcaattccaagggaaattgaagccaatgacatcgtgttttctgttcacattcccctcccccacatggagatgagtccttggttccaattcatgctgtttatcctgcagctggacattgccttcaagctaaacaaccaaatcagagaaaatgcagaagtctccatggacgtttccctggcttaccgtgatgacgcgtttgctgagtggactgaaatggcccatgaaagagtaccacggaaactcaaatgcaccttcacatctcccaagactccagagcatgagggccgttactatgaatgtgatgtccttcctttcatggaaattgggtctgtggcccataagttttaccttttaaacatccggctgcctgtgaatgagaagaagaaaatcaatgtgggaattggggagataaaggatatccggttggtggggatccaccaaaatggaggcttcaccaaggtgtggtttgccatgaagaccttccttacgcccagcatcttcatcattatggtgtggtattggaggaggatcaccatgatgtcccgacccccagtgcttctggaaaa

SEQ ID NO: 23125 - DNA, 572 bp, Homo sapiens
  misc_feature 1..572: note = ENST00000370973
  source 1..572: mol_type = unassigned DNA; mol_type = unassigned DNA
acaatcacagctccgggcattgggggaacccgagccggctgcgccgggggaatccgtgcgggcgccttccgtcccggtcccatcctcgccgcgctccagcacctctgaagttttgcagcgcccagaaaggaggcgaggaaggagggagtgtctggacattgccttcaagctaaacaaccaaatcagagaaaatgcagaagtctccatggacgtttccctggcttaccgtgatgacgcgtttgctgagtggactgaaatggcccatgaaagagtaccacggaaactcaaatgcaccttcacatctcccaagactccagagcatgagggccgttactatgaatgtgatgtccttcctttcatggaaattgggtctgtggcccataagttttaccttttaaacatccggctgcctgtgaatgagaagaagaaaatcaatgtgggaattggggagataaaggatatccggttggtggggatccaccaaaatggaggcttcaccaaggtgtggtttgccatgaagaccttccttacgcccagcatcttcatcattatggtgtggtattggaggagga

SEQ ID NO: 23126 - DNA, 555 bp, Homo sapiens
  misc_feature 1..555: note = ENST00000471243
  source 1..555: mol_type = unassigned DNA; mol_type = unassigned DNA
aacgaacagtggtctgatttggctggagagcaagtttcctcaaggggcgccgtggggaatttagctggctccagggcccacaacggcagtgtcctacatgtcggtgaaatgtgtggatgcccgtaagaaccatcacaagacaaaatggttcgtgccttggggacccaatcattgtgacaagatccgagacattgaagaggcaattccaagggaaattgaagccaatgacatcgtgttttctgttcacattcccctcccccacatggagatgagtccttggttccaattcatgctgtttatcctgcagctggacattgccttcaagctaaacaaccaaatcagagaaaatgcagaagtctccatggacgtttccctggcttaccgtgatgacgcgtttgctgagtggactgaaatggcccatgaaagagtaccacggaaactcaaatgcaccttcacatctcccaagactccagagcatgagggccgttactatgaatgtgatgtccttcctttcatggaaattgggtctgtggcccataagttttaccttttaaa

SEQ ID NO: 23127 - DNA, 779 bp, Homo sapiens
  misc_feature 1..779: note = ENST00000491076
  source 1..779: mol_type = unassigned DNA; mol_type = unassigned DNA
aatcacagctccgggcattgggggaacccgagccggctgcgccgggggaatccgtgcgggcgccttccgtcccggtcccatcctcgccgcgctccagcacctctgaagttttgcagcgcccagaaaggaggcgaggaaggagggagtgtgtgagaggagggagcaaaaagctcaccctaaaacatttatttcaaggagaaaagaaaaagggggggcgcaaaaatggctggggcaattatagaaaacatgagcaccaagaagctgtgcattgttggtgggattctgctcgtgttccaaatcatcgcctttctggtgggaggcttgattgcatacccataaatgagactattccaaacataaactctccagggcccacaacggcagtgtcctacatgtcggtgaaatgtgtggatgcccgtaagaaccatcacaagacaaaatggttcgtgccttggggacccaatcattgtgacaagatccgagacattgaagaggcaattccaagggaaattgaagccaatgacatcgtgttttctgttcacattcccctcccccacatggagatgagtccttggttccaattcatgctgtttatcctgcagctggacattgccttcaagctaaacaaccaaatcagagaaaatgcagaagtctccatggacgtttccctggcttaccgtgatgacgcgtttgctgagtggactgaaatggcccatgaaagagtaccacggaaactcaaatgcaccttcacatctcccaagactccagagcatgagggc

SEQ ID NO: 23128 - DNA, 570 bp, Homo sapiens
  misc_feature 1..570: note = ENST00000527864
  source 1..570: mol_type = unassigned DNA; mol_type = unassigned DNA
ggttcccttccaatcagctccgggagggcaacgtaatcgactttattaggaacaacagaagagtcggggaactgtgcccggcgcaaacccggagctctgttacaaggctgagatacttgcacgctccagggcccacaacggcagtgtcctacatgtcggtgaaatgtgtggatgcccgtaagaaccatcacaagacaaaatggttcgtgccttggggacccaatcattgtgacaagatccgagacattgaagaggcaattccaagggaaattgaagccaatgacatcgtgttttctgttcacattcccctcccccacatggagatgagtccttggttccaattcatgctgtttatcctgcagctggacattgccttcaagctaaacaaccaaatcacaatgaacaggacttcagagaagagtttgggagtgtggcaaacaagatcctattacacatgatggcttcctgcttatcagagattcacctgtaacaatattacttcatatgagaaaatgcagaagtctccatggacgtttccctggcttaccgtgatgacgcgtttgctgagtg

SEQ ID NO: 23129 - DNA, 700 bp, Homo sapiens
  misc_feature 1..700: note = ENST00000370971
  source 1..700: mol_type = unassigned DNA; mol_type = unassigned DNA
acaatcacagctccgggcattgggggaacccgagccggctgcgccgggggaatccgtgcgggcgccttccgtcccggtcccatcctcgccgcgctccagcacctctgaagttttgcagcgcccagaaaggaggcgaggaaggagggagtgtgtgagaggagggagcaaaaagctcaccctaaaacatttatttcaaggagaaaagaaaaagggggggcgcaaaaatggctggggcaattatagaaaacatgagcaccaagaagctgtgcattgttggtgggattctgctcgtgttccaaatcatcgcctttctggtgggaggcttgattgctccagggcccacaacggcagtgtcctacatgtcggtgaaatgtgtggatgcccgtaagaaccatcacaagacaaaatggttcgtgccttggggacccaatcattgtgacaagatccgagacattgaagaggcaattccaagggaaattgaagccaatgacatcgtgttttctgttcacattcccctcccccacatggagatgagtccttggttccaattcatgctgtttatcctgcagctggacattgccttcaagctaaacaaccaaatcagttaagtgtactctcctctcatccctttcttccctttgagcattgccctctttgggttctttttgagccaattctaataaaagtaaaaatggtaata

SEQ ID NO: 23130 - DNA, 1703 bp, Homo sapiens
  misc_feature 1..1703: note = ENST00000233948
  source 1..1703: mol_type = unassigned DNA; mol_type = unassigned DNA
tccgcaggagacacaggcgctggctgccccgtccgctctccgcctccgccgcgccctcctcgcccgggatgggcccccccgccgccgccggatccctcgcctcccggccgccgccgttgcgctcgccgcgctcgcactgaagcccgggccctcgcgcgccgcggttcgccccgcagcctcgccccctgcccacccgggcggccgtagggcggtcacgatgctgccgcccttaccctcccgcctcgggctgctgctgctgctgctcctgtgcccggcgcacgtcggcggactgtggtgggctgtgggcagccccttggttatggaccctaccagcatctgcaggaaggcacggcggctggccgggcggcaggccgagttgtgccaggctgagccggaagtggtggcagagctagctcggggcgcccggctcggggtgcgagagtgccagttccagttccgcttccgccgctggaattgctccagccacagcaaggcctttggacgcatcctgcaacaggacattcgggagacggccttcgtgttcgccatcactgcggccggcgccagccacgccgtcacgcaggcctgttctatgggcgagctgctgcagtgcggctgccaggcgccccgcgggcgggcccctccccggccctccggcctgcccggcacccccggaccccctggccccgcgggctccccggaaggcagcgccgcctgggagtggggaggctgcggcgacgacgtggacttcggggacgagaagtcgaggctctttatggacgcgcggcacaagcggggacgcggagacatccgcgcgttggtgcaactgcacaacaacgaggcgggcaggctggccgtgcggagccacacgcgcaccgagtgcaaatgccacgggctgtcgggatcatgcgcgctgcgcacctgctggcagaagctgcctccatttcgcgaggtgggcgcgcggctgctggagcgcttccacggcgcctcacgcgtcatgggcaccaacgacggcaaggccctgctgcccgccgtccgcacgctcaagccgccgggccgagcggacctcctctacgccgccgattcgcccgacttctgcgcccccaaccgacgcaccggctcccccggcacgcgcggtcgcgcctgcaatagcagcgccccggacctcagcggctgcgacctgctgtgctgcggccgcgggcaccgccaggagagcgtgcagctcgaagagaactgcctgtgccgcttccactggtgctgcgtagtacagtgccaccgctgccgtgtgcgcaaggagctcagcctctgcctgtgacccgccgcccggccgctagactgacttcgcgcagcggtggctcgcacctgtgggacctcagggcaccggcaccgggcgcctctcgccgctcgagcccagcctctccctgccaaagcccaactcccagggctctggaaatggtgaggcgaggggcttgagaggaacgcccacccacgaaggcccagggcgccagacggccccgaaaaggcgctcggggagcgtttaaaggacactgtacaggccctccctccccttggcctctaggaggaaacagttttttagactggaaaaaagccagtctaaaggcctctggatactgggctccccagaactgctggccacaggatggtgggtgaggttagtatcaataaagatatttaaaccacca

SEQ ID NO: 23131 - DNA, 408 bp, Homo sapiens
  misc_feature 1..408: note = ENST00000486233
  source 1..408: mol_type = unassigned DNA; mol_type = unassigned DNA
cgggccctcgcgcgccgcggttcgccccgcagcctcgccccctgcccacccgggcggccgtagggcggtcacgatgctgccgcccttaccctcccgcctcgggctgctgctgctgctgctcctgtgcccggcgcacgtcggcggactgtggtgacattcgggagacggccttcgtgttcgccatcactgcggccggcgccagccacgccgtcacgcaggcctgttctatgggcgagctgctgcagtgcggctgccaggcgccccgcgggcgggcccctccccggccctccggcctgcccggcacccccggaccccctggccccgcgggctccccggaaggcagcgccgcctgggagtggggaggctgcggcgacgacgtggacttcggggacgagaagtcgaggctct

SEQ ID NO: 23132 - DNA, 4041 bp, Homo sapiens
  misc_feature 1..4041: note = ENST00000285018
  source 1..4041: mol_type = unassigned DNA; mol_type = unassigned DNA
gaggggcgggggctggaggcagcagcgcccccgcactccccgcgtctcgcacacttgcaccggtcgctcgcgcgcagcccggcgtcgccccacgccgcgctcgctcctccctccctcctcccgctccgtggctcccgtgctcctggcgaggctcaggcgcggagcgcgcggacgggcgcaccgacagacggccccggggacgcctcggctcgcgcctcccgggcgggctatgttgattgccccgccggggccggcccgcgggatcagcacagcccggcccgcggccccggcggccaatcgggactatgaaccggaaagcgcggcgctgcctgggccacctctttctcagcctgggcatggtctacctccggatcggtggcttctcctcagtggtagctctgggcgcaagcatcatctgtaacaagatcccaggcctggctcccagacagcgggcgatctgccagagccggcccgacgccatcatcgtcataggagaaggctcacaaatgggcctggacgagtgtcagtttcagttccgcaatggccgctggaactgctctgcactgggagagcgcaccgtcttcgggaaggagctcaaagtggggagccgggaggctgcgttcacctacgccatcattgccgccggcgtggcccacgccatcacagctgcctgtacccagggcaacctgagcgactgtggctgcgacaaagagaagcaaggccagtaccaccgggacgagggctggaagtggggtggctgctctgccgacatccgctacggcatcggcttcgccaaggtctttgtggatgcccgggagatcaagcagaatgcccggactctcatgaacttgcacaacaacgaggcaggccgaaagatcctggaggagaacatgaagctggaatgtaagtgccacggcgtgtcaggctcgtgcaccaccaagacgtgctggaccacactgccacagtttcgggagctgggctacgtgctcaaggacaagtacaacgaggccgttcacgtggagcctgtgcgtgccagccgcaacaagcggcccaccttcctgaagatcaagaagccactgtcgtaccgcaagcccatggacacggacctggtgtacatcgagaagtcgcccaactactgcgaggaggacccggtgaccggcagtgtgggcacccagggccgcgcctgcaacaagacggctccccaggccagcggctgtgacctcatgtgctgtgggcgtggctacaacacccaccagtacgcccgcgtgtggcagtgcaactgtaagttccactggtgctgctatgtcaagtgcaacacgtgcagcgagcgcacggagatgtacacgtgcaagtgagccccgtgtgcacaccaccctcccgctgcaagtcagattgctgggaggactggaccgtttccaagctgcgggctccctggcaggatgctgagcttgtcttttctgctgaggagggtacttttcctgggtttcctgcaggcatccgtgggggaaaaaaaatctctcagagccctcaactattctgttccacacccaatgctgctccaccctcccccagacacagcccaggtccctccgcggctggagcgaagccttctgcagcaggaactctggacccctgggcctcatcacagcaatatttaacaatttattctgataaaaataatattaatttatttaattaaaaagaattcttccacctcgtcgggatccgttttctgcaatcaaagtggactgcttgctttcctagcaggatgattttgttgctaggacaaggagccgtgtagaagtgtacataactattctttatgcagatatttctactagctgattttgcaggtacccaccttgcagcactagatgtttaagtacaagaggagacatcttttatgcatatatagatatacacacacacatttttttttttttttttgctgtttgctgctacttatccagaaatttaagctggtccagatttggagacgttttttccagagtatgttttccatccttttgccctccccagttcaaacttcaccattagaaaaatccagtttggaataaatagagaggaaaaataataaattcccagcagtttccatctttcggaaagtgagccaccggataagagagaatattttgtaagagactatttttatatgaatattttatttatatcgagtctactgtatcattccacggcctgtgcttcttcttaattctggtactcacttaggggtaaggaggggcgatgcctggttgtggcgtcaggccccatggggccccttgcacagctggattcttgagttctgtttgccaagtgggcacaagctgcccctggatgcctggggttgaggcatcatctcatccatgttagccgggaaagaaatcaaatccccagcctcagcctgttaagctcaggcctttcaagcagggccactgagtggtagcttcgaaatgagtcactgtggtgggtggtcatcgtgcccctcacagggacttgaccgtcatcctgcagcagaggccagttcagggagccccacacctcaccaagacactagccattgcctgcgtgtcctggaaggtgagatgtagtcctcaggtgaggtgacccaaagcagatggggtgaggggccgatgagcagccgggcccagcggggcttcctggatatcctgctcccaaggccaagcagcagagagaggttcaagtgaggccactttgctttgggtccagctacacccagagcctcagcctagaaagctgtcctccagcaggctgggggtgttctaatatgtgtccgtttgcatttccggtgtgtgtgtgtgtgtgtgtgtgtgtgtgtgtgtgtgtgtgtgtgtgtactgtatcttcttagggacttgagtgtagtcacgtgactttgcgccttgcagcgcctccgccgtactcgtgtgtgtatgtgtctgtgtgtttccgtgctacccaagcgtctgtttctctccgtgtgcctgggagatcaggtctcaggcatggagctgcatgcctttgcatctgctgctccccagagtctctgcttgcatgtgagggctggtggtatgaggcagacagcagagattgtgtgtgattgtgttgaaccgccaagagaaggcacctctgaactctgtccccacacccatgggtgaaaaccagacacctctgagaccacagcacagccccatggccccacctgctgggagcccttcagtatctaggctgtgtctgactcctcagtgtccacactgagcctggatcacagcatgggcaaataaaagtgactggatggttgcatggtttcttcccttggacatttttttccatttttcttttacttgggtgtctggaggagtgggcatgtgaaggggccatggagtgaatggatggagggatggatgaatgtgtgagtaggtaggtaggtgaatgggtagatgtgtggatggataagtaggtgggtgggtgaatggataaatggatggatgggtagatggatggatgaagggataaacagatgggtggatggattgataagtgagcggatgaatggatgaatagctaggaaagtgggtgggtggatgagggtgggttgatgaggtaggtacacctacagataggtaagtgagcagtttcttgggagtccacaggtcacattttatctttgctttggaaaacctagcagatctgccatgatcaggatggcttcccgaccttgcaacccttctgcttctgacctccttggcacctgggaatgggggagattctgaccagcctccccagatgagtgttcaatgatagttacataaacacagtctcagaagagtcatccctgtgtcctccctcactgtgggttcccagctctggggcctgccctctctcgggtgccctgttcagctgtgctctgagccccagtttctccacctgtgaaatcagaataacacctacctcacagggctgttgtgaggatcctcccagtaatgactgtatggcactttgagttgcaaagcaatggatgaa

SEQ ID NO: 23133 - DNA, 401 bp, Homo sapiens
  misc_feature 1..401: note = ENST00000489346
  source 1..401: mol_type = unassigned DNA; mol_type = unassigned DNA
ggctcccagacagcgggcgatctgccagagccggcccgacgccatcatcgtcataggagaaggctcacaaatgggcctggacgagtgtcagtttcagttccgcaatggccgctggaactgctctgcactgggagagcgcaccgtcttcgggaaggagctcaaagtgggtgactgcctgggctgagggtcccatgtctggggatccccacactctgcaaaaaggactccatcattttacccatctagggctgtgagagtgcaacacatgtctggtgagctggtgaatgcttagaaggatggatttgaagacctttccagtgagagagacagaagcaaggggcgggccagctccattttctctctgccatttcttaacaatacgccatcttgcccaagcaaaa

SEQ ID NO: 23134 - DNA, 531 bp, Homo sapiens
  misc_feature 1..531: note = ENST00000497808
  source 1..531: mol_type = unassigned DNA; mol_type = unassigned DNA
ggaaaggtcacatgagctgctgtttgtggcagcacccaccatactgccttggcacatagtagggacactgcccaagtttactgatgcatttgatgcatatttggggggcacctgccatgtaataggtactcacccggagccacatctttgaagtgccacaatccatttattcagcagtcatttagtgaaccagcagacagcctccctgccctcagggagctcatcctctcaggaggaagacaagtgatcaattccttgagggcagggcattgcctgtcaggtgcacagctgtctcctagcatgtggcttctcctcagtggtagctctgggcgcaagcatcatctgtaacaagatcccaggcctggctcccagacagcgggcgatctgccagagccggcccgacgccatcatcgtcataggagaaggctcacaaatgggcctggacgagtgtcagtttcagttccgcaatggccgctggaactgctctgcactgggagagcgcaccgtcttcgggaaggagctcaaagtggg

SEQ ID NO: 23135 - DNA, 3919 bp, Homo sapiens
  misc_feature 1..3919: note = ENST00000339464
  source 1..3919: mol_type = unassigned DNA; mol_type = unassigned DNA
attggccgccgcggcgctcggcgaggcgctcacggcctcaggcggctgcgcctagtgcaggctgcacccgcccgccagccgcgcccgggcccccggcccgcgcttgcaggggtccacggtcgctcaaccgggcttcgaggtcgcggcccccagcctgggtcaattccccgggctcacgcggcggtggcggcggcggcatcccgggctcaccatggtggcagcgcgcgccgagtgcccgcgcgtcgccggccgcccgagccgcagcgcgggctgagcgcagtctgcccgcagccccctggcccctgcccggccctgccgggcccgcgcgtcccctccggccgccgctgtctatggcgcagcccccctccctggatcatgcacagaaactttcgcaagtggattttctacgtgtttctctgctttggcgtcctgtacgtgaagctcggagcactgtcatccgtggtggccctgggagccaacatcatctgcaacaagattcctggcctagccccgcggcagcgtgccatctgccagagtcggcccgatgccatcattgtgattggggagggggcgcagatgggcatcaacgagtgccagtaccagttccgcttcggacgctggaactgctctgccctcggcgagaagaccgtcttcgggcaagagctccgagtagggagccgtgaggctgccttcacgtacgccatcaccgcggctggcgtggcgcacgccgtcaccgctgcctgcagccaagggaacctgagcaactgcggctgcgaccgcgagaagcagggctactacaaccaagccgagggctggaagtggggcggctgctcggccgacgtgcgttacggcatcgacttctcccggcgcttcgtggacgctcgggagatcaagaagaacgcgcggcgcctcatgaacctgcataacaatgaggccggcaggaaggttctagaggaccggatgcagctggagtgcaagtgccacggcgtgtctggctcctgcaccaccaaaacctgctggaccacgctgcccaagttccgagaggtgggccacctgctgaaggagaagtacaacgcggccgtgcaggtggaggtggtgcgggccagccgtctgcggcagcccaccttcctgcgcatcaaacagctgcgcagctatcagaagcccatggagacagacctggtgtacattgagaagtcgcccaactactgcgaggaggacgcggccacgggcagcgtgggcacgcagggccgtctctgcaaccgcacgtcgcccggcgcggacggctgtgacaccatgtgctgcggccgaggctacaacacccaccagtacaccaaggtgtggcagtgcaactgcaaattccactggtgctgcttcgtcaagtgcaacacctgcagcgagcgcaccgaggtcttcacctgcaagtgaggccaggcccggaggcggccgcgggcaccctggaacccggcggcattttgcacatccactcctcaccttccctgccttggtgctgccagcagcagacatagacgggtgcagaagcggggagctccaggtgcaggagggcaccggccggggcccacgccctctgcccgcctccctggggctccttcctgccacctcctcccatcacctcctgcggcagaacagcacccgtgacccacccagagagcaaggccaggggtcttggtgctccccgacggggcccggcaagttctctttcttctctctgggaaaatgaacgtccaggacacacctgtatcccagagagcaaagtgatgaggagactgagcgtccccagccccacctggcggcatggacacagaaaagctacgccggctggcctctccagaccagttcccaggctgggtctgccgctgggccctggggcggtggggacagatgttgacacaaattatttatgttttcttagtatcagaagaggattctcggcactaacacatagccagtcctaactccgtactctgtgtcagcccatcccctagacaccctctgtttcctttcccggccccacctggccggccctctgcccctgcagagctgaggcagcctggggttgatggggaccacgcggtgcctgcaggtcctagaagtgagctgggcaggggctcttcagaccacacagccctgaccgggccttggaggagagccatggacaggctcctccatgccgtctttccttcttttgaaaatcctatcaatggctgggcgcggtggctcacacctgtaatcccagcactttgggagaccgaggcaggtggatcacctgaggtcaggagttcgagaccagcctggccaacgtggtgaaaccctgtctctactaaaaatacaaaaattagctgggcgtggtggcgtgcacctgtaatcccagctactcaggaggctgagacaggacacttgcttgaacccgggaggtggaggttgcaatgagccaagattgtgccactgtattccaacttgggtgacagagcacgactctgtctcaaaaaaagaaaagaaaataatatcaagcaaatcaaaatatcacccacgtcaggttccaggagtccttcgttccctccctcatcctgtcaccctcccggcctggcacctccagtttacagagacccccttccccctggagccagcctgacccctgggacagtgctgccgcgggggtcaggcaggtggtgagtggtcagggatgtttgtcccacttgacagatgggaactctgaggcccagagtggcacaaggacctaccagagaccctgcagctgtgactggaggcttccacctttctcctgcccagcctggggctctggacctgggagaacacatcaggatgcccggggtggcagtaggtagctcccatgccttgaggcacttggctgctccctccaccccctgacagcctcattggggcctgcactcccctcggtgcctttgaggcttcgcctagccctgtcctggtccttttaccctgaccccagtgctgagaaaatctggatccagagctggacatgtcctttctggatgctcccacccctgtctctgaggagcatgagtgacagagggaggaacttgtccgaggccagagaggatggtctgcagctggctcctggtgcacccccactgcccacggcctggcccccatttagggtgtgttctcttggaagcccgtaggaatgtgttcttgagcagccgacaagccaagggcctgggctcagcctggggcaagtgggtccctcctgggctctggccctgtggtccagcccatgtgcctctaaccatgcctggacgctctgagtctccgggccaccgtgaatgccccaccctcagcctggccccatccccttaccttccccaagtcccagaacacacctgagtccataggcccggcagcctctgcaaggaacctggttaacttatgttgttatatagcgtcgaaatgtctatagtgtctttaaattattgtgacctacactgggtaccggagagggggatggctgcggcccccatccctcatcccccatcccatcccatccctcatctcatccctcatcccatcccccatcccatccctgaccccatcccccatcccatccctcatccctattccccatacccaccccccatcccatcccccatctcccgaaccaggctcctcctgcttcaacagacccttggggcccctgatgccaccgagacactcgcactgtcccttggctgccgggcaccccactgagcccctgcccaccccaaagtctgccagcaacaggccctttgcctgggtgagacgggggtcagggtggcccagatgggggtgatggcgaccaaggtgctgcgtccccacccttctgacggcagcctcccctggaggggagtgctcggcccaataaaagctggaatcggaaaagtga

SEQ ID NO: 23136 - DNA, 2285 bp, Homo sapiens
  misc_feature 1..2285: note = ENST00000409496
  source 1..2285: mol_type = unassigned DNA; mol_type = unassigned DNA
gggtgtcccagccaaggcaacttgggcaagccctggaggcggctcccaccgcacgctccggtcagcctcccctttaaaaaaacccgccgggggaggaggcggatgtaggggcggcccgtccaatggcagctgcgcgcctcgggagacttggagaagtgagccagagcgagcgacagagccggttcgcaccgacagacggacggaggtccagaccgcagccaaggcgcgcccgctgcccccggccgggtccccgccccgcactccagccccagctcccgccgctgccccagacccagcgccatgcgcggccctagcggcggggcacgggcgacaactgcgcccgggcccacgagacccggcccctagcgcccagcgccgccgccctgcatcggggagctccgcggggaccccggcctcagctggcccaggcgcccggcccgcggagcctgttcagccccgccaggcacgccggcccaccatgcttctactgtcgccgcgcagcgcgctcgtctccgtctattgcccgcagatctttctcctcctgtccagcggcagctacttagcactgtcatccgtggtggccctgggagccaacatcatctgcaacaagattcctggcctagccccgcggcagcgtgccatctgccagagtcggcccgatgccatcattgtgattggggagggggcgcagatgggcatcaacgagtgccagtaccagttccgcttcggacgctggaactgctctgccctcggcgagaagaccgtcttcgggcaagagctccgagtagggagccgtgaggctgccttcacgtacgccatcaccgcggctggcgtggcgcacgccgtcaccgctgcctgcagccaagggaacctgagcaactgcggctgcgaccgcgagaagcagggctactacaaccaagccgagggctggaagtggggcggctgctcggccgacgtgcgttacggcatcgacttctcccggcgcttcgtggacgctcgggagatcaagaagaacgcgcggcgcctcatgaacctgcataacaatgaggccggcaggaaggttctagaggaccggatgcagctggagtgcaagtgccacggcgtgtctggctcctgcaccaccaaaacctgctggaccacgctgcccaagttccgagaggtgggccacctgctgaaggagaagtacaacgcggccgtgcaggtggaggtggtgcgggccagccgtctgcggcagcccaccttcctgcgcatcaaacagctgcgcagctatcagaagcccatggagacagacctggtgtacattgagaagtcgcccaactactgcgaggaggacgcggccacgggcagcgtgggcacgcagggccgtctctgcaaccgcacgtcgcccggcgcggacggctgtgacaccatgtgctgcggccgaggctacaacacccaccagtacaccaaggtgtggcagtgcaactgcaaattccactggtgctgcttcgtcaagtgcaacacctgcagcgagcgcaccgaggtcttcacctgcaagtgaggccaggcccggaggcggccgcgggcaccctggaacccggcggcattttgcacatccactcctcaccttccctgccttggtgctgccagcagcagacatagacgggtgcagaagcggggagctccaggtgcaggagggcaccggccggggcccacgccctctgcccgcctccctggggctccttcctgccacctcctcccatcacctcctgcggcagaacagcacccgtgacccacccagagagcaaggccaggggtcttggtgctccccgacggggcccggcaagttctctttcttctctctgggaaaatgaacgtccaggacacacctgtatcccagagagcaaagtgatgaggagactgagcgtccccagccccacctggcggcatggacacagaaaagctacgccggctggcctctccagaccagttcccaggctgggtctgccgctgggccctggggcggtggggacagatgttgacacaaattatttatgttttcttagtatcagaagaggattctcggcactaacacatagccagtcctaactccgtactctgtgtcagcccatcccctagacaccctctgtttcctttcccggccccacctggccggccctctgcccctgcagagctgaggcagcctggggttgatggggaccacgcggtgcctgcaggtcctagaagtgagctgggcaggggctcttcagaccacacagccctgaccgggccttggaggagagcca

SEQ ID NO: 23137 - DNA, 2202 bp, Homo sapiens
  misc_feature 1..2202: note = ENST00000410089
  source 1..2202: mol_type = unassigned DNA; mol_type = unassigned DNA
ctggcgcggcccggcgggcgggcgcccggcgagccgcgctagctgctctctgcggtagctgctccgagtcgtatttccacattcctgaacccagccgagtccttacctgttgagccgcgatctcctttagacagaatctgtctcggcttcgctcgaagtgggggtggagaaacggcgtgacggagagggggtgcggtgcacctcgcctggggcgcccaccgcccgctgctggccccgcgctcctcgcacctgcggggacccgggccccgccgcgccctgcgcgcctactgtgcgccgccggctgccccgaggcgagccccgtccaggccacaggcaaggcggtgaacagacccgcgggaggggcaggtgcaggtaccactggtgggagacgcggcttcccaggcggagaggtggaagcaggcgctgggaatcgtctctccatcaccctccatcccatgtctgccccgccattttacagagcactgtcatccgtggtggccctgggagccaacatcatctgcaacaagattcctggcctagccccgcggcagcgtgccatctgccagagtcggcccgatgccatcattgtgattggggagggggcgcagatgggcatcaacgagtgccagtaccagttccgcttcggacgctggaactgctctgccctcggcgagaagaccgtcttcgggcaagagctccgagtagggagccgtgaggctgccttcacgtacgccatcaccgcggctggcgtggcgcacgccgtcaccgctgcctgcagccaagggaacctgagcaactgcggctgcgaccgcgagaagcagggctactacaaccaagccgagggctggaagtggggcggctgctcggccgacgtgcgttacggcatcgacttctcccggcgcttcgtggacgctcgggagatcaagaagaacgcgcggcgcctcatgaacctgcataacaatgaggccggcaggaaggttctagaggaccggatgcagctggagtgcaagtgccacggcgtgtctggctcctgcaccaccaaaacctgctggaccacgctgcccaagttccgagaggtgggccacctgctgaaggagaagtacaacgcggccgtgcaggtggaggtggtgcgggccagccgtctgcggcagcccaccttcctgcgcatcaaacagctgcgcagctatcagaagcccatggagacagacctggtgtacattgagaagtcgcccaactactgcgaggaggacgcggccacgggcagcgtgggcacgcagggccgtctctgcaaccgcacgtcgcccggcgcggacggctgtgacaccatgtgctgcggccgaggctacaacacccaccagtacaccaaggtgtggcagtgcaactgcaaattccactggtgctgcttcgtcaagtgcaacacctgcagcgagcgcaccgaggtcttcacctgcaagtgaggccaggcccggaggcggccgcgggcaccctggaacccggcggcattttgcacatccactcctcaccttccctgccttggtgctgccagcagcagacatagacgggtgcagaagcggggagctccaggtgcaggagggcaccggccggggcccacgccctctgcccgcctccctggggctccttcctgccacctcctcccatcacctcctgcggcagaacagcacccgtgacccacccagagagcaaggccaggggtcttggtgctccccgacggggcccggcaagttctctttcttctctctgggaaaatgaacgtccaggacacacctgtatcccagagagcaaagtgatgaggagactgagcgtccccagccccacctggcggcatggacacagaaaagctacgccggctggcctctccagaccagttcccaggctgggtctgccgctgggccctggggcggtggggacagatgttgacacaaattatttatgttttcttagtatcagaagaggattctcggcactaacacatagccagtcctaactccgtactctgtgtcagcccatcccctagacaccctctgtttcctttcccggccccacctggccggccctctgcccctgcagagctgaggcagcctggggttgatggggaccacgcggtgcctgcaggtcctagaagtgagctgggcaggggctcttcagaccacacagccctgaccgggccttggaggagagcca

SEQ ID NO: 23138 - DNA, 714 bp, Homo sapiens
  misc_feature 1..714: note = ENST00000410058
  source 1..714: mol_type = unassigned DNA; mol_type = unassigned DNA
cgcgtcccctccggccgccgctgtctatggcgcagcccccctccctggatcatgcacagaaactttcgcaagtggattttctacgtgtttctctgctttggcgtcctgtacgtgaagctcggagcactgtcatccgtggtggccctgggagccaacatcatctgcaacaagattcctggcctagccccgcggcagcgtgccatctgccagagtcggcccgatgccatcattgtgattggggagggggcgcagatgggcatcaacgagtgccagtaccagttccgcttcggacgctggaactgctctgccctcggcgagaagaccgtcttcgggcaagagctccgagtagggagccgtgaggctgccttcacgtacgccatcaccgcggctggcgtggcgcacgccgtcaccgctgcctgcagccaagggaacctgagcaactgcggctgcgaccgcgagaagcagggctactacaaccaagccgagggctggaagtggggcggctgctcggccgacgtgcgttacggcatcgacttctcccggcgcttcgtggacgctcgggagatcaagaagaacgcgcggcgcctcatgaacctgcataacaatgaggccggcaggaagggcctacttggacaacccagggtgacctcctctccgttgtttccttgaccacatctgtaaaggccctacttccaaataaagtcacttgccgag

SEQ ID NO: 23139 - DNA, 521 bp, Homo sapiens
  misc_feature 1..521: note = ENST00000428540
  source 1..521: mol_type = unassigned DNA; mol_type = unassigned DNA
gccgcgatctcctttagacagaatctgtctcggcttcgctcgaagtgggggtggagaaacggcgtgacggagagggggtgcggtgcacctcgcctggggcgcccaccgcccgctgctggccccgcgctcctcgcacctgcggggacccgggccccgccgcgccctgcgcgcctactgtgcgccgccggctgccccgaggcgagccccgtccaggccacagagcactgtcatccgtggtggccctgggagccaacatcatctgcaacaagattcctggcctagccccgcggcagcgtgccatctgccagagtcggcccgatgccatcattgtgattggggagggggcgcagatgggcatcaacgagtgccagtaccagttccgcttcggacgctggaactgctctgccctcggcgagaagaccgtcttcgggcaagagctccgagtagggagccgtgaggctgccttcacgtacgccatcaccgcggctggcgtggcgcacgccgtcaccgctgcctgcagc

SEQ ID NO: 23140 - DNA, 1821 bp, Homo sapiens
  misc_feature 1..1821: note = ENST00000563763
  source 1..1821: mol_type = unassigned DNA; mol_type = unassigned DNA
tttccacactgtggaaggtttgttcttttgctctttgcaataactcttgctgctgctcactgtttgggtccacattgcttttatgagctgtaacactcgccgcgaaggtctacagcttcagtcctgaagccggcgagaccaccaacccaccaggaggaacaaacaacttcagacgcgctgccttaagagctgtaacactcaccgcgaaggtctgcagcttcactcctgaagccagcgagaccacgaacccatcaggaggaacgaacaactccagacgcgccgccttaagagctgcaacactcaccgcgaaggtccgtagcttcactcctgagccagcgagaccacgaacccaccaaaaggaagaaactccggacacatcctaacatcagaaggaacaaactccggacacgccacctttaagaactgtaacactcaccgcgaaggtccacggcttcattctttaagtcagtgagactgagaacccgccaattccggacacacagctacagccaagcctctttgcttctctgggccagcctctctggagctgaatcgtggctggctggatttgaggagcctgcatgggcgcactctctctttctgaatcccagctagggctctcctggctgtaattactaagactcagctgctgggaatttccacgcctcctacctctctacagggcagtccctccatattaggaaacccactggcacgctccgccgttatcttcgcaagacttccgttgttgcctcaagttgcagattgccttttaacagagaagaaagtgacaggaatgtgctggcactgatgacacagtaatgaccaaggtcttcagtgttttggccatctccctacctgatcaccctgaagcaacacccacaagcagacaagctctgcccagctacattgagatcccagaaccagagccactagcaatctcaccctaagaggaagagaaggagagccaggcatggctgtctgcagtgtgcctctcacggatacttcttttacctggcggacagcccagcgcctagttgtctgacccgtgatcaagatgtccttcacacggaaaacttgtttattctgacaaatgccttggtggttgctgtgtccagtgaatgcctgcctgaccatcgctcggagctgggagcttgtgttatccactgcgtcccggggaaaacctgctggggcagcccccggttcttcctttcttctctgcaactggggttctctgtgttcagggattacccaaaccacggctttctttggagaccagtgatggcaaagcgttctcttctgctcctgccaagtcgccctcactcagctcaaggcctctggcattccttggagacttctgctcactgctgttggaggaagatgctgattcaggccagattccatcttggggtgcgtgcccttggtcttcctctgccccacacgctccttccgcagctctgtgcatggttgctcctgcctgtcattcaggctttggctcagacagcacttactcaagagaacttttttggtagacgcatagcttttaaattttttttaaattttttaattttttaaacgtagtattttgattcaggggatacatgtgcatgttcgtcacagggtatattgtgtgatgctgaggttttggcttctattgatcctgtcacccaaagagtgaacatagtccccagcaggaaattttttaacccttgcccccatccctccctctccccttttggagtctcctgtatctgttattcccatctttatgtcatgtgtactcaatgtttagctcccaattataagtgagaatttgtggga

SEQ ID NO: 23141 - DNA, 759 bp, Homo sapiens
  misc_feature 1..759: note = ENST00000573619
  source 1..759: mol_type = unassigned DNA; mol_type = unassigned DNA
ccatattaggaaacccactggcacgctccgccgttatcttcgcaagacttccgttgttgcctcaagttgcagattgccttttaacagagaagaaagtgacaggaatgtgctggcactgatgacacagtaatgaccaaggtaaacaaggacctgctctagcctgacaggctggtcttcagtgttttggccatctccctacctgatcaccctgaagcaacacccacaagcagacaagctctgcccagtgagacagcacagaaaagcctccccgggatgtctggcagctcctacttggttccactggaaagaaaataagaggtcattattcacaaacaagatttctgcgccaggagatgaggggcggtagagccctggaatggagatgtccttgacgcctgggcagaggctgcagctgcaggaccctgtggccactggagataagtaatggtgccatttgaacacctactggaaacggggcaggaacagtgagtgaccccaggcgagcacaggcaggtgccaggagccaggatgcaaggatgacgcctccggaggccctggcctcactcccacctgggcgctaggagccatcccggggctccagccaggagccctgctgcccaggggcatggccaaacctttcttccgactccagaagtttctccgccgaacacagttcctgctgttcttcctcacggctgcctacctgatgaccggcagcctgctgctgctgcagcgggtccgcgtggctctcccacaggg

SEQ ID NO: 23142 - DNA, 523 bp, Homo sapiens
  misc_feature 1..523: note = ENST00000572764
  source 1..523: mol_type = unassigned DNA; mol_type = unassigned DNA
gtcaggacccatggctggccagtccatatccattgtcctcgtaggagactggacctcagagtggggcaggacttcccacagtcctgcagcaaaaggcagtggcagaaccagtcttggggcctcgcctcctggctgacccaggtgctaaatgatccctcactaggcactgggactgtcagctccctgaggaccaggagttgagttaaggggggtcagaccagcaccaggacccaaagacagtctaatttctgcgccaggagatgaggggcggtagagccctggaatggagatgtccttgacgcctgggcagaggctgcagctgcaggaccctgtggccactggagataagtaatggtgccatttgaacacctactggaaacggggcaggaacagtgagtgaccccaggcgagcacaggcaggtgccaggagccaggatgcaaggatgacgcctccggaggccctggcctcactcccacctgggcgctaggagccatcccggggctccagccaggagccctgctg

SEQ ID NO: 23143 - DNA, 5884 bp, Homo sapiens
  misc_feature 1..5884: note = ENST00000574946
  source 1..5884: mol_type = unassigned DNA; mol_type = unassigned DNA
atgaaactcccttttaggaagacggagtaagaggcaccaccacctgctcctgctgcctctgctgtcctcagcttctgggagcatcttagcagccagctccggatttctgcgccaggagatgaggggcggtagagccctggaatggagatgtccttgacgcctgggcagaggctgcagctgcaggaccctgtggccactggagataagtaatggtgccatttgaacacctactggaaacggggcaggaacagtgagtgaccccaggcgagcacaggcaggtgccaggagccaggatgcaaggatgacgcctccggaggccctggcctcactcccacctgggcgctaggagccatcccggggctccagccaggagccctgctgcccaggggcatggccaaacctttcttccgactccagaagtttctccgccgaacacagttcctgctgttcttcctcacggctgcctacctgatgaccggcagcctgctgctgctgcagcgggtccgcgtggctctcccacagggcccccgggcacccggccccctgcagaccttgccagtggccgccgtggcgctgggcgtgggcttgctggacagcagagccctgcacgaccctcgagtcagcccagagctgctgctgggtgtggacatgctgcagagccccctgacccggccccggcccggcccccgctggctccggagccgcaactcggagctgcgtcagttgcgtcgccgctggttccaccacttcatgagtgactcccagggaccgcccgccctgggccccgaggctgccaggcccgccatccacagccgaggcacctacattggatgcttcagtgacgatggccacgagaggactctgaaaggagctgtgttttatgacttgagaaagatgactgtctcccactgccaggatgcgtgtgctgagcggtcctatgtctacgccggcttggaggccggggcggagtgttactgcgggaaccggctgccagcggtgagcgtggggctggaagagtgtaaccatgagtgcaaaggcgagaagggctctgtgtgcggggctgtggaccggctctccgtgtaccgtgtggacgagctgcagccgggctccaggaagcggcggaccgccacctaccgcggatgcttccgactgccagagaacatcacacatgccttccccagctccctgatacaggccaatgtgaccgtggggacttgctcgggcttttgttcccagaaagagttccccttggccattctcaggggctgggaatgctactgtgcttaccctaccccccggttcaacctgcgggatgccatggacagctcagtatgtggccaggaccctgaggcacagaggctggcagaatactgtgaggtctaccagacacctgtgcaagacactcgttgtacagacaggaggttcctgcctaacaaatccaaagtgtttgtggctttgtcaagcttcccaggagccgggaacacatgggcacggcacctcattgagcatgccactggcttctatacagggagctactactttgatggaaccctctacaacaaagggttcaagggcgaaaaggaccactggcggagccgacgcaccatctgtgtcaaaacccacgagagtggcaggagggagattgagatgtttgattcagccatcctgctaatccggaacccatacaggtccctggtggcagaattcaacagaaaatgtgccgggcacctgggatatgcagctgaccgcaactggaagagcaaagagtggccggactttgtcaacagctacgcctcgtggtggtcctcgcacgtcctggactggctcaagtacgggaagcggctgctggtggtgcactacgaggagctgcggcgcagcctggtgcccacgttacgggagatggtggccttcctcaacgtgtctgtgagcgaggagcggctgctctgcgtggagaacaacaaggagggcagcttccggcggcgcggccggcgctcccacgaccctgagcccttcaccccggagatgaaagacttgatcaatggctacatccggacggtggaccaagccctgcgtgaccacaactggacggggctgcccagggagtatgtgcccagatgataggcctggcccacgccgccgcccccgctgagtgacgcaatcgcaccacggggctgcgctccccactctgatgctcaggcccgtggcctcactgggacgaacggtgggtggggggctcaccctggtgctgcctcccgcacaaggagacctggacacaacagacacacatcacaaggcgaacacaaatggacacacatacctggccacgaacccacacctcctcagacactcagacaccactccaggctcatagccccgtcttgatgcagagaagccacccacgtggggtgtgccaggcacccccagatacaaatgcagccacgcacagacgtaacacacaggtgccaggccgtgtgctcctggaggctggctggctgtctctctcacacagatacacgtgcgctccctgggatccgggaggccctgggcttcctgtgtgtagccctggcatagacttgctcgtcagggtgttcgactctgggatgctgggccgggcagacatttatgctctgagcagcaaggaccattgggatggaggtgggcacaaagactgctgcttccagggtgtgcggccctggccgtgtgtctgacatcccataaatgtgtgtgtggtgtgactacgggcaccacaaactccgcagccttgcctctcttttctctgtggctgggctggctgcaccatgggcagggttgaggactgccccccaccccgcccaagccaatgcagacactgacctcaagaccagccacaccaagtctgtgcactgcccaccacccccttcaacccctcctacaccatgctccggggcctggggcctccttgcctggcttcttcctccagctatcctcagggaagctggagattcaagtcatgccccagaagcaaggtgtaagcatgggggcgtggggaagagggcaggagctgaagttccaggggagcccaggacccctggggacctgtacactagcaggatgggtcttgggagttggcatggggagattgtaagggctgtatctccgcgattactggtactggtgctccacccataggggccctgttctctctggggtcccacactggggtcatgagagctagttagtactcagcctgacccctaggtctggtcctgccagcctgggatgggggtcaatgtatgctacacatcttgggctcacaagtgaggctgtggaggccaggaggttcaagtatggagggtaggagtgcaacccaggagcaacgctcaaggtggccgagatgcagggaggattgtggcgatccggttgcacactggcctctgtggaggtcagggaggtgggaaggtgggtgggcctgaactcaggcagcccttcagtggcttcttcaggcctaggataaccctggccaggccccatggtcctgctctgggtcagctgtcagggagacctcccttcagcctgagccaagctgcattgggaggagaaggcagggtgagggatctgggagagcaggacgttgagatatcctgaccctctgcttcctagcctgatgatggggaacccagagccacccgctatgagcacaggccgggggtggaaggcccagtagagctgcccttccccagatggaagcttcctccaaccttcagtttggccagtgggtgggtttgggcatctgtgcccctggtggcctccaaatccttcctgggattcccccaaacccacactgatgcgaagctgttcttgaccctcccatagcatcaactcagttcagctcaaagctagaaacaccaaggtctttgaaaatgtttattggctcaggatagcttcggcatccaatctgcgaaggcccctgatggagctatttcttcctagtatcaggagcaattgagacccctcaggagtttccacactgctgtggacgggatagccagggcagacctgcatcccagagcaagcctagatccttgaaagcaatgtcaggcgtggcagtggggaagccatggaggctgggaagggcaaagtgtggagagaggagtgaccgggactggagccagggtctggggagagcaacagcaccaggcttttcctggtagttggattggtacattcactgctgccaggtacccagagatgtcatctctctccaggtagagcatcaccagctcctgtggccttgtagatgactctgtacctcagtgaagagtgcaggcaagtagagtgatggggtcagtgtccatccagtttacgctgagtcagtccatacagcaagacacctggcacttggcaggtactcctggatgttgatgagcaaggaagagcaacggccctgtcagctggcagtggtcctcacagccttcatcccaggtctgcctacgtgggagatctcatcagaaacaggaacggggatctgtctgtgcttgcaggaaagtccatttgtttttctccaagttaggtctcatctacagctcttagcttctcagtaaagaggatactctcccaaccagccaaggaataaaagctgatctgtatgtagggcagaagtgtggcaaatgcatcaggaaccggttagaacagaacagagaaaccctgactgtctacagattccaactttaatagcaagcctgtggagttacacaaacctgtgttaaaacatgtaatttttatggatttcatctcccgttgtggatcaatttggaaaaaccaaaatatgtaattttaaaaaactaaaacacatcctggtagtcccagtgatgtgtaaatgagagagaagaatagacaggcttccaaaccctgggaagaaagctgcttaattatgtgaacatcttataatgaagtctcttgcagctaaaattagattttgagtgcatgaatctgtgataatgtttgcatatcagaatgcattctccccttaaaagtagcagtagccacttggttcttagggggccccaagaggagaggagaagtgctgaggttgatgttacgactgcaagaattcttgggacacaggtttgttttctgctgacttgctcggaaacccattggaggtatctgaaatgtgatgactccaaaggggttcatttcactatagggagaaattgattcgtctgacttcctatttatcaccactcaatattgggtgagttggtctgaacaaggtggggataaagtagagtggaaataatgtagagtcgtcagactgaaaggccaggttgtagtcccagctcttatctgccatcttggacaaagcttttcccatctccagtctcagtttcccatccataaaatgggggaagtggtaggtcttgctgattgcatccacattcattcctccatttcctttcccagcaaccccccatttctgtttgggaattcatatgatctgccagagcctctccaggggtggaatacatgtcctggactaagccaatgacaccttccatctttccagctatggtgactgggttaggtatgatcttgtgagttaagacaatgaagccagagggaatttcaagacttatgggaatgctgggtagaagctgttttaattcccctgttgaatgtgaaaaaggtagtagtattcctgggtctttatgatgaccaccttgggccttgggatcatgaccaggaatcacgtgaagctgacaccactgaagggagagttgagaggcagaaagagatcaagtccttggtgaaattgtttaagtacaggatcaagccttgcttgagattggccttacctctggactttttttgttatatgagctaataaattctgtttattgtttaa

SEQ ID NO: 23144 - DNA, 1573 bp, Homo sapiens
  misc_feature 1..1573: note = ENST00000573634
  source 1..1573: mol_type = unassigned DNA; mol_type = unassigned DNA
ttttaggaagacggagtaagaggcaccaccacctgctcctgctgcctctgctgtcctcagcttctgggagcatcttagcagccagctccgggtgaggacagggtccaccggtgcacatggcagagcagggcagatgctgtgacttggcggctttgggggaacagggtggggctcctccctgggaaaaatctttaggcacctacattggatgcttcagtgacgatggccacgagaggactctgaaaggagctgtgttttatgacttgagaaagatgactgtctcccactgccaggatgcgtgtgctgagcggtcctatgtctacgccggcttggaggccggggcggagtgttactgcgggaaccggctgccagcggtgagcgtggggctggaagagtgtaaccatgagtgcaaaggcgagaagggctctgtgtgcggggctgtggaccggctctccgtgtaccgtgtggacgagctgcagccgggctccaggaagcggcggaccgccacctaccgcggatgcttccgactgccagagaacatcacacatgccttccccagctccctgatacaggccaatgtgaccgtggggacttgctcgggcttttgttcccagaaagagttccccttggccattctcaggggctgggaatgctactgtgcttaccctaccccccggttcaacctgcgggatgccatggacagctcagtatgtggccaggaccctgaggcacagaggctggcagaatactgtgaggtctaccagacacctgtgcaagacactcgttgtacagacaggaggttcctgcctaacaaatccaaagtgtttgtggctttgtcaagcttcccaggagccgggaacacatgggcacggcacctcattgagcatgccactggcttctatacagggagctactactttgatggaaccctctacaacaaagggttcaagggcgaaaaggaccactggcggagccgacgcaccatctgtgtcaaaacccacgagagtggcaggagggagattgagatgtttgattcagccatcctgctaatccggaacccatacaggtccctggtggcagaattcaacagaaaatgtgccgggcacctgggatatgcagctgaccgcaactggaagagcaaagagtggccggactttgtcaacagctacgcctcgtggtggtcctcgcacgtcctggactggctcaagtacgggaagcggctgctggtggtgcactacgaggagctgcggcgcagcctggtgcccacgttacgggagatggtggccttcctcaacgtgtctgtgagcgaggagcggctgctctgcgtggagaacaacaaggagggcagcttccggcggcgcggccggcgctcccacgaccctgagcccttcaccccggagatgaaagacttgatcaatggctacatccggacggtggaccaagccctgcgtgaccacaactggacggggctgcccagggagtatgtgcccagatgataggcctggcccacgccgccgcccccgctgagtgacgcaatcgcaccacggggctgcgctccccactctgatgctca

SEQ ID NO: 23145 - DNA, 1059 bp, Homo sapiens
  misc_feature 1..1059: note = ENST00000576083
  source 1..1059: mol_type = unassigned DNA; mol_type = unassigned DNA
cgcgcccgcccgcccgccccgccgttcagcccggacgccagcagccccggggagccaggcggcggcgccctgtgcccgggcgcgtgggtccgcttgccgcgggcggccggagacgtgcgggcgccggggcttctgggctccgggcactgcggggggctgcgggctcggcgcccggggaaggcgggccatgggcgcgggtgcgggcgccccagccggccgcgatcgcgggatttctgcgccaggagatgaggggcggtagagccctggaatggagatgtccttgacgcctgggcagaggctgcagctgcaggaccctgtggccactggagataagtaatggtgccatttgaacacctactggaaacggggcaggaacagtgagtgaccccaggcgagcacaggcaggtgccaggagccaggatgcaaggatgacgcctccggaggccctggcctcactcccacctgggcgctaggagccatcccggggctccagccaggagccctgctgcccaggggcatggccaaacctttcttccgactccagaagtttctccgccgaacacagttcctgctgttcttcctcacggctgcctacctgatgaccggcagcctgctgctgctgcagcgggtccgcgtggctctcccacagggcccccgggcacccggccccctgcagaccttgccagtggccgccgtggcgctgggcgtgggcttgctggacagcagagccctgcacgaccctcgagtcagcccagagctgctgctgggtgtggacatgctgcagagccccctgacccggccccggcccggcccccgctggctccggagccgcaactcggagctgcgtcagttgcgtcgccgctggttccaccacttcatgagtgactcccagggaccgcccgccctgggccccgaggctgccaggcccgccatccacagccgaggcacctacattggatgcttcagtgacgatggccacgagaggactctgaaaggagctgtgttttatgacttgagaaagatgactgtctcccactgccaggatgcgtgtgctgagcg

SEQ ID NO: 23146 - DNA, 2129 bp, Homo sapiens
  misc_feature 1..2129: note = ENST00000574232
  source 1..2129: mol_type = unassigned DNA; mol_type = unassigned DNA
ggtcagcggagggtttgctccgtctcttggtgaacttgaacagaggcagaggcaaaagcaaaacatttctgcgccaggagatgaggggcggtagagccctggaatggagatgtccttgacgcctgggcagaggctgcagctgcaggaccctgtggccactggagataagtaatggtgccatttgaacacctactggaaacggggcaggaacagtgagtgaccccaggcgagcacaggcaggtgccaggagccaggatgcaaggatgacgcctccggaggccctggcctcactcccacctgggcgctaggagccatcccggggctccagccaggagccctgctgcccaggggcatggccaaacctttcttccgactccagaagtttctccgccgaacacagttcctgctgttcttcctcacggctgcctacctgatgaccggcagcctgctgctgctgcagcgggtccgcgtggctctcccacagggcccccgggcacccggccccctgcagaccttgccagtggccgccgtggcgctgggcgtgggcttgctggacagcagagccctgcacgaccctcgagtcagcccagagctgctgctgggtgtggacatgctgcagagccccctgacccggccccggcccggcccccgctggctccggagccgcaactcggagctgcgtcagttgcgtcgccgctggttccaccacttcatgagtgactcccagggaccgcccgccctgggccccgaggctgccaggcccgccatccacagccgaggcacctacattggatgcttcagtgacgatggccacgagaggactctgaaaggagctgtgttttatgacttgagaaagatgactgtctcccactgccaggatgcgtgtgctgagcggtcctatgtctacgccggcttggaggccggggcggagtgttactgcgggaaccggctgccagcggtgagcgtggggctggaagagtgtaaccatgagtgcaaaggcgagaagggctctgtgtgcggggctgtggaccggctctccgtgtaccgtgtggacgagctgcagccgggctccaggaagcggcggaccgccacctaccgcggatgcttccgactgccagagaacatcacacatgccttccccagctccctgatacaggccaatgtgaccgtggggacttgctcgggcttttgttcccagaaagagttccccttggccattctcaggggctgggaatgctactgtgcttaccctaccccccggttcaacctgcgggatgccatggacagctcagtatgtggccaggaccctgaggcacagaggctggcagaatactgtgaggtctaccagacacctgtgcaagacactcgttgtacagacaggaggttcctgcctaacaaatccaaagtgtttgtggctttgtcaagcttcccaggagccgggaacacatgggcacggcacctcattgagcatgccactggcttctatacagggagctactactttgatggaaccctctacaacaaagggttcaagggcgaaaaggaccactggcggagccgacgcaccatctgtgtcaaaacccacgagagtggcaggagggagattgagatgtttgattcagccatcctgctaatccggaacccatacaggtccctggtggcagaattcaacagaaaatgtgccgggcacctgggatatgcagctgaccgcaactggaagagcaaagagtggccggactttgtcaacagctacgcctcgtggtggtcctcgcacgtcctggactggctcaagtacgggaagcggctgctggtggtgcactacgaggagctgcggcgcagcctggtgcccacgttacgggagatggtggccttcctcaacgtgtctgtgagcgaggagcggctgctctgcgtggagaacaacaaggagggcagcttccggcggcgcggccggcgctcccacgaccctgagcccttcaccccggagatgaaagacttgatcaatggctacatccggacggtggaccaagccctgcgtgaccacaactggacggggctgcccagggagtatgtgcccagatgataggcctggcccacgccgccgcccccgctgagtgacgcaatcgcaccac

SEQ ID NO: 23147 - DNA, 677 bp, Homo sapiens
  misc_feature 1..677: note = ENST00000571973
  source 1..677: mol_type = unassigned DNA; mol_type = unassigned DNA
actcttgttaactccatgcgtctgaaagccctcagctccgttaagctgtgttcctggaccgcctgggggcctgtgcctatgcactgctccatctctcccatgtttcaggcttcatccatggctctggatttctgcgccaggagatgaggggcggtagagccctggaatggagatgtccttgacgcctgggcagaggctgcagctgcaggaccctgtggccactggagataagtaatggtgccatttgaacacctactggaaacggggcaggaacagtgagtgaccccaggcgagcacaggcaggtgccaggagccaggatgcaaggatgacgcctccggaggccctggcctcactcccacctgggcgctaggagccatcccggggctccagccaggagccctgctgcccaggggcatggccaaacctttcttccgactccagaagtttctccgccgaacacagttcctgctgttcttcctcacggctgcctacctgatgaccggcagcctgctgctgctgcagcgggtccgcgtggctctcccacagggcccccgggcacccggccccctgcagaccttgccagtggccgccgtggcgctgggcgtgggcttgctggacagcagagccctgcacgaccctcgagtcagcccagagctgctgctgggtgtggacatgc

SEQ ID NO: 23148 - DNA, 570 bp, Homo sapiens
  misc_feature 1..570: note = ENST00000576233
  source 1..570: mol_type = unassigned DNA; mol_type = unassigned DNA
ttttacagatggggaagctgaggcccagcaaggttaagcaacctacccagtgtcacacagctggccagtaacaaagctgggatttaaacctggctttgtccagtgctcctgcaacacagctggtccttggataaagcaagcacaggatttctgcgccaggagatgaggggcggtagagccctggaatggagatgtccttgacgcctgggcagaggctgcagctgcaggaccctgtggccactggagataagtaatggtgccatttgaacacctactggaaacggggcaggaacagtgagtgaccccaggcgagcacaggcaggtgccaggagccaggatgcaaggatgacgcctccggaggccctggcctcactcccacctgggcgctaggagccatcccggggctccagccaggagccctgctgcccaggggcatggccaaacctttcttccgactccagaagtttctccgccgaacacagttcctgctgttcttcctcacggctgcctacctgatgaccggcagcctgctgctgctgcagcgggtccgcgtggctctcccacagggcc

SEQ ID NO: 23149 - DNA, 2168 bp, Homo sapiens
  misc_feature 1..2168: note = ENST00000571494
  source 1..2168: mol_type = unassigned DNA; mol_type = unassigned DNA
ccggcagcctgctgctgctgcagcgggtccgcgtggctctcccacagggcccccgggcacccggccccctgcagaccttgccagtggccgccgtggcgctgggcgtgggcttgctggacagcagagccctgcacgaccctcgagtcagcccagagctgctgctgggtgtggacatgctgcagagccccctgacccggccccggcccggcccccgctggctccggagccgcaactcggagctgcgtcagttgcgtcgccgctggttccaccacttcatgagtgactcccagggaccgcccgccctgggccccgaggctgccaggcccgccatccacagccgaggtcctatgtctacgccggcttggaggccggggcggagtgttactgcgggaaccggctgccagcggtgagcgtggggctggaagagtgtaaccatgagtgcaaaggcgagaagggctctgtgtgcggggctgtggaccggctctccgtgtaccgtgtggacgagctgcagccgggctccaggaagcggcggaccgccacctaccgcggatgcttccgactgccagagaacatcacacatgccttccccagctccctgatacaggccaatgtgaccgtggggacttgctcgggcttttgttcccagaaagagttccccttggccattctcaggggctgggaatgctactgtgcttaccctaccccccggttcaacctgcgggatgccatggacagctcagtatgtggccaggaccctgaggcacagaggctggcagaatactgtgaggtctaccagacacctgtgcaagacactcgttgtacagacaggaggttcctgcctaacaaatccaaagtgtttgtggctttgtcaagcttcccaggagccgggaacacatgggcacggcacctcattgagcatgccactggcttctatacagggagctactactttgatggaaccctctacaacaaagggttcaagggcgaaaaggaccactggcggagccgacgcaccatctgtgtcaaaacccacgagagtggcaggagggagattgagatgtttgattcagccatcctgctaatccggaacccatacaggtccctggtggcagaattcaacagaaaatgtgccgggcacctgggatatgcagctgaccgcaactggaagagcaaagagtggccggactttgtcaacagctacgcctcgtggtggtcctcgcacgtcctggactggctcaagtacgggaagcggctgctggtggtgcactacgaggagctgcggcgcagcctggtgcccacgttacgggagatggtggccttcctcaacgtgtctgtgagcgaggagcggctgctctgcgtggagaacaacaaggagggcagcttccggcggcgcggccggcgctcccacgaccctgagcccttcaccccggagatgaaagacttgatcaatggctacatccggacggtggaccaagccctgcgtgaccacaactggacggggctgcccagggagtatgtgcccagatgataggcctggcccacgccgccgcccccgctgagtgacgcaatcgcaccacggggctgcgctccccactctgatgctcaggcccgtggcctcactgggacgaacggtgggtggggggctcaccctggtgctgcctcccgcacaaggagacctggacacaacagacacacatcacaaggcgaacacaaatggacacacatacctggccacgaacccacacctcctcagacactcagacaccactccaggctcatagccccgtcttgatgcagagaagccacccacgtggggtgtgccaggcacccccagatacaaatgcagccacgcacagacgtaacacacaggtgccaggccgtgtgctcctggaggctggctggctgtctctctcacacagatacacgtgcgctccctgggatccgggaggccctgggcttcctgtgtgtagccctggcatagacttgctcgtcagggtgttcgactctgggatgctgggccgggcagacatttatgctctgagcagcaaggaccattgggatggaggtgggcacaaagactgctgcttccagggtgtgcggccctggccgtgtgtctgacatcccataaatgtgtgtgtggtgtgactacgggcaccacaaactccgca

SEQ ID NO: 23150 - DNA, 494 bp, Homo sapiens
  misc_feature 1..494: note = ENST00000576947
  source 1..494: mol_type = unassigned DNA; mol_type = unassigned DNA
aagtgcaaattctcagattctcccggagttgcctagtcaggaactctggggtaggggccagcaggctttgtatttaacgctgtctccagctgaaaggaataaatccgcctcagagtgggtcccagtgtatccctcggaagttctttctttcctgaacattctcgcctctgtcggggagttagaaaagctgttcattctgcgtccagataaaagagctcgcctcctcttttatccccgtcgcacactgagacggggccagccaggcccgggctcgccctccacgccggtgagctccatcaaatggccagctggtcacagccatgcttccctttctgcaggcacctacattggatgcttcagtgacgatggccacgagaggactctgaaaggagctgtgttttatgacttgagaaagatgactgtctcccactgccaggatgcgtgtgctgagcggtcctatgtctacgccggcttggaggccggggcggagtgtt

SEQ ID NO: 23151 - DNA, 5819 bp, Homo sapiens
  misc_feature 1..5819: note = ENST00000317744
  source 1..5819: mol_type = unassigned DNA; mol_type = unassigned DNA
ggcgcgggtgcgggcgccccagccggccgcgatcgcgggatttctgcgccaggagatgaggggcggtagagccctggaatggagatgtccttgacgcctgggcagaggctgcagctgcaggaccctgtggccactggagataagtaatggtgccatttgaacacctactggaaacggggcaggaacagtgagtgaccccaggcgagcacaggcaggtgccaggagccaggatgcaaggatgacgcctccggaggccctggcctcactcccacctgggcgctaggagccatcccggggctccagccaggagccctgctgcccaggggcatggccaaacctttcttccgactccagaagtttctccgccgaacacagttcctgctgttcttcctcacggctgcctacctgatgaccggcagcctgctgctgctgcagcgggtccgcgtggctctcccacagggcccccgggcacccggccccctgcagaccttgccagtggccgccgtggcgctgggcgtgggcttgctggacagcagagccctgcacgaccctcgagtcagcccagagctgctgctgggtgtggacatgctgcagagccccctgacccggccccggcccggcccccgctggctccggagccgcaactcggagctgcgtcagttgcgtcgccgctggttccaccacttcatgagtgactcccagggaccgcccgccctgggccccgaggctgccaggcccgccatccacagccgaggcacctacattggatgcttcagtgacgatggccacgagaggactctgaaaggagctgtgttttatgacttgagaaagatgactgtctcccactgccaggatgcgtgtgctgagcggtcctatgtctacgccggcttggaggccggggcggagtgttactgcgggaaccggctgccagcggtgagcgtggggctggaagagtgtaaccatgagtgcaaaggcgagaagggctctgtgtgcggggctgtggaccggctctccgtgtaccgtgtggacgagctgcagccgggctccaggaagcggcggaccgccacctaccgcggatgcttccgactgccagagaacatcacacatgccttccccagctccctgatacaggccaatgtgaccgtggggacttgctcgggcttttgttcccagaaagagttccccttggccattctcaggggctgggaatgctactgtgcttaccctaccccccggttcaacctgcgggatgccatggacagctcagtatgtggccaggaccctgaggcacagaggctggcagaatactgtgaggtctaccagacacctgtgcaagacactcgttgtacagacaggaggttcctgcctaacaaatccaaagtgtttgtggctttgtcaagcttcccaggagccgggaacacatgggcacggcacctcattgagcatgccactggcttctatacagggagctactactttgatggaaccctctacaacaaagggttcaagggcgaaaaggaccactggcggagccgacgcaccatctgtgtcaaaacccacgagagtggcaggagggagattgagatgtttgattcagccatcctgctaatccggaacccatacaggtccctggtggcagaattcaacagaaaatgtgccgggcacctgggatatgcagctgaccgcaactggaagagcaaagagtggccggactttgtcaacagctacgcctcgtggtggtcctcgcacgtcctggactggctcaagtacgggaagcggctgctggtggtgcactacgaggagctgcggcgcagcctggtgcccacgttacgggagatggtggccttcctcaacgtgtctgtgagcgaggagcggctgctctgcgtggagaacaacaaggagggcagcttccggcggcgcggccggcgctcccacgaccctgagcccttcaccccggagatgaaagacttgatcaatggctacatccggacggtggaccaagccctgcgtgaccacaactggacggggctgcccagggagtatgtgcccagatgataggcctggcccacgccgccgcccccgctgagtgacgcaatcgcaccacggggctgcgctccccactctgatgctcaggcccgtggcctcactgggacgaacggtgggtggggggctcaccctggtgctgcctcccgcacaaggagacctggacacaacagacacacatcacaaggcgaacacaaatggacacacatacctggccacgaacccacacctcctcagacactcagacaccactccaggctcatagccccgtcttgatgcagagaagccacccacgtggggtgtgccaggcacccccagatacaaatgcagccacgcacagacgtaacacacaggtgccaggccgtgtgctcctggaggctggctggctgtctctctcacacagatacacgtgcgctccctgggatccgggaggccctgggcttcctgtgtgtagccctggcatagacttgctcgtcagggtgttcgactctgggatgctgggccgggcagacatttatgctctgagcagcaaggaccattgggatggaggtgggcacaaagactgctgcttccagggtgtgcggccctggccgtgtgtctgacatcccataaatgtgtgtgtggtgtgactacgggcaccacaaactccgcagccttgcctctcttttctctgtggctgggctggctgcaccatgggcagggttgaggactgccccccaccccgcccaagccaatgcagacactgacctcaagaccagccacaccaagtctgtgcactgcccaccacccccttcaacccctcctacaccatgctccggggcctggggcctccttgcctggcttcttcctccagctatcctcagggaagctggagattcaagtcatgccccagaagcaaggtgtaagcatgggggcgtggggaagagggcaggagctgaagttccaggggagcccaggacccctggggacctgtacactagcaggatgggtcttgggagttggcatggggagattgtaagggctgtatctccgcgattactggtactggtgctccacccataggggccctgttctctctggggtcccacactggggtcatgagagctagttagtactcagcctgacccctaggtctggtcctgccagcctgggatgggggtcaatgtatgctacacatcttgggctcacaagtgaggctgtggaggccaggaggttcaagtatggagggtaggagtgcaacccaggagcaacgctcaaggtggccgagatgcagggaggattgtggcgatccggttgcacactggcctctgtggaggtcagggaggtgggaaggtgggtgggcctgaactcaggcagcccttcagtggcttcttcaggcctaggataaccctggccaggccccatggtcctgctctgggtcagctgtcagggagacctcccttcagcctgagccaagctgcattgggaggagaaggcagggtgagggatctgggagagcaggacgttgagatatcctgaccctctgcttcctagcctgatgatggggaacccagagccacccgctatgagcacaggccgggggtggaaggcccagtagagctgcccttccccagatggaagcttcctccaaccttcagtttggccagtgggtgggtttgggcatctgtgcccctggtggcctccaaatccttcctgggattcccccaaacccacactgatgcgaagctgttcttgaccctcccatagcatcaactcagttcagctcaaagctagaaacaccaaggtctttgaaaatgtttattggctcaggatagcttcggcatccaatctgcgaaggcccctgatggagctatttcttcctagtatcaggagcaattgagacccctcaggagtttccacactgctgtggacgggatagccagggcagacctgcatcccagagcaagcctagatccttgaaagcaatgtcaggcgtggcagtggggaagccatggaggctgggaagggcaaagtgtggagagaggagtgaccgggactggagccagggtctggggagagcaacagcaccaggcttttcctggtagttggattggtacattcactgctgccaggtacccagagatgtcatctctctccaggtagagcatcaccagctcctgtggccttgtagatgactctgtacctcagtgaagagtgcaggcaagtagagtgatggggtcagtgtccatccagtttacgctgagtcagtccatacagcaagacacctggcacttggcaggtactcctggatgttgatgagcaaggaagagcaacggccctgtcagctggcagtggtcctcacagccttcatcccaggtctgcctacgtgggagatctcatcagaaacaggaacggggatctgtctgtgcttgcaggaaagtccatttgtttttctccaagttaggtctcatctacagctcttagcttctcagtaaagaggatactctcccaaccagccaaggaataaaagctgatctgtatgtagggcagaagtgtggcaaatgcatcaggaaccggttagaacagaacagagaaaccctgactgtctacagattccaactttaatagcaagcctgtggagttacacaaacctgtgttaaaacatgtaatttttatggatttcatctcccgttgtggatcaatttggaaaaaccaaaatatgtaattttaaaaaactaaaacacatcctggtagtcccagtgatgtgtaaatgagagagaagaatagacaggcttccaaaccctgggaagaaagctgcttaattatgtgaacatcttataatgaagtctcttgcagctaaaattagattttgagtgcatgaatctgtgataatgtttgcatatcagaatgcattctccccttaaaagtagcagtagccacttggttcttagggggccccaagaggagaggagaagtgctgaggttgatgttacgactgcaagaattcttgggacacaggtttgttttctgctgacttgctcggaaacccattggaggtatctgaaatgtgatgactccaaaggggttcatttcactatagggagaaattgattcgtctgacttcctatttatcaccactcaatattgggtgagttggtctgaacaaggtggggataaagtagagtggaaataatgtagagtcgtcagactgaaaggccaggttgtagtcccagctcttatctgccatcttggacaaagcttttcccatctccagtctcagtttcccatccataaaatgggggaagtggtaggtcttgctgattgcatccacattcattcctccatttcctttcccagcaaccccccatttctgtttgggaattcatatgatctgccagagcctctccaggggtggaatacatgtcctggactaagccaatgacaccttccatctttccagctatggtgactgggttaggtatgatcttgtgagttaagacaatgaagccagagggaatttcaagacttatgggaatgctgggtagaagctgttttaattcccctgttgaatgtgaaaaaggtagtagtattcctgggtctttatgatgaccaccttgggccttgggatcatgaccaggaatcacgtgaagctgacaccactgaagggagagttgagaggcagaaagagatcaagtccttggtgaaattgtttaagtacaggatcaagccttgcttgagattggccttacctctggactttttttgttatatgagctaataaattctgtttattgttt

SEQ ID NO: 23152 - DNA, 2665 bp, Homo sapiens
  misc_feature 1..2665: note = ENST00000539421
  source 1..2665: mol_type = unassigned DNA; mol_type = unassigned DNA
ggtcagcggagggtttgctccgtctcttggtgaacttgaacagaggcagaggcaaaagcaaaacatttctgcgccaggagatgaggggcggtagagccctggaatggagatgtccttgacgcctgggcagaggctgcagctgcaggaccctgtggccactggagataagtaatggtgccatttgaacacctactggaaacggggcaggaacagtgagtgaccccaggcgagcacaggcaggtgccaggagccaggatgcaaggatgacgcctccggaggccctggcctcactcccacctgggcgctaggagccatcccggggctccagccaggagccctgctgcccaggggcatggccaaacctttcttccgactccagaagtttctccgccgaacacagttcctgctgttcttcctcacggctgcctacctgatgaccggcagcctgctgctgctgcagcgggtccgcgtggctctcccacagggcccccgggcacccggccccctgcagaccttgccagtggccgccgtggcgctgggcgtgggcttgctggacagcagagccctgcacgaccctcgagtcagcccagagctgctgctgggtgtggacatgctgcagagccccctgacccggccccggcccggcccccgctggctccggagccgcaactcggagctgcgtcagttgcgtcgccgctggttccaccacttcatgagtgactcccagggaccgcccgccctgggccccgaggctgccaggcccgccatccacagccgaggcacctacattggatgcttcagtgacgatggccacgagaggactctgaaaggagctgtgttttatgacttgagaaagatgactgtctcccactgccaggatgcgtgtgctgagcggtcctatgtctacgccggcttggaggccggggcggagtgttactgcgggaaccggctgccagcggtgagcgtggggctggaagagtgtaaccatgagtgcaaaggcgagaagggctctgtgtgcggggctgtggaccggctctccgtgtaccgtgtggacgagctgcagccgggctccaggaagcggcggaccgccacctaccgcggatgcttccgactgccagagaacatcacacatgccttccccagctccctgatacaggccaatgtgaccgtggggacttgctcgggcttttgttcccagaaagagttccccttggccattctcaggggctgggaatgctactgtgcttaccctaccccccggttcaacctgcgggatgccatggacagctcagtatgtggccaggaccctgaggcacagaggctggcagaatactgtgaggtctaccagacacctgtgcaagacactcgttgtacagacaggaggttcctgcctaacaaatccaaagtgtttgtggctttgtcaagcttcccaggagccgggaacacatgggcacggcacctcattgagcatgccactggcttctatacagggagctactactttgatggaaccctctacaacaaagggttcaagggcgaaaaggaccactggcggagccgacgcaccatctgtgtcaaaacccacgagagtggcaggagggagattgagatgtttgattcagccatcctgctaatccggaacccatacaggtccctggtggcagaattcaacagaaaatgtgccgggcacctgggatatgcagctgaccgcaactggaagagcaaagagtggccggactttgtcaacagctacgcctcgtggtggtcctcgcacgtcctggactggctcaagtacgggaagcggctgctggtggtgcactacgaggagctgcggcgcagcctggtgcccacgttacgggagatggtggccttcctcaacgtgtctgtgagcgaggagcggctgctctgcgtggagaacaacaaggagggcagcttccggcggcgcggccggcgctcccacgaccctgagcccttcaccccggagatgaaagacttgatcaatggctacatccggacggtggaccaagccctgcgtgaccacaactggacggggctgcccagggagtatgtgcccagatgataggcctggcccacgccgccgcccccgctgagtgacgcaatcgcaccacggggctgcgctccccactctgatgctcaggcccgcacaaggagacctggacacaacagacacacatcacaaggcgaacacaaatggacacacatacctggccacgaacccacacctcctcagacactcagacaccactccaggctcatagccccgtcttgatgcagagaagccacccacgtggggtgtgccaggcacccccagatacaaatgcagccacgcacagacgtaacacacaggtgccaggccgtgtgctcctggaggctggctggctgtctctctcacacagatacacgtgcgctccctgggatccgggaggccctgggcttcctgtgtgtagccctggcatagacttgctcgtcagggtgttcgactctgggatgctgggccgggcagacatttatgctctgagcagcaaggaccattgggatggaggtgggcacaaagactgctgcttccagggtgtgcggccctggccgtgtgtctgacatcccataaatgtgtgtgtggtgtgactacgggcaccacaaactccgc

SEQ ID NO: 23153 - DNA, 4481 bp, Homo sapiens
  misc_feature 1..4481: note = ENST00000547525
  source 1..4481: mol_type = unassigned DNA; mol_type = unassigned DNA
atccccggggcgggtgcccgcgcggggcctcgccgcggctcggggcacccgcagtgccgcccgcccgagcgccaggctcacaggagcccggctttcacttcctctcgcttccgcccgcctccctggctcgccggctggcgtcgccaccgcctcctcgtccccggccaccgctgtcgccgctgctgcaattcaaggcgcacactatcccactttcccgctggaggcgcagaggatgccccttgagccagacctggagaaatagccccagggcccggcaggaggagccttggtggcgagaaaggaaatccaggctcccctttccttaaagccactgcagcagctgggaaggcgcccacagagcgggcgcgccaagcgggacgcgggagtcgcagagagggaccccgggcgcctgctgagctcagctggcagagtttgcaagtggcggagacccttcaggtggcatccctgagtcctgatgcctgactggatggaggcccaccagcttctgttcccatgaggtagaaaggccaagcttggtcttcagctggggaagaggccagaaacaaggcccccagtgaaataacccagatccattggcctgaggagcagagaaagggcaagaagtgaactgcagctgctggtaaccctcagaaaccttctccaagtgctattctcacagttctttaggaacactctgaagtgaagaacaatatgtaggaaaatgggaccaacttatgtgtgttctgagcctcaaaacccccttgttggcccaaagaagctcaccttcagtttgggagggctggtaagctccatcctttctcatggcctcagccaagcattgaacttgccctccccttctggccttggtgatcactttttcaggaagagtgagactgaggacccccaagtgttccatccctaaggaaagcttgggaaaccaagccccttccatcctctcccaagcaccccagccaagccccagagagccagtccggaatgatcccactatggccaagctctggttcaaattccagcggtacttccgccggaaacctgtgcgcttctttaccttcctggcactctacctgactgctgggagccttgtcttccttcactctggctttgtgggccagcccgctgtctcggggaaccaggcgaaccccgctgctgcaggaggcccagctgagggtgctgagctgtccttcttgggtgacatgcatctgggcagaggtttccgggacacaggtgaagcctcaagcattgctcgcaggtacggaccctggttcaagggcaaggatgggaatgagagagccaagcttggcgactacggtggagcctggagccgagccctcaaggggagggttgtccgggagaaggaggaagagcgagccaagtacatcggctgctacctggatgacacccagagtcgggcccttcgaggagtgtccttttttgactacaaaaagatgaccatcttccgttgccaggacaactgtgctgaacggggttacctgtatggcgggctggagttcggcgccgagtgctactgcggccacaagatccaggcgacgaacgtgagcgaggcagagtgcgacatggagtgcaagggcgagcgaggcagcgtgtgcggcggcgccaaccgcctctctgtctaccggctgcagctggcccaggagtcggcccgcaggtatggaagtgcagtgttccggggctgcttccgcaggcccgacaacctttccctggccttacccgtgacagctgccatgctgaacatgtctgtggacaaatgcgtggacttctgcactgagaaggagtacccgctggcagctcttgcaggcaccgcctgccactgtgggtttcccaccacccgattcccgctccatgacagagaggatgagcagctctgtgcccagaagtgcagcgcggaggagtttgagagctgcgggactcctagttacttcattgtgtaccagacacaagtccaagacaaccgttgcatggacagaaggttcctgccaggcaagtccaagcagctcattgctttggccagcttcccaggtgctggcaacacgtgggctcgccacctcattgaattggccacaggcttctacactggcagctactacttcgatggctccctctacaacaaagggtttaaaggtgagcgggaccactggcgcagcggacggaccatctgcatcaagacgcacgaaagcggccagaaagagatcgaggccttcgacgccgccatcctgctcatccgcaacccctacaaagccctcatggctgagttcaaccgcaagtacggcggccacataggctttgctgcgcatgcccactggaagggcaaagagtggccagagttcgtgaggaactatgccccgtggtgggccactcacacactggactggctcaagtttggcaagaaggtgctggtggtgcactttgaggacctgaagcaggacctctttgtccagctgggccggatggtcagcctgctgggcgtggctgtcagggaggaccggctgctctgtgtggagagccagaaggatggcaacttcaagcgctcagggctccggaagctcgagtatgacccctatactgcggacatgcagaagaccatctctgcctacatcaagatggtggatgcagccctcaaagggcggaacctaacgggtgtccccgatgactactacccaagatgatgcgtccacacagggggagggtagactgggagtcctgaccacgcaggccctggggactcaagacccctggttacccccactcatctgtcctctctttggtctggggacaatccccttggctgctctttgccttcaatgagtttcctgcatgacagaggaggctcaagggaagagattgcccaggcactaccactctgctcacatgttccccccttggcaatgtggggcatcttgtttagggggttctagttacatggactcttttctgtctcctgggtccctgcccccaccactctgggttccatttgtgggagggagggctcatccacatcatggagacttgctggatgccccatggcaattgtcaaggctcttgatgcaagagcccagggggctattgtaaaaacttggccccagatgcttgtcccttctgggctgagatttcgcagcccccttctcatctccacccaagaagtgctggcaccgatgtttaactcaggccaccttctgttctaaagaaagattgctgggaagtttctccgtggccttaggtttctgacatcctggatagtgtggggaggtaatggtgctcacagtaggttaattggagacaccatgtggggccattggtgttatgagccccccaggccacactgcttctcagaaatgagctgcttgcctttccacctccagggcatgaaccctgcccctttctatccatgctgtgtccaggaggtgaccttgagatcctgataccaccttcaaggaacctcaggcaccaacagtgagcccacgaggatggtcacatgccatgtgcagaatttgacttaagagagagccccagtgacacatctctccatggtgggctccagtcagtcttacactgcccttctgacccctacaaatgggtcctttgctatccaggtgagacagcaagagtgttcttaatcagatggaaccacacccaaaatggacccccactaccttcccagaccatatatctccccttgatcatagtccaacagggccagcttcccttgggggccctttaaggaatggggtgaatgaaattgtgtcatttctatacaaacactgctctcttgatgctgaaatgccaaaccgaaggatttctgaggacctaaatcacggagcatcaatcttacaaagtgttggtccagagtcccatctcttccccaaccctggataccagtagcttcccacccagtccaaacctgcaccatccatcattatgtagatgaaaaagccataggtcatagcctctttgctattctattggagtagcctccctaggcagtccctctgaagccttggagtgcaggtaaatgctcattcccaagtagcaaagagaccatggagaaggtgcgtgtaaagagatatatttttgtaagaggaatatgattaatacattccgccccttggaacctggccatgcaaagcaagggcacagggattagacctgtggcacacttccccaattccctcatctgtaggatttgggctgccccaggcccacccagggggctctgaatgtattttgtaccgtgtttctttcccccaggagaatttttagtcttctttcatgaagcagtggaggggttggcctcccttctactgggaggttgactctctctgggagactcttggtccaagacctgggtcagttctttgctggtggtcccctctgaccacaagcttctgcctgaagattcctcaggtcaacaccatcattaaatgcgagttttgttgatgattcta

SEQ ID NO: 23154 - DNA, 554 bp, Homo sapiens
  misc_feature 1..554: note = ENST00000552195
  source 1..554: mol_type = unassigned DNA; mol_type = unassigned DNA
tccctggctcgccggctggcgtcgccaccgcctcctcgtccccggccaccgctgtcgccgctgctgcaattcaaggcgcacactatcccactttcccgctggaggcgcagaggatgccccttgagccagacctggagaaatagccccagggcccggcaggaggagccttggtggcgagaaaggaaatccaggctcccctttccttaaagccactgcagcagctgggaaggcgcccacagagcgggcgcgccaagcgggacgcgggagtcgcagagagggaccccgggcgcctgctgagctcagctggcagagtttgcaagtggcggagacccttcagtttatagtctactgaggtgattaaacagctggattaagagtttccatcccggagtcaaacagactgaaatcaaatccccatttcacctctaaccagctgtgtgaccttgggcaagtgacttcccttctctgggcttcagtgtacctgcttgtaaaataaaggtggcatccctgagtcctgatgcctgactggatggaggcccaccagcttctgttcc

SEQ ID NO: 23155 - DNA, 766 bp, Homo sapiens
  misc_feature 1..766: note = ENST00000550529
  source 1..766: mol_type = unassigned DNA; mol_type = unassigned DNA
ggctggcgtcgccaccgcctcctcgtccccggccaccgctgtcgccgctgctgcaattcaaggcgcacactatcccactttcccgctggaggcgcagaggatgccccttgagccagacctggagaaatagccccagggcccggcaggaggagccttggtggcgagaaaggaaatccaggctcccctttccttaaagccactgcagcagctgggaaggcgcccacagagcgggcgcgccaagcgggacgcgggagtcgcagagagggaccccgggcgcctgctgagctcagctggcagagtttgcaagtggcggagacccttcagatgttcgcttgtgtgttctccactgcccaaacccaggtggttattctgcaacagctacaacttgagtaagaccaaaacacaactcaagtggactttctaaaaagagaataatttattttggctcccagacatcaaaattcgcaagggattgcttcaggtggcatccctgagtcctgatgcctgactggatggaggcccaccagcttctgttcccatgaggtagaaaggccaagcttggtcttcagctggggaagaggccagaaacaaggcccccagtgaaataacccagatccattggcctgaggagcagagaaagggcaagaagtgaactgcagctgctggtaaccctcagaaaccttctccaagtgctattctcacagttctttaggaacactctgaagtgaagaacaatatgtaggaaaatgggaccaacttatgtgtg

SEQ ID NO: 23156 - DNA, 552 bp, Homo sapiens
  misc_feature 1..552: note = ENST00000551106
  source 1..552: mol_type = unassigned DNA; mol_type = unassigned DNA
acactatcccactttcccgctggaggcgcagaggatgccccttgagccagacctggagaaatagccccagggcccggcaggaggagccttggtggcgagaaaggaaatccaggctcccctttccttaaagccactgcagcagctgggaaggcgcccacagagcgggcgcgccaagcgggacgcgggagtcgcagagagggaccccgggcgcctgctgagctcagctggcagagtttgcaagtggcggagacccttcaggttccgcctcccatgccccaggcactcttctcaggacatcacgtacactggctcatgtgatgttctccacaaccctaagaggtggcatccctgagtcctgatgcctgactggatggaggcccaccagcttctgttcccatgaggtagaaaggccaagcttggtcttcagctggggaagaggccagaaacaaggcccccagtgaaataacccagatccattggcctgaggagcagagaaagggcaagaagtgaactgcagctgctggtaaccctcagaaaccttctccaagtgct

SEQ ID NO: 23157 - DNA, 569 bp, Homo sapiens
  misc_feature 1..569: note = ENST00000551638
  source 1..569: mol_type = unassigned DNA; mol_type = unassigned DNA
agcagctgggaaggcgcccacagagcgggcgcgccaagcgggacgcgggagtcgcagagagggaccccgggcgcctgctgagctcagctggcagagtttgcaagtggcggagacccttcagccaagtacatcggctgctacctggatgacacccagagtcgggcccttcgaggagtgtccttttttgactacaaaaagatgaccatcttccgttgccaggacaactgtgctgaacggggttacctgtatggcgggctggagttcggcgccgagtgctactgcggccacaagatccaggcgacgaacgtgagcgaggcagagtgcgacatggagtgcaagggcgagcgaggcagcgtgtgcggcggcgccaaccgcctctctgtctaccggctgcagctggcccaggagtcggcccgcaggtatggaagtgcagtgttccggggctgcttccgcaggcccgacaacctttccctggccttacccgtgacagctgccatgctgaacatgtctgtggacaaatgcgtggacttctgcactgagaaggagtacccgctggcagctcttgcagg

SEQ ID NO: 23158 - DNA, 535 bp, Homo sapiens
  misc_feature 1..535: note = ENST00000546401
  source 1..535: mol_type = unassigned DNA; mol_type = unassigned DNA
agtccccgccctctctctgctttctcataaaatctctgctggaccagccactcctagtggggagcccagggtggtctgggagtgctgcatgcacccagctgctgtatcaccaggacatcaggaggtggaggtggcatccctgagtcctgatgcctgactggatggaggcccaccagcttctgttcccatgaggtagaaaggccaagcttggtcttcagctggggaagaggccagaaacaaggcccccagtgaaataacccagatccattggcctgaggagcagagaaagggcaagaagtgaactgcagctgctggtaaccctcagaaaccttctccaagtgctattctcacagttctttaggaacactctgaagtgaagaacaatatgtaggaaaatgggaccaacttatgtgtgttctgagcctcaaaacccccttgttggcccaaagaagctcaccttcagtttgggagggctggtaagctccatcctttctcatggcctcagccaagcattgaacttgccctccccttctgg

SEQ ID NO: 23159 - DNA, 4710 bp, Homo sapiens
  misc_feature 1..4710: note = ENST00000332082
  source 1..4710: mol_type = unassigned DNA; mol_type = unassigned DNA
tttctcataaaatctctgctggaccagccactcctagtggggagcccagggtggtctgggagtgctgcatgcacccagctgctgtatcaccaggacatcaggaggtggagatgttcgcttgtgtgttctccactgcccaaacccaggtggttattctgcaacagctacaacttgagtaagaccaaaacacaactcaagtggactttctaaaaagagaataatttattttggctcccagacatcaaaattcgcaagggattgcttcaggtggcatccctgagtcctgatgcctgactggatggaggcccaccagcttctgttcccatgaggtagaaaggccaagcttggtcttcagctggggaagaggccagaaacaaggcccccagtgaaataacccagatccattggcctgaggagcagagaaagggcaagaagtgaactgcagctgctggtaaccctcagaaaccttctccaagtgctattctcacagttctttaggaacactctgaagtgaagaacaatatgtaggaaaatgggaccaacttatgtgtgttctgagcctcaaaacccccttgttggcccaaagaagctcaccttcagtttgggagggctggtaagctccatcctttctcatggcctcagccaagcattgaacttgccctccccttctggccttggtgatcactttttcaggaagagtgagactgaggacccccaagtgttccatccctaaggaaagcttgggaaaccaagccccttccatcctctcccaagcaccccagccaagccccagagagccagtccggaatgatcccactatggccaagctctggttcaaattccagcggtacttccgccggaaacctgtgcgcttctttaccttcctggcactctacctgactgctgggagccttgtcttccttcactctggctttgtgggccagcccgctgtctcggggaaccaggcgaaccccgctgctgcaggaggcccagctgagggtgctgagctgtccttcttgggtgacatgcatctgggcagaggtttccgggacacaggtgaagcctcaagcattgctcgcaggtacggaccctggttcaagggcaaggatgggaatgagagagccaagcttggcgactacggtggagcctggagccgagccctcaaggggagggttgtccgggagaaggaggaagagcgagccaagtacatcggctgctacctggatgacacccagagtcgggcccttcgaggagtgtccttttttgactacaaaaagatgaccatcttccgttgccaggacaactgtgctgaacggggttacctgtatggcgggctggagttcggcgccgagtgctactgcggccacaagatccaggcgacgaacgtgagcgaggcagagtgcgacatggagtgcaagggcgagcgaggcagcgtgtgcggcggcgccaaccgcctctctgtctaccggctgcagctggcccaggagtcggcccgcaggtatggaagtgcagtgttccggggctgcttccgcaggcccgacaacctttccctggccttacccgtgacagctgccatgctgaacatgtctgtggacaaatgcgtggacttctgcactgagaaggagtacccgctggcagctcttgcaggcaccgcctgccactgtgggtttcccaccacccgattcccgctccatgacagagaggatgagcagctctgtgcccagaagtgcagcgcggaggagtttgagagctgcgggactcctagttacttcattgtgtaccagacacaagtccaagacaaccgttgcatggacagaaggttcctgccaggcaagtccaagcagctcattgctttggccagcttcccaggtgctggcaacacgtgggctcgccacctcattgaattggccacaggcttctacactggcagctactacttcgatggctccctctacaacaaagggtttaaaggtgagcgggaccactggcgcagcggacggaccatctgcatcaagacgcacgaaagcggccagaaagagatcgaggccttcgacgccgccatcctgctcatccgcaacccctacaaagccctcatggctgagttcaaccgcaagtacggcggccacataggctttgctgcgcatgcccactggaagggcaaagagtggccagagttcgtgaggaactatgccccgtggtgggccactcacacactggactggctcaagtttggcaagaaggtgctggtggtgcactttgaggacctgaagcaggacctctttgtccagctgggccggatggtcagcctgctgggcgtggctgtcagggaggaccggctgctctgtgtggagagccagaaggatggcaacttcaagcgctcagggctccggaagctcgagtatgacccctatactgcggacatgcagaagaccatctctgcctacatcaagatggtggatgcagccctcaaagggcggaacctaacgggtgtccccgatgactactacccaagatgatgcgtccacacagggggagggtagactgggagtcctgaccacgcaggccctggggactcaagacccctggttacccccactcatctgtcctctctttggtctggggacaatccccttggctgctctttgccttcaatgagtttcctgcatgacagaggaggctcaagggaagagattgcccaggcactaccactctgctcacatgttccccccttggcaatgtggggcatcttgtttagggggttctagttacatggactcttttctgtctcctgggtccctgcccccaccactctgggttccatttgtgggagggagggctcatccacatcatggagacttgctggatgccccatggcaattgtcaaggctcttgatgcaagagcccagggggctattgtaaaaacttggccccagatgcttgtcccttctgggctgagatttcgcagcccccttctcatctccacccaagaagtgctggcaccgatgtttaactcaggccaccttctgttctaaagaaagattgctgggaagtttctccgtggccttaggtttctgacatcctggatagtgtggggaggtaatggtgctcacagtaggttaattggagacaccatgtggggccattggtgttatgagccccccaggccacactgcttctcagaaatgagctgcttgcctttccacctccagggcatgaaccctgcccctttctatccatgctgtgtccaggaggtgaccttgagatcctgataccaccttcaaggaacctcaggcaccaacagtgagcccacgaggatggtcacatgccatgtgcagaatttgacttaagagagagccccagtgacacatctctccatggtgggctccagtcagtcttacactgcccttctgacccctacaaatgggtcctttgctatccaggtgagacagcaagagtgttcttaatcagatggaaccacacccaaaatggacccccactaccttcccagaccatatatctccccttgatcatagtccaacagggccagcttcccttgggggccctttaaggaatggggtgaatgaaattgtgtcatttctatacaaacactgctctcttgatgctgaaatgccaaaccgaaggatttctgaggacctaaatcacggagcatcaatcttacaaagtgttggtccagagtcccatctcttccccaaccctggataccagtagcttcccacccagtccaaacctgcaccatccatcattatgtagatgaaaaagccataggtcatagcctctttgctattctattggagtagcctccctaggcagtccctctgaagccttggagtgcaggtaaatgctcattcccaagtagcaaagagaccatggagaaggtgcgtgtaaagagatatatttttgtaagaggaatatgattaatacattccgccccttggaacctggccatgcaaagcaagggcacagggattagacctgtggcacacttccccaattccctcatctgtaggatttgggctgccccaggcccacccagggggctctgaatgtattttgtaccgtgtttctttcccccaggagaatttttagtcttctttcatgaagcagtggaggggttggcctcccttctactgggaggttgactctctctgggagactcttggtccaagacctgggtcagttctttgctggtggtcccctctgaccacaagcttctgcctgaagattcctcaggtcaacaccatcattaaatgcgagttttgttgatgattctaccatgtggtagagtgttgtgtaagacaggttcacaaatgggatgttttcctagtgtgtgtgtgtgtgtgtgtgtgtgtgtatgagagagagagagagagacaacagagacagagagaggcagagaggcatagagagacagagagagagacaagaaacagagatagacagaaaatgttcggggtggcaggcgggttggtgtataactgctttgtgcctgtgtgactctggcatagctgctcagggagaattacgtgcctctgtgtgtaaaattgcctttgtgttctcctgcctttctatgttttgaaactgtatcccacaagttgccggtatgaccatcttatttgtaatgagtctgtgcaggtccttgtgtatggaattgcacccgtgtaaaggaggaaatggtcagtgtgcatgaaa

SEQ ID NO: 23160 - DNA, 565 bp, Homo sapiens
  misc_feature 1..565: note = ENST00000551057
  source 1..565: mol_type = unassigned DNA; mol_type = unassigned DNA
actcctagtggggagcccagggtggtctgggagtgctgcatgcacccagctgctgtatcaccaggacatcaggaggtggagatgttcgcttgtgtgttctccactgcccaaacccaggtggttattctgcaacagctacaacttgagtaagaccaaaacacaactcaagtggactttctaaaaagagaataatttattttggctcccagacatcaaaattcgcaagggattgcttcagtttatagtctactgaggtgattaaacagctggattaagagtttccatcccggagtcaaacagactgaaatcaaatccccatttcacctctaaccagctgtgtgaccttgggcaagtgacttcccttctctgggcttcagtgtacctgcttgtaaaataaaggtggcatccctgagtcctgatgcctgactggatggaggcccaccagcttctgttcccatgaggtagaaaggccaagcttggtcttcagctggggaagaggccagaaacaaggcccccagtgaaataacccagatccattggcctgaggagcagagaaagggcaaga

SEQ ID NO: 23161 - DNA, 543 bp, Homo sapiens
  misc_feature 1..543: note = ENST00000551734
  source 1..543: mol_type = unassigned DNA; mol_type = unassigned DNA
ctcctagtggggagcccagggtggtctgggagtgctgcatgcacccagctgctgtatcaccaggacatcaggaggtggagtttatagtctactgaggtgattaaacagctggattaagagtttccatcccggagtcaaacagactgaaatcaaatccccatttcacctctaaccagctgtgtgaccttgggcaagtgacttcccttctctgggcttcagtgtacctgcttgtaaaataaaggtggcatccctgagtcctgatgcctgactggatggaggcccaccagcttctgttcccatgaggtagaaaggccaagcttggtcttcagctggggaagaggccagaaacaaggcccccagtgaaataacccagatccattggcctgaggagcagagaaagggcaagaagtgaactgcagctgctggtaaccctcagaaaccttctccaagtgctattctcacagttctttaggaacactctgaagtgaagaacaatatgtaggaaaatgggaccaacttatgtgtgttctgagcctcaaaacc

SEQ ID NO: 23162 - DNA, 454 bp, Homo sapiens
  misc_feature 1..454: note = ENST00000546811
  source 1..454: mol_type = unassigned DNA; mol_type = unassigned DNA
agagttattccagctgaggagcaagggagctggggcatttatacaccaactcccatcagtcatatttgcagctgcttccaaatgttaatattctagcatgtcttgcctgccaaccacacaagcacaaaaagcattcaaggtgctggagaaacccctcagacaaccagatgaacattcagaatttaactctgtgggtggggcacatatggcatctgttacagatctaccaaactgaccaaaaaggaaaggactgacaacattaagtgttggtgtggatttggagcagcaggaatgctcaaactgtactggggaagttgtgactacagcaaccttggaaaaaaactggcatcttttaggataatcataagatgctcatacaaaaacaaaaacaaacagacaaaaactagcgctttcactcctaggtggcatccctgagtcctgatgcctgactgga

SEQ ID NO: 23163 - DNA, 3534 bp, Homo sapiens
  misc_feature 1..3534: note = ENST00000549903
  source 1..3534: mol_type = unassigned DNA; mol_type = unassigned DNA
atggccaagctctggttcaaattccagcggtacttccgccggaaacctgtgcgcttctttaccttcctggcactctacctgactgctgggagccttgtcttccttcactctggctttgtgggccagcccgctgtctcggggaaccaggcgaaccccgctgctgcaggaggcccagctgagggtgctgagctgtccttcttgggtgacatgcatctgggcagaggtttccgggacacaggtgaagcctcaagcattgctcgcaggtacggaccctggttcaagggcaaggatgggaatgagagagccaagcttggcgactacggtggagcctggagccgagccctcaaggggagggttgtccgggagaaggaggaagagcgagccaagtacatcggctgctacctggatgacacccagagtcgggcccttcgaggagtgtccttttttgactacaaaaagatgaccatcttccgttgccaggacaactgtgctgaacggggttacctgtatggcgggctggagttcggcgccgagtgctactgcggccacaagatccaggcgacgaacgtgagcgaggcagagtgcgacatggagtgcaagggcgagcgaggcagcgtgtgcggcggcgccaaccgcctctctgtctaccggctgcagctggcccaggagtcggcccgcaggtatggaagtgcagtgttccggggctgcttccgcaggcccgacaacctttccctggccttacccgtgacagctgccatgctgaacatgtctgtggacaaatgcgtggacttctgcactgagaaggagtacccgctggcagctcttgcaggcaccgcctgccactgtgggtttcccaccacccgattcccgctccatgacagagaggatgagcagctctgtgcccagaagtgcagcgcggaggagtttgagagctgcgggactcctagttacttcattgtgtaccagacacaagtccaagacaaccgttgcatggacagaaggttcctgccaggcaagtccaagcagctcattgctttggccagcttcccaggtgctggcaacacgtgggctcgccacctcattgaattggccacaggcttctacactggcagctactacttcgatggctccctctacaacaaagggtttaaaggtgagcgggaccactggcgcagcggacggaccatctgcatcaagacgcacgaaagcggccagaaagagatcgaggccttcgacgccgccatcctgctcatccgcaacccctacaaagccctcatggctgagttcaaccgcaagtacggcggccacataggctttgctgcgcatgcccactggaagggcaaaggagccgtaccaggatctttgcaaatcttatttcgctcgatttgcacagcatctgtaggagagtggccagagttcgtgaggaactatgccccgtggtgggccactcacacactggactggctcaagtttggcaagaaggtgctggtggtgcactttgaggacctgaagcaggacctctttgtccagctgggccggatggtcagcctgctgggcgtggctgtcagggaggaccggctgctctgtgtggagagccagaaggatggcaacttcaagcgctcagggctccggaagctcgagtatgacccctatactgcggacatgcagaagaccatctctgcctacatcaagatggtggatgcagccctcaaagggcggaacctaacgggtgtccccgatgactactacccaagatgatgcgtccacacagggggagggtagactgggagtcctgaccacgcaggccctggggactcaagacccctggttacccccactcatctgtcctctctttggtctggggacaatccccttggctgctctttgccttcaatgagtttcctgcatgacagaggaggctcaagggaagagattgcccaggcactaccactctgctcacatgttccccccttggcaatgtggggcatcttgtttagggggttctagttacatggactcttttctgtctcctgggtccctgcccccaccactctgggttccatttgtgggagggagggctcatccacatcatggagacttgctggatgccccatggcaattgtcaaggctcttgatgcaagagcccagggggctattgtaaaaacttggccccagatgcttgtcccttctgggctgagatttcgcagcccccttctcatctccacccaagaagtgctggcaccgatgtttaactcaggccaccttctgttctaaagaaagattgctgggaagtttctccgtggccttaggtttctgacatcctggatagtgtggggaggtaatggtgctcacagtaggttaattggagacaccatgtggggccattggtgttatgagccccccaggccacactgcttctcagaaatgagctgcttgcctttccacctccagggcatgaaccctgcccctttctatccatgctgtgtccaggaggtgaccttgagatcctgataccaccttcaaggaacctcaggcaccaacagtgagcccacgaggatggtcacatgccatgtgcagaatttgacttaagagagagccccagtgacacatctctccatggtgggctccagtcagtcttacactgcccttctgacccctacaaatgggtcctttgctatccaggtgagacagcaagagtgttcttaatcagatggaaccacacccaaaatggacccccactaccttcccagaccatatatctccccttgatcatagtccaacagggccagcttcccttgggggccctttaaggaatggggtgaatgaaattgtgtcatttctatacaaacactgctctcttgatgctgaaatgccaaaccgaaggatttctgaggacctaaatcacggagcatcaatcttacaaagtgttggtccagagtcccatctcttccccaaccctggataccagtagcttcccacccagtccaaacctgcaccatccatcattatgtagatgaaaaagccataggtcatagcctctttgctattctattggagtagcctccctaggcagtccctctgaagccttggagtgcaggtaaatgctcattcccaagtagcaaagagaccatggagaaggtgcgtgtaaagagatatatttttgtaagaggaatatgattaatacattccgccccttggaacctggccatgcaaagcaagggcacagggattagacctgtggcacacttccccaattccctcatctgtaggatttgggctgccccaggcccacccagggggctctgaatgtattttgtaccgtgtttctttcccccaggagaatttttagtcttctttcatgaagcagtggaggggttggcctcccttctactgggaggttgactctctctgggagactcttggtccaagacctgggtcagttctttgctggtggtcccctctgaccacaagcttctgcctgaagattcctcaggtcaacaccatcattaaatgcgagttttgttgatgattcta

SEQ ID NO: 23164 - DNA, 433 bp, Homo sapiens
  misc_feature 1..433: note = ENST00000547185
  source 1..433: mol_type = unassigned DNA; mol_type = unassigned DNA
ggagaaggaggaagagcgagtgtttaataggaaccagctgtcatatcattgtagctataaatagtgcctgccattatcatccccattgcacagaggagaaaattgaagctcagagagatgaagcggcttgcccaaggtcacacagcttgtcaagagctaacagatgtggaaactgaggcttgaagaagggaagacacttgcccaaagctgcgcagctggtcagcagcaggaacggagtttaaatctgattcatctggcctgaatgctcagttctctaaggctgtctcctagagtccactggcatctacccatccaaccagcatgctagggaggaacccacaacccctacaattcataagattaacacaaatggacatttcagaaatctgggccagatggtttgggagaataaaccaccaatcaaggcagatgg

SEQ ID NO: 23165 - DNA, 574 bp, Homo sapiens
  misc_feature 1..574: note = ENST00000546629
  source 1..574: mol_type = unassigned DNA; mol_type = unassigned DNA
gagtacccgctggcagctcttgcaggcaccgcctgccactgtgggtttcccaccacccgattcccgctccatgacagagaggatgagcagctctgtgcccagaagtgcagcgcggaggagtttgagagctgcgggactcctagttacttcattgtgtaccagacacaagtccaagacaaccgttgcatggacagaaggttcctgccaggcaagtccaagcagctcattgctttggccagcttcccaggtgctggcaacacgtgggctcgccacctcattgaattggccacaggcttctacactggcagctactacttcgatggctccctctacaacaaaggtgaggagatggcagggagggcagggcaagaggttccctgggcttgggaaggtccccacttggagggtatgggaatactcctccttgagtatctactgtgtgccactcagctctcccaggcacactttttgagactcactgcatgcttggtacccccccaccttcctttatgccccacaaacatttcttaagtcatgtcctggatactccactagcatccattcaataattgac

SEQ ID NO: 23166 - DNA, 7130 bp, Homo sapiens
  misc_feature 1..7130: note = ENST00000265293
  source 1..7130: mol_type = unassigned DNA; mol_type = unassigned DNA
ggggcagcgcggttacctgcaccgcccgagccgcacctggcggaggcagaagtcacaaacccggcgagctcagagcggtggagcggagaggagggacggcacccggctgcagggaggagggaggcggcagcggcagcggcggcgtggagggcgcagcgcgccgcgcggcggaggagggcagacggcggcggcggcggcgctcggctcgctctgcccggccggctgggcgcgcacccgggctcgcaccgcgccgctgcggacgcacatggcagcgtgagaggccggcggcgggaggagcgggcggcgccgggtcggggctgcagggccgcatggacagcggcgccaccccggccggcccctactagggccccccatctgcgggcgccaccccccggatcatggtgcctcggcggccgcccgggctaagagcggccggctggagccgctgagcccccgctgcggccgggagctgcatgggggagcgccggcagcgcttgggaagatgccccggccggagctgcccctgccggagggctgggaggaggcgcgcgacttcgacggcaaggtctactacatagaccacacgaaccgcaccaccagctggatcgacccgcgggacaggtacaccaaaccgctcacctttgctgactgcattagtgatgagttgccgctaggatgggaagaggcatatgacccacaggttggagattacttcatagaccacaacaccaaaaccactcagattgaggatcctcgagtacaatggcggcgggagcaggaacatatgctgaaggattacctggtggtggcccaggaggctctgagtgcacaaaaggagatctaccaggtgaagcagcagcgcctggagcttgcacagcaggagtaccagcaactgcatgccgtctgggagcataagctgggctcccaggtcagcttggtctctggttcatcatccagctccaagtatgaccctgagatcctgaaagctgaaattgccactgcaaaatcccgggtcaacaagctgaagagagagatggttcacctccagcacgagctgcagttcaaagagcgtggctttcagaccctgaagaaaatcgataagaaaatgtctgatgctcagggcagctacaaactggatgaagctcaggctgtcttgagagaaacaaaagccatcaaaaaggctattacctgtggggaaaaggaaaagcaagatctcattaagagccttgccatgttgaaggacggcttccgcactgacagggggtctcactcagacctgtggtccagcagcagctctctggagagttcgagtttcccgctaccgaaacagtacctggatgtgagctcccagacagacatctcgggaagcttcggcatcaacagcaacaatcagttggcagagaaggtcagattgcgccttcgatatgaagaggctaagagaaggatcgccaacctgaagatccagctggccaagcttgacagtgaggcctggcctggggtgctggactcagagagggaccggctgatccttatcaacgagaaggaggagctgctgaaggagatgcgcttcatcagcccccgcaagtggacccagggggaggtggagcagctggagatggcccggaagcggctggaaaaggacctgcaggcagcccgggacacccagagcaaggcgctgacggagaggttaaagttaaacagtaagaggaaccagcttgtgagagaactggaggaagccacccggcaggtggcaactctgcactcccagctgaaaagtctctcaagcagcatgcagtccctgtcctcaggcagcagccccggatccctcacgtccagccggggctccctggttgcatccagcctggactcctccacttcagccagcttcactgacctctactatgacccctttgagcagctggactcagagctgcagagcaaggtggagttcctgctcctggagggggccaccggcttccggccctcaggctgcatcaccaccatccacgaggatgaggtggccaagacccagaaggcagagggaggtggccgcctgcaggctctgcgttccctgtctggcaccccaaagtccatgacctccctatccccacgttcctctctctcctccccctccccaccctgttcccctctcatggctgaccccctcctggctggtgatgccttcctcaactccttggagtttgaagacccggagctgagtgccactctttgtgaactgagccttggtaacagcgcccaggaaagataccggctggaggaaccaggaacggagggcaagcagctgggccaagctgtgaatacggcccaggggtgtggcctgaaagtggcctgtgtctcagccgccgtatcggacgagtcagtggctggagacagtggtgtgtacgaggcttccgtgcagagactgggtgcttcagaagctgctgcatttgacagtgacgaatcggaagcagtgggtgcgacccgaattcagattgccctgaagtatgatgagaagaataagcaatttgcaatattaatcatccagctgagtaacctttctgctctgttgcagcaacaagaccagaaagtgaatatccgcgtggctgtccttccttgctctgaaagcacaacctgcctgttccggacccggcctctggacgcctcagacactctagtgttcaatgaggtgttctgggtatccatgtcctatccagcccttcaccagaagaccttaagagtcgatgtctgtaccaccgacaggagccatctggaagagtgcctgggaggcgcccagatcagcctggcggaggtctgccggtctggggagaggtcgactcgctggtacaaccttctcagctacaaatacttgaagaaacagagcagggagctcaagccagtgggagtcatggcccctgcctcagggcctgccagcacggacgctgtgtctgctctgttggaacagacagcagtggagctggagaagaggcaggagggcaggagcagcacacagacactggaagacagctggaggtatgaggagaccagtgagaatgaggcagtagccgaggaagaggaggaggaggtggaggaggaggagggagaagaggatgttttcaccgagaaagcctcacctgatatggatgggtacccagcattaaaggtggacaaagagaccaacacggagaccccggccccatcccccacagtggtgcgacctaaggaccggagagtgggcaccccgtcccaggggccatttcttcgagggagcaccatcatccgctctaagaccttctccccaggaccccagagccagtacgtgtgccggctgaatcggagtgatagtgacagctccactctgtccaaaaagccaccttttgttcgaaactccctggagcgacgcagcgtccggatgaagcggccttcctcggtcaagtcgctgcgctccgagcgtctgatccgtacctcgctggacctggagttagacctgcaggcgacaagaacctggcacagccaattgacccaggagatctcggtgctgaaggagctcaaggagcagctggaacaagccaagagccacggggagaaggagctgccacagtggttgcgtgaggacgagcgtttccgcctgctgctgaggatgctggagaagcggcagatggaccgagcggagcacaagggtgagcttcagacagacaagatgatgagggcagctgccaaggatgtgcacaggctccgaggccagagctgtaaggaacccccagaagttcagtctttcagggagaagatggcatttttcacccggcctcggatgaatatcccagctctctctgcagatgacgtctaatcgccagaaaagtatttcctttgttccactgaccaggctgtgaacattgactgtggctaaagttatttatgtggtgttatatgaaggtactgagtcacaagtcctctagtgctcttgttggtttgaagatgaaccgactttttagtttgggtcctactgttgttattaaaaacagaacaaaaacaaaacacacacacacacaaaaacagaaacaaaaaaaaccagcattaaaataataagattgtatagtttgtatatttaggagtgtatttttgggaaagaaaatttaaatgaactaaagcagtattgagttgctgctcttcttaaaatcgtttagattttttttggtttgtacagctccaccttttagaggtcttactgcaataagaagtaatgcctgggggacggtaatcctaataggacgtcccgcacttgtcacagtacagctaatttttcctagttaacatattttgtacaatattaaaaaaatgcacagaaaccattgggggggattcagaggtgcatccacggatcttcttgagctgtgacgtgtttttatgtggctgcccaacgtggagcgggcagtgtgataggctgggtgggctaagcagcctagtctatgtgggtgacaggccacgctggtctcagatgcccagtgaagccactaacatgagtgaggggagggctgtggggaactccattcagttttatctccatcaataaagtggcctttcaaaaagaatcttcctcttgctctctttttctttcctacccctcacttcatctgtttccctgatttttgactctcccctttccagtcatttctttcccacccatccgcagtcctggaaacatttattttttcttttgcccactgttttcatttgctcattaaattaaaatgactgctcggctcattgggaatccacatccccaagttagactggggatatgctctctgtactgtctccttctatggaattccaccccacccagagagagatgacttcacagtttgttcatatgagcatcatcccatgtcgtccccaacccaggggctggtaggtgctacagcttgtgcttcatgctgctcctgtggcccctattcctacccagctcagagctttgcagggtctactgcagacaatcagaagtcagtttctaacaaatagcaacagccacaaatctcttcctccttcctctctgacattaccctgtgcaacttttctcaaagtctgttgcaccactcagcaaagcaagttgcaccagctatatcagaatcacctggggcagcctattaaaaatgcagactgttgagaccatcctggctaacacggtgaaaccctgtctctactaaaaatacaaaaaattagccggccgtggtggcgggcagctactcgggaggctgaggcaggagaatgacctgaacctgggaggcagagcttgcagtgagctgagattgtgccactgcactccagcctgggtgacagagcaagactccgtctcaaaaaaaaaaaaaaaagaaaaatgcagactggctggcgcggtggctcatgcttgtaatcccagcactttgggaggctgaggcgggcagatcaactgagatcgggggttcgagaccagcctgatcaacatggagaaacctggtctctactaaaaatacataattagctgggcgtagtggcgcatacctgtaatcccagctacttgggtggccaaggcttgaacccaggaggcggaggttgcggtgagccgagatggcgccattgactccagcctgggcaacaagagcgtaactccatctcaaaaaaataataataataaaaataaaatgcagactgtcaggtcctctctagacccactgaactatcccgcccaccctgggacggtccccagtgccagtgttttacccatgttccctctgtaagtcttatgcacaccgcaatttgagagccccactggtataaagtgagtgaaacccaggcagagacaggcaaaatggtgaggcccgcatcctattggtgagtcacacagggaacgctgaaattcatggccttctccaggctactgggaacccatgggcggtgatggagggagtggtgccaccttcacttgctgctgaggctcttccccctctccccagcatactccttacctggctgtctctcctcatgtataaggaacctatagtggtgtagaatctactcttcttccccctgtggcttccaggcccccctgtatagctgctatccagcccgatttctcaccactggcccagggcttcctcctgccccgtggcttcacgtctctgaacacatcaatctctgatgttctctctccttccattgaattccaccagacacattcagggtttacttcgtaatgtcttcatatgagtatcaatcaacaccttccccaactcaattgtactaggttgtagagcacaaggatggtctcgtgctgctctgtggcacctgtgcctacactcctctgagctttgaggaggctgctctctttgctgaccccatgatcttttctgcccttctgttaagggcattggccacagcaacggggcaaatgccccaagctggctgtaagtgacccatccctttggctcccatgattagaccaaggagaggcatggggtccagctgagccattcagaaccattccttagcattttccactcaaaggttagagatgagattttctcttcccaaggctacctctggccatggttccagcttcatgggggcaatgggattaggaaaatgaggtcaacctgcaaaggaaagcagatgcaagagatggagacagaatgggggtgtcctggggatcttggagcctgaattcattggcacaaaaggcagcagcatcctcactgtatctgcagtccatttggactcaataaaaactttgaaagtcacatgtgttatggaattccttctcagtgacacattcatctgtgctcagttgtcccagcaagggtcagcccctcatacccctgcagcatccgctgctatgaagcagagctgtaaacgccctccctgtgtataggaaaagctacatggagcaaatcctcctgcctgaagaagtgcatctcagcatcacttcagctgtcggggcatttgtggggagaaccagaccacctctgcggaaggcagcagaccctcttccagccatggatggagttgaattctctataaacggttcaccagcaaaccaccaatacattccattgtttgcctagagagaaatttaaaaataaataaatgttcacttataa

SEQ ID NO: 23167 - DNA, 3562 bp, Homo sapiens
  misc_feature 1..3562: note = ENST00000521089
  source 1..3562: mol_type = unassigned DNA; mol_type = unassigned DNA
aagatgccccggccggagctgcccctgccggagggctgggaggaggcgcgcgacttcgacggcaaggtctactacatagaccacacgaaccgcaccaccagctggatcgacccgcgggacaggtacaccaaaccgctcacctttgctgactgcattagtgatgagttgccgctaggatgggaagaggcatatgacccacaggttggagattacttcatagaccacaacaccaaaaccactcagattgaggatcctcgagtacaatggcggcgggagcaggaacatatgctgaaggattacctggtggtggcccaggaggctctgagtgcacaaaaggagatctaccaggtgaagcagcagcgcctggagcttgcacagcaggagtaccagcaactgcatgccgtctgggagcataagctgggctcccaggtcagcttggtctctggttcatcatccagctccaagtatgaccctgagatcctgaaagctgaaattgccactgcaaaatcccgggtcaacaagctgaagagagagatggttcacctccagcacgagctgcagttcaaagagcgtggctttcagaccctgaagaaaatcgataagaaaatgtctgatgctcagggcagctacaaactggatgaagctcaggctgtcttgagagaaacaaaagccatcaaaaaggctattacctgtggggaaaaggaaaagcaagatctcattaagagccttgccatgttgaaggacggcttccgcactgacagggggtctcactcagacctgtggtccagcagcagctctctggagagttcgagtttcccgctaccgaaacagtacctggatgtgagctcccagacagacatctcgggaagcttcggcatcaacagcaacaatcagttggcagagaaggtcagattgcgccttcgatatgaagaggctaagagaaggatcgccaacctgaagatccagctggccaagcttgacagtgaggcctggcctggggtgctggactcagagagggaccggctgatccttatcaacgagaaggaggagctgctgaaggagatgcgcttcatcagcccccgcaagtggacccagggggaggtggagcagctggagatggcccggaagcggctggaaaaggacctgcaggcagcccgggacacccagagcaaggcgctgacggagaggttaaagttaaacagtaagaggaaccagcttgtgagagaactggaggaagccacccggcaggtggcaactctgcactcccagctgaaaagtctctcaagcagcatgcagtccctgtcctcaggcagcagccccggatccctcacgtccagccggggctccctggttgcatccagcctggactcctccacttcagccagcttcactgacctctactatgacccctttgagcagctggactcagagctgcagagcaaggtggagttcctgctcctggagggggccaccggcttccggccctcaggctgcatcaccaccatccacgaggatgaggtggccaagacccagaaggcagagggaggtggccgcctgcaggctctgcgttccctgtctggcaccccaaagtccatgacctccctatccccacgttcctctctctcctccccctccccaccctgttcccctctcatggctgaccccctcctggctggtgatgccttcctcaactccttggagtttgaagacccggagctgagtgccactctttgtgaactgagccttggtaacagcgcccaggaaagataccggctggaggaaccaggaacggagggcaagcagctgggccaagctgtgaatacggcccaggggtgtggcctgaaagtggcctgtgtctcagccgccgtatcggacgagtcagtggctggagacagtggtgtgtacgaggcttccgtgcagagactgggtgcttcagaagctgctgcatttgacagtgacgaatcggaagcagtgggtgcgacccgaattcagattgccctgaagtatgatgagaagaataagcaatttgcaatattaatcatccagctgagtaacctttctgctctgttgcagcaacaagaccagaaagtgaatatccgcgtggctgtccttccttgctctgaaagcacaacctgcctgttccggacccggcctctggacgcctcagacactctagtgttcaatgaggtgttctgggtatccatgtcctatccagcccttcaccagaagaccttaagagtcgatgtctgtaccaccgacaggagccatctggaagagtgcctgggaggcgcccagatcagcctggcggaggtctgccggtctggggagaggtcgactcgctggtacaaccttctcagctacaaatacttgaagaaacagagcagggagctcaagccagtgggagtcatggcccctgcctcagggcctgccagcacggacgctgtgtctgctctgttggaacagacagcagtggagctggagaagaggcaggagggcaggagcagcacacagacactggaagacagctggaggtatgaggagaccagtgagaatgaggcagtagccgaggaagaggaggaggaggtggaggaggaggagggagaagaggatgttttcaccgagaaagcctcacctgatatggatgggtacccagcattaaaggtggacaaagagaccaacacggagaccccggccccatcccccacagtggtgcgacctaaggaccggagagtgggcaccccgtcccaggggccatttcttcgagggagcaccatcatccgctctaagaccttctccccaggaccccagagccagtacgtgtgccggctgaatcggagtgatagtgacagctccactctgtccaaaaagccaccttttgttcgaaactccctggagcgacgcagcgtccggatgaagcggccgtccccacccccacagccttcctcggtcaagtcgctgcgctccgagcgtctgatccgtacctcgctggacctggagttagacctgcaggcgacaagaacctggcacagccaattgacccaggagatctcggtgctgaaggagctcaaggagcagctggaacaagccaagagccacggggagaaggagctgccacagtggttgcgtgaggacgagcgtttccgcctgctgctgaggatgctggagaagcggcagatggaccgagcggagcacaagggtgagcttcagacagacaagatgatgagggcagctgccaaggatgtgcacaggctccgaggccagagctgtaaggaacccccagaagttcagtctttcagggagaagatggcatttttcacccggcctcggatgaatatcccagctctctctgcagatgacgtctaatcgccagaaaagtatttcctttgttccactgaccaggctgtgaacattgactgtggctaaagttatttatgtggtgttatatgaaggtactgagtcacaagtcctctagtgctcttgttggtttgaagatgaaccgactttttagtttgggtcctactgttgttattaaaaacagaacaaaaacaaaacacacacacac

SEQ ID NO: 23168 - DNA, 599 bp, Homo sapiens
  misc_feature 1..599: note = ENST00000523043
  source 1..599: mol_type = unassigned DNA; mol_type = unassigned DNA
accagctggatcgacccgcgggacaggtacaccaaaccgctcacctttgctgactgcattagtgatgagttgccgctaggatgggaagaggcatatgacccacaggttggagattacttcatagaccacaacaccaaaaccactcagattgaggatcctcgagtacaatggcggcgggagcaggaacatatgctgaaggattacctggtggtggcccaggaggctctgagtgcacaaaaggagatctaccaggtgaagcagcagcgcctggagcttgcacagcaggagtaccagcaactgcatgccgtctgggagcataagctgggctcccaggtcagcttggtctctggttcatcatccagctccaagtatgaccctgagatcctgaaagctgaaattgccactgcaaaatcccgggtcaacaagctgaagagagagatggttcacctccagcacgagctgcagttcaaagagcgtggctttcagaccctgaagaaagccttgccatgttgaaggacggcttccgcactgacagggggtctcactcagacctgtggtccagcagcagctctctggagagttcgagtttcccgctaccg

SEQ ID NO: 23169 - DNA, 562 bp, Homo sapiens
  misc_feature 1..562: note = ENST00000519859
  source 1..562: mol_type = unassigned DNA; mol_type = unassigned DNA
gaagagaaagaaaggactggctgggttgtaggcagcagggccgagcagctgagggctaagtgcacagcaggccctagcaaatgcttctggaattgaattggtccaaggggagactccagctttagttcaacatgggctgtatccgaatccttctgaaatttgctgggattccatgagggagtcaggtacaccaaaccgctcacctttgctgactgcattagtgatgagttgccgctaggatgggaagaggcatatgacccacaggttggagattacttcatagaccacaacaccaaaaccactcagattgaggatcctcgagtacaatggcggcgggagcaggaacatatgctgaaggattacctggtggtggcccaggaggctctgagtgcacaaaaggagatctaccaggtgaagcagcagcgcctggagcttgcacagcaggagtaccagcaactgcatgccgtctgggagcataagctgggctcccaggtcagcttggtctctggttcatcatccagctccaagtatgaccctgagatcctgaaagctgaaattgcca

SEQ ID NO: 23170 - DNA, 3980 bp, Homo sapiens
  misc_feature 1..3980: note = ENST00000393895
  source 1..3980: mol_type = unassigned DNA; mol_type = unassigned DNA
caggtacaccaaaccgctcacctttgctgactgcattagtgatgagttgccgctaggatgggaagaggcatatgacccacaggttggagattacttcatagaccacaacaccaaaaccactcagattgaggatcctcgagtacaatggcggcgggagcaggaacatatgctgaaggattacctggtggtggcccaggaggctctgagtgcacaaaaggagatctaccaggtgaagcagcagcgcctggagcttgcacagcaggagtaccagcaactgcatgccgtctgggagcataagctgggctcccaggtcagcttggtctctggttcatcatccagctccaagtatgaccctgagatcctgaaagctgaaattgccactgcaaaatcccgggtcaacaagctgaagagagagatggttcacctccagcacgagctgcagttcaaagagcgtggctttcagaccctgaagaaaatcgataagaaaatgtctgatgctcagggcagctacaaactggatgaagctcaggctgtcttgagagaaacaaaagccatcaaaaaggctattacctgtggggaaaaggaaaagcaagatctcattaagagccttgccatgttgaaggacggcttccgcactgacagggggtctcactcagacctgtggtccagcagcagctctctggagagttcgagtttcccgctaccgaaacagtacctggatgtgagctcccagacagacatctcgggaagcttcggcatcaacagcaacaatcagttggcagagaaggtcagattgcgccttcgatatgaagaggctaagagaaggatcgccaacctgaagatccagctggccaagcttgacagtgaggcctggcctggggtgctggactcagagagggaccggctgatccttatcaacgagaaggaggagctgctgaaggagatgcgcttcatcagcccccgcaagtggacccagggggaggtggagcagctggagatggcccggaagcggctggaaaaggacctgcaggcagcccgggacacccagagcaaggcgctgacggagaggttaaagttaaacagtaagaggaaccagcttgtgagagaactggaggaagccacccggcaggtggcaactctgcactcccagctgaaaagtctctcaagcagcatgcagtccctgtcctcaggcagcagccccggatccctcacgtccagccggggctccctggttgcatccagcctggactcctccacttcagccagcttcactgacctctactatgacccctttgagcagctggactcagagctgcagagcaaggtggagttcctgctcctggagggggccaccggcttccggccctcaggctgcatcaccaccatccacgaggatgaggtggccaagacccagaaggcagagggaggtggccgcctgcaggctctgcgttccctgtctggcaccccaaagtccatgacctccctatccccacgttcctctctctcctccccctccccaccctgttcccctctcatggctgaccccctcctggctggtgatgccttcctcaactccttggagtttgaagacccggagctgagtgccactctttgtgaactgagccttggtaacagcgcccaggaaagataccggctggaggaaccaggaacggagggcaagcagctgggccaagctgtgaatacggcccaggggtgtggcctgaaagtggcctgtgtctcagccgccgtatcggacgagtcagtggctggagacagtggtgtgtacgaggcttccgtgcagagactgggtgcttcagaagctgctgcatttgacagtgacgaatcggaagcagtgggtgcgacccgaattcagattgccctgaagtatgatgagaagaataagcaatttgcaatattaatcatccagctgagtaacctttctgctctgttgcagcaacaagaccagaaagtgaatatccgcgtggctgtccttccttgctctgaaagcacaacctgcctgttccggacccggcctctggacgcctcagacactctagtgttcaatgaggtgttctgggtatccatgtcctatccagcccttcaccagaagaccttaagagtcgatgtctgtaccaccgacaggagccatctggaagagtgcctgggaggcgcccagatcagcctggcggaggtctgccggtctggggagaggtcgactcgctggtacaaccttctcagctacaaatacttgaagaaacagagcagggagctcaagccagtgggagtcatggcccctgcctcagggcctgccagcacggacgctgtgtctgctctgttggaacagacagcagtggagctggagaagaggcaggagggcaggagcagcacacagacactggaagacagctggaggtatgaggagaccagtgagaatgaggcagtagccgaggaagaggaggaggaggtggaggaggaggagggagaagaggatgttttcaccgagaaagcctcacctgatatggatgggtacccagcattaaaggtggacaaagagaccaacacggagaccccggccccatcccccacagtggtgcgacctaaggaccggagagtgggcaccccgtcccaggggccatttcttcgagggagcaccatcatccgctctaagaccttctccccaggaccccagagccagtacgtgtgccggctgaatcggagtgatagtgacagctccactctgtccaaaaagccaccttttgttcgaaactccctggagcgacgcagcgtccggatgaagcggccgtccccacccccacagccttcctcggtcaagtcgctgcgctccgagcgtctgatccgtacctcgctggacctggagttagacctgcaggcgacaagaacctggcacagccaattgacccaggagatctcggtgctgaaggagctcaaggagcagctggaacaagccaagagccacggggagaaggagctgccacagtggttgcgtgaggacgagcgtttccgcctgctgctgaggatgctggagaagcggatggaccgagcggagcacaagggtgagcttcagacagacaagatgatgagggcagctgccaaggatgtgcacaggctccgaggccagagctgtaaggaacccccagaagttcagtctttcagggagaagatggcatttttcacccggcctcggatgaatatcccagctctctctgcagatgacgtctaatcgccagaaaagtatttcctttgttccactgaccaggctgtgaacattgactgtggctaaagttatttatgtggtgttatatgaaggtactgagtcacaagtcctctagtgctcttgttggtttgaagatgaaccgactttttagtttgggtcctactgttgttattaaaaacagaacaaaaacaaaacacacacacacacaaaaacagaaacaaaaaaaaccagcattaaaataataagattgtatagtttgtatatttaggagtgtatttttgggaaagaaaatttaaatgaactaaagcagtattgagttgctgctcttcttaaaatcgtttagattttttttggtttgtacagctccaccttttagaggtcttactgcaataagaagtaatgcctgggggacggtaatcctaataggacgtcccgcacttgtcacagtacagctaatttttcctagttaacatattttgtacaatattaaaaaaatgcacagaaaccattgggggggattcagaggtgcatccacggatcttcttgagctgtgacgtgtttttatgtggctgcccaacgtggagcgggcagtgtgataggctgggtgggctaagcagcctagtctatgtgggtgacaggccacgctggtctcagatgcccagtgaagccactaacatgagtgaggggagggctgtggggaactccattcagttttatctccatcaataaagtggcctttcaaaaa

SEQ ID NO: 23171 - DNA, 476 bp, Homo sapiens
  misc_feature 1..476: note = ENST00000519659
  source 1..476: mol_type = unassigned DNA; mol_type = unassigned DNA
cttgagagaaacaaaagccatcaaaaaggctattacctgtggggaaaaggaaaagcaagatctcattaagagccttgccatgttgaaggacggcttccgcactgacagggggtctcactcagacctgtggtccagcagcagctctctggagagttcgagtttcccgctaccgaaacagtacctggatgtgagctcccagacagacatctcgggaagcttcggcatcaacagcaacaatcagttggcagagaaggtcagattgcgccttcgatatgaagaggctaagagaaggtaattgggctggggctaggggcgggatggttccaaaaataataactactattgtagaatgcctgctctgtgcttagcttttcacacacttcgtcttctttaatcctcacaaagattatgaagatagttattatactttttatattttcatcctctctgaaattcagagaggaaatgactcaccc

SEQ ID NO: 23172 - DNA, 743 bp, Homo sapiens
  misc_feature 1..743: note = ENST00000517425
  source 1..743: mol_type = unassigned DNA; mol_type = unassigned DNA
agccatcaaaaaggctattacctgtggggaaaaggaaaagcaagatctcattaagagccttgccatgttgaaggacggcttccgcactgacagggggtctcactcagacctgtggtccagcagcagctctctggagagttcgagtttcccgctaccgaaacagtacctggatgtgagctcccagacagacatctcgggaagcttcggcatcaacagcaacaatcagttggcagagaaggtcagattgcgccttcgatatgaagaggctaagagaagactttcctgtcaatgtggccaggcaactcccagcaattcggagcttacacactaccagctcccccaggcgtccagcaaaacagcaagacatctgtatttggacagccacttcttgttctctctgaagaggaccactctgaaccttggatctgttccatcctgcaggaatgcctgtcttagatggatcgccaacctgaagatccagctggccaagcttgacagtgaggcctggcctggggtgctggactcagagagggaccggctgatccttatcaacgagaaggaggagctgctgaaggagatgcgcttcatcagcccccgcaagtggacccagggggaggtggagcagctggagatggcccggaagcggctggaaaaggacctgcaggcagcccgggacacccagagcaaggcgctgacggagaggttaaagttaaacagtaagaggaaccagcttgtgagagaac

SEQ ID NO: 23173 - DNA, 3408 bp, Homo sapiens
  misc_feature 1..3408: note = ENST00000524228
  source 1..3408: mol_type = unassigned DNA; mol_type = unassigned DNA
caaaaaggctattacctgtggggaaaaggaaaagcaagatctcattaagagccttgccatgttgaaggacggcttccgcactgacagggggtctcactcagacctgtggtccagcagcagctctctggagagttcgagtttcccgctaccgaaacagtacctggatgtgagctcccagacagacatctcgggaagcttcggcatcaacagcaacaatcagttggcagagaaggtcagattgcgccttcgatatgaagaggctaagagaaggatcgccaacctgaagatccagctggccaagcttgacagtgaggcctggcctggggtgctggactcagagagggaccggctgatccttatcaacgagaaggaggagctgctgaaggagatgcgcttcatcagcccccgcaagtggacccagggggaggtggagcagctggagatggcccggaagcggctggaaaaggacctgcaggcagcccgggacacccagagcaaggcgctgacggagaggttaaagttaaacagtaagaggaaccagcttgtgagagaactggaggaagccacccggcaggtggcaactctgcactcccagctgaaaagtctctcaagcagcatgcagtccctgtcctcaggcagcagccccggatccctcacgtccagccggggctccctggttgcatccagcctggactcctccacttcagccagcttcactgacctctactatgacccctttgagcagctggactcagagctgcagagcaaggtggagttcctgctcctggagggggccaccggcttccggccctcaggctgcatcaccaccatccacgaggatgaggtggccaagacccagaaggcagagggaggtggccgcctgcaggctctgcgttccctgtctggcaccccaaagtccatgacctccctatccccacgttcctctctctcctccccctccccaccctgttcccctctcatggctgaccccctcctggctggtgatgccttcctcaactccttggagtttgaagacccggagctgagtgccactctttgtgaactgagccttggtaacagcgcccaggaaagataccggctggaggaaccaggaacggagggcaagcagctgggccaagctgtgaatacggcccaggggtgtggcctgaaagtggcctgtgtctcagccgccgtatcggacgagtcagtggctggagacagtggtgtgtacgaggcttccgtgcagagactgggtgcttcagaagctgctgcatttgacagtgacgaatcggaagcagtgggtgcgacccgaattcagattgccctgaagtatgatgagaagaataagcaatttgcaatattaatcatccagctgagtaacctttctgctctgttgcagcaacaagaccagaaagtgaatatccgcgtggctgtccttccttgctctgaaagcacaacctgcctgttccggacccggcctctggacgcctcagacactctagtgttcaatgaggtgttctgggtatccatgtcctatccagcccttcaccagaagaccttaagagtcgatgtctgtaccaccgacaggagccatctggaagagtgcctgggaggcgcccagatcagcctggcggaggtctgccggtctggggagaggtcgactcgctggtacaaccttctcagctacaaatacttgaagaaacagagcagggagctcaagccagtgggagtcatggcccctgcctcagggcctgccagcacggacgctgtgtctgctctgttggaacagacagcagtggagctggagaagaggcaggagggcaggagcagcacacagacactggaagacagctggaggtatgaggagaccagtgagaatgaggcagtagccgaggaagaggaggaggaggtggaggaggaggagggagaagaggatgttttcaccgagaaagcctcacctgatatggatgggtacccagcattaaaggtggacaaagagaccaacacggagaccccggccccatcccccacagtggtgcgacctaaggaccggagagtgggcaccccgtcccaggggccatttcttcgagggagcaccatcatccgctctaagaccttctccccaggaccccagagccagtacgtgtgccggctgaatcggagtgatagtgacagctccactctgtccaaaaagccaccttttgttcgaaactccctggagcgacgcagcgtccggatgaagcggccttcctcggtcaagtcgctgcgctccgagcgtctgatccgtacctcgctggacctggagttagacctgcaggcgacaagaacctggcacagccaattgacccaggagatctcggtgctgaaggagctcaaggagcagctggaacaagccaagagccacggggagaaggagctgccacagtggttgcgtgaggacgagcgtttccgcctgctgctgaggatgctggagaagcggatggaccgagcggagcacaagggtgagcttcagacagacaagatgatgagggcagctgccaaggatgtgcacaggctccgaggccagagctgtaaggaacccccagaagttcagtctttcagggagaagatggcatttttcacccggcctcggatgaatatcccagctctctctgcagatgacgtctaatcgccagaaaagtatttcctttgttccactgaccaggctgtgaacattgactgtggctaaagttatttatgtggtgttatatgaaggtactgagtcacaagtcctctagtgctcttgttggtttgaagatgaaccgactttttagtttgggtcctactgttgttattaaaaacagaacaaaaacaaaacacacacacacacaaaaacagaaacaaaaaaaaccagcattaaaataataagattgtatagtttgtatatttaggagtgtatttttgggaaagaaaatttaaatgaactaaagcagtattgagttgctgctcttcttaaaatcgtttagattttttttggtttgtacagctccaccttttagaggtcttactgcaataagaagtaatgcctgggggacggtaatcctaataggacgtcccgcacttgtcacagtacagctaatttttcctagttaacatattttgtacaatattaaaaaaatgcacagaaaccattgggggggattcagaggtgcatccacggatcttcttgagctgtgacgtgtttttatgtggctgcccaacgtggagcgggcagtgtgataggctgggtgggctaagcagcctagtctatgtgggtgacaggccacgctggtctcagatgcccagtgaagccactaacatgagtgaggggagggctgtggggaactccattcagttttatctccatcaataaagtggcctttcaaaaag

SEQ ID NO: 23174 - DNA, 254 bp, Homo sapiens
  misc_feature 1..254: note = ENST00000517646
  source 1..254: mol_type = unassigned DNA; mol_type = unassigned DNA
gagagttcgagtttcccgctaccgaaacagtacctggatttcggcatcaacagcaacaatcagttggcagagaaggtcagattgcgccttcgatatgaagaggctaagagaaggatcgccaacctgaagatccagctggccaagcttgacagtgaggcctggcctggggtgctggactcagagagggaccggctgatccttatcaacgagaaggaggagctgctgaaggagatgcgcttcatcagcccccgcaa

SEQ ID NO: 23175 - DNA, 2451 bp, Homo sapiens
  misc_feature 1..2451: note = ENST00000624315
  source 1..2451: mol_type = unassigned DNA; mol_type = unassigned DNA
gatgaatccacatctctattgtaccaggaacagggcaaggacattgccttgttcatgtctgcaccccattcctgcagagcctacttcattgttggcacatggtaggcacccacatgtgtttgtttagaaaaaaaataggttccttgagatgacaagctgatcaaaggaagacagtaactgtcaaagattgctctgagatgtctgtttcttcatggcatctcctgttccctcagtgccattaggcacaccagtcatgcttgctttcttggcccccaggatcgccaacctgaagatccagctggccaagcttgacagtgaggcctggcctggggtgctggactcagagagggaccggctgatccttatcaacgagaaggaggagctgctgaaggagatgcgcttcatcagcccccgcaagtggacccagggggaggtggagcagctggagatggcccggaagcggctggaaaaggacctgcaggcagcccgggacacccagagcaaggcgctgacggagaggtggggctggggccccagggtgtgtaggacccttctctcactggcagtctgtcctcagcccccagatgggggaagaatgagggggctccgggcccctgggctccaccctgagcacgctcagttcagagatctctcaggttgccgacataggaaatcaggaaagatggtttgccatccagtgcgccagctaccctggaattttgcatggtgaatcatgctaccaaaaagtctgcttaggtgcaggtgttcaaaaatgtatcttctgactcaattaagccacataactctatataacttaaagcagtcattttccaactttttgacagtgatgcacattttatactgtaacctgatccaaggttcacaaaatagtgcatgctctttctacctctgatggtcctctgatgttttctcccttctgttgcattttgtttcatgcagtttgtgactcaccaaattgatttcaccccatgctaagtaaggggttgcagtttgcagtttgaaaaacactggtctggataggggttgcaaactggcatgcttataggagccaagcaggtcacagaaatgctagagacccacctggcagtggtctgtgttagaccagagtgcacagaccccactggtctaaagcaggtgctgtctctctgctccagcaaatgggagtgcaggcctcgggctgccagagctgcctgtacttcaaacaaaagagtcgttcagattttttatttttaaatattgggaactaatccagaagtttttttaaaaaaatatgcaaatcagcctcatctatgggcctgatataacctaaaagccaccggtttacattctttaatttagaccttattatagacattgtctttgtttatttccttcagtgttcccaccaacctcctcacccacattgcaccgaatgcaacactgcgttcaccataggctttacaaagctctccagcttcatgttcatttattcattctgttcatcagccaatgtttactcattcatttgagaaaccttttgctgcacagattgtgtgtgcaaggcaatttggggcactcagaaattaacaagacatggtccctgccccatgacctttaaatctattctagttattttcaccattttttggcaggagcctttattcagcaaggtccctgcccgtaaggagcttagaagtgaagctagagattttcaagtgtgtgtgtgtggggggggggggggggcgtgtgtgtgtgtgtgtgtgtgtgtgtgtgtgtgtgtggcatatgtggtgtgtgtgtgtttggaatatgagcaagggaattcctttttctagtgaaatcagaggcagaggcccagtctatgaagcaagtaaacgtgcctactgcctcagtggaagcagtcgggagtcctagagatgctgtctgtgctcactctgtcaccccatcatggggcttccagagagcctttgagctctaaggcacccagcttgcagtaccattctagcaactgagtaggccccacttgcacatggcatggtgccaggtggatcgggttccccaagttcttgcctggcctcccatggcttcagagacccccttgactcatcgatggtaggaatctctccgcactagttgcttagtcagaactgctaacagtgatgtccaaagcgtatccatttcctctcttccgttcttcattggcagcagcagctgattagccctgatccaccaccagttggtgggagaaggagaaggacagagcttgaataattggtgttctgcagcccttggaagcaccttgctagaagtcttctttagcaccacgactccattctgctttctctgggattttacgctttggggataaggcctgtgtctatatgcccgcatgcctttagtgttcgttgaaagaataaatggttagctggcctaggtagacccttactgggc

SEQ ID NO: 23176 - DNA, 611 bp, Homo sapiens
  misc_feature 1..611: note = ENST00000518334
  source 1..611: mol_type = unassigned DNA; mol_type = unassigned DNA
ctgcaccccattcctgcagagcctacttcattgttggcacatggtaggcacccacatgtgtttgtttagaaaaaaaataggttccttgagatgacaagctgatcaaaggaagacagtaactgtcaaagattgctctgagatgtctgtttcttcatggcatctcctgttccctcagtgccattaggcacaccagtcatgcttgctttcttggcccccaggatcgccaacctgaagatccagctggccaagcttgacagtgaggcctggcctggggtgctggactcagagagggaccggctgatccttatcaacgagaaggaggagctgctgaaggagatgcgcttcatcagcccccgcaagtggacccagggggaggtggagcagctggagatggcccggaagcggctggaaaaggacctgcaggcagcccgggacacccagagcaaggcgctgacggagaggttaaagttaaacagtaagaggaaccagcttgtgagagaactggaggaagccacccggcaggtggcaactctgcactcccagctgaaaagtctctcaagcagcatgcagtccctgtcctcaggcagcagccccggatccctcacgtccag

SEQ ID NO: 23177 - DNA, 489 bp, Homo sapiens
  misc_feature 1..489: note = ENST00000524093
  source 1..489: mol_type = unassigned DNA; mol_type = unassigned DNA
agactgggtgcttcagaagctgctgcatttgacagtgacgaatcggaagcagtgggtgcgacccgaattcagattgccctgaagtatgatgagaagaataagcaatttgcaatattaatcatccagctgagtaacctttctgctctgttgcagcaacaagaccagaaagtgaatatccgcgtggctgtccttccttgctctgaaagcacaacctgcctgttccggacccggcctctggacgcctcagacactctagtgttcaatgaggtgttctgggtatccatgtcctatccagcccttcaccagaagaccttaagagtcgatgtctgtaccaccgacaggagccatctggaagagtgcctggacgctgtgtctgctctgttggaacagacagcagtggagctggagaagaggcaggagggcaggagcagcacacagacactggaagacagctggaggtatgaggagaccagtgagaatgaggcagta

SEQ ID NO: 23178 - DNA, 2077 bp, Homo sapiens
  misc_feature 1..2077: note = ENST00000524038
  source 1..2077: mol_type = unassigned DNA; mol_type = unassigned DNA
tttgcaatattaatcatccagctgagtaacctttctgctctgttgcagcaacaagaccagaaagtgaatatccgcgtggctgtccttccttgctctgaaagcacaacctgcctgttccggacccggcctctggacgcctcagacactctagtgttcaatgaggtgttctgggtatccatgtcctatccagcccttcaccagaagaccttaagagtcgatgtctgtaccaccgacaggagccatctggaagagtgcctgggaggcgcccagatcagcctggcggaggtctgccggtctggggagaggtcgactcgctggtacaaccttctcagctacaaatacttgaagaaacagagcagggagctcaagccagtgggagtcatggcccctgcctcagggcctgccagcacggacgctgtgtctgctctgttggaacagacagcagtggagctggagaagaggcaggagggcaggagcagcacacagacactggaagacagctggaggtatgaggagaccagtgagaatgaggcagtagccgaggaagaggaggaggaggtggaggaggaggagggagaagaggatgttttcaccgagaaagcctcacctgatatggatgggtacccagcattaaaggtggacaaagagaccaacacggagaccccggccccatcccccacagtggtgcgacctaaggaccggagagtgggcaccccgtcccaggggccatttcttcgagggagcaccatcatccgctctaagaccttctccccaggaccccagagccagtacgtgtgccggctgaatcggagtgatagtgacagctccactctgtccaaaaagccaccttttgttcgaaactccctggagcgacgcagcgtccggatgaagcggccgtccccacccccacagccttcctcggtcaagtcgctgcgctccgagcgtctgatccgtacctcgctggacctggagttagacctgcaggcgacaagaacctggcacagccaattgacccaggagatctcggtgctgaaggagctcaaggagcagctggaacaagccaagagccacggggagaaggagctgccacagtggttgcgtgaggacgagcgtttccgcctgctgctgaggatgctggagaagcggatggaccgagcggagcacaagggtgagcttcagacagacaagatgatgagggcagctgccaaggatgtgcacaggctccgaggccagagctgtaaggaacccccagaagttcagtctttcagggagaagatggcatttttcacccggcctcggatgaatatcccagctctctctgcagatgacgtctaatcgccagaaaagtatttcctttgttccactgaccaggctgtgaacattgactgtggctaaagttatttatgtggtgttatatgaaggtactgagtcacaagtcctctagtgctcttgttggtttgaagatgaaccgactttttagtttgggtcctactgttgttattaaaaacagaacaaaaacaaaacacacacacacacaaaaacagaaacaaaaaaaaccagcattaaaataataagattgtatagtttgtatatttaggagtgtatttttgggaaagaaaatttaaatgaactaaagcagtattgagttgctgctcttcttaaaatcgtttagattttttttggtttgtacagctccaccttttagaggtcttactgcaataagaagtaatgcctgggggacggtaatcctaataggacgtcccgcacttgtcacagtacagctaatttttcctagttaacatattttgtacaatattaaaaaaatgcacagaaaccattgggggggattcagaggtgcatccacggatcttcttgagctgtgacgtgtttttatgtggctgcccaacgtggagcgggcagtgtgataggctgggtgggctaagcagcctagtctatgtgggtgacaggccacgctggtctcagatgcccagtgaagccactaacatgagtgaggggagggctgtggggaactccattcagttttatctccatcaataaagtggcctttcaaaaagaa

SEQ ID NO: 23179 - DNA, 1015 bp, Homo sapiens
  misc_feature 1..1015: note = ENST00000522140
  source 1..1015: mol_type = unassigned DNA; mol_type = unassigned DNA
atgtcctatccagcccttcaccagaagaccttaagagtcgatgtctgtaccaccgacaggagccatctggaagagtgcctgggaggcgcccagatcagcctggcggaggtctgccggtctggggagaggtcgactcgctggtacaaccttctcagctacaaatacttgaagaaacagagcagggagctcaagccagtgggagtcatggcccctgcctcagggcctgccagcacggtgagctgggaccaggacgctgtgtctgctctgttggaacagacagcagtggagctggagaagaggcaggagggcaggagcagcacacagacactggaagacagctggaggtatgaggagaccagtgagaatgaggcagtagccgaggaagaggaggaggaggtggaggaggaggagggagaagaggatgttttcaccgagaaagcctcacctgatatggatgggtacccagcattaaaggtggacaaagagaccaacacggagaccccggccccatcccccacagtggtgcgacctaaggaccggagagtgggcaccccgtcccaggggccatttcttcgagggagcaccatcatccgctctaagaccttctccccaggaccccagagccagtacgtgtgccggctgaatcggagtgatagtgacagctccactctgtccaaaaagccaccttttgttcgaaactccctggagcgacgcagcgtccggatgaagcggccttcctcggtcaagtcgctgcgctccgagcgtctgatccgtacctcgctggacctggagttagacctgcaggcgacaagaacctggcacagccaattgacccaggagatctcggtgctgaaggagctcaaggagcagctggaacaagccaagagccacggggagaaggagctgccacagtggttgcgtgaggacgagcgtttccgcctgctgctgaggatgctggagaagcggcagatggaccgagcggagcacaagggtgagcttcagacagacaagatga

SEQ ID NO: 23180 - DNA, 386 bp, Homo sapiens
  misc_feature 1..386: note = ENST00000521391
  source 1..386: mol_type = unassigned DNA; mol_type = unassigned DNA
gtttccgcctgctgctgaggatgctggagaagcggatggaccgagcggagcacaagggtgagcttcagacagacaagatgatgagggcagctgccaaggatgtgcacaggctccgaggccagagctgtaaggaacccccagaagttcagtctttcaggaaaagctacatggagcaaatcctcctgcctgaagaagtgcatctcagcatcacttcagctgtcggggcatttgtggggagaaccagaccacctctgcggaaggcagcagaccctcttccagccatggatggagttgaattctctataaacggttcaccagcaaaccaccaatacattccattgtttgcctagagagaaatttaaaaataaataaatgttcacttataa

SEQ ID NO: 23181 - DNA, 543 bp, Homo sapiens
  misc_feature 1..543: note = ENST00000518204
  source 1..543: mol_type = unassigned DNA; mol_type = unassigned DNA
ttatcgttctgaatgaagtggatcccacatggagcaagagtgagggtgccgtccctacagtagccccctctgttgtgatagcgagttctccttgcccctttctggaggccccctccactgactcagggccttgcttgctttgcccagcagatggaccgagcggagcacaagggtgagcttcagacagacaagatgatgagggcagctgccaaggatgtgcacaggctccgaggccagagctgtaaggaacccccagaagttcagtctttcagggagaagatggcatttttcacccggcctcggatgaatatcccagctctctctgcagatgacgtctaatcgccagaaaagtatttcctttgttccactgaccaggctgtgaacattgactgtggctaaagttatttatgtggtgttatatgaaggtactgagtcacaagtcctctagtgctcttgttggtttgaagatgaaccgactttttagtttgggtcctactgttgttattaaaaacagaacaaaaacaaaacacacacacacacaaa

SEQ ID NO: 23182 - DNA, 8826 bp, Homo sapiens
  misc_feature 1..8826: note = ENST00000403733
  source 1..8826: mol_type = unassigned DNA; mol_type = unassigned DNA
ctgatccgcagcggggccgcgaacagcgtttcctgaggcacctcccgcgcgtggttccgccgcgccccgcgccctgcgcccctcagcccctcgccggcgcccgcgtcgcgggttggcagcctagcccggcagccgcgttcccgccgcgtcccgcgcccggtacctatggaggcgccgctcgccggcgaggccgccgaccatgcctaggagggccgggagcggtcagctgccgctgccccggggctgggaggaggccagggactacgacggcaaggtcttctacattgaccacaacaccaggaggaccagctggatcgacccccgggacaggttaacgaagcccttgtcatttgctgattgtgttggggatgagctgccgtggggatgggaagcagggtttgaccctcagattggtgtctactacatcgatcacatcaacaaaaccacgcagatagaagatccaagaaaacaatggaggggggaacaggagaagatgctcaaggactacctctctgtggcacaggatgccctccggacacagaaggaactgtaccatgtgaaggagcagaggctggcgctggccctggatgaatacgtgcgattaaatgatgcctataaggaaaagtcaagttctcacacaagcttattctcaggatcttcatccagtactaaatatgatcccgatattttaaaagctgagatctccactacaagattaagggttaaaaagctaaagagagagctctcacagatgaagcaggaactgctctataaagaacaaggctttgaaacattgcagcaaattgataaaaaaatgtctggaggccagagcgggtatgaactcagtgaagccaaagccattctaacagaactaaaatctatcagaaaggcaattagctcaggagaaaaagaaaaacaagatctgatgcagagtcttgctaagctgcaggagcggtttcatttggatcagaacattggcagatctgagccagatttgagatgtagtcctgtgaactctcatttatgtctctccagacagacccttgatgctgggtcacaaacaagcatttccggagatattggagtaagaagtagatcaaatttagctgaaaaggtcaggctaagcctacagtatgaagaagccaaaagaagtatggccaacttaaaaattgaactgtcaaaattggacagtgaggcctggcctggggcactggatattgagaaggaaaaactgatgctgattaatgaaaaagaagaacttttgaaagagcttcagttcgtcaccccacagaaacgtacccaagatgaattagaacgcctagaagctgaaaggcagcggctggaagaagagttgctgtctgtgaggggaacaccaagcagagctctggccgagagattgagattggaagagagaagaaaagagctgctacagaaacttgaagaaactactaaattaactacttatttgcattcacaacttaaaagcctctctgccagcaccctgtccatgtcatctgggagcagcctgggttccctggcatcgagtcggggctctctgaacacctccagcagagggtcactcaactccctcagttccaccgaactctattacagcagtcaaagtgatcagatagatgtggattatcagtataaactggacttccttctgcaagagaaaagcggttacattccttctggacccatcaccaccatccatgaaaacgaggtggtcaagtcccctagccagcctggccagagtggactctgtggagtggcagctgcagcaacaggccacactcctccactggctgaggccccgaagtctgtggcctccctgtcctcgaggtcctccctttcctccttgtctcctccaggctctcccttggttttggaaggcacgtttcccatgtcttcttctcatgatgcctctctccatcagttcactgctgactttgaagactgtgagttgagtagccattttgcagatatcagcctcatcgaaaatcagattttgctggattctgattcaggaggagcctcccagtctctttcagaggataaagaccttaatgaatgtgctagggagccattatatgaaggaactgcagatgtggaaaaatcattaccaaaaagaagagtgatccacttgcttggggagaaaaccacttgtgtgtcggctgctgtgtctgatgagtctgtggctggagacagtggggtctatgaagctttcgtgaaacaacctagtgaaatggaagatgtcacatacagtgaagaggatgtagccattgtagagaccgcccaggttcagataggactcagatacaatgcaaaaagttcaagtttcatggtgattatagcacagctccgaaaccttcatgccttcttgatacctcatacttcaaaagtatattttagggttgccgttcttccttcctcaactgatgtcagctgtctgtttcgcacaaaagttcatccgcccacagaatccattttattcaatgatgtgttcagagtcgccatttcccaaacagccttacaacagaagacactgagggtagacctttgctctgtcagtaaacaccgaagggaagaatgcctggctggaactcagatcagcctggcagatttaccattttccagtgaggttttcactctatggtataacttgcttccttccaagcaaatgccttgcaaaaagaatgaagaaaatgaggactctgtatttcaaccaaaccagccgttagtagattctatagacttggatgcagtgtcagccttacttgcaagaacatcagctgagttgttagctgtggaacaagaattagcacaagaagaagaagaagaatcaggacaagaagagccaaggggcccagatggagactggctaacaatgctaagagaggcctctgatgaaattgtggctgaaaaagaggctgaagttaaattgccagaggacagtagctgtacagaagatttaagttcatgcactagtgtgcctgagatgaatgaagacgggaacaggaaagaaagcaactgtgccaaagacctcagaagtcagccacctactagaataccaacactggttgacaaagagacaaacactgatgaagccgctaatgacaatatggcagttcgccccaaagagcgcagcagcctgagctctagacagcatccgtttgtgaggagcagtgtgatagtgcgctcacagaccttttctccaggagagcggaaccagtacatctgcaggttaaatcggagtgacagtgacagttcaaccctggctaaaaaatcactgtttgtgagaaactccaccgaacgccgcagtttgagggtcaaaaggacggtttgccagtcagtccttagaagaacaacacaggaatgcccagtgcggacatctctagacttagaactggaccttcaggcatctctgacccggcagagccgcctcaatgatgagctgcaggcgctgagggacttgcggcagaagctggaggaactgaaagctcagggagagactgaccttccaccaggcgtgctggaggatgagaggttccagaggcttctgaagcaagctgagaagcaggctgaacagtccaaagaagagcagaagcaaggtctgaatgcagagaagttgatgaggcaagtctccaaggacgtgtgtcggctccgggagcagagccagaaggtgcctcggcaggtgcagtccttcagggagaagattgcctacttcaccagagcaaagataagcatcccatccctgccagctgatgatgtgtgattacatgacttaagaaattattttttcatctgttcactttcttagggagggtaaaagactgaagatttgtgtttttgttttggtgtttggttttttttggtaacgtaactgtcaactcttgaagaacttttatttcacatcagattttcaacacattaatttgtaaagtaccttgagtgtaatttttatatgcttaaaaaagaaaaaatcatataagaaagatgggataacctggtacacaaatgttgcccagtatgtgcgcattgccagtggacttcattttgtaaaaatggaatagaggcagtaccccacatgtgtactgttgagccggctgttgagaaacaacttggttcagccggtggttttgcttctcctttgtgttcctgtgagtaggctgtgccgatggcagcagcgccacgtggtatctgtgcgctggcgaggagaggagcgctttccatttggaggcagtgtgagcacacgctggagtgcagcgttccaaagtccgcccgaaatggatgctgcgtccacggccatcacctgtgcgggaacacctggtttccttaagacaatttcctttttgtccttttatatttttctaaagaaaactaagatataaactaccaagtgctcttaagaataaaaataagaataagaatacaaaggagcactactcttggctacacgaaagatcttgggattcatgacactgagggcagggagaagaaagaacaccagccacgcagagatacaaataagctcatcaaatgagcagctggtttgtctcactcagcctgaatttgcattaagtgttcaaaagtgagtttctggcttgcactagtgttttgccctaaatctaaggatggtgcctagtggtggccctgtgttctgaggacagagagagctggaggggtggagggaaatgcatcggcactcatttggtgtaaccaagaagagggggaaagatgtcttgatagaatcaaagttgccaaaaacaaagaagagtttatcaagcagatttctaacatttagtagaaactacttcatagctctcatttttagggggttctatctataatttatggtaaatagttgggaggcaaagggaagaatgtgtgtggggggattattaatttgaagtataagctaaattgtttattaaaaagcctattttggatgaacaagtttagagagataaactgactaatgtgtcctccagtttagaatttcaccttacccgacccaggcacttcttaaaaacacagatcctcagtgcagctctgccagcatcaaggcttttaaaatatgtagtatttaggccatttaaaccatacttattactcaataacccaagaaacaattttgggttagccatctaatatagcaaataaaatagattttttaaagaaatccaaaattgtcttaaaggaatggaccccttgaagaaaaaaaaaaaaagttttgttcctcagttagaatgctcactagctcactagcaagaatttttattttcttgaaagcaattatatatattttggaaagttcatgttattggaattgaagttcaaattaagcaacttctgagcctagaactttaattactttttcctaaatgtcccaacacttacatacaaatttctttgaagacataactggacatggcagacactgctttgaacaaaaaccagcctagtgaattgactgagtacagtcctttaaggctgcccagttcattctattagatgactaaggaaaactagaaaaagaatacagttcacccttgtcaaggtcaaatgtgaaagacagaagtttatttaatgtagaggtaaatgaaggtgagctgttttcagcatcttagtttgaccatgaaaatgtctatagaattatgtgtagttgttccgtacgattttattttcttcatttatttatttacagtcttatttatgttctgtttaatatatagtttgattctggccattttaaatatttgacacagaagagactatattggaatatttacagctttataagtctttcatcagattagctgttgactttttgtaatacaaaaagtttcagacaagtattaaagaataaaatctgtctcaggctggtagttagcagttgtgaccaagatgcttttggttgttgtatttcacaaaatttcctcatttctaacatgagagatgaacttattttaatataatcctttttctacactttaaaagtcagcaatagtgttatgtatttataggcagcttttaataatcttgtcatatttgtactaacccaaatgattcacagtgacaaaacattttaataacttgatcacaaaaccatatggacaaatatgaattttaatattataaatactatttttaaaaggtagaatttattcgcacagggtaaaaagaatgtaatatttagttctcaagtttgaattatcagtatattattacaattttgtatatcagaatcttaagtgttacaggtacaaaaagaatattgctagccaaatgaacaaagtttagctaaatctctgtagcatgcaaatcaaataaattaaaattttttgctattgctttatctatattgtcttaaatatcaaaagctcaggactgaacttaatatttaatcaggttaaattctgaacatgtttctgttttaatttgtcttgtttgtaaacgtatgcaaatacatcacatagattaactggtttctgcactttccatgtgtttgtgggtggaaaaaaattcagtggttttttttaaaaaaaaaagcaaaaacaaagctacatattgcctaatactctatttcagtgtcgtttattgttcagtttatttccctgattggcacaaacacaagagtttccttgaaccatgtaccaagcaaatacaaaatatttcatgaagaaatccccaggctggcagtttgtgatgaatagttcttgttggaactatatgtattgctgataaaaaaggacgaagtattttcattgagcaaataaaatgaagggctccagaatatgtgctctgtggtcgctgcgcctgggctggcagtgtgctccacagagaggcagccgtcccaggaggttatctacccacacaccccagtcctgccctgccgtgccccccacaggctgctcagtgcctgggaagccagaaacgctgcccgtgaaatacagaacacaggatgcagaagcacgtttgtgtggcagagtctacttgaatcatccaaaacccaagatcgccctcctgcctctgacagtatagaaggcgtgactgaatgtggctgccttttgaaaaaggttccatagagacactgaggtctctgattcagaaggagatgatgtgtctacacctttcacctctgaagcttctaaagagctagtaattattttatataataagacgtcatgcattttaaataaatatgcaacaagacctcaggcttattatactaggttatcttaaacacctgaaataagtaaatgatttgccaaatgattccgctccatatgaataataccttcaaagatacatagagattaatgttttatttaccacttctgtgcaatcgctattttaaaattgagaaaactcatccacagtaatgggtgtcattactattcagtcttgattgattttggtctcagactagaagataaaaatggtttaccagtcttggaaagaaactatagtttaatagccacaggaaaagatgcattttcaaaaatcaaaagcacagtgagatgactagagcgggacatcctaccaaatccagtgttgagcaagcgtctcctgaacagcagacgcttgtcctttctggcttagtgtttcaggttggtgtttctcgtctccagttcttgatgatgatcttgtgtttgtgccactgcgtagtggcccgaagctaggggagcgtggctggagcaggctgcacagtggagcagacaccctcctagcagaagagaaagtccagcaaaccagcccagaaacagggcctccccaaactcccacctggggacaaagtctgggacgttctcatcccagaactcctgaaccgtcttgtgggcaacccaagagacgggaaccagggctgtgactcccgaggcccaggacagaattcctcccaggatcagcagtcgcctcttgagatctctctgactctctccaattctcaaacagtccaggccaaacccagagaccagcaggcccagaaatcccagcccatttgacagaaacattaagatcctggagaccctgagttcagcaggcaaagccaggaaggagtcaaagtccttgcattgcatccccacttcctcttggatgacacaggtttgccagagtcccatggtccagttttccatttcatttaagtccaggttgaggttcttccagtgtggcaggtagtttgtaagacaggataaaacccatcccagcaaagataatgaaactccagctagttgagctacagttctaaatactaaagccattataatgtcctgagagctttagccaaactaactcctgcccttcggttgctgtgaaaagaagtgtgacacttgtgttataacttatgaaactcagaaatatttcttcattgtgtatataggaggattcttgccagagttgctattgtttgattccatgttgaatgggtttcacaaaaggatagggaaataatgccgccaaccagtaatgccaaggtgtggccaagattgtgtttgtgtcctgtgggctggatttgacagaaagcagtttgtcactgaaatataattaagtgataatctcctttcattgtcaaggttaaaatggctttcatgttattcccaacctttctaacaaagaattaagtctaaatgcaaaatgtttaactgatggttttggttcaactcctcctgctttgtgtttcactaactgcacctgtcagattttcatctcttatagttctcacatttcaaatgtgcatgttatggtaatactgagtgttattttttaaaaataggtttaagaaaagtatttcttaaccaaataaatcaatcttatcagaaa

SEQ ID NO: 23183 - DNA, 604 bp, Homo sapiens
  misc_feature 1..604: note = ENST00000508614
  source 1..604: mol_type = unassigned DNA; mol_type = unassigned DNA
gcgcgtggttccgccgcgccccgcgccctgcgcccctcagcccctcgccggcgcccgcgtcgcgggttggcagcctagcccggcagccgcgttcccgccgcgtcccgcgcccggtacctatggaggcgccgctcgccggcgaggccgccgaccatgcctaggagggccgggagcggtcagctgccgctgccccggggctgggaggaggccagggactacgacggcaaggtcttctacattgaccacaacaccaggaggaccagctggatcgacccccgggacaggttaacgaagcccttgtcatttgctgattgtgttggggatgagctgccgtggggatgggaagcagggtttgaccctcagattggtgtctactacatcgatcacatcaacagttaaaaagctaaagagagagctctcacagatgaagcaggaactgctctataaagaacaaggctttgaaacattgcagcaaattgataaaaaaatgtctggaggccagagcgggtatgaactcagtgaagccaaagccattctaacagaactaaaatctatcagaaaggcaattagctcaggagaaaaagaaaaacaagatctgatgcag

SEQ ID NO: 23184 - DNA, 4887 bp, Homo sapiens
  misc_feature 1..4887: note = ENST00000513834
  source 1..4887: mol_type = unassigned DNA; mol_type = unassigned DNA
atgcctaggagggccgggagcggtcagctgccgctgccccggggctgggaggaggccagggactacgacggcaaggtcttctacattgaccacaacaccaggaggaccagctggatcgacccccgggacaggttaacgaagcccttgtcatttgctgattgtgttggggatgagctgccgtggggatgggaagcagggtttgaccctcagattggtgtctactacatcgatcacatcaacaaaaccacgcagatagaagatccaagaaaacaatggaggggggaacaggagaagatgctcaaggactacctctctgtggcacaggatgccctccggacacagaaggaactgtaccatgtgaaggagcagaggctggcgctggccctggatgaatacgtgcgattaaatgatgcctataaggaaaagtcaagttctcacacaagcttattctcaggatcttcatccagtactaaatatgatcccgatattttaaaagctgagatctccactacaagattaagggttaaaaagctaaagagagagctctcacagatgaagcaggaactgctctataaagaacaaggctttgaaacattgcagcaaattgataaaaaaatgtctggaggccagagcgggtatgaactcagtgaagccaaagccattctaacagaactaaaatctatcagaaaggcaattagctcaggagaaaaagaaaaacaagatctgatgcagagtcttgctaagctgcaggagcggtttcatttggatcagaacattggcagatctgagccagatttgagatgtagtcctgtgaactctcatttatgtctctccagacagacccttgatgctgggtcacaaacaagcatttccggagatattggagtaagaagtagatcaaatttagctgaaaaggtcaggctaagcctacagtatgaagaagccaaaagaagtatggccaacttaaaaattgaactgtcaaaattggacagtgaggcctggcctggggcactggatattgagaaggaaaaactgatgctgattaatgaaaaagaagaacttttgaaagagcttcagttcgtcaccccacagaaacgtacccaagatgaattagaacgcctagaagctgaaaggcagcggctggaagaagagttgctgtctgtgaggggaacaccaagcagagctctggccgagagattgagattggaagagagaagaaaagagctgctacagaaacttgaagaaactactaaattaactacttatttgcattcacaacttaaaagcctctctgccagcaccctgtccatgtcatctgggagcagcctgggttccctggcatcgagtcggggctctctgaacacctccagcagagggtcactcaactccctcagttccaccgaactctattacagcagtcaaagtgatcagatagatgtggattatcagtataaactggacttccttctgcaagagaaaagcggttacattccttctggacccatcaccaccatccatgaaaacgaggtggtcaagtcccctagccagcctggccagagtggactctgtggagtggcagctgcagcaacaggccacactcctccactggctgaggccccgaagtctgtggcctccctgtcctcgaggtcctccctttcctccttgtctcctccaggctctcccttggttttggaaggcacgtttcccatgtcttcttctcatgatgcctctctccatcagttcactgctgactttgaagactatgtggaaaaatcattaccaaaaagaagagtgatccacttgcttggggagaaaaccacttgtgtgtcggctgctgtgtctgatgagtctgtggctggagacagtggggtctatgaagctttcgtgaaacaacctagtgaaatggaagatgtcacatacagtgaagaggatgtagccattgtagagaccgcccaggttcagataggactcagatacaatgcaaaaagttcaagtttcatggtgattatagcacagctccgaaaccttcatgccttcttgatacctcatacttcaaaagtatattttagggttgccgttcttccttcctcaactgatgtcagctgtctgtttcgcacaaaagttcatccgcccacagaatccattttattcaatgatgtgttcagagtcgccatttcccaaacagccttacaacagaagacactgagggtagacctttgctctgtcagtaaacaccgaagggaagaatgcctggctggaactcagatcagcctggcagatttaccattttccagtgaggttttcactctatggtataacttgcttccttccaagcaaatgccttgcaaaaagaatgaagaaaatgaggactctgtatttcaaccaaaccagccgttagtagattctatagacttggatgcagtgtcagccttacttgcaagaacatcagctgagttgttagctgtggaacaagaattagcacaagaagaagaagaagaatcaggacaagaagagccaaggggcccagatggagactggctaacaatgctaagagaggcctctgatgaaattgtggctgaaaaagaggctgaagttaaattgccagaggacagtagctgtacagaagatttaagttcatgcactagtgtgcctgagatgaatgaagacgggaacaggaaagaaagcaactgtgccaaagacctcagaagtcagccacctactagaataccaacactggttgacaaagagacaaacactgatgaagccgctaatgacaatatggcagttcgccccaaagagcgcagcagcctgagctctagacagcatccgtttgtgaggagcagtgtgatagtgcgctcacagaccttttctccaggagagcggaaccagtacatctgcaggttaaatcggagtgacagtgacagttcaaccctggctaaaaaatcactgtttgtgagaaactccaccgaacgccgcagtttgagggtcaaaaggacggtttgccagtcagtccttagaagaacaacacaggaatgcccagtgcggacatctctagacttagaactggaccttcaggcatctctgacccggcagagccgcctcaatgatgagctgcaggcgctgagggacttgcggcagaagctggaggaactgaaagctcagggagagactgaccttccaccaggcgtgctggaggatgagaggttccagaggcttctgaagcaagctgagaagcaggctgaacagtccaaagaagagcagaagcaaggtctgaatgcagagaagttgatgaggcaagtctccaaggacgtgtgtcggctccgggagcagagccagaaggtgcctcggcaggtgcagtccttcagggagaagattgcctacttcaccagagcaaagataagcatcccatccctgccagctgatgatgtgtgattacatgacttaagaaattattttttcatctgttcactttcttagggagggtaaaagactgaagatttgtgtttttgttttggtgtttggttttttttggtaacgtaactgtcaactcttgaagaacttttatttcacatcagattttcaacacattaatttgtaaagtaccttgagtgtaatttttatatgcttaaaaaagaaaaaatcatataagaaagatgggataacctggtacacaaatgttgcccagtatgtgcgcattgccagtggacttcattttgtaaaaatggaatagaggcagtaccccacatgtgtactgttgagccggctgttgagaaacaacttggttcagccggtggttttgcttctcctttgtgttcctgtgagtaggctgtgccgatggcagcagcgccacgtggtatctgtgcgctggcgaggagaggagcgctttccatttggaggcagtgtgagcacacgctggagtgcagcgttccaaagtccgcccgaaatggatgctgcgtccacggccatcacctgtgcgggaacacctggtttccttaagacaatttcctttttgtccttttatatttttctaaagaaaactaagatataaactaccaagtgctcttaagaataaaaataagaataagaatacaaaggagcactactcttggctacacgaaagatcttgggattcatgacactgagggcagggagaagaaagaacaccagccacgcagagatacaaataagctcatcaaatgagcagctggtttgtctcactcagcctgaatttgcattaagtgttcaaaagtgagtttctggcttgcactagtgttttgccctaaatctaaggatggtgcctagtggtggccctgtgttctgaggacagagagagctggaggggtggagggaaatgcatcggcactcatttggtgtaaccaagaagagggggaaagatgtcttgatagaatcaaagttgccaaaaacaaagaagagtttatcaagcagatttctaacatttagtagaaactacttcatagctctcatttttagggggttctatctataatttatggtaaatagttgggaggcaaagggaagaatgtgtgtggggggattattaatttgaagtataagctaaattgtttattaaaaagcctattttggatgaacaagtttagagagataaactgactaatgtgtcctccagtttagaatttcaccttacccgacccaggcacttcttaaaaacacagatcctcagtgcagctctgccagcatcaaggcttttaaaatatgtagtatttaggccatttaaaccatacttattactcaataacccaagaaacaattttgggttagccatctaatatagcaaataaaatagattttttaaagaaatccaaaattgtcttaaaggaatggaccccttgaagaaaaaaaaaaaaa

SEQ ID NO: 23185 - DNA, 6356 bp, Homo sapiens
  misc_feature 1..6356: note = ENST00000448232
  source 1..6356: mol_type = unassigned DNA; mol_type = unassigned DNA
atgcctaggagggccgggagcggtcagctgccgctgccccggggctgggaggaggccagggactacgacggcaaggtcttctacattgaccacaacaccaggaggaccagctggatcgacccccgggacaggttaacgaagcccttgtcatttgctgattgtgttggggatgagctgccgtggggatgggaagcagggtttgaccctcagattggtgtctactacatcgatcacatcaacaaaaccacgcagatagaagatccaagaaaacaatggaggggggaacaggagaagatgctcaaggactacctctctgtggcacaggatgccctccggacacagaaggaactgtaccatgtgaaggagcagaggctggcgctggccctggatgaatacgtgcgattaaatgatgcctataaggaaaagtcaagttctcacacaagcttattctcaggatcttcatccagtactaaatatgatcccgatattttaaaagctgagatctccactacaagattaagggttaaaaagctaaagagagagctctcacagatgaagcaggaactgctctataaagaacaaggctttgaaacattgcagcaaattgataaaaaaatgtctggaggccagagcgggtatgaactcagtgaagccaaagccattctaacagaactaaaatctatcagaaaggcaattagctcaggagaaaaagaaaaacaagatctgatgcagagtcttgctaagctgcaggagcggtttcatttggatcagaacattggcagatctgagccagatttgagatgtagtcctgtgaactctcatttatgtctctccagacagacccttgatgctgggtcacaaacaagcatttccggagatattggagtaagaagtagatcaaatttagctgaaaaggtcaggctaagcctacagtatgaagaagccaaaagaagtatggccaacttaaaaattgaactgtcaaaattggacagtgaggcctggcctggggcactggatattgagaaggaaaaactgatgctgattaatgaaaaagaagaacttttgaaagagcttcagttcgtcaccccacagaaacgtacccaagatgaattagaacgcctagaagctgaaaggcagcggctggaagaagagttgctgtctgtgaggggaacaccaagcagagctctggccgagagattgagattggaagagagaagaaaagagctgctacagaaacttgaagaaactactaaattaactacttatttgcattcacaacttaaaagcctctctgccagcaccctgtccatgtcatctgggagcagcctgggttccctggcatcgagtcggggctctctgaacacctccagcagagggtcactcaactccctcagttccaccgaactctattacagcagtcaaagtgatcagatagatgtggattatcagtataaactggacttccttctgcaagagaaaagcggttacattccttctggacccatcaccaccatccatgaaaacgaggtggtcaagtcccctagccagcctggccagagtggactctgtggagtggcagctgcagcaacaggccacactcctccactggctgaggccccgaagtctgtggcctccctgtcctcgaggtcctccctttcctccttgtctcctccaggctctcccttggttttggaaggcacgtttcccatgtcttcttctcatgatgcctctctccatcagttcactgctgactttgaagactgtgagttgagtagccattttgcagatatcagcctcatcgaaaatcagattttgctggattctgattcaggaggagcctcccagtctctttcagaggataaagaccttaatgaatgtgctagggagccattatatgaaggaactgcagatgtggaaaaatcattaccaaaaagaagagtgatccacttgcttggggagaaaaccacttgtgtgtcggctgctgtgtctgatgagtctgtggctggagacagtggggtctatgaagctttcgtgaaacaacctagtgaaatggaagatgtcacatacagtgaagaggatgtagccattgtagagaccgcccaggttcagataggactcagatacaatgcaaaaagttcaagtttcatggtgattatagcacagctccgaaaccttcatgccttcttgatacctcatacttcaaaagtatattttagggttgccgttcttccttcctcaactgatgtcagctgtctgtttcgcacaaaagttcatccgcccacagaatccattttattcaatgatgtgttcagagtcgccatttcccaaacagccttacaacagaagacactgagggtagacctttgctctgtcagtaaacaccgaagggaagaatgcctggctggaactcagatcagcctggcagatttaccattttccagtgaggttttcactctatggtataacttgcttccttccaagcaaatgccttgcaaaaagaatgaagaaaatgaggactctgtatttcaaccaaaccagccgttagtagattctatagacttggatgcagtgtcagccttacttgcaagaacatcagctgagttgttagctgtggaacaagaattagcacaagaagaagaagaagaatcaggacaagaagagccaaggggcccagatggagactggttaaacacttatttcctttgctgttgggagctcaaagatgatgtgtttacacggcttacagtgaaacctttgctaacaatgctaagagaggcctctgatgaaattgtggctgaaaaagaggctgaagttaaattgccagaggacagtagctgtacagaagatttaagttcatgcactagtgtgcctgagatgaatgaagacgggaacaggaaagaaagcaactgtgccaaagacctcagaagtcagccacctactagaataccaacactggttgacaaagagacaaacactgatgaagccgctaatgacaatatggcagttcgccccaaagagcgcagcagcctgagctctagacagcatccgtttgtgaggagcagtgtgatagtgcgctcacagaccttttctccaggagagcggaaccagtacatctgcaggttaaatcggagtgacagtgacagttcaaccctggctaaaaaatcactgtttgtgagaaactccaccgaacgccgcagtttgagggtcaaaaggacggtttgccagtcagtccttagaagaacaacacaggaatgcccagtgcggacatctctagacttagaactggaccttcaggcatctctgacccggcagagccgcctcaatgatgagctgcaggcgctgagggacttgcggcagaagctggaggaactgaaagctcagggagagactgaccttccaccaggcgtgctggaggatgagaggttccagaggcttctgaagcaagctgagaagcaggctgaacagtccaaagaagagcagaagcaaggtctgaatgcagagaagttgatgaggcaagtctccaaggacgtgtgtcggctccgggagcagagccagaaggtgcctcggcaggtgcagtccttcagggagaagattgcctacttcaccagagcaaagataagcatcccatccctgccagctgatgatgtgtgattacatgacttaagaaattattttttcatctgttcactttcttagggagggtaaaagactgaagatttgtgtttttgttttggtgtttggttttttttggtaacgtaactgtcaactcttgaagaacttttatttcacatcagattttcaacacattaatttgtaaagtaccttgagtgtaatttttatatgcttaaaaaagaaaaaatcatataagaaagatgggataacctggtacacaaatgttgcccagtatgtgcgcattgccagtggacttcattttgtaaaaatggaatagaggcagtaccccacatgtgtactgttgagccggctgttgagaaacaacttggttcagccggtggttttgcttctcctttgtgttcctgtgagtaggctgtgccgatggcagcagcgccacgtggtatctgtgcgctggcgaggagaggagcgctttccatttggaggcagtgtgagcacacgctggagtgcagcgttccaaagtccgcccgaaatggatgctgcgtccacggccatcacctgtgcgggaacacctggtttccttaagacaatttcctttttgtccttttatatttttctaaagaaaactaagatataaactaccaagtgctcttaagaataaaaataagaataagaatacaaaggagcactactcttggctacacgaaagatcttgggattcatgacactgagggcagggagaagaaagaacaccagccacgcagagatacaaataagctcatcaaatgagcagctggtttgtctcactcagcctgaatttgcattaagtgttcaaaagtgagtttctggcttgcactagtgttttgccctaaatctaaggatggtgcctagtggtggccctgtgttctgaggacagagagagctggaggggtggagggaaatgcatcggcactcatttggtgtaaccaagaagagggggaaagatgtcttgatagaatcaaagttgccaaaaacaaagaagagtttatcaagcagatttctaacatttagtagaaactacttcatagctctcatttttagggggttctatctataatttatggtaaatagttgggaggcaaagggaagaatgtgtgtggggggattattaatttgaagtataagctaaattgtttattaaaaagcctattttggatgaacaagtttagagagataaactgactaatgtgtcctccagtttagaatttcaccttacccgacccaggcacttcttaaaaacacagatcctcagtgcagctctgccagcatcaaggcttttaaaatatgtagtatttaggccatttaaaccatacttattactcaataacccaagaaacaattttgggttagccatctaatatagcaaataaaatagattttttaaagaaatccaaaattgtcttaaaggaatggaccccttgaagaaaaaaaaaaaaagttttgttcctcagttagaatgctcactagctcactagcaagaatttttattttcttgaaagcaattatatatattttggaaagttcatgttattggaattgaagttcaaattaagcaacttctgagcctagaactttaattactttttcctaaatgtcccaacacttacatacaaatttctttgaagacataactggacatggcagacactgctttgaacaaaaaccagcctagtgaattgactgagtacagtcctttaaggctgcccagttcattctattagatgactaaggaaaactagaaaaagaatacagttcacccttgtcaaggtcaaatgtgaaagacagaagtttatttaatgtagaggtaaatgaaggtgagctgttttcagcatcttagtttgaccatgaaaatgtctatagaattatgtgtagttgttccgtacgattttattttcttcatttatttatttacagtcttatttatgttctgtttaatatatagtttgattctggccattttaaatatttgacacagaagagactatattggaatatttacagctttataagtctttcatcagattagctgttgactttttgtaatacaaaaagtttcagacaagtattaaagaataaaatctgtctcaggctggtagttagcagttgtgaccaagatgcttttggttgttgtatttcacaaaatttcctcatttctaacatgagagatgaacttattttaatataatcctttttctacactttaaaagtcagcaatagtgttatgtatttataggcagcttttaataatcttgtcatatttgtactaacccaaatgattcacagtgacaaaacattttaataacttgatcacaaaaccatatggacaaatatgaattttaatattataaatactatttttaaaaggtagaatttattcgcacagggtaaaaagaatgtaatatttagttctcaagtttgaattatcagtatattattacaattttgtatatcagaatcttaagtgttacaggtacaaaaagaatattgctagccaaatgaacaaagtttagctaaatctctgtagcatgcaaatcaaataaattaaaattttttgctattgctttatctatattgtcttaaatatcaaaagctcaggactgaacttaatatttaatcaggttaaattctgaacatgtttctgttttaatttgtcttgtttgtaaacgtatgcaaatacatcacataga

SEQ ID NO: 23186 - DNA, 6373 bp, Homo sapiens
  misc_feature 1..6373: note = ENST00000427431
  source 1..6373: mol_type = unassigned DNA; mol_type = unassigned DNA
tcatttgctgattgtgttggggatgagctgccgtggggatgggaagcagggtttgaccctcagattggtgtctactacatcgatcacatcaacaaaaccacgcagatagaagatccaagaaaacaatggaggggggaacaggagaagatgctcaaggactacctctctgtggcacaggatgccctccggacacagaaggaactgtaccatgtgaaggagcagaggctggcgctggccctggatgaatacgtgcgattaaatgatgcctataaggaaaagtcaagttctcacacaagcttattctcaggatcttcatccagtactaaatatgatcccgatattttaaaagctgagatctccactacaagattaaggaattgataaaaaaatgtctggaggccagagcgggtatgaactcagtgaagccaaagccattctaacagaactaaaatctatcagaaaggcaattagctcaggagaaaaagaaaaacaagatctgatgcagagtcttgctaagctgcaggagcggtttcatttggatcagaacattggcagatctgagccagatttgagatgtagtcctgtgaactctcatttatgtctctccagacagacccttgatgctgggtcacaaacaagcatttccggagatattggagtaagaagtagatcaaatttagctgaaaaggtcaggctaagcctacagtatgaagaagccaaaagaagtatggccaacttaaaaattgaactgtcaaaattggacagtgaggcctggcctggggcactggatattgagaaggaaaaactgatgctgattaatgaaaaagaagaacttttgaaagagcttcagttcgtcaccccacagaaacgtacccaagatgaattagaacgcctagaagctgaaaggcagcggctggaagaagagttgctgtctgtgaggggaacaccaagcagagctctggccgagagattgagattggaagagagaagaaaagagctgctacagaaacttgaagaaactactaaattaactacttatttgcattcacaacttaaaagcctctctgccagcaccctgtccatgtcatctgggagcagcctgggttccctggcatcgagtcggggctctctgaacacctccagcagagggtcactcaactccctcagttccaccgaactctattacagcagtcaaagtgatcagatagatgtggattatcagtataaactggacttccttctgcaagagaaaagcggttacattccttctggacccatcaccaccatccatgaaaacgaggtggtcaagtcccctagccagcctggccagagtggactctgtggagtggcagctgcagcaacaggccacactcctccactggctgaggccccgaagtctgtggcctccctgtcctcgaggtcctccctttcctccttgtctcctccaggctctcccttggttttggaaggcacgtttcccatgtcttcttctcatgatgcctctctccatcagttcactgctgactttgaagactgtgagttgagtagccattttgcagatatcagcctcatcgaaaatcagattttgctggattctgattcaggaggagcctcccagtctctttcagaggataaagaccttaatgaatgtgctagggagccattatatgaaggaactgcagatgtggaaaaatcattaccaaaaagaagagtgatccacttgcttggggagaaaaccacttgtgtgtcggctgctgtgtctgatgagtctgtggctggagacagtggggtctatgaagctttcgtgaaacaacctagtgaaatggaagatgtcacatacagtgaagaggatgtagccattgtagagaccgcccaggttcagataggactcagatacaatgcaaaaagttcaagtttcatggtgattatagcacagctccgaaaccttcatgccttcttgatacctcatacttcaaaagtatattttagggttgccgttcttccttcctcaactgatgtcagctgtctgtttcgcacaaaagttcatccgcccacagaatccattttattcaatgatgtgttcagagtcgccatttcccaaacagccttacaacagaagacactgagggtagacctttgctctgtcagtaaacaccgaagggaagaatgcctggctggaactcagatcagcctggcagatttaccattttccagtgaggttttcactctatggtataacttgcttccttccaagcaaatgccttgcaaaaagaatgaagaaaatgaggactctgtatttcaaccaaaccagccgttagtagattctatagacttggatgcagtgtcagccttacttgcaagaacatcagctgagttgttagctgtggaacaagaattagcacaagaagaagaagaagaatcaggacaagaagagccaaggggcccagatggagactggctaacaatgctaagagaggcctctgatgaaattgtggctgaaaaagaggctgaagttaaattgccagaggacagtagctgtacagaagatttaagttcatgcactagtgtgcctgagatgaatgaagacgggaacaggaaagaaagcaactgtgccaaagacctcagaagtcagccacctactagaataccaacactggttgacaaagagacaaacactgatgaagccgctaatgacaatatggcagttcgccccaaagagcgcagcagcctgagctctagacagcatccgtttgtgaggagcagtgtgatagtgcgctcacagaccttttctccaggagagcggaaccagtacatctgcaggttaaatcggagtgacagtgacagttcaaccctggctaaaaaatcactgtttgtgagaaactccaccgaacgccgcagtttgagggtcaaaaggacggtttgccagtcagtccttagaagaacaacacaggaatgcccagtgcggacatctctagacttagaactggaccttcaggcatctctgacccggcagagccgcctcaatgatgagctgcaggcgctgagggacttgcggcagaagctggaggaactgaaagctcagggagagactgaccttccaccaggcgtgctggaggatgagaggttccagaggcttctgaagcaagctgagaagcaggctgaacagtccaaagaagagcagaagcaaggtctgaatgcagagaagttgatgaggcaagtctccaaggacgtgtgtcggctccgggagcagagccagaaggtgcctcggcaggtgcagtccttcagggagaagattgcctacttcaccagagcaaagataagcatcccatccctgccagctgatgatgtgtgattacatgacttaagaaattattttttcatctgttcactttcttagggagggtaaaagactgaagatttgtgtttttgttttggtgtttggttttttttggtaacgtaactgtcaactcttgaagaacttttatttcacatcagattttcaacacattaatttgtaaagtaccttgagtgtaatttttatatgcttaaaaaagaaaaaatcatataagaaagatgggataacctggtacacaaatgttgcccagtatgtgcgcattgccagtggacttcattttgtaaaaatggaatagaggcagtaccccacatgtgtactgttgagccggctgttgagaaacaacttggttcagccggtggttttgcttctcctttgtgttcctgtgagtaggctgtgccgatggcagcagcgccacgtggtatctgtgcgctggcgaggagaggagcgctttccatttggaggcagtgtgagcacacgctggagtgcagcgttccaaagtccgcccgaaatggatgctgcgtccacggccatcacctgtgcgggaacacctggtttccttaagacaatttcctttttgtccttttatatttttctaaagaaaactaagatataaactaccaagtgctcttaagaataaaaataagaataagaatacaaaggagcactactcttggctacacgaaagatcttgggattcatgacactgagggcagggagaagaaagaacaccagccacgcagagatacaaataagctcatcaaatgagcagctggtttgtctcactcagcctgaatttgcattaagtgttcaaaagtgagtttctggcttgcactagtgttttgccctaaatctaaggatggtgcctagtggtggccctgtgttctgaggacagagagagctggaggggtggagggaaatgcatcggcactcatttggtgtaaccaagaagagggggaaagatgtcttgatagaatcaaagttgccaaaaacaaagaagagtttatcaagcagatttctaacatttagtagaaactacttcatagctctcatttttagggggttctatctataatttatggtaaatagttgggaggcaaagggaagaatgtgtgtggggggattattaatttgaagtataagctaaattgtttattaaaaagcctattttggatgaacaagtttagagagataaactgactaatgtgtcctccagtttagaatttcaccttacccgacccaggcacttcttaaaaacacagatcctcagtgcagctctgccagcatcaaggcttttaaaatatgtagtatttaggccatttaaaccatacttattactcaataacccaagaaacaattttgggttagccatctaatatagcaaataaaatagattttttaaagaaatccaaaattgtcttaaaggaatggaccccttgaagaaaaaaaaaaaaagttttgttcctcagttagaatgctcactagctcactagcaagaatttttattttcttgaaagcaattatatatattttggaaagttcatgttattggaattgaagttcaaattaagcaacttctgagcctagaactttaattactttttcctaaatgtcccaacacttacatacaaatttctttgaagacataactggacatggcagacactgctttgaacaaaaaccagcctagtgaattgactgagtacagtcctttaaggctgcccagttcattctattagatgactaaggaaaactagaaaaagaatacagttcacccttgtcaaggtcaaatgtgaaagacagaagtttatttaatgtagaggtaaatgaaggtgagctgttttcagcatcttagtttgaccatgaaaatgtctatagaattatgtgtagttgttccgtacgattttattttcttcatttatttatttacagtcttatttatgttctgtttaatatatagtttgattctggccattttaaatatttgacacagaagagactatattggaatatttacagctttataagtctttcatcagattagctgttgactttttgtaatacaaaaagtttcagacaagtattaaagaataaaatctgtctcaggctggtagttagcagttgtgaccaagatgcttttggttgttgtatttcacaaaatttcctcatttctaacatgagagatgaacttattttaatataatcctttttctacactttaaaagtcagcaatagtgttatgtatttataggcagcttttaataatcttgtcatatttgtactaacccaaatgattcacagtgacaaaacattttaataacttgatcacaaaaccatatggacaaatatgaattttaatattataaatactatttttaaaaggtagaatttattcgcacagggtaaaaagaatgtaatatttagttctcaagtttgaattatcagtatattattacaattttgtatatcagaatcttaagtgttacaggtacaaaaagaatattgctagccaaatgaacaaagtttagctaaatctctgtagcatgcaaatcaaataaattaaaattttttgctattgctttatctatattgtcttaaatatcaaaagctcaggactgaacttaatatttaatcaggttaaattctgaacatgtttctgttttaatttgtcttgtttgtaaacgtatgcaaatacatcacatagattaactggtttctgcactttccatgtgtttgtgggtggaaaaaaattcagtggttttttttaaaaaaaaaagcaaaaacaaagctacatattgcctaatactctatttcagtgtcgtttattgttcagtttatttccctgattggcacaaacacaagagtttccttgaaccatgtaccaagcaaatacaaaatatttcatgaagaaatccccaggctggcagtttgtgatgaatagttcttgttggaactatatgtattgctgataaaaaaggacgaagtattttcattgagcaaataaaatgaagggctccagaa

SEQ ID NO: 23187 - DNA, 3824 bp, Homo sapiens
  misc_feature 1..3824: note = ENST00000438543
  source 1..3824: mol_type = unassigned DNA; mol_type = unassigned DNA
agtgtggcctgggctgactaatgtacactctctacacccctaagaaaggggttgtggaactctgagtgggctgtggaagtattttcagaaaccacgcagatagaagatccaagaaaacaatggaggggggaacaggagaagatgctcaaggactacctctctgtggcacaggatgccctccggacacagaaggaactgtaccatgtgaaggagcagaggctggcgctggccctggatgaatacgtgcgattaaatgatgcctataaggaaaagtcaagttctcacacaagcttattctcaggatcttcatccagtactaaatatgatcccgatattttaaaagctgagatctccactacaagattaagggttaaaaagctaaagagagagctctcacagatgaagcaggaactgctctataaagaacaaggctttgaaacattgcagcaaattgataaaaaaatgtctggaggccagagcgggtatgaactcagtgaagccaaagccattctaacagaactaaaatctatcagaaaggcaattagctcaggagaaaaagaaaaacaagatctgatgcagagtcttgctaagctgcaggagcggtttcatttggatcagaacattggcagatctgagccagatttgagatgtagtcctgtgaactctcatttatgtctctccagacagacccttgatgctgggtcacaaacaagcatttccggagatattggagtaagaagtagatcaaatttagctgaaaaggtcaggctaagcctacagtatgaagaagccaaaagaagtatggccaacttaaaaattgaactgtcaaaattggacagtgaggcctggcctggggcactggatattgagaaggaaaaactgatgctgattaatgaaaaagaagaacttttgaaagagcttcagttcgtcaccccacagaaacgtacccaagatgaattagaacgcctagaagctgaaaggcagcggctggaagaagagttgctgtctgtgaggggaacaccaagcagagctctggccgagagattgagattggaagagagaagaaaagagctgctacagaaacttgaagaaactactaaattaactacttatttgcattcacaacttaaaagcctctctgccagcaccctgtccatgtcatctgggagcagcctgggttccctggcatcgagtcggggctctctgaacacctccagcagagggtcactcaactccctcagttccaccgaactctattacagcagtcaaagtgatcagatagatgtggattatcagtataaactggacttccttctgcaagagaaaagcggttacattccttctggacccatcaccaccatccatgaaaacgaggtggtcaagtcccctagccagcctggccagagtggactctgtggagtggcagctgcagcaacaggccacactcctccactggctgaggccccgaagtctgtggcctccctgtcctcgaggtcctccctttcctccttgtctcctccaggctctcccttggttttggaaggcacgtttcccatgtcttcttctcatgatgcctctctccatcagttcactgctgactttgaagactgtgagttgagtagccattttgcagatatcagcctcatcgaaaatcagattttgctggattctgattcaggaggagcctcccagtctctttcagaggataaagaccttaatgaatgtgctagggagccattatatgaaggaactgcagatgtggaaaaatcattaccaaaaagaagagtgatccacttgcttggggagaaaaccacttgtgtgtcggctgctgtgtctgatgagtctgtggctggagacagtggggtctatgaagctttcgtgaaacaacctagtgaaatggaagatgtcacatacagtgaagaggatgtagccattgtagagaccgcccaggttcagataggactcagatacaatgcaaaaagttcaagtttcatggtgattatagcacagctccgaaaccttcatgccttcttgatacctcatacttcaaaagtatattttagggttgccgttcttccttcctcaactgatgtcagctgtctgtttcgcacaaaagttcatccgcccacagaatccattttattcaatgatgtgttcagagtcgccatttcccaaacagccttacaacagaagacactgaggaagaactttacctttgtgacagctatcactcatggagtgtgcttaccactcccagtaccaatgccaagctttgcgtgactgctgtgtatatattatctcatttaatcctcatgacaacctgatgaaagattggttatgaaatggatgattatccactattttcagataaggagctgcttagagagtattggagctttcgggaagatgtgatgttactgtttaaagcaatatgacatttaaatgctacagcagaagacttcacagttaactaattgctggaactcagatcagcctggcagatttaccattttccagtgaggttttcactctatggtataacttgcttccttccaagcaaatgccttgcaaaaagaatgaagaaaatgaggactctgtatttcaaccaaaccagccgttagtagattctatagacttggatgcagtgtcagccttacttgcaagaacatcagctgagttgttagctgtggaacaagaattagcacaagaagaagaagaagaatcaggacaagaagagccaaggggcccagatggagactggctaacaatgctaagagaggcctctgatgaaattgtggctgaaaaagaggctgaagttaaattgccagaggacagtagctgtacagaagatttaagttcatgcactagtgtgcctgagatgaatgaagacgggaacaggaaagaaagcaactgtgccaaagacctcagaagtcagccacctactagaataccaacactggttgacaaagagacaaacactgatgaagccgctaatgacaatatggcagttcgccccaaagagcgcagcagcctgagctctagacagcatccgtttgtgaggagcagtgtgatagtgcgctcacagaccttttctccaggagagcggaaccagtacatctgcaggttaaatcggagtgacagtgacagttcaaccctggctaaaaaatcactgtttgtgagaaactccaccgaacgccgcagtttgagggtcaaaaggacggtttgccagtcagtccttagaagaacaacacaggaatgcccagtgcggacatctctagacttagaactggaccttcaggcatctctgacccggcagagccgcctcaatgatgagctgcaggcgctgagggacttgcggcagaagctggaggaactgaaagctcagggagagactgaccttccaccaggcgtgctggaggatgagaggttccagaggcttctgaagcaagctgagaagcaggctgaacagtccaaagaagagcagaagcaaggtctgaatgcagagaagttgatgaggcaagtctccaaggacgtgtgtcggctccgggagcagagccagaaggtgcctcggcaggtgcagtccttcagggagaagattgcctacttcaccagagcaaagataagcatcccatccctgccagctgatgatgtgtgattacatgacttaagaaattattttttcatctgttcactttcttagggagggtaaaagactgaagatttgtgtttttgttttggtgtttggttttttttggtaacgtaactgtcaactcttgaagaacttttatttcacatcagattttcaacacattaatttgtaaagt

SEQ ID NO: 23188 - DNA, 5247 bp, Homo sapiens
  misc_feature 1..5247: note = ENST00000504005
  source 1..5247: mol_type = unassigned DNA; mol_type = unassigned DNA
atgatcccgatattttaaaagctgagatctccactacaagattaaggtatggccaacttaaaaattgaactgtcaaaattggacagtgaggcctggcctggggcactggatattgagaaggaaaaactgatgctgattaatgaaaaagaagaacttttgaaagagcttcagttcgtcaccccacagaaacgtacccaagatgaattagaacgcctagaagctgaaaggcagcggctggaagaagagttgctgtctgtgaggggaacaccaagcagagctctggccgagagattgagattggaagagagaagaaaagagctgctacagaaacttgaagaaactactaaattaactacttatttgcattcacaacttaaaagcctctctgccagcaccctgtccatgtcatctgggagcagcctgggttccctggcatcgagtcggggctctctgaacacctccagcagagggtcactcaactccctcagttccaccgaactctattacagcagtcaaagtgatcagatagatgtggattatcagtataaactggacttccttctgcaagagaaaagcggttacattccttctggacccatcaccaccatccatgaaaacgaggtggtcaagtcccctagccagcctggccagagtggactctgtggagtggcagctgcagcaacaggccacactcctccactggctgaggccccgaagtctgtggcctccctgtcctcgaggtcctccctttcctccttgtctcctccaggctctcccttggttttggaaggcacgtttcccatgtcttcttctcatgatgcctctctccatcagttcactgctgactttgaagactgtgagttgagtagccattttgcagatatcagcctcatcgaaaatcagattttgctggattctgattcaggaggagcctcccagtctctttcagaggataaagaccttaatgaatgtgctagggagccattatatgaaggaactgcagatgtggaaaaatcattaccaaaaagaagagtgatccacttgcttggggagaaaaccacttgtgtgtcggctgctgtgtctgatgagtctgtggctggagacagtggggtctatgaagctttcgtgaaacaacctagtgaaatggaagatgtcacatacagtgaagaggatgtagccattgtagagaccgcccaggttcagataggactcagatacaatgcaaaaagttcaagtttcatggtgattatagcacagctccgaaaccttcatgccttcttgatacctcatacttcaaaagtatattttagggttgccgttcttccttcctcaactgatgtcagctgtctgtttcgcacaaaagttcatccgcccacagaatccattttattcaatgatgtgttcagagtcgccatttcccaaacagccttacaacagaagacactgagggtagacctttgctctgtcagtaaacaccgaagggaagaatgcctggctggaactcagatcagcctggcagatttaccattttccagtgaggttttcactctatggtataacttgcttccttccaagcaaatgccttgcaaaaagaatgaagaaaatgaggactctgtatttcaaccaaaccagccgttagtagattctatagacttggatgcagtgtcagccttacttgcaagaacatcagctgagttgttagctgtggaacaagaattagcacaagaagaagaagaagaatcaggacaagaagagccaaggggcccagatggagactggctaacaatgctaagagaggcctctgatgaaattgtggctgaaaaagaggctgaagttaaattgccagaggacagtagctgtacagaagatttaagttcatgcactagtgtgcctgagatgaatgaagacgggaacaggaaagaaagcaactgtgccaaagacctcagaagtcagccacctactagaataccaacactggttgacaaagagacaaacactgatgaagccgctaatgacaatatggcagttcgccccaaagagcgcagcagcctgagctctagacagcatccgtttgtgaggagcagtgtgatagtgcgctcacagaccttttctccaggagagcggaaccagtacatctgcaggttaaatcggagtgacagtgacagttcaaccctggctaaaaaatcactgtttgtgagaaactccaccgaacgccgcagtttgagggtcaaaaggacggtttgccagtcagtccttagaagaacaacacaggaatgcccagtgcggacatctctagacttagaactggaccttcaggcatctctgacccggcagagccgcctcaatgatgagctgcaggcgctgagggacttgcggcagaagctggaggaactgaaagctcagggagagactgaccttccaccaggcgtgctggaggatgagaggttccagaggcttctgaagcaagctgagaagcaggctgaacagtccaaagaagagcagaagcaaggtctgaatgcagagaagttgatgaggcaagtctccaaggacgtgtgtcggctccgggagcagagccagaaggtgcctcggcaggtgcagtccttcagggagaagattgcctacttcaccagagcaaagataagcatcccatccctgccagctgatgatgtgtgattacatgacttaagaaattattttttcatctgttcactttcttagggagggtaaaagactgaagatttgtgtttttgttttggtgtttggttttttttggtaacgtaactgtcaactcttgaagaacttttatttcacatcagattttcaacacattaatttgtaaagtaccttgagtgtaatttttatatgcttaaaaaagaaaaaatcatataagaaagatgggataacctggtacacaaatgttgcccagtatgtgcgcattgccagtggacttcattttgtaaaaatggaatagaggcagtaccccacatgtgtactgttgagccggctgttgagaaacaacttggttcagccggtggttttgcttctcctttgtgttcctgtgagtaggctgtgccgatggcagcagcgccacgtggtatctgtgcgctggcgaggagaggagcgctttccatttggaggcagtgtgagcacacgctggagtgcagcgttccaaagtccgcccgaaatggatgctgcgtccacggccatcacctgtgcgggaacacctggtttccttaagacaatttcctttttgtccttttatatttttctaaagaaaactaagatataaactaccaagtgctcttaagaataaaaataagaataagaatacaaaggagcactactcttggctacacgaaagatcttgggattcatgacactgagggcagggagaagaaagaacaccagccacgcagagatacaaataagctcatcaaatgagcagctggtttgtctcactcagcctgaatttgcattaagtgttcaaaagtgagtttctggcttgcactagtgttttgccctaaatctaaggatggtgcctagtggtggccctgtgttctgaggacagagagagctggaggggtggagggaaatgcatcggcactcatttggtgtaaccaagaagagggggaaagatgtcttgatagaatcaaagttgccaaaaacaaagaagagtttatcaagcagatttctaacatttagtagaaactacttcatagctctcatttttagggggttctatctataatttatggtaaatagttgggaggcaaagggaagaatgtgtgtggggggattattaatttgaagtataagctaaattgtttattaaaaagcctattttggatgaacaagtttagagagataaactgactaatgtgtcctccagtttagaatttcaccttacccgacccaggcacttcttaaaaacacagatcctcagtgcagctctgccagcatcaaggcttttaaaatatgtagtatttaggccatttaaaccatacttattactcaataacccaagaaacaattttgggttagccatctaatatagcaaataaaatagattttttaaagaaatccaaaattgtcttaaaggaatggaccccttgaagaaaaaaaaaaaaagttttgttcctcagttagaatgctcactagctcactagcaagaatttttattttcttgaaagcaattatatatattttggaaagttcatgttattggaattgaagttcaaattaagcaacttctgagcctagaactttaattactttttcctaaatgtcccaacacttacatacaaatttctttgaagacataactggacatggcagacactgctttgaacaaaaaccagcctagtgaattgactgagtacagtcctttaaggctgcccagttcattctattagatgactaaggaaaactagaaaaagaatacagttcacccttgtcaaggtcaaatgtgaaagacagaagtttatttaatgtagaggtaaatgaaggtgagctgttttcagcatcttagtttgaccatgaaaatgtctatagaattatgtgtagttgttccgtacgattttattttcttcatttatttatttacagtcttatttatgttctgtttaatatatagtttgattctggccattttaaatatttgacacagaagagactatattggaatatttacagctttataagtctttcatcagattagctgttgactttttgtaatacaaaaagtttcagacaagtattaaagaataaaatctgtctcaggctggtagttagcagttgtgaccaagatgcttttggttgttgtatttcacaaaatttcctcatttctaacatgagagatgaacttattttaatataatcctttttctacactttaaaagtcagcaatagtgttatgtatttataggcagcttttaataatcttgtcatatttgtactaacccaaatgattcacagtgacaaaacattttaataacttgatcacaaaaccatatggacaaatatgaattttaatattataaatactatttttaaaaggtagaatttattcgcacagggtaaaaagaatgtaatatttagttctcaagtttgaattatcagtatattattacaattttgtatatcagaatcttaagtgttacaggtacaaaaagaatattgctagccaaatgaacaaagtttagctaaatctctgtagcatgcaaatcaaataaattaaaattttttgct

SEQ ID NO: 23189 - DNA, 553 bp, Homo sapiens
  misc_feature 1..553: note = ENST00000506225
  source 1..553: mol_type = unassigned DNA; mol_type = unassigned DNA
aatgcaaaaagttcaagtttcatggtgattatagcacagctccgaaaccttcatgccttcttgatacctcatacttcaaaagtatattttagggttgccgttcttccttcctcaactgatgtcagctgtctgtttcgcacaaaagttcatccgcccacagaatccattttattcaatgatgtgttcagagtcgccatttcccaaacagccttacaacagaagacactgagggtagacctttgctctgtcagtaaacaccgaagggaagaatgcctgtattggagctttcgggaagatgtgatgttactgtttaaagcaatatgacatttaaatgctacagcagaagacttcacagttaactaattgtgagtttaatacactgttgtgcgtaataaccagaaaaccattatgtcccagtaaagttacataagtattcaaatgcaggcatctagagatgtgccatgtgttcagaaaacaatgtgagtctccaattgagcttttctctgcagtccagtgggaagcacagaaacacatgtttcatgatgaacaaagt

SEQ ID NO: 23190 - DNA, 641 bp, Homo sapiens
  misc_feature 1..641: note = ENST00000515284
  source 1..641: mol_type = unassigned DNA; mol_type = unassigned DNA
aaccagccgttagtagattctatagacttggatgcagtgtcagccttacttgcaagaacatcagctgagttgttagctgtggaacaagaattagcacaagaagaagaagaagaatcaggacaagaagagccaaggggcccagatggagactggttaaacacttatttcctttgctgttgggagctcaaagatgatgtgtttacacggcttacagtgaaacctttgtaggctcatgctttattccagaatgatggaatgcactgcaccttcaggaagctgtgctaggaaaagtctttccttggtcattagagagttaaggaagtaatggcaagattatgggcaaagttaaaacattagccagattctttgttcttgtttcgagtaattttaaaacactattttctgagcctttttttttttagtctaaacttgattttgaaaggtatggtagcttattgtagagttatagataattttaaaagtgactctatttttcttttaactacctggaagtaccatttaggctctagtaagacaaagcaggtatttaaaaaacaacttctgagtactcatttctctgttaccactcttaccttctttttctgtgtccttccctgtatccatacccaatcctttaaaaa

SEQ ID NO: 23191 - DNA, 1216 bp, Homo sapiens
  misc_feature 1..1216: note = ENST00000508747
  source 1..1216: mol_type = unassigned DNA; mol_type = unassigned DNA
tgagtctgtttatttcccagataacaacttagcatgcccaggttgcgtgttcatggagcatgcctgcctaccaaaagtgttttgtttttgttttaccataggctaacaatgctaagagaggcctctgatgaaattgtggctgaaaaagaggctgaagttaaattgccagaggacagtagctgtacagaagatttaagttcatgcactagtgtgcctgagatgaatgaagacgggaacaggaaagaaagcaactgtgccaaagacctcagaagtcagccacctactagaataccaacactggttgacaaagagacaaacactgatgaagccgctaatgacaatatggcagttcgccccaaagagcgcagcagcctgagctctagacagcatccgtttgtgaggagcagtgtgatagtgcgctcacagaccttttctccaggagagcggaaccagtacatctgcaggttaaatcggagtgacagtgacagttcaaccctggctaaaaaatcactgtttgtgagaaactccaccgaacgccgcagtttgagggtcaaaaggacggtttgccagtcagtccttagaagaacaacacaggaatgcccagtgcggacatctctagacttagaactggaccttcaggcatctctgacccggcagagccgcctcaatgatgagctgcaggcgctgagggacttgcggcagaagctggaggaactgaaagctcagggagagactgaccttccaccaggcgtgctggaggatgagaggttccagaggcttctgaagcaagctgagaagcaggctgaacagtccaaagaagagcagaagcaaggtctgaatgcagagaagttgatgaggcaagtctccaaggacgtgtgtcggctccgggagcagagccagaaggtgcctcggcaggtgcagtccttcagggagaagattgcctacttcaccagagcaaagataagcatcccatccctgccagctgatgatgtgtgattacatgacttaagaaattattttttcatctgttcactttcttagggagggtaaaagactgaagatttgtgtttttgttttggtgtttggttttttttggtaacgtaactgtcaactcttgaagaacttttatttcacatcagattttcaacacattaatttgtaaagtaccttgagtgtaatttttatatgcttaaaaaagaaaaaatcatataagaaa

SEQ ID NO: 23192 - DNA, 2865 bp, Homo sapiens
  misc_feature 1..2865: note = ENST00000434839
  source 1..2865: mol_type = unassigned DNA; mol_type = unassigned DNA
agcagaagatggaattagactgatgacacactgtccagctactcagcgaagacctgggtgaattagcatggcacttcgcagctgtctttagccagtcaggagaaagaagtggaggggccacgtgtatgtctcccagtgggcggtacaccaggtgttttcaaggacattctgagcatgtgagacctgaggactgcaaacagctataagaggctccaaattaatcatatctttccctttgagaatctggccaagctccagctaatctacttggatgggttgccagctatctggagaaaaagatcttcctcagaagaataggcttgttgttttacagtgttagtgatccattccctttgacgatccctaggtggagatggggcatgaggatcctccaggggaaaagctcactaccactgggcaacaaccctaggtcaggaggttctgtcaagatactttcctggtcccagataggaagataaagtctcaaaaacaaccaccacacgtcaagctcttcattgttcctatctgccaaatcattatacttcctacaagcagtgcagagagctgagtcttcagcaggtccaagaaatttgaacacactgaaggaagtcagccttcccacctgaagatcaacatgcctggcactctagcacttgaggatagctgaatgaatgtgtcttacccatttccatgtttctcttgctaatttctttcgtgtgtgcctttgcctcattttctctttttgttcacaagagtggtctgtgtcttgtcttagacatatctctcatttttcattttgttgctatttctctttgctctcctagatgtggctcttctttcacgctttatttcatgtctcctttttgggtcacatgctgtgtgctttttgtccttttcttgttctgtctacctctcctttctctgcctacctctcttttctctttgtgaactgtgattatttgttaccccttccccttctcgttcgttttaaatttcaccttttttctgagtctggcctcctttctgctgtttctactttttatctcacatttctcatttctgcatttcctttctgcctctcttgggctattctctctctcctcccctgcgtgcctcagcatctcttgctgtttgtgattttctatttcagtattaatctctgttggcttgtatttgttctctgcttcttccctttctactcacctttgagtatttcagcctcttcatgaatctatctccctctctttgatttcatgtaatctctccttaaatatttctttgcatatgtgggcaagtgtacgtgtgtgtgtgtcatgtgtggcagaggggcttcctaacccctgcctgataggtgcagaacgtcggctatcagagcaagcattgtggagcggttccttatgccaggctgccatgtgagatgatccaagaccaaaacaaggccctagactgcagtaaaacccagaactcaagtagggcagaaggtggaaggctcatatggatagaaggcccaaagtataagacagatggtttgagacttgagacccgaggactaagatggaaagcccatgttccaagatagatagaagcctcaggcctgaaaccaacaaaagcctcaagagccaagaaaacagagggtggcctgaattggaccgaaggcctgagttggatggaagtctcaaggcttgagttagaagtcttaagacctgggacaggacacatggaaggcctaagaactgagacttgtgacacaaggccaacgacctaagattagcccagggttgtagctggaagacctacaacccaaggatggaaggcccctgtcacaaagcctacctagatggatagaggacccaagcgaaaaaggtatctcaagactaacggccggaatctggaggcccatgacccagaacccaggaaggatagaagcttgaagacctggggaaatcccaagatgagaaccctaaaccctacctcttttctattgtttacacttcttactcttagatatttccagttctcctgtttatctttaagcctgattcttttgagatgtactttttgatgttgccggttacctttagattgacagtattatgcctgggccagtcttgagccagctttaaatcacagcttttacctatttgttaggctatagtgttttgtaaacttctgtttctattcacatcttctccacttgagagagacaccaaaatccagtcagtatctaatctggcttttgttaacttccctcaggagcagacattcatataggtgatactgtatttcagtcctttcttttgaccccagaagccctagactgagaagataaaatggtcaggttgttggggaaaaaaaagtgccaggctctctagagaaaaatgtgaagagatgctccaggccaatgagaagaattagacaagaaatacacagatgtgccagacttctgagaagcacctgccagcaacagcttccttctttgagcttagtttctggcatcactaccactactgattaaacaagaataagagaacattttatcatcatctgctttattcacataaatgaagttgtgatgaataaatctgcttttatgcagacacaaggaattaagtggcttcgtcattgtccttctacctcaaagataatttattccaaaagctaagataaatggaagactcttgaacttgtgaactgatgtgaaatgcagaatctcttttgagtctttgctgtttggaagattgaaaaatattgttcagcatgggtgaccaccagaaagtaatcttaagccatctagatgtcacaattgaaacaaactggggagttggttgctattgtaaaataaaatatactgttttgaaaactttg

SEQ ID NO: 23193 - DNA, 446 bp, Homo sapiens
  misc_feature 1..446: note = ENST00000421322
  source 1..446: mol_type = unassigned DNA; mol_type = unassigned DNA
tacaacccaaggatggaaggcccctgtcacaaagcctacctagatggatagaggacccaagcgaaaaagtttctggcatcactaccactactgattaaacaagaataagagaacattttatcatcatctgctttattcacataaatgaagttgtgatgaataaatctgcttttatgcagacacaaggaattaagtggcttcgtcattgtccttctacctcaaagataatttattccaaaagctaagataaatggaagactcttgaacttgtgaactgatgtgaaatgcagaatctcttttgagtctttgctgtttggaagattgaaaaatattgttcagcatgggtgaccaccagaaagtaatcttaagccatctagatgtcacaattgaaacaaactggggagttggttgctattgtaaaataaaatatactgttttgaaaactt

SEQ ID NO: 23194 - DNA, 724 bp, Homo sapiens
  misc_feature 1..724: note = ENST00000417942
  source 1..724: mol_type = unassigned DNA; mol_type = unassigned DNA
gaccccagaagccctagactgagaagataaaatggtcaggttgttggggaaaaaaaagtgccaggctctctagagaaaaatgtgaagagatgctccaggccaatgagaagaattagacaagaaatacacagatgtgccagacttctgagaagcacctgccagcaacagcttccttctttgagcttagacacttcattttcctagtccatccctcatgaaaaatgactgaccactgctgggcagcaggagggatgatgaccaactaattcccaaaccccagtctcattggtaccagccttggggaaccacctacacttgagccacaattggttttgaagtgcatttacaagtttctggcatcactaccactactgattaaacaagaataagagaacattttatcatcatctgctttattcacataaatgaagttgtgatgaataaatctgcttttatgcagacacaaggaattaagtggcttcgtcattgtccttctacctcaaagataatttattccaaaagctaagataaatggaagactcttgaacttgtgaactgatgtgaaatgcagaatctcttttgagtctttgctgtttggaagattgaaaaatattgttcagcatgggtgaccaccagaaagtaatcttaagccatctagatgtcacaattgaaacaaactggggagttggttgctattgtaaaataaaatatactgttttgaaaa

SEQ ID NO: 23195 - DNA, 750 bp, Homo sapiens
  misc_feature 1..750: note = ENST00000416330
  source 1..750: mol_type = unassigned DNA; mol_type = unassigned DNA
cagacattcatataggtgatactgtatttcagtcctttcttttgaccccagaagccctagactgagaagataaaatggtcaggttgttggggaaaaaaaagtgccaggctctctagagaaaaatgtgaagagatgctccaggccaatgagaagaattagacaagaaatacacagatgtgccagacttctgagaagcacctgccagcaacagcttccttctttgagcttagtccatccctcatgaaaaatgactgaccactgctgggcagcaggagggatgatgaccaactaattcccaaaccccagtctcattggtaccagccttggggaaccacctacacttgagccacaattggttttgaagtgcatttacaagtttctggcatcactaccactactgattaaacaagaataagagaacattttatcatcatctgctttattcacataaatgaagttgtgatgaataaatctgcttttatgcagacacaaggaattaagtggcttcgtcattgtccttctacctcaaagataatttattccaaaagctaagataaatggaagactcttgaacttgtgaactgatgtgaaatgcagaatctcttttgagtctttgctgtttggaagattgaaaaatattgttcagcatgggtgaccaccagaaagtaatcttaagccatctagatgtcacaattgaaacaaactggggagttggttgctattgtaaaataaaatatactgttttgaaaa

SEQ ID NO: 23196 - DNA, 19275 bp, Homo sapiens
  misc_feature 1..19275: note = ENST00000429829
  source 1..19275: mol_type = unassigned DNA; mol_type = unassigned DNA
ccttcagttcttaaagcgctgcaattcgctgctgcagccatatttcttactctctcggggctggaagcttcctgactgaagatctctctgcacttggggttctttctagaacattttctagtcccccaacaccctttatggcgtatttctttaaaaaaatcacctaaattccataaaatatttttttaaattctatactttctcctagtgtcttcttgacacgtcctccatatttttttaaagaaagtatttggaatattttgaggcaatttttaatatttaaggaatttttctttggaatcatttttggttgacatctctgttttttgtggatcagttttttactcttccactctcttttctatattttgcccatcggggctgcggatacctggttttattattttttctttgcccaacggggccgtggatacctgccttttaattcttttttattcgcccatcggggccgcggatacctgctttttatttttttttccttagcccatcggggtatcggatacctgctgattcccttcccctctgaacccccaacactctggcccatcggggtgacggatatctgctttttaaaaattttctttttttggcccatcggggcttcggatacctgctttttttttttttatttttccttgcccatcggggcctcggatacctgctttaatttttgtttttctggcccatcggggccgcggatacctgctttgatttttttttttcatcgcccatcggtgctttttatggatgaaaaaatgttggttttgtgggttgttgcactctctggaatatctacacttttttttgctgctgatcatttggtggtgtgtgagtgtacctaccgctttggcagagaatgactctgcagttaagctaagggcgtgttcagattgtggaggaaaagtggccgccattttagacttgccgcataactcggcttagggctagtcgtttgtgctaagttaaactagggaggcaagatggatgatagcaggtcaggcagaggaagtcatgtgcattgcatgagctaaacctatctgaatgaattgatttggggcttgttaggagctttgcgtgattgttgtatcgggaggcagtaagaatcatcttttatcagtacaagggactagttaaaaatggaaggttaggaaagactaaggtgcagggcttaaaatggcgattttgacattgcggcattgctcagcatggcgggctgtgctttgttaggttgtccaaaatggcggatccagttctgtcgcagtgttcaagtggcgggaaggccacatcatgatgggcgaggctttgttaagtggttagcatggtggtggacatgtgcggtcacacaggaaaagatggcggctgaaggtcttgccgcagtgtaaaacatggcgggcctctttgtctttgctgtgtgcttttcgtgttgggttttgccgcagggacaatatggcaggcgttgtcatatgtatatcatggcttttgtcacgtggacatcatggcgggcttgccgcattgttaaagatggcgggttttgccgcctagtgccacgcagagcgggagaaaaggtgggatggacagtgctggattgctgcataacccaaccaattagaaatgggggtggaattgatcacagccaattagagcagaagatggaattagactgatgacacactgtccagctactcagcgaagacctgggtgaattagcatggcacttcgcagctgtctttagccagtcaggagaaagaagtggaggggccacgtgtatgtctcccagtgggcggtacaccaggtgttttcaaggtcttttcaaggacatttagcctttccacctctgtcccctcttatttgtcccctcctgtccagtgctgcctcttgcagtgctggatatctggctgtgtggtctgaacctccctccattcctctgtattggtgcctcacctaaggctaagtatacctccccccccaccccccaacccccccaactccccacccccaccccccaccccccacctccccacccccctacccccctacccccctacccccctctggtctgccctgcactgcactgttgccatgggcagtgctccaggcctgcttggtgtggacatggtggtgagccgtggcaaggaccagaatggatcacagatgatcgttggccaacaggtggcagaagaggaattcctgccttcctcaagaggaacacctaccccttggctaatgctggggtcggattttgatttatatttatcttttggatgtcagtcatacagtctgattttgtggtttgctagtgtttgaatttaagtcttaagtgactattatagaaatgtattaagaggctttatttgtagaattcactttaattacatttaatgagtttttgttttgagttccttaaaattccttaaagtttttagcttctcattacaaattccttaacctttttttggcagtagatagtcaaagtcaaatcatttctaatgttttaaaaatgtgctggtcattttctttgaaattgacttaactattttcctttgaagagtctgtagcacagaaacagtaaaaaatttaacttcatgacctaatgtaaaaaagagtgtttgaaggtttacacaggtccaggccttgctttgttcccatccttgatgctgcactaattgactaatcacctacttatcagacaggaaacttgaattgctgtggtctggtgtcctctattcagacttattatattggagtatttcaatttttcgttgtatcctgcctgcctagcatccagttcctccccagccctgctcccagcaaacccctagtctagccccagccctactcccaccccgccccagccctgccccagccccagtcccctaaccccccagccctagccccagtcccagtcctagttcctcagtcccgcccagcttctctcgaaagtcactctaattttcattgattcagtgctcaaaataagttgtccattgcttatcctattatactgggatattccgtttacccttggcattgctgatcttcagtactgactccttgaccattttcagttaatgcatacaatcccatttgtctgtgatctcaggacaaagaatttccttactcggtacgttgaagttagggaatgtcaattgagagctttctatcagagcattattgcccacaatttgagttacttatcattttctcgatcccctgcccttaaaggagaaaccatttctctgtcattgcttctgtagtcacagtcccaattttgagtagtgatcttttcttgtgtactgtgttggccacctaaaactctttgcattgagtaaaattctaattgccaataatcctacccattggattagacagcactctgaaccccatttgcattcagcagggggtcgcagacaacccgtcttttgttggacagttaaaatgctcagtcccaattgtcatagctttgcctattaaacaaaggcaccctactgcgctttttgctgtgcttctggagaatcctgctgttcttggacaattaaagaacaaagtagtaattgctaattgtctcacccattaatcatgaagactaccagtcgcccttgcatttgccttgaggcagcgctgactacctgagatttaagagtttcttaaattattgagtaaaatcccaattatccatagttctgttagttacactatggcctttgcaaacatctttgcataacagcagtgggactgactcattcttagagccccttcccttggaatattaatggatacaatagtaattattcatggttctgcgtaacagagaagacccacttatgtgtatgcctttatcattgctcctagatagtgtgaactacctaccaccttgcattaatatgtaaaacactaattgcccatagtcccactcattagtctaggatgtcctctttgccattgctgctgagttctgactacccaagtttccttctcttaaacagttgatatgcataattgcatatattcatggttctgtgcaataaaaatggattctcaccccatcccaccttctgtgggatgttgctaacgagtgcagattattcaataacagctcttgaacagttaatttgcacagttgcaattgtccagagtcctgtccattagaaagggactctgtatcctatttgcacgctacaatgtgggctgatcacccaaggactcttcttgtgcattgatgttcataattgtatttgtccacgatcttgtgcactaacccttccactccctttgtattccagcaggggacccttactactcaagacctctgtactaggacagtttatgtgcacaatcctaattgattagaactgagtcttttatatcaaggtccctgcatcatctttgctttacatcaagagggtgctggttacctaatgcccctcctccagaaattattgatgtgcaaaatgcaatttccctatctgctgttagtctggggtctcatcccctcatattccttttgtcttacagcagggggtacttgggactgttaatgcgcataattgcaattatggtcttttccattaaattaagatcccaactgctcacaccctcttagcattacagtagagggtgctaatcacaaggacatttcttttgtactgttaatgtgctacttgcatttgtccctcttcctgtgcactaaagaccccactcacttccctagtgttcagcagtggatgacctctagtcaagacctttgcactaggatagttaatgtgaaccatggcaactgatcacaacaatgtctttcagatcagatccattttatcctccttgttttacagcaagggatattaattacctatgttacctttccctgggactatgaatgtgcaaaattccaatgttcatggtctctccctttaaacctatattctaccccttttacattatagaaagggatgctggaaacccagagtccttctcttgggactcttaatgtgtatttctaattatccatgactcttaatgtgcatattttcaattgcctaattgatttcaattgtctaagacatttcaaatgtctaattgattagaactgagtcttttatatcaagctaatatctagcttttatatcaagctaatatcttgacttctcagcatcatagaagggggtactgatttcctaaagtctttcttgaatttctattatgcaaaattgccctgaggccgggtgtggtggctcacacctgtaatcccagcactttgggaggctgaggtgggaagatcccttactgccaggagtttgagaccagcctggccaacattaaaaaaaaaaaaaagtaagacaattgccctggaatcccatccccctcacacctccttggcaaagcagcaggagtgctaactagctagtgcttcttctcttatactgcttaaatgcgcataattagcagtagttgatgtgcccctatgttagagtagaatcccgcttccttgctccatttgcattactgcaggagcttctaactagcctgaattcactctcttggactgttaatgtgcatacttatatttgctgctgtacttttttaccatgtaaggaccccacccactgtatttacatcccagctggaagtacctactacttaagacccttagactagtaaagttagcgtgcataatcttaggtgttatatacacattttcagttgcatacagttgtgccttttatcaggactcctgtacttatcaaagcagagagtgctaatcaatattaagcccttctcttcgaactgtagatggcatgtaattgcagttgtcaatggtccttcaattagacttgggtttctgacctatcacaccctctttgctttattgcatggggtactattcacttaaggcccctttctcaaactgttaatgtgcctaatgacaattacatcagtatccttccttttgaaggacagcatggttggtgacacctaaggccccatttcttggcctcccaatatgtgtgattgtatttgtcgaggttgctatgcactagagaaggaaagtgctcccctcatccccacttttcccttccagcaggaagtgcccaccccataagacccttttatttggagagtctaggtgcacaattgtaagtgaccacaagcatgcatcttggacatttatgtgcgtaatcgcacactgctcattccatgtgaataaggtcctactctccgaccccttttgcaatacagaagggttgctgataacgcagtccccttttcttggcatgttgtgtgtgattataatcgtctgggatcctatgcactagaaaaggagggtcctctccacatacctcagtctcacctttcccttccagcagggagtgcccactccataagactctcacatttggacagtcaaggtgcgtaattgttaagtgaacacaaccatgcaccttagacatggatttgcataactacacacagctcaacctatctgaataaaatcctactctcagaccccttttgcagtacagcaggggtgctgatcaccaaggccctttttcctggcctggtatgcgtgtgattatgtttgtcccggttcctgtgtattagacatggaagcctcccctgccacactccacccccaatcttcctttcccttccggcagggagtgccctctccataagacgcttacgtttggacaatcaaggtgcacagttgtaagtgaccacaggcatacaccttggacattaatgtgcataaccactttgcccattccatctgaataaggtcctactctcagaccccttttgcagtacagcaggggtgctgatcaccaaggccccttttcttggcctgttatgtgcgtgattatatttgtctgggttcctgtgtattagacaaggaagccttccccccgcccccacccccactcccagtcttcctttcccttccagcagggagtgccccctccataagatcattacatttggacaatcaaggtgcacaattataagtgaccacagccatgcaccttggacattattggacattaatgtgcgtaactgcacatggcccatcccatctgaataaggtcctactctcagatgccctttgcagtacagcaggggtactgaatcaccaaggccctttttcttggcctgttatgtgtgtgattatatttatcccagtttctgtgtaatagacatgaaagcctcccctgccacaccccacctccaatcttcctttcccttccaccagggagtgtccactccatatacccttacatttggacaatcaaggtgcacaattgtaagtgagcataggcactcaccttggacatgaatgtgcataactgcacatggcccatcccatctgaataaggtcctactctcagaccctttttgcagtacagcaggggtgctgatcaccaaggccccttttcctggcctgttatgtgtgtgattatatttgttccagttcctgtgtaatagacatggaagcctcccctgccacactccacccccaatcttcctttcccttctggcaggaagtacccgctccataagacccttacatttggacagtcaaggtgcacaattgtatgtgaccacaaccatgcaccttggacataaatgtgtgtaactgcacatggcccatcccatctgaataaggtcctactctcagaccccttttgcagtacagtaggtgtgctgataaccaaggcccctcttcctggcctgttaacgtatgtgattatatttgtctgggttccagtgtataagacatggaagcctcccctgccccaccccaccctcaatcttcctttcccttctggcagggagtgccagctccataagaaccttacatttggacagtcaaggtgcacaattctaagtgaccgcagccatgcaccttggtcaataatgtgtgtaactgcacacggcctatctcatctgaataaggccttactctcagaccccttttgcagtacagcaggggtgctgataaccaaggcccattttcctggcctgttatgtgtgtgattatatttgtccaggtttctgtgtactagacaaggaagcctcctctgccccatcccatctacgcataatctttcttttcctcccagcagggagtgctcactccataagacccttacatttggacaatcaaggtgcacaattgtaagtgaccacaaccatgcatcttggaaatttatgtgcataactgcacatggcttatcctatttgaataaagtcctactctcagaccccctttgcagtatagctggggtgctgatcactgaggcctctttgcttggcttgtctatattcttgtgtactagataagggcaccttctcatggactccctttgcttttcaacaaggagtacccactactttttaagattcttatatttgtccaaagtacatggttttaattgaccacaacaatgtcccttggacattaatgtatgtaatcaccacatggttcatcctaattaaacaaagttctaccttctcaccctccatttgcagtataccagggttgctgaccccctaagtccccttttcttggcttgttgacatgcataattgcatttatgttggttcttgtgccctagacaaggatgccccacctcttttcaatagtgggtgcccactccttatgatctttacatttgaacagttaatgtgaataattgcagttgtccacaaccctatcacttctaggaccattatacctcttttgcattactgtggggtatactgtttccctccaaggccccttctggtggactatcaacatataattgaaattttcttttgtctttgtcagtagattaaggtcataccccatcacctttcctttgtagtacaacagggtgtcctgatcaaccaaagtcctgttgttttggactgttaatatgtgcaattacatttgctcctgatctgtgcactagataaggatcctacctactttcttagtgtttttagcaggtagtgcccactactcaagactgtcacttggaatgttcatgtgcacaaactcaattctctaagcatgttcctgtaccacctttgctttagagcagggggatgatattcactaagtgccccttcttttggacttaatatgcattaatgcaattgtccacctcttcttttagactaagagttgatctccacatattccccttgcatcaggggcatgttaattatgaatgaacccttttcttttaatattaatgtcataattgtatttgtggacctgtgtaggagaaaaagaccctatgttcctcccattaccctttggattgctgctgagaagtgttaactactcataatctcagctcttggacaattaatagcattaataacaattatcaagggcactgatcattagataagactcctgcttcctcgttgcttacatcgggggtactgacccactaaggccccttgtactgttaatgtgaatatttgcaattatatatgtctccttctggtagagtgggatattatgccctagtatcccctttgcattactgcaggggctgctgactactcaaaacttctcctgggactgttaataggcacaatggcagttatcaatggttttctccctccctgaccttgttaagcaagcgccccaccccacccttagtttcccatggcataataaagtataagcattggagtattccatgcacttgtctatcaaacagtggtccatactcccaacccttttgcattgcgccagtgtgtaaaatcacaggtagccatggtgtcatgctttatatacgaagtcttccctctctctgccccttgtgtgcccttggcccctttttacagactattgctcacaatctcaggtgtccatatttgcagctattaggtaagattgtgctgtctccctcttcccttccctctgccctgccccttttgcctctttgctgggtaatgttgaccagacaaggccctttctcttggacttaaacaattctcagttgcactttccttggtcccacccattatacatgaacccctctacttcctttcgcattgcttctgagtatgctgactacccaaagccccttctgtgttattaataaacacagtactgattgtcccatttttcagcccatcagtccaagatctccctaccactttggtgtgttggtgcagtgttgactatgaaaagcaggcctgaactaggtggataagccttcactcattttctttcatttattaatgatcctagtttcaattattgtcagattctggggacaagaaccattcttgcccacctgtgttactgctttactgtgcaaaatactgaaggcaagtcagacccagggagctggattgccatcctttattttgtgtttccagtgtacactataaaattgtctccccaggaaggaaggttggcactttctctgcattcttctttccagagcagattgcctggttaagaatctcttgttgtcccctttgtatattgttattgtaaagtgccaaatgccaggatacagccagaaaaattgcttattattattaaaaaaatttttttaagaaagacatctggattgtagggtggactcgataacctggtcattatttttttgaagccaaaatatccatttatactatgtacctggtgaccagtgtctctcattttaactgagggtggtgggtctgtggatagaacactgactcttgctattttaatatcaaagatattctagagtggaactcttaagaccagtatctttgtgtgggctttaccagcattcacttttagaaaaactacctaaattttataatcctttaatttcttcatctggagcacctgcccctacttatttcaagaagattgcagtaaaacgattaaatgagggaacatatgcagaggtgcttttaaaaagcatatgccaccttttttattaattattatataaaatgaagcatttaattatagtaataatttgaagtagtttgaagtaccacactgaggtgaggacttaaaaatgataagacgagttccctattttataagaaaaataagccaaaattaaatattcttttggatataaatttcaacagtgagatagctgcctagtggaaatgaataatatcccagccactagtgtacagggtgttttgtggcacaggattatgtaatatggaactgctcaagcaaataactagtcatcacaacagcagttctttgtaataactgaaaaagaatattgtttctcggagaaggatgtcaaaagatcggcccagctcagggagcagtttgccctactagctcctcggacagctgtaaagaagagtctctggctctttagaatactgatcccattgaagataccacgctgcatgtgtccttagtagtcatgtctccttaggctcctcttggacattctgagcatgtgagacctgaggactgcaaacagctataagaggctccaaattaatcatatctttccctttgagaatctggccaagctccagctaatctacttggatgggttgccagctatctggagaaaaagatcttcctcagaagaataggcttgttgttttacagtgttagtgatccattccctttgacgatccctaggtggagatggggcatgaggatcctccaggggaaaagctcactaccactgggcaacaaccctaggtcaggaggttctgtcaagatactttcctggtcccagataggaagataaagtctcaaaaacaaccaccacacgtcaagctcttcattgttcctatctgccaaatcattatacttcctacaagcagtgcagagagctgagtcttcagcaggtccaagaaatttgaacacactgaaggaagtcagccttcccacctgaagatcaacatgcctggcactctagcacttgaggatagctgaatgaatgtgtatttctttgtctctttctttcttgtctttgctctttgttctctatctaaagtgtgtcttacccatttccatgtttctcttgctaatttctttcgtgtgtgcctttgcctcattttctctttttgttcacaagagtggtctgtgtcttgtcttagacatatctctcatttttcattttgttgctatttctctttgctctcctagatgtggctcttctttcacgctttatttcatgtctcctttttgggtcacatgctgtgtgctttttgtccttttcttgttctgtctacctctcctttctctgcctacctctcttttctctttgtgaactgtgattatttgttaccccttccccttctcgttcgttttaaatttcaccttttttctgagtctggcctcctttctgctgtttctactttttatctcacatttctcatttctgcatttcctttctgcctctcttgggctattctctctctcctcccctgcgtgcctcagcatctcttgctgtttgtgattttctatttcagtattaatctctgttggcttgtatttgttctctgcttcttccctttctactcacctttgagtatttcagcctcttcatgaatctatctccctctctttgatttcatgtaatctctccttaaatatttctttgcatatgtgggcaagtgtacgtgtgtgtgtgtcatgtgtggcagaggggcttcctaacccctgcctgataggtgcagaacgtcggctatcagagcaagcattgtggagcggttccttatgccaggctgccatgtgagatgatccaagaccaaaacaaggccctagactgcagtaaaacccagaactcaagtagggcagaaggtggaaggctcatatggatagaaggcccaaagtataagacagatggtttgagacttgagacccgaggactaagatggaaagcccatgttccaagatagatagaagcctcaggcctgaaaccaacaaaagcctcaagagccaagaaaacagagggtggcctgaattggaccgaaggcctgagttggatggaagtctcaaggcttgagttagaagtcttaagacctgggacaggacacatggaaggcctaagaactgagacttgtgacacaaggccaacgacctaagattagcccagggttgtagctggaagacctacaacccaaggatggaaggcccctgtcacaaagcctacctagatggatagaggacccaagcgaaaaaggtatctcaagactaacggccggaatctggaggcccatgacccagaacccaggaaggatagaagcttgaagacctggggaaatcccaagatgagaaccctaaaccctacctcttttctattgtttacacttcttactcttagatatttccagttctcctgtttatctttaagcctgattcttttgagatgtactttttgatgttgccggttacctttagattgacagtattatgcctgggccagtcttgagccagctttaaatcacagcttttacctatttgttaggctatagtgttttgtaaacttctgtttctattcacatcttctccacttgagagagacaccaaaatccagtcagtatctaatctggcttttgttaacttccctcaggagcagacattcatataggtgatactgtatttcagtcctttcttttgaccccagaagccctagactgagaagataaaatggtcaggttgttggggaaaaaaaagtgccaggctctctagagaaaaatgtgaagagatgctccaggccaatgagaagaattagacaagaaatacacagatgtgccagacttctgagaagcacctgccagcaacagcttccttctttgagcttaggtgagcaggattctggggtttgggatttctagtgatggttatggaaagggtgactgtgcctgggacaaagcgaggtcccaaggggacagcctgaactccctgctcatagtagtggccaaataatttggtggactgtgccaacgctactcctgggtttaatacccatctctaggcttaaagatgagagaacctgggactgttgagcatgtttaatactttccttgatttttttcttcctgtttatgtgggaagttgatttaaatgactgataatgtgtatgaaagcactgtaaaacataagagaaaaaccaattagtgtattggcaatcatgcagttaacatttgaaagtgcagtgtaaattgtgaagcattatgtaaatcaggggtccacagtttttctgtaaggggtcaaatcataaatactttagactgtgggccatatggtttctgttacatatttgttttttaaacaacgtttttataaggtcaaaatcattcttagtttttgagccaattggatttggcctgctgttcatagcttaccaccccctgatgtattatttgttattcagagaaaatttctgaatactactagtttccttttctgtgcctgtccctgtgctaggcactaaaaatgcaatgattattgatatctaggtgacctgaaaaaaaatagtgaatgtgctttgtaaactgtaaagcacttgtattctactgtgataagcgttgtggatacaaagaaaggagcaagcataaaaaagtgctctttcaaaaggatatagtactatgcagacacaaggaattgtttgataaatgaataaattatatgtatatttgaggccaatttgtgtttgctgctctggtaattttgagtaaaaatgcagtattccaggtatcagaaacgaaaacacatggaaactgcttttaaactttaaaatatactgaaaacataagggactaagcttgttgtggtcacctataatgtgccagataccatgctgggtgctagagctaccaaagggggaaaagtattctcatagaacaaaaaatttcagaaaggtgcatattaaagtgctttgtaaactaaagcatgatacaaatgtcaatgggctacatatttatgaatgaatgaatggatgaatgaatattaagtgcctcttacataccagctattttgggtactgtaaaatacaagattaattctcctatgtaataagaggaaagtttatcctctatactattcagatgtaaggaatgatatattgcttaattttaaacaatcaagactttactggtgaggttaagttaaattattactgatacatttttccaggtaaccaggaaagagctagtatgaggaaatgaagtaatagatgtgagatccagaccgaaagtcacttaattcagcttgcgaatgtgctttctaaattataaagcacttgtaaatgaaaaatttgatgctttctgtatgaataaaactttctgtaagctaggtattgtctctacaaaattctcattgtatagttaaaccacagtgagaagggttctataagtagttatacaaaccaagggtttaaatacctgttaaatagatcaattttgattgcctactatgtgaactcactgttaaaggcactgaaaatttatcatatttcatttagccacagccaaaaataaggcaatacctatgttagcattttgtgaactctaaggcaccatataaatgtaactgttgattttctcacttggtgctgggtactaggtttataaaattgtatgatagttattatattgtgcaaataaagtaggaaaatttgaataacaatgattatcttttgaatacgcatacgcaagggattggttgtctgaagaatgccactatagtagttatctattgtgtgccaatctcattgctaggcattggggatgcaaagataaaccatctttattgtgtcttgggtagcagaagaaaatatgtgtaaaatcaatttataatttgtaaactgccacccatatataagctatatctgctgaatgatcattgattactcttatccttagagataacaactgggggcacaaacatttattatcattattgaacctacaacagagatctatgtgtagatttacaaagcctacagttctatacagataggaatgaactattggcttactgaatggtgattactttctgtggggctcggaactacatgccctaggatataaaaatgatgttatcattatagagtgctcacagaaggaaatgaagtaatataggtgtgagatccagaccaaaagtcatttaacaagtttattcagtgatgaaaacatgggacaaatggactaatataaggcagtgtactaagctgagtagagagataaagtcctgtccagaagatacatgcttcctggcctgattgaggagatggaaaatttttgcaaaaaacaaggtgttgtggtcttccatccagtttcttaagtgctgatgataaaagtgaattagacccaccttgacctggcctacagaagtaaaggagtaaaaataaatgcctcaggcgtgctttttgattcatttgataaacaaagcatcttttatgtggaatataccattctgggtcctgaggataagagagatgagggcattagatcactgacagctgaagatagaagaacatctttggtttgattgtttaaataatatttcaatgcctattctctgcaaggtactatgtttcgtaaattaaataggtctggcccagaagacccactcaattgcctttgagattaaaaaaaaaaaaaaaaagaaagaaaaatgcaagtttctttcaaaataaagagacatttttcctagtttcaggaatcccccaaatcacttcctcattggcttagtttaaagccaggagactgataaaagggctcagggtttgttctttaattcattaactaaacattctgcttttattacagttaaatggttcaagatgtaacaactagttttaaaggtatttgctcattggtctggcttagagacaggaagacatatgagcaataaaaaaaagattcttttgcatttaccaatttagtaaaaatttattaaaactgaataaagtgctgttcttaagtgcttgaaagacgtaaaccaaagtgcactttatctcatttatcttatggtggaaacacaggaacaaattctctaagagactgtgtttctttagttgagaagaaacttcattgagtagctgtgatatgttcgatactaaggaaaaactaaacagatcacctttgacatgcgttgtagagtgggaataagagagggctttttattttttcgttcatacgagtattgatgaagatgatactaaatgctaaatgaaatatatctgctccaaaaggcatttattctgacttggagatgcaacaaaaacacaaaaatggaatgaagtgatactcttcatcaaacagaagtgactgttatctcaaccattttgttaaatcctaaacagaaaacaaaaaaaatcatgacgaaaagacacttgcttattaattggcttggaaagtagaatataggagaaaggttactgtttattttttttcatgtattcattcattctacaaatatattcgggtgccaataggtacttggtataaggtttttggccccagagacatgggaaaaaaatgcatgccttcccagagaatgcctaatactttccttttggcttgttttcttgttaggggcatggcttagtccctaaataacattgtgtggtttaattcctactccgtatctcttctaccactctggccactacgataagcaggtagctgggttttgtagtgagcttgctccttaagttacaggaactctccttataatagacacttcattttcctagtccatccctcatgaaaaatgactgaccactgctgggcagcaggagggatgatgaccaactaattcccaaaccccagtctcattggtaccagccttggggaaccacctacacttgagccacaattggttttgaagtgcatttacaaggtttgtctattttcagttctttactttttacatgctgacacatacatacactgcctaaatagatctctttcagaaacaatcctcagataacgcatagcaaaatggagatggagacatgatttctcatgcaacagcttctctaattataccttagaaatgttctcctttttatcatcaaatctgctcaagaagggctttttatagtagaataatatcagtggatgaaaacagcttaacattttaccatgcttaagttttaagaataaaataaaaattggaaataattggccaaaattgaaaggaaaaatttttttaaaatttctctaaatgtaggcctggctgggctttgaccttttccgtttttaaatcactcacagagggtgggacaggaggaagagtgaaggaaaaggtcaaacctgttttaagggcaacctgcctttgttctgaattggtcttaagaacattaccagctccaggtttaaattgttcagtttcatgcagttccaatagctgatcattgttgagatgaggacaaaatcctttgtcctcactagtttgctttacatttttgaaaagtattatttttgtccaagtgcttatcaactaaaccttgtgttaggtaagaatggaatttattaagtgaatcagtgtgacccttcttgtcataagattatcttaaagctgaagccaaaatatgcttcaaaagaagaggactttattgttcattgtagttcatacattcaaagcatctgaactgtagtttctatagcaagccaattacatccataagtggagaaggaaatagataaatgtcaaagtatgattggtggagggagcaaggttgaagataatctggggttgaaattttctagttttcattctgtacatttttagttagacatcagatttgaaatattaatgtttacctttcaatgtgtggtatcagctggactcagtaacacccctttcttcagctggggatggggaatggattattggaaaatggaaagaagaaagtaactaaaagccttcctttcacagtttctggcatcactaccactactgattaaacaagaataagagaacattttatcatcatctgctttattcacataaatgaagttgtgatgaataaatctgcttttatgcagacacaaggaattaagtggcttcgtcattgtccttctacctcaaagataatttattccaaaagctaagataaatggaagactcttgaacttgtgaactgatgtgaaatgcagaatctcttttgagtctttgctgtttggaagattgaaaaatattgttcagcatgggtgaccaccagaaagtaatcttaagccatctagatgtcacaattgaaacaaactggggagttggttgctattgtaaaataaaatatactgttttgaaaa

SEQ ID NO: 23197 - DNA, 1734 bp, Homo sapiens
  misc_feature 1..1734: note = ENST00000635841
  source 1..1734: mol_type = unassigned DNA; mol_type = unassigned DNA
ggacatggtggtgagccgtggcaaggaccagaatggatcacagatgatcgttggccaacaggtggcagaagaggaattcctgccttcctcaagaggaacacctaccccttggctaatgctgggatgccacctatagaaaagtcagagggtccagatcccattgaagataccacgctgcatgtgtccttagtagtcatgtctccttaggctcctcttggacattctgagcatgtgagacctgaggactgcaaacagctataagaggctccaaattaatcatatctttccctttgagaatctggccaagctccagctaatctacttggatgggttgccagctatctggagaaaaagatcttcctcagaagaataggcttgttgttttacagtgttagtgatccattccctttgacgatccctaggtggagatggggcatgaggatcctccaggggaaaagctcactaccactgggcaacaaccctaggtcaggaggttctgtcaagatactttcctggtcccagataggaagataaagtctcaaaaacaaccaccacacgtcaagctcttcattgttcctatctgccaaatcattatacttcctacaagcagtgcagagagctgagtcttcagcaggtccaagaaatttgaacacactgaaggaagtcagccttcccacctgaagatcaacatgcctggcactctagcacttgaggatagctgaatgaatgtgtatttctttgtctctttctttcttgtctttgctctttgttctctatctaaagtgtgtcttacccatttccatgtttctcttgctaatttctttcgtgtgtgcctttgcctcattttctctttttgttcacaagagtggtctgtgtcttgtcttagacatatctctcatttttcattttgttgctatttctctttgctctcctagatgtggctcttctttcacgctttatttcatgtctcctttttgggtcacatgctgtgtgctttttgtccttttcttgttctgtctacctctcctttctctgcctacctctcttttctctttgtgaactgtgattatttgttaccccttccccttctcgttcgttttaaatttcaccttttttctgagtctggcctcctttctgctgtttctactttttatctcacatttctcatttctgcatttcctttctgcctctcttgggctattctctctctcctcccctgcgtgcctcagcatctcttgctgtttgtgattttctatttcagtattaatctctgttggcttgtatttgttctctgcttcttccctttctactcacctttgagtatttcagcctcttcatgaatctatctccctctctttgatttcatgtaatctctccttaaatatttctttgcatatgtgggcaagtgtacgtgtgtgtgtgtcatgtgtggcagaggggcttcctaacccctgcctgataggtgcagaacgtcggctatcagagcaagcattgtggagcggttccttatgccaggctgccatgtgagatgatccaagaccaaaacaaggccctagactgcagtaaaacccagaactcaagtagggcagaaggtggaaggctcatatggatagaaggcccaaagtataagacagatggtttgagacttgagacccgaggactaagatggaaagcccatgttccaagatagatagaagcctcaggcctgaaaccaacaaaagcctcaagagccaa

SEQ ID NO: 23198 - DNA, 676 bp, Homo sapiens
  misc_feature 1..676: note = ENST00000433732
  source 1..676: mol_type = unassigned DNA; mol_type = unassigned DNA
ggtgtctctagtgactcatcaagtgatatttggcaagacattttcccatttatgccagtttcctattctgttgaatgaggaaattttctctctaaagacctaaaagttttgactttataggtttcaaagttctgtggaaacattttctattgcttattaatttgaatcttatgtaactctagcacagtactcaatatttatggcatttacatggtttatctcatgtttttttatagctcttcattgttcctatctgccaaatcattatacttcctacaagcagtgcagagagctgagtcttcagcaggtccaagaaatttgaacacactgaaggaagtcagccttcccacctgaagatcaacatgcctggcactctagcacttgaggatagctgaatgaatgtgtatttctttgtctctttctttcttgtctttgctctttgttctctatctaaagtgtgtcttacccatttccatgtttctcttgctaatttctttcgtgtgtgcctttgcctcattttctctttttgttcacaagagtggtctgtgtcttgtcttagacatatctctcatttttcattttgttgctatttctctttgctctcctagatgtggctcttctttcacgctttatttcatgtctcctttttgggtcacatgctgtgtgctttttgtcc

SEQ ID NO: 23199 - DNA, 583 bp, Homo sapiens
  misc_feature 1..583: note = ENST00000602587
  source 1..583: mol_type = unassigned DNA; mol_type = unassigned DNA
ccactcttcaatccacatgaagaaaaggatcttcctcagaagaataggcttgttgttttacagtgttagtgatccattccctttgacgatccctaggtggagatggggcatgaggatcctccaggggaaaagctcactaccactgggcaacaaccctaggtcaggaggttctgtcaagatactttcctggtcccagataggaagataaagtctcaaaaacaaccaccacacgtcaagctcttcattgttcctatctgccaaatcattatacttcctacaagcagtgcagagagctgagtcttcagcaggtccaagaaatttgaacacactgaaggaagtcagccttcccacctgaagatcaacatgcctggcactctagcacttgaggatagctgaatgaatgtgtcttacccatttccatgtttctcttgctaatttctttcgtgtgtgcctttgcctcattttctctttttgttcacaagagtggtctgtgtcttgtcttagacatatctctcatttttcattttgttgctatttctctttgctctcctagatgtggctcttctttcacgctttatttcat

SEQ ID NO: 23200 - DNA, 437 bp, Homo sapiens
  misc_feature 1..437: note = ENST00000445814
  source 1..437: mol_type = unassigned DNA; mol_type = unassigned DNA
ctaggtggagatggggcatgaggatcctccaggggaaaagctcactaccactgggcaacaaccctaggtcaggaggttctgtcaagatactttcctggtcccagataggaagataaagtctcaaaaacaaccaccacacgtcaagctcttcattgttcctatctgccaaatcattatacttcctacaagcagtgcagagagctgagtcttcagcaggtccaagaaatttgaacacactgaaggaagtcagccttcccacctgaagatcaacatgcctggcactctagcacttgaggatagctgaatgaatgtgtcttacccatttccatgtttctcttgctaatttctttcgtgtgtgcctttgcctcattttctctttttgttcacaagagtggtctgtgtcttgtcttagacatatctctcatttttcattttgt

SEQ ID NO: 23201 - DNA, 775 bp, Homo sapiens
  misc_feature 1..775: note = ENST00000602863
  source 1..775: mol_type = unassigned DNA; mol_type = unassigned DNA
aaattaaatattcttttggatataaatttcaacagtgagatagctgcctagtggaaatgaataatatcccagccactagtgtacagggtgttttgtggcacaggattatgtaatatggaactgctcaagcaaataactagtcatcacaacagcagttctttgtaataactgaaaaagaatattgtttctcggagaaggatgtcaaaagatcggcccagctcagggagcagtttgccctactagctcctcggacagctgtaaagaagagtctctggctctttagaatactgatcccattgaagataccacgctgcatgtgtccttagtagtcatgtctccttaggctcctcttggacattctgagcatgtgagacctgaggactgcaaacagctataagaggctccaaattaatcatatctttccctttgagaatctggccaagctccagctaatctacttggatgggttgccagctatctggagaaaaaggtggagatggggcatgaggatcctccaggggaaaagctcactaccactgggcaacaaccctaggtcaggaggttctgtcaagatactttcctggtcccagataggaagataaagtctcaaaaacaaccaccacacgtcaagctcttcattgttcctatctgccaaatcattatacttcctacaagcagtgcagagagctgagtcttcagcaggtccaagaaatttgaacacactgaaggaagtcagccttcccacctgaagatcaacatgcctggcactctagca

SEQ ID NO: 23202 - DNA, 827 bp, Homo sapiens
  misc_feature 1..827: note = ENST00000602495
  source 1..827: mol_type = unassigned DNA; mol_type = unassigned DNA
agatagccaattattaaaaacagtcaagacaattgcacctctaagcagtagtagcagttgccacaccaccttgaatcttgaagtattttcagcaacaggatgaccattagccacaaatttagtgtcagcccttaaggtcggtattggtttgacccatattttcatgtagttctttttcttcacttgtctaatcttcccgtgtactgccagggcttgtcattagaggactttagggagaccaagcaggctagaaagtagagacaggagatacctatgtctaatgcttcagtttatacttcctaggtttttttcattggggtttttgtaactcttttggtatcctaccggtgctttggtagcctactgaaccctgtctttcttcttaaggacattctgagcatgtgagacctgaggactgcaaacagctataagaggctccaaattaatcatatctttccctttgagaatctggccaagctccagctaatctacttggatgggttgccagctatctggagaaaaagatcttcctcagaagaataggcttgttgttttacagtgttagtgatccattccctttgacgatccctaggtggagatggggcatgaggatcctccaggggaaaagctcactaccactgggcaacaaccctaggtcaggaggttctgtcaagatactttcctggtcccagataggaagataaagtctcaaaaacaaccaccacacgtcaagctcttcattgttcctatctgccaaatcattatacttcctacaagcagtgcagagagctgagtcttcagcaggtccaagaaatttgaacacactg

SEQ ID NO: 23203 - DNA, 7844 bp, Homo sapiens
  misc_feature 1..7844: note = ENST00000562532
  source 1..7844: mol_type = unassigned DNA; mol_type = unassigned DNA
agctcaggcgggtgggggcggggcggggcggcgccgaggagaatgaataattgaagtggaggggaggaggaagaagaggagaaggaggaagaggagccgcccgcgcagggtcctccccacgccgcacccccctccgccgcccggaagtcgctccccgcctccctctccgccaacatggccgcgaagtcggatggagcggcggcctcggccagcccggacccggagggggctgccggtggagcccggggcagtgccggcgggcgcggggaggcggcggcggcggccgggcccccgggggtcgtcggggcgggcggcccggggccgcgctacgagctgcgggactgctgctgggtgctgtgcgcgctgctcgtgttcttctccgacggtgccacggacctgtggctggcggcctcctactacctgcagaatcaacacacctacttcagcctcaccttgctgttcgtgctcctgccctcgctggtcgtgcagttactgagcttccgctggttcgtctacgactactcggagcccgcagggtccccgggacccgccgtcagcaccaaggacagcgtagccggcggagccgccatcagcaccaaggacagcgccggcgccttccggaccaaagaaggcagccccgagccgggtccccagcctgcgccctcctcggccagcgcctaccgccgccgctgctgccgcctctgcatctggctgctgcagaccctcgtccacctcctgcagctcggccaggtctggaggtacctgcgcgccctgtacctggggctgcagagccgctggcgcggggagcggctgcggcgccacttctactggcagatgctgttcgagagcgccgacgtgagcatgctgcgcttgctggagaccttcctgcgcagcgcgccgcagctagtgctgcagctcagcctgctggtgcaccgcggtggcgcgcccgacctgctgccggccctctccacctccgcctccctcgtgtctctggcctggacgctggcctcctaccagaaggtgctgcgggactcgcgggacgacaagcggccgctgtcctacaagggcgccgtggcacaggtgctgtggcacctgttcagcattgccgcccgcggcctggccttcgcgctcttcgccagcgtctacaagctctattttggcatcttcatcgtggcccactggtgcgtcatgaccttctgggtcatccaaggggagacggacttctgcatgtccaagtgggaggagatcatctacaacatggtcgtgggcatcatctacatcttctgctggttcaacgtcaaggagggccgcagccgccgccgcatgaccctctaccactgcatcgtcctgctggagaacgccgcgctcaccggcttctggtactccagccgcaacttctcaaccgacttctactcgctcatcatggtctgcgtagtggcctccagctttgcgctgggcatattcttcatgtgtgtctactactgtctcctgcaccccaatgggcccatgctgggtccccaggcacctggttgcatcttccgtaaggcctcagagccctgtggcccacccgctgacgccatcacgagtccccccaggtccctgccaaggactacaggtgctgagcgggatggggcctcggcgggagagcgtgcagggacccccaccccacctgtcttccaggtgcggcctggcttgcctcccacaccagtggcccgcaccttgcggacagaggggcctgtcatccggattgacttgcctcgcaagaagtacccggcctgggatgctcattttattgaccgccggctccggaagaccatcctggcactggagtactcctcacctgccacgccccggttgcagtaccggagtgtggggacttcccaggagctgctggagtatgagaccacagtgtaggctacagtgtcccagcacaaaagggacaggcttggctgatcccacatccgccgcagtgttgtgccccgaatttcagggccaccaggctaagggggagtggatctgttggtccaagggtagagtggccccactcttgggttctttcaggggagggggcagccttgcggaggccccagccctgggccccgttttcagccttgtggcccattccctaaattcccctgacccagggcctggggaatcatctggtgctacacttttcgagctgccctgctttcatggggcctccacacctctcccctgcctggcgttgcccatgtgttgcccctgctggacttgccagagaaagggcactgtctggggtccatgacctagaccctgtgctcctcaggggttgtggagagtgggctgcctctatggtgggaaaagatctctgagaaggatggaggtggccgtggaagggatggggtgaggttggagcattgtgtggacagggatggcgtggctcctgtagcatctgaggcctggagccagggcaagagggagctgaagaagggagttggggtggggcagggtgttggggtggggggctggcagtgctggagatggataggagaaagaactggggggggggtctaggctggcagaagcatggaggggtggaagacttgggggaggggaacctgcaatccagagcatagcgaacaagaatgaactccttaggagacgtctcttgttgtgttgtgggctctgtgaaggatgaagttccacacacctcaggtgaaatgtttgaaggagccattttttgttctagatgtgcacctggaacgtggcttctagatacaggtcttcaacacagcagataagatgtctggaaagatctctgggctcaagtgcaggtgaggttttagcacagttatcagaggaactgatccagaagcaggcttagttctagattgagttctagagtgctaggctgataaaatgtcccagggagccactctgatctgtgtattctgttgtgaggaggaggacactggaggcctgctgctctgctgtgggggattctagcacctgtcacagtggtgggggagaagaggttctagagcccagcgtgaatggaattttctaggaatgggtgctctcattctagacttctggggctcatgggagctctaggcccctgttaccttggtccatagccatctttctaaaaggaaattgtcctcagaacccctgagacatttcagctgccaactggttcccagctggaaaaaaaaatagctctggggacgtgacatgaatcctggctctcagccactctgcaaatggggctccctggagcggcatctgggaaactgacttgttttgccttagatctgatgactccccaggacctgtggtctattcccatggcctgaacatcctggagtgcccaggggactcacccagggcccctcctcccacctaggacagccagtgctggattgagggggcgtatgggagaggggaagtaggcagttccatggggtgaggagacagagcctctagcagagctgggaacccaacccaccccccacccccccacacacacactcccacagcaacttaggtgtgattggtgggagaggacagcagcggatgttaaggacagatgccaacctgatcctggagtgaggtgggccatgagaatcctagactatgcaaattagagggatgcttagccctccctggttcagcctctcttgggttacagatgggaaactgaggcccagagtggcagccactctctcaaggtcccagactctgggctgcccatcaaaaggtgatgggtaatgatgaattgctggggatgcagggtaaccccaaaggcagggagggccagactgcccacatacacacaagcacaagcacaaccatgatacgggtcaccctccccaccagcacacaggccgagatggtgtacgcatcatccctcctgccaacacagcaagagtgcttttccttctttctgctgctaagcaccctcaggaacgaggcctcgagggtgacgggaggtgggagaagcccaaggctgacccaggcccactctgttgggttcatccatcctccaaatccatctttggaggctgaattcacacacaaagccgttgtgagatgggagctctgaagatgcggacccagacccagaaacagactgtttctccagggccaactttgtgccaggaattttcaccccatgtcgtttcacttacactctcctctggtcacgacgtccctgcaagagaggtattatcaacccatcttacagacgaggaaactgaggcccagagatgtagcatgagggtcacccttggcaagttattctcctccccagtatcccagaatggcccatctggctgctgccttctagaggaaaagtcctagctggggtcctttacactccaggagactcccaaggggcagggatgtgctggcagggcttggcatggtctgaggctcgcagggaagccatggctacatttttggattttactccacccccactccccacctcttctcaaccccacacacccttccctcagggcttctgcctgcagggacatctgggcacaggaatggccacagtcaaagggcccagggagagggctgcaggcacctcctcctgcttctcaccctcagaagagtctcagcccttaaaggactctccacccaggagctcgggaccaggcctgaggccccctgctccactggcttgtcccttcatttcactgggatagaggagtcagatgagggaggggtccatccccttggagctgttttgtttttctttctgtgacacaatctacctcagccagtctctcccctagcagaactgacccccctggtcctctgcctcctgtcccctgacccccaccccagtctggatgttcagtccttccctgtccttcccaccctgccagggtccttgcagcccagagggtccctgagggttccttaagccacctgccctccacatccattagacaggagaaagtgagacccagagaggaccaaggactcaccaaaggccacacaggaagtcagtggcagttaggatttccctggggatgagaggtagttgggtgtgtcttaattttgccaggaacagaagagaacaggatgctttgggtaccaaatatggcaggccctgccctcagttacctctaaccccaggagaccagtgtccccatctccagggcagacttctgtctacctgttttcttagaactgacccccacgctgttgactgtgttccccaaacctctgcaggcaccacacacacccacatcacggcgcctcctggcactgatgtgccatgtgccttgtaactgtcaccccagctgaacagcacagacctccccactcccccacacagggctccccaatgagggagccttgcttgatcccctcctgtcatctgcctcattcttgtgtctcccccaaatctgccttacccccagccagctccctgctacacctgtgtcccacagaggcatgtcacccatgagagtcgggaaagacagagggcagggaaggtgaggcctggggaaagtccaggcctctggataagggctgagggagctgggaatatccagggaaggtctcgcttgcagtcaacaccctcctaagtactcgagttctgcaggttcttcccttggaattaatctggacctggagtccacagaagcctcagacaatagggagaaggttttctgggacgaaggctgcatgggatgcaaactcaaatgcctcgagataatgaaactaagagtaatggagacaatagggagtgttggggactctggcagacaggagagtgagtgtgtgccctgcctgtaggtactaaaattcaaatgtttgggaaactgctggccactcatatttggcccacgtgccaccagtttgagacttacggttcaaaatgttgagaaggttctggagtgtcctgccaagtggaaacccctcagcggaagtcagggacagaggctgtggctccctctgagactttgctagtccaaccctaaatccccatcacctggctatctgagaactgagcccactgccctctcagctgaaaagggaaatctggggggtccacagggtccctggtttgggaatcatctgataagggctacaggcccctccagtgcctcatggggttagaggctgctggagtcttctccagcttgggggcccctggttaggaggaatctacattgggttgcaggggagtccaggtgcaggatgtggactgaaagccaggacccaagagtcccattctgtgctggcccctgccacctttggcacctgtctccctcccagttcaagctgtggtggggcctgcagtagaggttggtagggggagctgtagtttctatattaaagtgctttgcagtgtctcaatggaagggaacaagtgggtgtcaagccgcatgggcagtagtagggttggggtttgagcccccttcccaaccatagaggcttctgagacctggggctggggaggaaaggagcttcaatgtgccattctggttggggagaggataggacatttctgggtccttggctgctgccggtagaggtatggggaggaaaaactctagagtgggagatgtggaagtggaaaaggaaggccctgtccaggcctggcctggtttctggagacagaaaactccccaggggacagagaggttacccccttgtgcttagcttctgccacccttcccttctctggaggagaaggctgccctctcctcagcaaccctggcctttattctatgcataaccactgcaagggcacccctggccaggctgaatgggtgggggtcccagggcacctgcaataatctcagaatggagggtatcctgggacaaagagggggtacagaaggtgccaggggggaaaaggtgattcctccatctctctctcacccaaatccccccagatcgaatctgacccttttccctggtctccattgtgctaaaccaccgaacttggaggagcctcatataaacatagcccccagccccactggctttccgaacccatcatgaaatagctggaaggtatctgaaccgttcccatagctccctcattattttcttccctgaggatcctgtggtttaggagatttttctcccaaaccagcctcatttcttgaagaagaattcattttcccatattaaattaactcaagctgagcttctgattgcagataaatgtttctaaggcctcaagtcaacttctagggcttgaaggtgggggaatatatgtattttattgagttgcttaatacaaaattctcaaaagcacttgtgggcactcattcctgccttcacaggccctcagggtctgggaccccacgttgggaatcaatggtttagacatccagcatcctattttactgaaggggcaagcccagagatgggagatggccagcccaaggtcacacagcaagttggtggcagggtgagaccagaacccggttcttttgagggtcccaccagaatatccccagccctgatcctcccctccatgcccctggaactctaggaatcactagccatgcctgaggggctaatctccctctgtcagcacaattccgagtgattcttcccctccctgtcgtctcttcctccctaacgggccctcacccctgtcctcttctgtttccttttcctggtcccacctcctggtatttactacatctgtgccatccctcatccccctgacccccattcaccctccgagcttcccccaggagggggagggggagggggccccgagctggggcctctttactgagactcttttgtacaccacaaactttttgtatatttttaattttgctgcgacatgagatattaaaagtcatttcagtacgtgc

SEQ ID NO: 23204 - DNA, 2339 bp, Homo sapiens
  misc_feature 1..2339: note = ENST00000530562
  source 1..2339: mol_type = unassigned DNA; mol_type = unassigned DNA
gtcttgctggcgcgaggtagtcagaggacgtggccgcggggcttgctgggacttgaggttagacgtcccggccgtcggttgccgcctacactgtctgccgtcgcgtcgcagttactaaggcgtggggaagatagcggcaggcaccgcagtggagcggctccgagatccccggggggctcgcaggcgcgcatccctcctgactgggacgtcgcctccgcagacccctcggaggctgaagcgacgccggaggcaggcaaagaaacaagtgaagaaacaaaaaaaaaaggaagttaaggggccattcccaaagtcaaagatcaagccaaggacactggttagtggttcagaaaggtaacctcaagaagaagcccaagggtttggttggagcacaagctgaacgtcgggaaagcctgaaggcgacttcttttgagttcaaggggaagaaagagtctcggcgggaaaatcaggtggaccttcctggacatatcctggaccaggcttttctgctgaagcaccactgtgtgaggaagccatcagatctgtgcaccattaatgtgagtggcctgaagttctccaaggccaaggaaaatgacttcaagcattttcattctgtgatttatatcaatgcctcagaaaacctgctgcctctagttcttggacctttccttcaacagcctgactgtggaggccatctgtgatttggggattctgccacacctccgtgtcctgctcctcacaggcaatggccttacctccctgccgcccaatttggccgtcgcagaacaggaggcatctgtaacatcgctgacaagcaagaggtacatcctgaggttcccagcgctggagacactgatgctggatgacaacagactctccaaccccagttgctttgccagcctggctgggctcaggagatcgcaaaagaggatgctgtcctaccagtagctctcttcccatctctctgcgagttcgtctttcataacaaccctctggtggcccatacacgaggggtccctccactgctgaagagcttcctccaggagcgactgggaatccacttaattcgaaggaagatagtaaagcctaagcatcatgttttgatgtctcggaaggaatcatggaaggtgaaaagcgaaatcccaaaggtgccgaagcagcctctggtgctccatcacccgcgcatgacgacaaccaagtctccctcaaaggatatgctagagccagaggcagagctggctgaagatctgcccactaccaaaagcacttctgtggagtcagagatgcccactgagaacctggaaggccattccccgtcttgccggaccttcgtgccactgcctcccatctgctccaactccactgtgcatagtgaagagaccctgtcccacctgagtgacacaactgtccgcctcagcccagagcgcccatcagatgaggactccaagagcacagagtccatcttcctgacccaggtgagtgaactgccttcctccgtcatccataaggatgatttagagttaaaggagaaagaccaaaagaaaccaccaacggcacccagagaggtgaaagggactcggaggaaactcccaactgccttccttcccagcaagtaccacggctatgaagaactgctgacagccaagcctgatccagccttcattgagccaaagggaatccagaagaatgcacaagccctgcaacaaatgctgaagcacccactcctgtgccactcctccaagcccaagctggacactcttcagaaaccctatgttcacaaagagaaacgggtgctgtcctgcaccagtggacagaacggcggctggtgaaccacaagcagtacctggaggccaagaggctgttgaaggagttccaggcacgttaccggcagctgagtctcaatatgttgcccaggctggtctcaaactcctgagctcaaatgatcctcctgcctcccaaagtgctgttatcacaggagtcaaccactatgcccggcttcctaataatttttactgctgctctcaaagtttttgacaacgcacttgtgttgctggcaaacaacattttcaccgcaatgctgagccactgctaacagaccattagctaaaaatttacaaaagtgaaaaaaatcatgtatccatttaaatattcaaatgaatcatgttggtgttttctcaatatggagttctgtacaagtttttgtttctttgttttcattgcttttggttgttatttataaggatttgagaacttggtctctagaagagagtttttatactgaaaaagactaagggagggtgagaaagtagcattttaaatgtgaataaaaaatatcaattgct

SEQ ID NO: 23205 - DNA, 5681 bp, Homo sapiens
  misc_feature 1..5681: note = ENST00000340360
  source 1..5681: mol_type = unassigned DNA; mol_type = unassigned DNA
agtttgggtcttgctggcgcgaggtagtcagaggacgtggccgcggggcttgctgggacttgaggttagacgtcccggccgtcggttgccgcctacactgtctgccgtcgcgtcgcagttactaaggcgtggggaagatagcggcaggcaccgcagtggagcggctccgagatccccggggggctcgcaggcgcgcatccctcctgactgggacgtcgcctccgcagacccctcggaggctgaagcgacgccggaggcaggcaaagaaacaagtgaagaaacaaaaaaaaaaggaagttaaggggccattcccaaagtcaaagatcaaggagatggccttctcaggaatctacaagctggatgatgggaagccttacctgaacaactgcttcccagccagaaatctgcttcgcgtgccggaggaaggccaaggacactggttagtggttcagaaaggtaacctcaagaagaagcccaagggtttggttggagcacaagctgaacgtcgggaaagcctgaaggcgacttcttttgagttcaaggggaagaaagagtctcggcgggaaaatcaggtggaccttcctggacatatcctggaccaggcttttctgctgaagcaccactgtgtgaggaagccatcagatctgtgcaccattaatgccaaggaaaatgacttcaagcattttcattctgtgatttatatcaatgcctcagaaaacctgctgcctctagaggcatttcacacgtttccagccctaaaggaactggatctcgcatttaatggcatcaaaactatctacgtgaaatatggagactttaagttattagaattcttggacctttccttcaacagcctgactgtggaggccatctgtgatttggggattctgccacacctccgtgtcctgctcctcacaggcaatggccttacctccctgccgcccaatttggccgtcgcagaacaggaggcatctgtaacatcgctgacaagcaagaggtacatcctgaggttcccagcgctggagacactgatgctggatgacaacagactctccaaccccagttgctttgccagcctggctgggctcaggagactgaagaagttaagcttggatgaaaacaggattatcaggatcccatacctacagcaagttcagctctatgacgagtcagtagactggaatggaggcaggggaagtccccataaagagccccaattcatgctgcagtccaagccaaggatgcttgaggactcagatgagcaactggattatactgtactgcccatgaaaaaggatgttgaccggacagaggttgtgttttcatcttaccctggattttcaacctcagagacaaccaagatatgttcacttcctcccatattcgagatccttcctgtgaagtcactgaaggccaggaaccagacgctggccccacccttcccagagctgagataccttagcctggcctacaacaagatcgcaaaagaggatgctgtcctaccagtagctctcttcccatctctctgcgagttcgtctttcataacaaccctctggtggcccatacacgaggggtccctccactgctgaagagcttcctccaggagcgactgggaatccacttaattcgaaggaagatagtaaagcctaagcatcatgttttgatgtctcggaaggaatcatggaaggtgaaaagcgaaatcccaaaggtgccgaagcagcctctggtgctccatcacccgcgcatgacgacaaccaagtctccctcaaaggatatgctagagccagaggcagagctggctgaagatctgcccactaccaaaagcacttctgtggagtcagagatgcccactgagaacctggaaggccattccccgtcttgccggaccttcgtgccactgcctcccatctgctccaactccactgtgcatagtgaagagaccctgtcccacctgagtgacacaactgtccgcctcagcccagagcgcccatcagatgaggactccaagagcacagagtccatcttcctgacccaggtgagtgaactgccttcctccgtcatccataaggatgatttagagttaaaggagaaagaccaaaagaaaccaccaacggcacccagagaggtgaaagggactcggaggaaactcccaactgccttccttcccagcaagtaccacggctatgaagaactgctgacagccaagcctgatccagccttcattgagccaaagggaatccagaagaatgcacaagccctgcaacaaatgctgaagcacccactcctgtgccactcctccaagcccaagctggacactcttcagaaaccctatgttcacaaagagaaacgggcccagagaatcccgattccacccccaaagaagactagagcccaacttctggatgacatcttcattcgcttgcgggatccccggaacattacagaggctccactaggtgctgtcctgcaccagtggacagaacggcggctggtgaaccacaagcagtacctggaggccaagaggctgttgaaggagttccaggcacgttaccggcagctggtgagtggctctctgcgcacagtgttcgggactaccccgctccccatggcctgcccagcgctgagtgagagccagcccaagttcggccacttcctcgagttcatggatgagttctgccaggagcccacagccagtgactcacaaggctagagctgtgcatgggggctgtgtgcaccacccggcctgtgccccagctctccccgagggctctgtgccctggaccgcacctcaaggttgaccagccggccacaggcctcagagctcagctgggccccacttgctggccacaaggtggcatccccttgtcaggatctcccctccttggcccaggcatgacctggtgcctggcccagcggcaataaagagtgggtgcacagggcaatagactgggtgccacatgcattctttcttggaacccaggccacagcagcattgtcacacttccctctaaaaatggttttccagttcagatgcaacagggatacatttgttctctgttgtatgagaaactgacaccaaggggatcttaacaaattcctgaacaatggctccaaaaaagggtatttttaaaaaccagatcttgtgagtacagccctaatgtgcagggacagtgtcatcctgtatattcgttctttactcagactctttcttggttccttcattaggagcatgaatggttgaatgtgaacatgacagtaaattggagcaaactgtaaactggacataacttatgccaaaagacgtagttgtacaccatggaaaccccatccctgctcctaatctctactgccattctgaatgccaaagcaagacatccaacatggggcatctcccagagcacatacagcaccaaaaatccacacacagcctaagcttaacccatgtttttgtctgagattgttcaccagagacaagactctgactataaacagaacatccactttcatgagtttcctttactgtattctcaacttgggccttgcttcaagcaggcaaacatacattgaagaatgcactttggtactgtttaaataacaacacatcagcccacttgattccatgccatgtccttgctgacagaaacatccccaacagggcatgccctggtccaagtcctctgtctttgtcaaaatgctcttctgatgagttggagaggaggcagccagcagtggcagtccacaaggatccaggtaccttctccaatcctaaagcagacagcaggttgaataaaaccaatacacaacctattttctaggcaggaggggaaaaggcccttaggacaataatatttgtacaaagagttgagagtaaacaaacagtgtatcaggttcaaaaaaaaaaaaactattcgttggcatttaaatttttttcccttgcatagtatctattctctcactaggacttttaagtgctctgctggaggctcagcgttggtaataccatgtttgatgcaaacttgaacccaatgctctcattggtggcacagctttggagggtggtggccccaagaaggggcaatctgcctgctgctatattaatctggaaccagggccaacagctactcttgaactatggtatttgaagagcgagttcattgcctgttttaccttaaatgacaggaaaggaagatgaacaaaccttgctttgccttggcttcaaactagttcttgatttaagacaccagaaagggagagagggagtctgcttagagtttgaggttgcctctcacaagatgacagttaaaagttgccaccttacttaaaaggcattaaggaggcatttactcacaaaggagagagagtaaatttttttcttaagaggaaaaaaatactgataatacatagaacaatctgcacatccagtcttggcactttttccaatttgactgatctctaaactggtgacccttgcatatatcttagtctcttttctacaatcttcttcagaaagctacagcagctaacaatcatgtataaagatgcatttcctagatcatcttcagaagaaaatctcttcagcactttccctagaatctgtctcctgaccaccccgccccagacctgctttctcttttgagaattcataaccaggtatgtttagataccagttcaaaagaccactctatgggttgatgaggaaaaggctgcctgaggacaatttaagaccataatgagtttccaatttttaaagaaaatttggctagctggcttttaattcttaattaaaatcattaaatttaattaaaattattccaatcaaaatatatcactttccaagattccacattcatattacttacttatactatggagactttctctacctgagcatgtattcaggggctataggtacatttaactctaactaactgaaaaaaatcaggaagaaaaaactattaaaataaaataacctcctaaatcatttgggggtatccccatcattggtgcgtgtgtctgcgtgtgtcaaactttaatgattatttattcagaccctggaaaaccacactataaaatagggcactggatcacaagttcgtttggttaaaaaaaaaaaaaaaaaaaagtgggggcggggggcagagaagaagtttaacttggatgatttccatgcccattccagctgtaacattctatgactgtgacccagcctttgttctcttttctcactctcctactagacatttcaatgaaaagttaggcaggaaaaaggaaaggaatcccaagttgctgccagctctgatgagagatcaggttgggggagagattaggtggttactgaattgaggtgtgggcctcccctgaccatgtcagtgatccacaacccacctcacttcttggggcttaagctaaaagcagcttctgaagagatgttaatgtcctgtaatcactagaggagaaaattcattctccttccataacattacttagtaaaggaaaagcggtggtgcaatcaaattcacaaataccaatggggtctctaaaatgtagaatgcagcttgctgggtgctggtcagttttctaaatgggaccagaaatggctttcctaagaccataaatgaactctccagccacacatacattcaaatgcattccattagacattgagctcctcaagagcagg

SEQ ID NO: 23206 - DNA, 4695 bp, Homo sapiens
  misc_feature 1..4695: note = ENST00000321448
  source 1..4695: mol_type = unassigned DNA; mol_type = unassigned DNA
ggccgcggggcttgctgggacttgaggttagacgtcccggccgtcggttgccgcctacactgtctgccgtcgcgtcgcagttactaaggcgtggggaagatagcggcaggcaccgcagtggagcggctccgagatccccggggggctcgcaggcgcgcatccctcctgactgggacgtcgcctccgcagacccctcggaggctgaagcgacgccggaggcaggccaaggacactggttagtggttcagaaaggtaacctcaagaagaagcccaagggtttggttggagcacaagctgaacgtcgggaaagcctgaaggcgacttcttttgagttcaaggggaagaaagagtctcggcgggaaaatcaggtggaccttcctggacatatcctggaccaggcttttctgctgaagcaccactgtgtgaggaagccatcagatctgtgcaccattaatgtgagtggcctgaagttctccaaggccaaggaaaatgacttcaagcattttcattctgtgatttatatcaatgcctcagaaaacctgctgcctctagaggcatttcacacgtttccagccctaaaggaactggatctcgcatttaatggcatcaaaactatctacgtgaaatatggagactttaagttattagaattcttggacctttccttcaacagcctgactgtggaggccatctgtgatttggggattctgccacacctccgtgtcctgctcctcacaggcaatggccttacctccctgccgcccaatttggccgtcgcagaacaggaggcatctgtaacatcgctgacaagcaagaggtacatcctgaggttcccagcgctggagacactgatgctggatgacaacagactctccaaccccagttgctttgccagcctggctgggctcaggagactgaagaagttaagcttggatgaaaacaggattatcaggatcccatacctacagcaagttcagctctatgacgagtcagtagactggaatggaggcaggggaagtccccataaagagccccaattcatgctgcagtccaagccaaggatgcttgaggactcagatgagcaactggattatactgtactgcccatgaaaaaggatgttgaccggacagaggttgtgttttcatcttaccctggattttcaacctcagagatcgcaaaagaggatgctgtcctaccagtagctctcttcccatctctctgcgagttcgtctttcataacaaccctctggtggcccatacacgaggggtccctccactgctgaagagcttcctccaggagcgactgggaatccacttaattcgaaggaagatagtaaagcctaagcatcatgttttgatgtctcggaaggaatcatggaaggtgaaaagcgaaatcccaaaggtgccgaagcagcctctggtgctccatcacccgcgcatgacgacaaccaagtctccctcaaaggatatgctagagccagaggcagagctggctgaagatctgcccactaccaaaagcacttctgtggagtcagagatgcccactgagaacctggaaggccattccccgtcttgccggaccttcgtgccactgcctcccatctgctccaactccactgtgcatagtgaagagaccctgtcccacctgagtgacacaactgtccgcctcagcccagagcgcccatcagatgaggactccaagagcacagagtccatcttcctgacccaggtgagtgaactgccttcctccgtcatccataaggatgatttagagttaaaggagaaagaccaaaagaaaccaccaacggcacccagagaggtgaaagggactcggaggaaactcccaactgccttccttcccagcaagtaccacggctatgaagaactgctgacagccaagcctgatccagccttcattgagccaaagggaatccagaagaatgcacaagccctgcaacaaatgctgaagcacccactcctgtgccactcctccaagcccaagctggacactcttcagaaaccctatgttcacaaagagaaacgggcccagagaatcccgattccacccccaaagaagactagagcccaacttctggatgacatcttcattcgcttgcgggatccccggaacattacagaggctccactaggtgctgtcctgcaccagtggacagaacggcggctggtgaaccacaagcagtacctggaggccaagaggctgttgaaggagttccaggcacgttaccggcagctggtgagtggctctctgcgcacagtgttcgggactaccccgctccccatggcctgcccagcgctgagtgagagccagcccaagttcggccacttcctcgagttcatggatgagttctgccaggagcccacagccagtgactcacaaggctagagctgtgcatgggggctgtgtgcaccacccggcctgtgccccagctctccccgagggctctgtgccctggaccgcacctcaaggttgaccagccggccacaggcctcagagctcagctgggccccacttgctggccacaaggtggcatccccttgtcaggatctcccctccttggcccaggcatgacctggtgcctggcccagcggcaataaagagtgggtgcacagggcaatagactgggtgccacatgcattctttcttggaacccaggccacagcagcattgtcacacttccctctaaaaatggttttccagttcagatgcaacagggatacatttgttctctgttgtatgagaaactgacaccaaggggatcttaacaaattcctgaacaatggctccaaaaaagggtatttttaaaaaccagatcttgtgagtacagccctaatgtgcagggacagtgtcatcctgtatattcgttctttactcagactctttcttggttccttcattaggagcatgaatggttgaatgtgaacatgacagtaaattggagcaaactgtaaactggacataacttatgccaaaagacgtagttgtacaccatggaaaccccatccctgctcctaatctctactgccattctgaatgccaaagcaagacatccaacatggggcatctcccagagcacatacagcaccaaaaatccacacacagcctaagcttaacccatgtttttgtctgagattgttcaccagagacaagactctgactataaacagaacatccactttcatgagtttcctttactgtattctcaacttgggccttgcttcaagcaggcaaacatacattgaagaatgcactttggtactgtttaaataacaacacatcagcccacttgattccatgccatgtccttgctgacagaaacatccccaacagggcatgccctggtccaagtcctctgtctttgtcaaaatgctcttctgatgagttggagaggaggcagccagcagtggcagtccacaaggatccaggtaccttctccaatcctaaagcagacagcaggttgaataaaaccaatacacaacctattttctaggcaggaggggaaaaggcccttaggacaataatatttgtacaaagagttgagagtaaacaaacagtgtatcaggttcaaaaaaaaaaaaactattcgttggcatttaaatttttttcccttgcatagtatctattctctcactaggacttttaagtgctctgctggaggctcagcgttggtaataccatgtttgatgcaaacttgaacccaatgctctcattggtggcacagctttggagggtggtggccccaagaaggggcaatctgcctgctgctatattaatctggaaccagggccaacagctactcttgaactatggtatttgaagagcgagttcattgcctgttttaccttaaatgacaggaaaggaagatgaacaaaccttgctttgccttggcttcaaactagttcttgatttaagacaccagaaagggagagagggagtctgcttagagtttgaggttgcctctcacaagatgacagttaaaagttgccaccttacttaaaaggcattaaggaggcatttactcacaaaggagagagagtaaatttttttcttaagaggaaaaaaatactgataatacatagaacaatctgcacatccagtcttggcactttttccaatttgactgatctctaaactggtgacccttgcatatatcttagtctcttttctacaatcttcttcagaaagctacagcagctaacaatcatgtataaagatgcatttcctagatcatcttcagaagaaaatctcttcagcactttccctagaatctgtctcctgaccaccccgccccagacctgctttctcttttgagaattcataaccaggtatgtttagataccagttcaaaagaccactctatgggttgatgaggaaaaggctgcctgaggacaatttaagaccataatgagtttccaatttttaaagaaaatttggctagctggcttttaattcttaattaaaatcattaaatttaattaaaattattccaatcaaaatatatcactttccaagattccacattcatattacttacttatactatggagactttctctacctgagcatgtattcaggggctataggtacatttaactctaactaactgaaaaaaatcaggaagaaaaaactattaaaataaaataacctcctaaatcatttgggggtatccccatca

SEQ ID NO: 23207 - DNA, 5084 bp, Homo sapiens
  misc_feature 1..5084: note = ENST00000531849
  source 1..5084: mol_type = unassigned DNA; mol_type = unassigned DNA
aatcgggatccgtagtttgggtcttgctggcgcgaggtagtcagaggacgtggccgcggggcttgctgggacttgaggttagacgtcccggccgtcggttgccgcctacactgtctgccgtcgcgtcgcagttactaaggcgtggggaagatagcggcaggcaccgcagtggagcggctccgagatccccggggggctcgcaggcgcgcatccctcctgactgggacgtcgcctccgcagacccctcggaggctgaagcgacgccggaggcaggccaaggacactggttagtggttcagaaaggtaacctcaagaagaagcccaagggtttggttggagcacaagctgaacgtcgggaaagcctgaaggcgacttcttttgagttcaaggggaagaaagagtctcggcgggaaaatcaggtggaccttcctggacatatcctggaccaggcttttctgctgaagcaccactgtgtgaggaagccatcagatctgtgcaccattaatgtgagtggcctgaagttctccaaggccaaggaaaatgacttcaagcattttcattctgtgatttatatcaatgcctcagaaaacctgctgcctctagaggcatttcacacgtttccagccctaaaggaactggatctcgcatttaatggcatcaaaactatctacgtgaaatatggagactttaagttattagaattcttggacctttccttcaacagcctgactgtggaggccatctgtgatttggggattctgccacacctccgtgtcctgctcctcacaggcaatggccttacctccctgccgcccaatttggccgtcgcagaacaggaggcatctgtaacatcgctgacaagcaagaggtacatcctgaggttcccagcgctggagacactgatgctggatgacaacagactctccaaccccagttgctttgccagcctggctgggctcaggagactgaagaagttaagcttggatgaaaacaggattatcaggatcccatacctacagcaagttcagctctatgacgagtcagtagactggaatggaggcaggggaagtccccataaagagccccaattcatgctgcagtccaagccaaggatgcttgaggactcagatgagcaactggattatactgtactgcccatgaaaaaggatgttgaccggacagatcgcaaaagaggatgctgtcctaccagtagctctcttcccatctctctgcgagttcgtctttcataacaaccctctggtggcccatacacgaggggtccctccactgctgaagagcttcctccaggagcgactgggaatccacttaattcgaaggaagatagtaaagcctaagcatcatgttttgatgtctcggaaggaatcatggaaggtgaaaagcgaaatcccaaaggtgccgaagcagcctctggtgctccatcacccgcgcatgacgacaaccaagtctccctcaaaggatatgctagagccagaggcagagctggctgaagatctgcccactaccaaaagcacttctgtggagtcagagatgcccactgagaacctggaaggccattccccgtcttgccggaccttcgtgccactgcctcccatctgctccaactccactgtgcatagtgaagagaccctgtcccacctgagtgacacaactgtccgcctcagcccagagcgcccatcagatgaggactccaagagcacagagtccatcttcctgacccaggtgagtgaactgccttcctccgtcatccataaggatgatttagagttaaaggagaaagaccaaaagaaaccaccaacggcacccagagaggtgaaagggactcggaggaaactcccaactgccttccttcccagcaagtaccacggctatgaagaactgctgacagccaagcctgatccagccttcattgagccaaagggaatccagaagaatgcacaagccctgcaacaaatgctgaagcacccactcctgtgccactcctccaagcccaagctggacactcttcagaaaccctatgttcacaaagagaaacgggcccagagaatcccgattccacccccaaagaagactagagcccaacttctggatgacatcttcattcgcttgcgggatccccggaacattacagaggctccactaggtacggctctgccacagctgccaggatcccagatccagttcacgcctgctggctaaaggcaaagaaagggcttgtgtcagtgcaggaaaggcccttagagagcaactgcctacatcagtctctacatgtagatggacaaaaggagagccagcgtgaggcagggagttgcctaaaatcacacagcatgttaaggtcctgaaccagggcttaagatagagtcaatgcataggggcagtaggaagtcagtgacttcccaagctggaaaggccatttttagccccttagcatcctcctgccacaccatcccattttccaagggtctctggacccaatcctcttgcttctggctaggtgagaaccaggatgagcttggtgcctctcctggcttcttttcctgcaggtgctgtcctgcaccagtggacagaacggcggctggtgaaccacaagcagtacctggaggccaagaggctgttgaaggagttccaggcacgttaccggcagctggtgagtggctctctgcgcacagtgttcgggactaccccgctccccatggcctgcccagcgctgagtgagagccagcccaagttcggccacttcctcgagttcatggatgagttctgccaggagcccacagccagtgactcacaaggctagagctgtgcatgggggctgtgtgcaccacccggcctgtgccccagctctccccgagggctctgtgccctggaccgcacctcaaggttgaccagccggccacaggcctcagagctcagctgggccccacttgctggccacaaggtggcatccccttgtcaggatctcccctccttggcccaggcatgacctggtgcctggcccagcggcaataaagagtgggtgcacagggcaatagactgggtgccacatgcattctttcttggaacccaggccacagcagcattgtcacacttccctctaaaaatggttttccagttcagatgcaacagggatacatttgttctctgttgtatgagaaactgacaccaaggggatcttaacaaattcctgaacaatggctccaaaaaagggtatttttaaaaaccagatcttgtgagtacagccctaatgtgcagggacagtgtcatcctgtatattcgttctttactcagactctttcttggttccttcattaggagcatgaatggttgaatgtgaacatgacagtaaattggagcaaactgtaaactggacataacttatgccaaaagacgtagttgtacaccatggaaaccccatccctgctcctaatctctactgccattctgaatgccaaagcaagacatccaacatggggcatctcccagagcacatacagcaccaaaaatccacacacagcctaagcttaacccatgtttttgtctgagattgttcaccagagacaagactctgactataaacagaacatccactttcatgagtttcctttactgtattctcaacttgggccttgcttcaagcaggcaaacatacattgaagaatgcactttggtactgtttaaataacaacacatcagcccacttgattccatgccatgtccttgctgacagaaacatccccaacagggcatgccctggtccaagtcctctgtctttgtcaaaatgctcttctgatgagttggagaggaggcagccagcagtggcagtccacaaggatccaggtaccttctccaatcctaaagcagacagcaggttgaataaaaccaatacacaacctattttctaggcaggaggggaaaaggcccttaggacaataatatttgtacaaagagttgagagtaaacaaacagtgtatcaggttcaaaaaaaaaaaaactattcgttggcatttaaatttttttcccttgcatagtatctattctctcactaggacttttaagtgctctgctggaggctcagcgttggtaataccatgtttgatgcaaacttgaacccaatgctctcattggtggcacagctttggagggtggtggccccaagaaggggcaatctgcctgctgctatattaatctggaaccagggccaacagctactcttgaactatggtatttgaagagcgagttcattgcctgttttaccttaaatgacaggaaaggaagatgaacaaaccttgctttgccttggcttcaaactagttcttgatttaagacaccagaaagggagagagggagtctgcttagagtttgaggttgcctctcacaagatgacagttaaaagttgccaccttacttaaaaggcattaaggaggcatttactcacaaaggagagagagtaaatttttttcttaagaggaaaaaaatactgataatacatagaacaatctgcacatccagtcttggcactttttccaatttgactgatctctaaactggtgacccttgcatatatcttagtctcttttctacaatcttcttcagaaagctacagcagctaacaatcatgtataaagatgcatttcctagatcatcttcagaagaaaatctcttcagcactttccctagaatctgtctcctgaccaccccgccccagacctgctttctcttttgagaattcataaccaggtatgtttagataccagttcaaaagaccactctatgggttgatgaggaaaaggctgcctgaggacaatttaagaccataatgagtttccaatttttaaagaaaatttggctagctggcttttaattcttaattaaaatcattaaatttaattaaaattattccaatcaaaatatatcactttccaagattccacattcatattacttacttatactatggagactttctctacctgagcatgtattcaggggctataggtacatttaactctaactaactgaaaaaaatcaggaagaaaaaactattaaaataaaataacctcctaaat

SEQ ID NO: 23208 - DNA, 1588 bp, Homo sapiens
  misc_feature 1..1588: note = ENST00000531449
  source 1..1588: mol_type = unassigned DNA; mol_type = unassigned DNA
gcaggggaagtccccataaagagccccaattcatgctgcagtccaagccaaggatgcttgaggactcagatgagcaactggattatactgtactgcccatgaaaaaggatgttgaccggacagatcgcaaaagaggatgctgtcctaccagtagctctcttcccatctctctgcgagttcgtctttcataacaaccctctggtggcccatacacgaggggtccctccactgctgaagagcttcctccaggagcgactgggaatccacttaattcgaaggaagatagtaaagcctaagcatcatgttttgatgtctcggaaggaatcatggaaggtgaaaagcgaaatcccaaaggtgccgaagcagcctctggtgctccatcacccgcgcatgacgacaaccaagtctccctcaaaggatatgctagagccagaggcagagctggctgaagatctgcccactaccaaaagcacttctgtggagtcagagatgcccactgagaacctggaaggccattccccgtcttgccggaccttcgtgccactgcctcccatctgctccaactccactgtgcatagtgaagagaccctgtcccacctgagtgacacaactgtccgcctcagcccagagcgcccatcagatgaggactccaagagcacagagtccatcttcctgacccaggtgagtgaactgccttcctccgtcatccataaggatgatttagagttaaaggagaaagaccaaaagaaaccaccaacggcacccagagaggtgaaagggactcggaggaaactcccaactgccttccttcccagcaagtaccacggctatgaagaactgctgacagccaagcctgatccagccttcattgagccaaagggaatccagaagaatgcacaagccctgcaacaaatgctgaagcacccactcctgtgccactcctccaagcccaagctggacactcttcagaaaccctatgttcacaaagagaaacgggcccagagaatcccgattccacccccaaagaagactagagcccaacttctggatgacatcttcattcgcttgcgggatccccggaacattacagaggctccactaggtgctgtcctgcaccagtggacagaacggcggctggtgaaccacaagcagtacctggaggccaagaggctgttgaaggagttccaggcacgttaccggcagctggtgagtggctctctgcgcacagtgttcgggactaccccgctccccatggcctgcccagcgctgagtgagagccagcccaagttcggccacttcctcgagttcatggatgagttctgccaggagcccacagccagtgactcacaaggctagagctgtgcatgggggctgtgtgcaccacccggcctgtgccccagctctccccgagggctctgtgccctggaccgcacctcaaggttgaccagccggccacaggcctcagagctcagctgggccccacttgctggccacaaggtggcatccccttgtcaggatctcccctccttggcccaggcatgacctggtgcctggcccagcggcaataaagagtgggtgcacagggcaa

SEQ ID NO: 23209 - DNA, 2505 bp, Homo sapiens
  misc_feature 1..2505: note = ENST00000527087
  source 1..2505: mol_type = unassigned DNA; mol_type = unassigned DNA
gtcccggccgtcggttgccgcctacactgtctgccgtcgcgtcgcagttactaaggcgtggggaagatagcggcaggcaccgcagtggagcggctccgagatccccggggggctcgcaggcgcgcatccctcctgactgggacgtcgcctccgcagacccctcggaggctgaagcgacgccggaggcaggcaaagaaacaagtgaagaaacaaaaaaaaaaggaagttaaggggccattcccaaagtcaaagatcaaggagatggccttctcaggaatctacaagctggatgatgggaagccttacctgaacaactgcttcccagccagaaatctgcttcgcgtgccggaggaaggccaaggacactggttagtggttcagaaaggtaacctcaagaagaagcccaagggtttggttggagcacaagctgaacgtcgggaaagcctgaaggcgacttcttttgagttcaaggggaagaaagagtctcggcgggaaaatcaggtggaccttcctggacatatcctggaccaggcttttctgctgaagcaccactgtgtgaggaagccatcagatctgtgcaccattaatgccaaggaaaatgacttcaagcattttcattctgtgatttatatcaatgcctcagaaaacctgctgcctctagaggcatttcacacgtttccagccctaaaggaactggatctcgcatttaatggcatcaaaactatctacgtgaaatatggagactttaagttattagaattcttggacctttccttcaacagcctgactgtggaggccatctgtgatttggggattctgccacacctccgtgtcctgctcctcacaggcaatggccttacctccctgccgcccaatttggccgtcgcagaacaggaggcatctgtaacatcgctgacaagcaagaggtacatcctgaggttcccagcgctggagacactgatgctggatgacaacagactctccaaccccagttgctttgccagcctggctgggctcaggagactgaagaagttaagcttggatgaaaacaggattatcaggatcccatacctacagcaagttcagctctatgacgagtcagtagactggaatggaggcaggggaagtccccataaagagccccaattcatgctgcagtccaagccaaggatgcttgaggactcagatgagcaactggattatactgtactgcccatgaaaaaggatgttgaccggacaggggtccctccactgctgaagagcttcctccaggagcgactgggaatccacttaattcgaaggaagatagtaaagcctaagcatcatgttttgatgtctcggaaggaatcatggaaggtgaaaagcgaaatcccaaaggtgccgaagcagcctctggtgctccatcacccgcgcatgacgacaaccaagtctccctcaaaggatatgctagagccagaggcagagctggctgaagatctgcccactaccaaaagcacttctgtggagtcagagatgcccactgagaacctggaaggccattccccgtcttgccggaccttcgtgccactgcctcccatctgctccaactccactgtgcatagtgaagagaccctgtcccacctgagtgacacaactgtccgcctcagcccagagcgcccatcagatgaggactccaagagcacagagtccatcttcctgacccaggtgagtgaactgccttcctccgtcatccataaggatgatttagagttaaaggagaaagaccaaaagaaaccaccaacggcacccagagaggtgaaagggactcggaggaaactcccaactgccttccttcccagcaagtaccacggctatgaagaactgctgacagccaagcctgatccagccttcattgagccaaagggaatccagaagaatgcacaagccctgcaacaaatgctgaagcacccactcctgtgccactcctccaagcccaagctggacactcttcagaaaccctatgttcacaaagagaaacgggtgctgtcctgcaccagtggacagaacggcggctggtgaaccacaagcagtacctggaggccaagaggctgttgaaggagttccaggcacgttaccggcagctggtgagtggctctctgcgcacagtgttcgggactaccccgctccccatggcctgcccagcgctgagtgagagccagcccaagttcggccacttcctcgagttcatggatgagttctgccaggagcccacagccagtgactcacaaggctagagctgtgcatgggggctgtgtgcaccacccggcctgtgccccagctctccccgagggctctgtgccctggaccgcacctcaaggttgaccagccggccacaggcctcagagctcagctgggccccacttgctggccacaaggtggcatccccttgtcaggatctcccctccttggcccaggcatgacctggtgcctggcccagcggcaataaagagtgggtgcacagggcaa

SEQ ID NO: 23210 - DNA, 2995 bp, Homo sapiens
  misc_feature 1..2995: note = ENST00000431210
  source 1..2995: mol_type = unassigned DNA; mol_type = unassigned DNA
tgtttttattcaggtgataattcttcccttttttatattgttaattttcctcaaatagtaggagattcttgattattcagtctttttgtgtaacaatcctcaatcagaagcttaaaatgcagtaattcctgtgattgtggggagagcaggatgcgcgttcagacagcgtgcccatctttctagaggtgctgttgttttctagggttcattgcttagcactcacacttgcaaccatggcccatcccccagggaattcctactttgttcattgcacaaagctttcccaaactcccttgcagaccctcatcacaggagaagttatttatgccatgttgttccatctcctattactgttttcttcattttcatgtgacttgtctcattataatatcattaacatgtagaaggtgtcggttaactagggtaaaggtgagcaatgtctgcacaggatctagtcccagcagatgctatgctgtgttaggttgaactcagctgttagactcatctcattctgacggtcccaagaatgaaatcactctgcagcctcctccttatgactgtgtgctggttgttcttggtatctctcctgaattcactggctcaacacattctgtttctactaatataagaaatatttccaaatcctctgacagaatgtcttctatatacatttttctcttctaagacagttggttagctttctgctcagtatggactccccagtaattctgaggctcgaaagtgcttatgtgctttaaagtcagattgaaggtcagtcagtgtggctgaaatacagtgaatgagggagagtatcatgaaatgagactgaagaagtaggcaggggcccaatcatgcaggacatcagaggactagataagcagtttgtattttatcctaagtgcaaagggacttattacctgatgcatgtcacagccagctcctcttcctagttagcactggggctgaggaccaatgagaactccctctaggaggtgccctgctgcacacagtggatggcagacctatatcctgggtgctctaggcatcaatcagcggtctcaccaaccttcattctgtttctcttctgtttcagaggttgtgttttcatcttaccctggattttcaacctcagaggtgaaaagcgaaatcccaaaggtgccgaagcagcctctggtgctccatcacccgcgcatgacgacaaccaagtctccctcaaaggatatgctagagccagaggcagagctggctgaagatctgcccactaccaaaagcacttctgtggagtcagagatgcccactgagaacctggaaggccattccccgtcttgccggaccttcgtgccactgcctcccatctgctccaactccactgtgcatagtgaagagaccctgtcccacctgagtgacacaactgtccgcctcagcccagagcgcccatcagatgaggactccaagagcacagagtccatcttcctgacccaggtgagtgaactgccttcctccgtcatccataaggatgatttagagttaaaggagaaagaccaaaagaaaccaccaacggcacccagagaggtgaaagggactcggaggaaactcccaactgccttccttcccagcaagtaccacggctatgaagaactgctgacagccaagcctgatccagccttcattgagccaaagggaatccagaagaatgcacaagccctgcaacaaatgctgaagcacccactcctgtgccactcctccaagcccaagctggacactcttcagaaaccctatgttcacaaagagaaacgggtaaacatccagctcactgaatgtgtaaatggcccctgagtaccgcccacaattacagatgtggctgtcaccttgggaccctctgagggccatgctttcccagcacccccagatgccccccagcctgttgctgtgactgtatgaagttaggccagggaagtctgtgcataaacctgggataacaccctcctccatgaccttctgccaggcccagagaatcccgattccacccccaaagaagactagagcccaacttctggatgacatcttcattcgcttgcgggatccccggaacattacagaggctccactaggtacggctctgccacagctgccaggatcccagatccagttcacgcctgctggctaaaggcaaagaaagggcttgtgtcagtgcaggaaaggcccttagagagcaactgcctacatcagtctctacatgtagatggacaaaaggagagccagcgtgaggcagggagttgcctaaaatcacacagcatgttaaggtcctgaaccagggcttaagatagagtcaatgcataggggcagtaggaagtcagtgacttcccaagctggaaaggccatttttagccccttagcatcctcctgccacaccatcccattttccaagggtctctggacccaatcctcttgcttctggctaggtgagaaccaggatgagcttggtgcctctcctggcttcttttcctgcaggtgctgtcctgcaccagtggacagaacggcggctggtgaaccacaagcagtacctggaggccaagaggctgttgaaggagttccaggcacgttaccggcagctggtgagtggctctctgcgcacagtgttcgggactaccccgctccccatggcctgcccagcgctgagtgagagccagcccaagttcggccacttcctcgagttcatggatgagttctgccaggagcccacagccagtgactcacaaggctagagctgtgcatgggggctgtgtgcaccacccggcctgtgccccagctctccccgagggctctgtgccctggaccgcacctcaaggttgaccagccggccacaggcctcagagctcagctgggccccacttgctggccacaaggtggcatccccttgtcaggatctcccctccttggcccaggcatgacctggtgcctggcccagcggcaataaagagtgggtgcacagggc

SEQ ID NO: 23211 - DNA, 414 bp, Homo sapiens
  misc_feature 1..414: note = ENST00000530280
  source 1..414: mol_type = unassigned DNA; mol_type = unassigned DNA
gtcctaccagtagctctcttcccatctctctgcgagttcgtctttcataacaaccctctggtggcccatacacgaggtgaaaagcgaaatcccaaaggtgccgaagcagcctctggtgctccatcacccgcgcatgacgacaaccaagtctccctcaaaggatatgctagagccagaggcagagctggctgaagatctgcccactaccaaaagcacttctgtggagtcagagatgcccactgagaacctggaaggccattccccgtcttgccggaccttcgtgccactgcctcccatctgctccaactccactgtgcatagtgaagagaccctgtcccacctgagtgacacaactgtccgcctcagcccagagcgcccatcagatgaggactccaagagcacagagtccatctt

SEQ ID NO: 23212 - DNA, 542 bp, Homo sapiens
  misc_feature 1..542: note = ENST00000529926
  source 1..542: mol_type = unassigned DNA
gtccccataaagagccccaattcatgctgcagtccaagccaaggatgcttgaggactcagatgagcaactggattatactgtactgcccatgaaaaaggatgttgaccggacagatcgcaaaagaggatgctgtcctaccagtagctctcttcccatctctctgcgagttcgtctttcataacaaccctctggtggcccatacacgaggggtccctccactgctgaagagcttcctccaggagcgactgggaatccacttaattcgaaggaagatagtaaagcctaagcatcatgttttgatgtctcggaaggaatcatggaaggtagggcttccaaggcaggactcccacccccaggaagagtgcagcctattataatgtatgcaaaccaacctggctgtagagctgctcactccacagtgcctggaatctctccattaggttcagcattgccttctcctttccttgctttgggaagagcactggatgaaacaacagatatgaaaatatattttaaactcctaaaactcttaccattgaaa

SEQ ID NO: 23213 - DNA, 412 bp, Homo sapiens
  misc_feature 1..412: note = ENST00000528819
  source 1..412: mol_type = unassigned DNA
gcgctggagacactgatgctggatgacaacagactctccaaccccagttgctttgccagcctggctgggctcaggagactgaagaagttaagcttggatgaaaacaggattatcaggatcccatacctacagcaagttcagctctatgacgagtcagtagactggaatggaggcaggggaagtccccataaagagccccaattcatgctgcagtccaagccaaggatgcttgaggactcagatgagcaactggattatactgtactgcccatgaaaaaggatgttgaccggacagacaaccaagatatgttcacttcctcccatattcgagatccttcctgtgaagtcactgaaggccaggaaccagacgctggccccacccttcccagagctgagataccttagcctggcc

SEQ ID NO: 23214 - DNA, 986 bp, Homo sapiens
  misc_feature 1..986: note = ENST00000525407
  source 1..986: mol_type = unassigned DNA; mol_type = unassigned DNA
cgagatccccggggggctcgcaggcgcgcatccctcctgactgggacgtcgcctccgcagacccctcggaggctgaagcgacgccggaggcagggagatggccttctcaggaatctacaagctggatgatgggaagccttacctgaacaactgcttcccagccagaaatctgcttcgcgtgccggaggaaggccaaggacactggttagtggttcagaaaggtaacctcaagaagaagcccaagggtttggttggagcacaagctgaacgtcgggaaagcctgaaggcgacttcttttgagttcaaggggaagaaagagtctcggcgggaaaatcaggtggaccttcctggacatatcctggaccaggcttttctgctgaagcaccactgtgtgaggaagccatcagatctgtgcaccattaatgtgagtggcctgaagttctccaaggccaaggaaaatgacttcaagcattttcattctgtgatttatatcaatgcctcagaaaacctgctgcctctagaggcatttcacacgtttccagccctaaaggaactggatctcgcatttaatggcatcaaaactatctacgtgaaatatggagactttaagttattagaattcttggacctttccttcaacagcctgactgtggaggccatctgtgatttggggattctgccacacctccgtgtcctgctcctcacaggcaatggccttacctccctgccgcccaatttggccgtcgcagaacaggaggcatctgtaacatcgctgacaagcaagaggtacatcctgaggttcccagcgctggagacactgatgctggatgacaacagactctccaaccccagttgctttgccagcctggctgggctcaggagactgaagaagttaagcttggatgaaaacaggattatcaggatcccatacctacagcaagttcagctctatgacgagtcagtagactggaatggaggcaggggaa

SEQ ID NO: 23215 - DNA, 1016 bp, Homo sapiens
  misc_feature 1..1016: note = ENST00000528219
  source 1..1016: mol_type = unassigned DNA; mol_type = unassigned DNA
tcgcgtcgcagttactaaggcgtggggaagatagcggcaggcaccgcagtggagcggctccgagatccccggggggctcgcaggcgcgcatccctcctgactgggacgtcgcctccgcagacccctcggaggctgaagcgacgccggaggcaggcaaagaaacaagtgaagaaacaaaaaaaaaaggaagttaaggggccattcccaaagtcaaagatcaagccaaggacactggttagtggttcagaaaggtaacctcaagaagaagcccaagggtttggttggagcacaagctgaacgtcgggaaagcctgaaggcgacttcttttgagttcaaggggaagaaagagtctcggcgggaaaatcaggtggaccttcctggacatatcctggaccaggcttttctgctgaagcaccactgtgtgaggaagccatcagatctgtgcaccattaatgtgagtggcctgaagttctccaaggccaaggaaaatgacttcaagcattttcattctgtgatttatatcaatgcctcagaaaacctgctgcctctagaggcatttcacacgtttccagccctaaaggaactggatctcgcatttaatggcatcaaaactatctacgtgaaatatggagactttaagttattagaattcttggacctttccttcaacagcctgactgtggaggccatctgtgatttggggattctgccacacctccgtgtcctgctcctcacaggcaatggccttacctccctgccgcccaatttggccgtcgcagaacaggaggcatctgtaacatcgctgacaagcaagaggtacatcctgaggttcccagcgctggagacactgatgctggatgacaacagactctccaaccccagttgctttgccagcctggctgggctcaggagactgaagaagttaagcttggatgaaaacaggattatcaggatcccatacctacagcaagttcagctctatgacgagtcagtagactggaatggaggcaggggaa

SEQ ID NO: 23216 - DNA, 644 bp, Homo sapiens
  misc_feature 1..644: note = ENST00000526047
  source 1..644: mol_type = unassigned DNA; mol_type = unassigned DNA
ttggggattctgccacacctccgtgtcctgctcctcacaggcaatggccttacctccctgccgcccaatttggccgtcgcagaacaatagaggatctaggcccagagatgctcaacaccagccggaagtcacacagcaagcaaagcagcagcagcaccggagccagagctcagggatcctggccacccttcccatgcatcttctaatatgggaggcatctgtaacatcgctgacaagcaagaggtacatcctgaggttcccagcgctggagacactgatgctggatgacaacagactctccaaccccagttgctttgccagcctggctgggctcaggaggtaaagccataagcctttctctgctgggcctcctctaatccccaggcttgctcacactctgagtgctgttctggaagccaaaaggtttgggtttaaagcctagctccacaatttatctctactgtgtggccatgggtaagtcatttctcccctctgagctttggctcctccataaaaatggccatgagtgaggacatttctgatcacatgactgaattagaagcagcaaagagaaaggaaaacaggaggagattttacccaagataggattcggaccctgacagtagagacaggaaaatttttta

SEQ ID NO: 23217 - DNA, 690 bp, Homo sapiens
  misc_feature 1..690: note = ENST00000531852
  source 1..690: mol_type = unassigned DNA; mol_type = unassigned DNA
ggttgccgcctacactgtctgccgtcgcgtcgcagttactaaggcgtggggaagatagcggcaggcaccgcagtggagcggctccgagatccccggggggctcgcaggcgcgcatccctcctgactgggacgtcgcctccgcagacccctcggaggctgaagcgacgccggaggcaggcaaagaaacaagtgaagaaacaaaaaaaaaaggaagttaaggggccattcccaaagtcaaagatcaagccaaggacactggttagtggttcagaaaggtaacctcaagaagaagcccaagggtttggttggagcacaagctgaacgtcgggaaagcctgaaggcgacttcttttgagttcaaggggaagaaagagtctcggcgggaaaatcaggtggaccttcctggacatatcctggaccaggcttttctgttcttggacctttccttcaacagcctgactgtggaggccatctgtgatttggggattctgccacacctccgtgtcctgctcctcacaggcaatggccttacctccctgccgcccaatttggccgtcgcagaacaggaggcatctgtaacatcgctgacaagcaagaggtacatcctgaggttcccagcgctggagacactgatgctggatgacaacagactctccaaccccagttgctttgccagcctggctgggctcag

SEQ ID NO: 23218 - DNA, 872 bp, Homo sapiens
  misc_feature 1..872: note = ENST00000533598
  source 1..872: mol_type = unassigned DNA; mol_type = unassigned DNA
tcgcagttactaaggcgtggggaagatagcggcaggcaccgcagtggagcggctccgagatccccggggggctcgcaggcgcgcatccctcctgactgggacgtcgcctccgcagacccctcggaggctgaagcgacgccggaggcaggcaaagaaacaagtgaagaaacaaaaaaaaaaggaagttaaggggccattcccaaagtcaaagatcaagccaaggacactggttagtggttcagaaaggtaacctcaagaagaagcccaagggtttggttggagcacaagctgaacgtcgggaaagcctgaaggcgacttcttttgagttcaaggggaagaaagagtctcggcgggaaaatcaggtggaccttcctggacatatcctggaccaggcttttctgctgaagcaccactgtgtgaggaagccatcagatctgtgcaccattaatgtgagtggcctgaagttctccaaggccaaggaaaatgacttcaagcattttcattctgtgatttatatcaatgcctcagaaaacctgctgcctctagaggcatttcacacgtttccagccctaaaggaactggatctcgcatttaatggcatcaaaactatctacgtgaaatatggagactttaagttattagaattcttggacctttccttcaacagcctgactgtggaggccatctgtgatttggggattctgccacacctccgtgtcctgctcctcacaggcaatggccttacctccctgccgcccaatttggccgtcgcagaacaatagaggatctaggcccagagatgctcaacaccagccggaagtcacacagcaagcaaagcagcagcagcaccggagccagagctcagggatcct

SEQ ID NO: 23219 - DNA, 571 bp, Homo sapiens
  misc_feature 1..571: note = ENST00000534041
  source 1..571: mol_type = unassigned DNA; mol_type = unassigned DNA
ctacactgtctgccgtcgcgtcgcagttactaaggcgtggggaagatagcggcaggcaccgcagtggagcggctccgagatccccggggggctcgcaggcgcgcatccctcctgactgggacgtcgcctccgcagacccctcggaggctgaagcgacgccggaggcaggccaaggacactggttagtggttcagaaaggtaacctcaagaagaagcccaagggtttggttggagcacaagctgaacgtcgggaaagcctgaaggcgacttcttttgagttcaaggggaagaaagagtctcggcgggaaaatcaggtggaccttcctggacatatcctggaccaggcttttctgctgaagcaccactgtgtgaggaagccatcagatctgtgcaccattaatgtgagtggcctgaagttctccaaggccaaggaaaatgacttcaagcattttcattctgtgatttatatcaatgcctcagaaaacctgctgcctctagttcttggacctttccttcaacagcctgactgtggaggccatctgtgatttggggattctgccacacctccgtg

SEQ ID NO: 23220 - DNA, 568 bp, Homo sapiens
  misc_feature 1..568: note = ENST00000534798
  source 1..568: mol_type = unassigned DNA; mol_type = unassigned DNA
actgtctgccgtcgcgtcgcagttactaaggcgtggggaagatagcggcaggcaccgcagtggagcggctccgagatccccggggggctcgcaggcgcgcatccctcctgactgggacgtcgcctccgcagacccctcggaggctgaagcgacgccggaggcaggccaaggacactggttagtggttcagaaaggtaacctcaagaagaagcccaagggtttggttggagcacaagctgaacgtcgggaaagcctgaaggcgacttcttttgagttcaaggggaagaaagagtctcggcgggaaaatcaggtggaccttcctggacatatcctggaccaggcttttctgctgaagcaccactgtgtgaggaagccatcagatctgtgcaccattaatgccaaggaaaatgacttcaagcattttcattctgtgatttatatcaatgcctcagaaaacctgctgcctctagaggcatttcacacgtttccagccctaaaggaactggatctcgcatttaatggcatcaaaactatctacgtgaaatatggagactttaagttattagaa

SEQ ID NO: 23221 - DNA, 561 bp, Homo sapiens
  misc_feature 1..561: note = ENST00000529400
  source 1..561: mol_type = unassigned DNA; mol_type = unassigned DNA
agtcagaggacgtggccgcggggcttgctgggacttgaggttagacgtcccggccgtcggttgccgcctacactgtctgccgtcgcgtcgcagttactaaggcgtggggaagatagcggcaggcaccgcagtggagcggctccgagatccccggggggctcgcaggcgcgcatccctcctgactgggacgtcgcctccgcagacccctcggaggctgaagcgacgccggaggcaggcaaagaaacaagtgaagaaacaaaaaaaaaaggaagttaaggggccattcccaaagtcaaagatcaagccaaggacactggttagtggttcagaaaggtaacctcaagaagaagcccaagggtttggttggagcacaagctgaacgtcgggaaagcctgaaggcgacttcttttgagttcaaggggaagaaagagtctcggcgggaaaatcaggtggaccttcctggacatatcctggaccaggcttttctggccaaggaaaatgacttcaagcattttcattctgtgatttatatcaatgcctcagaaaacctgctgcctctag

SEQ ID NO: 23222 - DNA, 561 bp, Homo sapiens
  misc_feature 1..561: note = ENST00000524430
  source 1..561: mol_type = unassigned DNA; mol_type = unassigned DNA
gacttgaggttagacgtcccggccgtcggttgccgcctacactgtctgccgtcgcgtcgcagttactaaggcgtggggaagatagcggcaggcaccgcagtggagcggctccgagatccccggggggctcgcaggcgcgcatccctcctgactgggacgtcgcctccgcagacccctcggaggctgaagcgacgccggaggcaggcaaagaaacaagtgaagaaacaaaaaaaaaaggaagttaaggggccattcccaaagtcaaagatcaagccaaggacactggttagtggttcagaaaggtaacctcaagaagaagcccaagggtttggttggagcacaagctgaacgtcgggaaagcctgaaggcgacttcttttgagttcaaggggaagaaagagtctcggcgggaaaatcaggtggaccttcctggacatatcctggaccaggcttttctgctgaagcaccactgtgtgaggaagccatcagatctgtgcaccattaatgtgagtggcctgaagttctccaagcttgataggagcatatcattaaagaaactctt

SEQ ID NO: 23223 - DNA, 645 bp, Homo sapiens
  misc_feature 1..645: note = ENST00000533990
  source 1..645: mol_type = unassigned DNA; mol_type = unassigned DNA
cttcctggacatatcctggaccaggcttttctgctgaagcaccactgtgtgaggaagccatcagatctgtgcaccattaatgtgagtggcctgaagttctccaaggtgaggtcagccagcaaagatgtgattggggtgagccagacttgaggtggcgcacctggctgttgtggtttgtctcttgcacctccagagtccctagggactggaaatctggtcacgaagaaggagggagaggagagtcagacaaggatttattgggttgaaacaatattcagacacaaacttttgctacaaattttatattgcccttgtcctatttgatatgaattaaagaaaattgccttatgggccaggcgtggtggctcagggctgtaatcccagcactttgggaggccgaggtgggtggatcacaaggtcaggagctcaagaccagcctggccaagatggtgaaactccatctctactaaaaatacaaaaaatcagccaagcatggtagcaggcacctgtaatcccagctacttgggaggctgaggcagagaattgcttgaacccctgaggcagaggttgcagtgagccaagatcgtgccagtgcactccagcctgggtgacagtgagactctgtcaccaaaaaaaaaaagaaaa

SEQ ID NO: 23224 - DNA, 9891 bp, Homo sapiens
  misc_feature 1..9891: note = ENST00000261381
  source 1..9891: mol_type = unassigned DNA; mol_type = unassigned DNA
gcggccgcgggagctgcggggagcgcgggggcggcccggagcgtgccggggtccccgcgcctcgctcgccggccgcgctccgaagatggtggcggcgccgtgcgcccggaggctggcccggcgctcgcactcggcgctgctcgcggcgctcacggtgctgctgctgcagacgctggtcgtgtggaatttcagcagcctcgactccggggccggggagcgccgcgggggcgcagcggtcggcggcggggagcagccgcccccggccccggccccgcgccgggagcgccgggacctgcccgccgagccggctgcagcccgaggaggaggaggaggcggcggcggaggaggaggaggacgggggccccaggcgcgggcgcggggaggcggccccggagaaccgcggggacagcagccggccagccggggggcactgcccgcccgggctctggatccacacccaagtccgctcatcaccctggagactcaggatggctacttttctcatcggccgaaagagaaagtgcgaacagacagcaacaacgagaactctgtccccaaagactttgagaatgtcgacaacagcaacttcgcacccaggactcaaaagcagaagcaccagcctgagttggcgaagaagccaccgagtagacagaaggagcttttgaaaaggaagctggaacagcaggagaaaggaaaaggacatacattccctgggaaaggccccggtgaggtgctgcctcccggggacagagccgcagccaacagcagccacgggaaggatgtgtccagaccgcctcatgccaggaaaactgggggcagctcccccgagaccaagtatgaccagccccctaagtgtgacatctcaggcaaggaggccatctctgccctgtcccgtgctaagtccaagcactgccgccaggagattggggagacttactgccgccacaagttagggctgctgatgcctgagaaggtgactcggttctgccccctcgagggtaaagccaacaagaacgtgcagtgggacgaggactccgtggagtacatgccagccaacccggtcagaatcgcctttgtcctggtggtccacggccgtgcctctcggcagttgcagcgcatgttcaaggccatctaccacaaagaccacttctactacatccacgtggacaagcgctctaattacctgcatcggcaagtgctccaggtctccaggcagtacagcaatgtccgcgtcaccccctggagaatggccaccatctggggaggagccagcctcctgtccacctacctgcagagcatgcgggacctcctggagatgaccgactggccctgggacttcttcatcaacctgagtgcggccgactaccccatcaggacaaatgaccagttggtggcgtttctctcccgataccgagatatgaatttcttgaagtcacacggccgggacaatgcaaggttcattcggaagcagggcctggatcggctcttcctggagtgcgacgctcacatgtggcgcctgggagatcggcggatcccagagggcattgccgtggatggcggttcggactggttcctgctgaaccggaggtttgtagaatatgtgaccttctccacagacgatctggtgaccaagatgaaacagttctactcctacaccctgcttcctgctgagtccttcttccatacggtcctggagaacagcccccactgcgacaccatggtggacaacaacctgcgcatcaccaactggaatcgcaagctgggctgcaagtgccagtacaagcacatcgtggactggtgcggctgctcccccaatgacttcaagccgcaggacttccaccgcttccagcagacagcccggcctaccttctttgcccgcaagtttgaagccgtggtgaatcaggaaatcattgggcagctggactattacctgtacgggaactaccctgcaggtaccccgggcctgcgctcctactgggagaatgtctacgatgagcctgacggcatccacagcctgagcgacgtgacactcaccttgtaccactcctttgcccgcctgggtcttcgacgggccgagacgtccctgcacacggatggggagaacagctgccgatactacccaatgggccacccagcatctgtgcacctctacttccttgctgaccgcttccagggctttctgatcaagcatcatgctaccaatctggctgtgagcaaactagagactctggagacctgggtgatgccgaaaaaagtcttcaagatcgcaagcccacccagtgactttgggaggcttcagttttccgaggtcggcactgactgggatgccaaggagaggctattccgcaactttgggggtcttctggggcccatggatgagccggtgggtatgcagaagtgggggaagggacctaatgtgaccgtgaccgtcatttgggtggatcccgtcaatgtcatcgcagccacctacgacatcctcattgagtccactgccgaattcacacactacaagccccctttgaacttgcccctgaggcctggggtctggacagtgaaaattctccaccactgggtgccagttgcagagaccaaattcctcgttgcgcctctgaccttctcgaacaggcagcccatcaaacctgaggaggcactgaagctgcacaatgggcccctccgcaatgcctacatggagcagagcttccagagcctaaaccccgtcctcagcctgcccatcaaccccgcccaggtggaacaggcacggaggaacgcagcctccacgggcacagcgctggagggatggctggactcgttggtgggcgggatgtggactgccatggacatctgtgccacgggccccacagcctgcccggtcatgcagacctgcagccagacggcctggagctccttcagccctgaccccaagtcggagctgggggcagtcaaacctgatggccggctcaggtagcactgggcacgaggagtgggccacagcaggatctcaacgggaaagcagccagaggggttgtggggcctgaaccccggcctcccaccctgggggaggccctctgtgaatgggtctctcctggccatagaatgatggaaagggaaggtcagcaggtcaaagcaggatcagccaacaacctgcctttggcaagctgcgggtgggatggctcagtccctgcactgtgactgtctcacctcttctggttgatcctcaagtcctacaggttccttgtcttccccttccagtgacccacccctgaccccagacgtgtgattttcagacttttctttcgagcagcagaacttcgtttacggagcacagtcataagtggaggttcagggtgctgacgaaatccaagctgctctggttgaagctgacaagtgcgaggttccctcccaaagctcagccctctgggcggtccccttgcccagggtatctcctacggtacctcttcagaacccaagggctctgcaaatgccagtttgacaagcactgcccagaccaaccatgggttcaaactccagccctgccctttggttcatttttctgcttctcttggctgggggactctggtgccagccttgaaagtcatggtcgtgggccctttcccatggaggctgcagccttaggagagctctgagcctctcagcagccctccttgggttgaactattctccttagtaactaggtaagtgggaaagccttttgatgtggcatggccaaggtccagccacaagtgcaactgccacctgtccaggggtctgggcctccttccctcaaggctgccacacaaagtagcagaaataggatgatgtttgtgagcaccagactcaagaccatgaccttctttgatccttgaaaatgggaactttgacagccatgaccatgaaactcacaaggcaacgcgatgaaactcacaaagcaatgcttggagcaaaactcctgagctagacagcacagcagcacccatcccctgccagagcccttccgttctgaggtcagacacacaaaaccttcgtcaattgcacaccggtgctgttgggagtgaccaaaccacatgaaccagacttttcccgtccaggaaatagcatttcagatttggtttttaatttcatgcccttcggccacaggctcaacgggacatgcaacataaaaatgggaaggttatttaaacaacaaaaaacagtatgatttaagtgttgagttaccagaaacccaaaaggtttccttgccacgagccccctggagtgtcatccctgttcaccaggagagctcttcgcaggaggcctcccttgctcctgtaatcccacctcccctgaatgatgggattcccttggaaaaaggtctcacccctggtagccatctgcccttcccatggagagccagtcctgacacttctctccagcgtgggtttgaaggggctgcccttcgctttgtgtgacttgtcctaatcctagccagatgtgttgccccatcccaagcctcgcaaggcagggtgtcctgttggcaatggaggacgtagagaagggacactttagatatttattatttacatgttttagtcgatgactaattagtaggtgctgtttttgcagcttgtcaattatgttaccttactaactgaagctgcctttattcacaaaaggccccttttcccatcttttcccaccccctggtgtctctctctctctcggtttctctttctctgcgtctaccccccatcctcctcatcctcagagtaaagcaggggcatcgaacaccacgcaaagaaagctccaacccgcatcttccactggctttgagtggggtgccttggggaccgttggagccttgtttttttccttatgcagagtgtcagcctcactctccctcggattccaagagtattggaattcctgagcctcccatcctccccctactcaccccccgtcacaggcacaaggaggtgacaggcagaaaacgtggagggtgagtggggaatgtgctagctgcagagagtttgtggggaatgtgctagctgcagagagtttgggccattcctgcttgctccgtggttgccttcccatggcccatctaattatgggcattcatgcgaccttaacagagggaaacaggctcctttgagagagatccatcttaggaggagggtcgtcagatccaggcagcagagtccgggagatagccattctcaacagcgattccagggatctcagggtacttttctcagaaagcccctatgatctcttttacagactctatggtggccacgcgctgggtgccacatcctctttctgcccccggcctctgcctctggccagggtttccctggggctgccgaagccactttgggagcttccctttcaccctccttgctgggccaccagtgctttgtgttcgcagcgttatttgcagtggctttggggactcagcagtggcaagtccctgtgcataatgtgaacctgcagacttcaagatggggcccctcctgcacccactaacatgtctgcctttttttgtttttatcctggaacaagtggagaaatggcagagctggctgactctggggacccttccctttttcccatggcttcatttcttcctcaccacaactaattcggggagctgagaagtcacacagggtattcctctcccttctctgatgttattaattaatagaccagagaataaggttgcagatattacatttgttgtgtttttgtgttttgtttttttttttaaggaaaatcccaaacaaagcccagcatgatttgagaaaagaggatgttttcccagggaaaataatttttttaacctgcctgagaatgatttatttatttgttggaggccattggtcagacagcctggagcttgggctgtggaagatttcaaaagcatagggctgtggtctctggaaacctattacagcctgcagctgtgagctgagccagtgacgaggtccctggaaactcaggaaggctgacaggtgggccttggggtattggtttgtggagaaggaagcattctttaggctgcggcactccttatagtttcccacccaccgagtgacattcaggcagaaattgagctcaggagacagccagccttcccacatcccacttcacttcccggtccacacgtaaagcagtgtgtctccaaggaggcagtgagcaattcccaaggtccccgtgttgtgagaagcgcgctgctttctccctttgcaggggaaaaaaaaggctttcctggtgagatcatgagtccttccggcttcatttctcattgtgggtttaacttctaaaacgcaaatggagtttagagaggatgagcagaaccacaggacctgcccccatctctcactcactgcaattgcttctactctgggcacaagtagggtgtctgaagaccatgtttccctctggttctctagtttgcagataacacagaagacactggctagaaccttaagctttctgccaaaaagatgcagagagcagggcagtagctactggcagtggggtgtgaataaagagtcctttcacaaccaagttcactgaggatttggagcaccagcttcccagcagtatcgaggggtggagaggtgtacattcaggtggaggggtacatctaggggtggagaggtgtacattctagaaacagctgttaacacactccactttaaagacagcaagctagacctgcaggatcaaagccacacactgtggtaggggttacaaatgtttatggggcccagaatactagcatagatgcgtgaaatggttggtgtgaggcaaaagggcatggtgggggcaaggatggggactgtggtcttactggcatgcacgtgacctacccagaatgagcagctgctactcagccccaacctgtcattgtttgtaaaaatgtaagcacagtgtagtggaatcttccaatttggaagggaagccggaaatccagatttaatggaaaaaatctgatttttcaacgtcgggttgtttgtttgtttgtttttgttttttttaacagatagtgggcaaagaaaaattccactgttccacgtgtacactgccagcaacctctgctctctggagaggtggtttaaagtgagattatgcattgccctggtagaagaggaaaaaagccagcatcaggtcagggcaaaaataacagcccatgttgaactcggaatggggacctcttgctaagtcattccactcctcaagagaccattccacagaggggggatggatcattcagctctcctggtcccaagattgtgctgaagggaagaaggaatagaatctggagatctggactgctgccccttagatatgcagaggtccacatctgcctggggctacagcttgtgggactccatcaaaccaggccgaaatggcaaagacagtctaggaggaggaggaggtagggtgtgaaacagccaggctctctccaaatcccaagtgttgacacagccatcttgtcccatccctggaagcctctttggaaaccacatagagctgtgctggctcacgggatgtcctgtttgcttctgcctcagttaccttactttgcccatgggtctaccacaggcgctacctcattgtgtctgctgagaagtttacctgggaggggggaacaaagttgtccaaatctgcttgagctgaatgtatgatctatgcaaattctctctctcctctctctcttcctctctggctctcttagaagtttttttgttttgttttgttttgttttgtgtttaccttgcaaacaagatactgtataggaccctcttaagatggaggagggctttcttgcgccacctgtgtctacccctcacgttgtctttggctctggtcttaccaggcgtatgcagggagaaagtgacctctcttccctctccacttggctgggaatattccaactgcctctgcctacagataccaccagaaagcgggttctgcaccttgtcatccccctccctaacgtcatctactccatccctcatgttcctccaacttgcttctcccatccctccttcaaaaacaaaacaaaacaaaacaaaagccttaggtttctcctttttgaaatgtggccttaacattatttttgggaagctgaccatccatcctttccctcccatctccaccaacatcagagaagacagcatcgtgaagcttctgtggcagcctcctaaggaaggggctgccaatctgtagttggcagatgctataggaattgcttacaaatgtcgtctttaagaaaaatgttcttatatttttcctatgggcaaaatgaaggcttgggtgctcatctaaagctcagccaactcctgaagcactctctcagagcatactgctgctgtaatgggctggcttaattatcggcagagtgcttgaaaaggctttgcagacctcccctgcccccaagactgggtgactttatatgtacttcattcaagggtaaatcaggagacgttctccatttatctcttcgtccttcctgcctggaaagtgatagcactaaatattcccagcagatgggtagtgttctcaaaggaatcaccctttccctaccttcagactctattctttacccttccattgctccagtgctgatggaggccaaagacaaccccagggttttcataggaaattcactggaattgtgcgcaattgtctttgtagtccttttgccttttttttttttaaatattatgttgtcaatagcatttgtttgggtatttgttttagaggcctcactctaagttattaccgtccccttcattgttttcaaagacatgtggtgatatagtttttaaaaataactattttgttatagatcataatatgcataaaactgtacagaaatattttgtaatgtgttgattttaaaaaaaatctgtaaataaagttttaaaaaaagaattcaaatggcacacgctgaaatatgtagatattttgctatttatttaaaggagtattttaagagatattgaactatctgaaattgaccagtaatcaaagttccaatcatctgaatgcttttccttgaggtagaatgtgagtctcagaaatgactgcattacctgcccttttttgcaccttttctgtctttttattttgcagaacaacaacaacaacaaaattgtgccttagctgtatttttttgtctaggggagtttgtttctgtctgacaaagcaacattttttgcagaaaacagtggatgtattaaatactgtatcataccaaaaacactgcaggtgtatatagatgctttctgtcatactgtgttttcagatgcagaattttaaaattaaaaaaacactgcctttatggaacagtgactatatgtggcttcttttcagcaacattgtgcatctttacacaatctcatattctcttctgtcatctgcatggtgaagataggatgactatataatttatcatccaaactgggatacttttgagagttaaaggaagcaccacgtggatgggatgctgagactgcaggcataaatggcctatcctgggaaaacctgggtgtgtggacacatttccctcataaaaactgctgtcatcttctaactggattatagcaacaacctcctataagtacctcctggttgaggcagaagtatatgatttttaaacccgtactgagtagagaataacaagaagggactgccatggaaagttgcagtttcctatacccaactggttggttggttggcaaacgtgttttcctttcctctttaccacagagactacatttcccagactgccttgctcttagctgtgaccatgtgaccaggccaatggaacagctagactgcatcttccagactgccttgctcttagccatggccatgtgactgactcaggccaatggaatg

SEQ ID NO: 23225 - DNA, 598 bp, Homo sapiens
  misc_feature 1..598: note = ENST00000575674
  source 1..598: mol_type = unassigned DNA; mol_type = unassigned DNA
gctgatgcctgagaaggtgactcggttctgccccctcgagggtaaagccaacaagaacgtgcagtgggacgaggactccgtggagtacatgccagccaacccggtcagaatcgcctttgtcctggtggtccacggccgtgcctctcggcagttgcagcgcatgttcaaggccatctaccacaaagaccacttctactacatccacgtggacaagcgctctaattacctgcatcggcaagtgctccaggtctccaggcagtacagcaatgtccgcgtcaccccctggagaatggccaccatctggggaggagccagcctcctgtccacctacctgcagagcatgcgggacctcctggagatgaccgactggccctgggacttcttcatcaacctgagtgcggccgactaccccatcaggtaaggcagccaagggccccaagccagtcttgtctgacgtcctgctctggctggtcatggctgggaactcacgaggcagaaggagactgatgcatagtctccacaggatcgctcaggataggattctgattggacctgagaatcattgattcattcactcattcattcatgcattcaacag

SEQ ID NO: 23226 - DNA, 839 bp, Homo sapiens
  misc_feature 1..839: note = ENST00000568226
  source 1..839: mol_type = unassigned DNA; mol_type = unassigned DNA
agacgtgactttcaccttctgccgtgattgtgaggcctcgccagccacctggaactgatccacacccaagtccgctcatcaccctggagactcagaaggataccctattaaacttatgaaaacccatgggcgaacatctgtgtccggaactctggaagtcaaatcttatctcctgggagtggaacagcagaatccctggatggttctgtctttgaccttcctgtatccttcactctggacaccaccccatcagcccttcaaaaccctcatgggaaagaggagttgcagaccagtggctttggccagcacctgaggcttccagcagcagctccttacacagtggcgactcttaaagtccaatctgttagcccaagggacctgaacctccatctgcaaccagcaatggcacaaggtagactctcagcatttgtgctatgccattggggaagagcttcaatttgtctgcaaacgatgctccatcagtctcatttggttccctgtctttggggagcctgggaatattgttctcgctccccgagttctgatttcccatgttaaagagatgttggaacccaaccaaagtgcaaatgtttctttgtgactgttggcacaagcccgtggccagatctgactttgtgctggcctcagcccattgtgaggtgaatgatgggatcctgttcagctgcctgcaggcaggtcagacaagggggtcaggtccctttctggcaggaagtagtgcctcaaatgttacccatatgccatgaacaagatggcagatgtggccaagcttggaagaattaactctgcagaggttaggtgacagatgtaccctgagccct

SEQ ID NO: 23227 - DNA, 359 bp, Homo sapiens
  misc_feature 1..359: note = ENST00000563403
  source 1..359: mol_type = unassigned DNA; mol_type = unassigned DNA
gactgttgagctagaggaagatggtcctgtgtgtattaacctcagtgctcaacttcctgatggattatttgagtttttctgtttctgctgtgaagtcacgggatcccgaatttttcttcttgaggttggcgggatccacacccaagtccgctcatcaccctggagactcagaaggataccctattaaacttatgaaaacccatgggcgaacatctgtgtccggaactctggaagtcaaatcttatctcctgggagtggaacagcagaatccctggatggttctgtctttgaccttcctgtatccttcactctggacaccaccccatcagcccttcaaaaccctcatgggaaagaggagt

SEQ ID NO: 23228 - DNA, 1590 bp, Homo sapiens
  misc_feature 1..1590: note = ENST00000007699
  source 1..1590: mol_type = unassigned DNA; mol_type = unassigned DNA
ggttcgcgagccggggggaggggccggggcggtggcggctgtggccggtactggacccggcgggatgagcgaggtggaggcggcagcgggggctacagcggtccccgcggcgacggtgcccgcgacggcggcaggggtggtagcggtggtggtaccggtgcccgcaggggagccgcagaaaggcggcggggcgggcggcgggggcggagccgcctcgggccccgctgctgggaccccctcggcgccgggctcccgcacccctggcaatccggcgacggcggtctcgggaacccccgcccccccggcccggagtcaggcggacaagccggtgctggcaatccaagtcctgggcactgtcaaatggttcaacgtccggaatggttacggattcatcaacaggaatgacaccaaggaagatgtctttgttcaccagacagctattaaaagaaacaaccccaggaagtttctgcgcagcgttggagatggggagactgtggaatttgatgtcgtggaaggagagaagggcgcagaagccactaatgtaactgggcctgggggagtacccgtgaagggcagccgttatgcccccaaccgacgtaagtcccgccgattcatcccccggcctccctcagttgccccaccacccatggtggcagagatcccctcggcggggacaggacctggcagtaaaggggagcgggctgaagactctgggcaacggccccgacgatggtgccccccacccttcttctaccgacggcggtttgtgcgaggcccccggcctcccaaccagcagcagcctatagagggcactgacagggtagaacccaaagagacagccccattggaggggcaccaacagcagggagatgagcgagtccccccgcccagattccggcccaggtaccgaaggcctttccgccccaggccacgccagcagcctaccacagaaggtggggatggtgagaccaagcccagccaaggtcccgctgatggttcccggcctgagccccagcgcccacgaaaccgcccctacttccagcggagacggcagcaggcccctggcccccagcaggcccctggcccccggcagcccgcagcccctgagacctcagcccctgtcaacagtggggaccccaccaccaccatcctggagtgattccaactcaactcagaggacacccagagctgccatctggtatctgccagtttttccaaatgacctgtaccctacccagtaccctgctccccctttcccataattcatgacatcaaaacaccagcttttcaccttttccttgagactcaggaggaccaaagcagcagccttttgctttttcttttttcttccctccccttatcaagggttgaaggaagggagccatccttactgttcagagacagcaactccctcccgtaactcaggctgagaaggaaccagccagctcttacctcctcctggttgcttttcttgcccccaccccaagtttatttttgttttcccccggccccctacctctgaagccattttatgatctgtcatgtgccacctgagcctccagtaaaaacaaaaacaggctttcctgtggt

SEQ ID NO: 23229 - DNA, 2195 bp, Homo sapiens
  misc_feature 1..2195: note = ENST00000571834
  source 1..2195: mol_type = unassigned DNA; mol_type = unassigned DNA
aactaggcaaacctctgagcctggcaagcaggtgcactggggacccttgcattgggagggctagaaaaaccctcagttatgacctgggggcggcactttgcagaccagcaatccaagtcctgggcactgtcaaatggttcaacgtccggaatggttacggattcatcaacaggaatgacaccaaggaagatgtctttgttcaccaggtaagagctaggttagctttctgaggggaagaaccggccgtctttgaaggcctttgctgtaatccttagcagtgcgctccgccatgtttctctggctcttcttcacaacggcccatccgccttgggtgcctgtgtcaaccaccattagccgcacttgtgctgggttactaaacgtccgtcagaattgagcatgttacccctgggcatggcacgcttactacccaccgggacctgttaacactccaggaagcactgaggcagttttcagagggagaaggtccttgggtgcagtggttctcaaagcgtggcccctgcaccagcggcagcagcatcacctgacatccgaattctcaggtcccaccccagacctggtgaatcaatcagagctggggctggggctccacaatcggtttaacgagctctccaggtgattctgatgcacgctacagcttgagaaccactgcttggtggaaagagctctcactgggactgaggtaagaagcacagtgcattctacccactttgcgactgaaggctgtccctgccttttgctttggagttcatatttcttgcctccctttctgaaatccctgaggggtaaagcggggcgggaggggaggtgcggggagtgcatcctggggatggtggtaactgcacaatctgctgaggccctgagttcaggacttttcccctgctaaactttgaccacctccttgctccaccctccagctctagaccccaagtcaaatgttgaaagaatgaaattgggtggtggccccagcaggggtgacagagactcctgtcttgctgtctcacttttcacatggccttttccccaatcagacagctattaaaagaaacaaccccaggaagtttctgcgcagcgttggagatggggagactgtggaatttgatgtcgtggaaggagagaagggcgcagaagccactaatgtaactgggcctgggggagtacccgtgaagggcagccgttatgcccccaaccgacgtaagtcccgccgattcatcccccggcctccctcagttgccccaccacccatggtggcagagatcccctcggcggggacaggacctggcagtaaaggggagcgggctgaagactctgggcaacggccccgacgatggtgccccccacccttcttctaccgacggcggtttgtgcgaggcccccggcctcccaaccagcagcagcctatagagggcactgacagggtagaacccaaagagacagccccattggaggggcaccaacagcagggagatgagcgagtccccccgcccagattccggcccaggtaccgaaggcctttccgccccaggccacgccagcagcctaccacagaaggtggggatggtgagaccaagcccagccaaggtcccgctgatggttcccggcctgagccccagcgcccacgaaaccgcccctacttccagcggagacggcagcaggcccctggcccccagcaggcccctggcccccggcagcccgcagcccctgagacctcagcccctgtcaacagtggggaccccaccaccaccatcctggagtgattccaactcaactcagaggacacccagagctgccatctggtatctgccagtttttccaaatgacctgtaccctacccagtaccctgctccccctttcccataattcatgacatcaaaacaccagcttttcaccttttccttgagactcaggaggaccaaagcagcagccttttgctttttcttttttcttccctccccttatcaagggttgaaggaagggagccatccttactgttcagagacagcaactccctcccgtaactcaggctgagaaggaaccagccagctcttacctcctcctggttgcttttcttgcccccaccccaagtttatttttgttttcccccggccccctacctctgaagccattttatgatctgtcatgtgccacctgagcctccagtaaaaacaaaaacaggc

SEQ ID NO: 23230 - DNA, 4553 bp, Homo sapiens
  misc_feature 1..4553: note = ENST00000571485
  source 1..4553: mol_type = unassigned DNA; mol_type = unassigned DNA
ggcgcgaggaccgagcagggcggtgggttcgcgagccggggggaggggccggggcggtggcggctgtggccggtactggacccggcgggatgagcgaggtggaggcggcagcgggggctacagcggtccccgcggcgacggtgcccgcgacggcggcaggggtggtagcggtggtggtaccggtgcccgcaggggagccgcagaaaggcggcggggcgggcggcgggggcggagccgcctcgggccccgctgctgggaccccctcggcgccgggctcccgcacccctggcaatccggcgacggcggtctcgggaacccccgcccccccggcccggagtcaggcggacaagccggtgctgggtgaggggcaggcgcgcacagggcggctctgaggggtcggcgggctgggggaggggcagtgtggagcccggcaggatccggaaaaccaaaggcggcctggcccgcaggcccagagcgctaactgggctgggagctgcgcaccaaagtggattcccctggtgggaaatcctgccgtaccttcctgggagagagggcggggccggcaggttcagctaaggtcttggggtggagaataaagccccagggtccggccacgcccccgggcgggacacagtgcctagttgactgggttagaactaggcaaacctctgagcctggcaagcaggtgcactggggacccttgcattgggagggctagaaaaaccctcagttatgacctgggggcggcactttgcagaccaggtgagtacccagttctaggtgaaggggctggatttgtaggatgtggggaacgtgacttagagttggaaggctttttgaaagcctgagtccctgtgtgggtgatttcatttggtggactagggtaggaataccttgaagctactagtgaaacctggttggcttgaaggtaacctgaataggtaataaggcagtaggctagatttttttttgttttggagtgtctcaaaactgagttcaactccatctcttccccccatctcactgtccccactgcatctctgcctggcagcaatccaagtcctgggcactgtcaaatggttcaacgtccggaatggttacggattcatcaacaggtatccaaggaacccagggcgggggtggaatgggtgtcttcccagctggcctgtgggactggacacccgcccaacctcatcgacccctgcggaggcacatggttgcaatgtccagctgatgctggttgaaagcctttaaccgcagcacaaatgtgtgcttcgtgacaagaggaagcctcctccgcatcttcaagggtagcggaggattaatgattcaggaacttggcaaacctggctctgaccctgccagcttctcatctcaccttctggaattgcttcattacttttactctgacatgcctttggggcagaatgtattatagggttctctgtgcctcagggcccccggctggaatcctcaactgatttcctgttatggcagcactcacaactcaactcccttaaagagctgtggctcattcgagccctccacctgttgggactgaggctgacagtgggggtcaggaggaaggagccagaggctgctgctttccttcagtaggcagccccacccctcagcaccgggagaggctgtggcagtggattctgagcagagccaggtctcccccagtgggcccttccccagcccaggcatcctgcccggcctggctctcctgggaggccctagttccctcttagcaggctgacctttgtgcagatccaagtgctttaaagctaaaacgtttgttctggggaagggtccctgtctaattctggaaatggcagactgggtcgggggcagagtgcctccaggaaaacttttcctttctcccctccccccacccactggggttcttatgatagagaatgggtgaatgttttcttctctctcacccttggtcccacgcgtgttgagagtggtcctgactctgggattcacctccaggctgaggatgagaataaagtttggcagctgtttagagcaagttcctgacacattgttcccttctcaaacttgttctgcccctctggccccatctgcactttctgcctccttgactatagaaggaagaagactggaattttccaaccctgatgggggttgggggagggggtgttggccagggacagttgcacccagcgctggcaggttgtaaggctagcctggggtggaaggtggagtcccggcaggggcagagctgtctgaggttcctcaaggtgcctttgcctccccagcctgccctttccttgtgaagtccaggtttggcactgaggttttaggtgtatctctctttacaccagcttctgggggccctgctggctctccctcccattccccaggccatgtccacccctaactggaatgctggagaggatgggcccactgagcttagactgggcatctagggggacctcagtgaggagctgagggctttgttgaagtcccttccttaacgacccatcctgttctgcaggaatgacaccaaggaagatgtctttgttcaccaggtaagagctaggttagctttctgaggggaagaaccggccgtctttgaaggcctttgctgtaatccttagcagtgcgctccgccatgtttctctggctcttcttcacaacggcccatccgccttgggtgcctgtgtcaaccaccattagccgcacttgtgctgggttactaaacgtccgtcagaattgagcatgttacccctgggcatggcacgcttactacccaccgggacctgttaacactccaggaagcactgaggcagttttcagagggagaaggtccttgggtgcagtggttctcaaagcgtggcccctgcaccagcggcagcagcatcacctgacatccgaattctcaggtcccaccccagacctggtgaatcaatcagagctggggctggggctccacaatcggtttaacgagctctccaggtgattctgatgcacgctacagcttgagaaccactgcttggtggaaagagctctcactgggactgaggtaagaagcacagtgcattctacccactttgcgactgaaggctgtccctgccttttgctttggagttcatatttcttgcctccctttctgaaatccctgaggggtaaagcggggcgggaggggaggtgcggggagtgcatcctggggatggtggtaactgcacaatctgctgaggccctgagttcaggacttttcccctgctaaactttgaccacctccttgctccaccctccagctctagaccccaagtcaaatgttgaaagaatgaaattgggtggtggccccagcaggggtgacagagactcctgtcttgctgtctcacttttcacatggccttttccccaatcagacagctattaaaagaaacaaccccaggaagtttctgcgcagcgttggagatggggagactgtggaatttgatgtcgtggaaggagagaagggcgcagaagccactaatgtaactgggcctgggggagtacccgtgaagggcagccgttatgcccccaaccgacgtaagtcccgccgattcatcccccggcctccctcagttgccccaccacccatggtggcagagatcccctcggcggggacaggacctggcagtaaaggggagcgggctgaagactctgggcaacggccccgacgatggtgccccccacccttcttctaccgacggcggtttgtgcgaggcccccggcctcccaaccagcagcagcctatagagggcactgacagggtagaacccaaagagacagccccattggaggggcaccaacagcagggagatgagcgagtccccccgcccagattccggcccaggtaccgaaggcctttccgccccaggccacgccagcagcctaccacagaaggtggggatggtgagaccaagcccagccaaggtcccgctgatggttcccggcctgagccccagcgcccacgaaaccgcccctacttccagcggagacggcagcaggcccctggcccccagcaggcccctggcccccggcagcccgcagcccctgagacctcagcccctgtcaacagtggggaccccaccaccaccatcctggagtgattccaactcaactcagaggacacccagagctgccatctggtatctgccagtttttccaaatgacctgtaccctacccagtaccctgctccccctttcccataattcatgacatcaaaacaccagcttttcaccttttccttgagactcaggaggaccaaagcagcagccttttgctttttcttttttcttccctccccttatcaagggttgaaggaagggagccatccttactgttcagagacagcaactccctcccgtaactcaggctgagaaggaaccagccagctcttacctcctcctggttgcttttcttgcccccaccccaagtttatttttgttttcccccggccccctacctctgaagccattttatgatctgtcatgtgccacctgagcctccagtaaaaacaaaaacaggc

SEQ ID NO: 23231 - DNA, 640 bp, Homo sapiens
  misc_feature 1..640: note = ENST00000571464
  source 1..640: mol_type = unassigned DNA; mol_type = unassigned DNA
ggcggggacaggacctggcagtaaaggggagcgggctgaagactctgggcaacggccccgacgatggtgccccccacccttcttctaccgacggcggtttgtgcgaggcccccggcctcccaaccagcagcagcctatagagggcactgacagggtagaacccaaagagacagccccattggaggggcaccaacagcagggagatgagcgagtccccccgcccagattccggcccaggtaccgaaggcctttccgccccaggccacgccagcagcctaccacagaaggtggggatggtgagaccaagcccagccaaggtcccgctgatggttcccggcctgagccccagcgcccacgaaaccgcccctacttccagcggagacggcagcaggcccctggcccccagcaggcccctggcccccggcagcccgcagcccctgagacctcagcccctgtcaacagtggggaccccaccaccaccatcctggagtgattccaactcaactcagaggacacccagagctgccatctgggttgaaggaagggagccatccttactgttcagagacagcaactccctcccgtaactcaggctgagaaggaaccagccagctcttacctcctcctggttgcttttctt

SEQ ID NO: 23232 - DNA, 606 bp, Homo sapiens
  misc_feature 1..606: note = ENST00000570720
  source 1..606: mol_type = unassigned DNA; mol_type = unassigned DNA
tctcactattcccttaccaccttcccagggcgcagaagccactaatgtaactgggcctgggggagtacccgtgaagggcagccgttatgcccccaaccgacgtaagtcccgccgattcatcccccggcctccctcagttgccccaccacccatggtggcagagatcccctcggcggggacaggacctggcagtaaaggggagcgggctgaagactctgggcaacggccccgacgatggtgccccccacccttcttctaccgacggcggtttgtgcgaggcccccggcctcccaaccagcagcagcctatagagggcactgacagggtagaacccaaagagacagccccattggaggggcaccaacagcagggagatgagcgagtccccccgcccagattccggcccaggtaccgaaggcctttccgccccaggccacgccagcagcctaccacagaaggtggggatggtgagaccaagcccagccaaggtcccgctgatggttcccggcctgagccccagcgcccacgaaaccgcccctacttccagcggagacggcagcaggcccctggcccccagcaggcccctggcccccggcagcccgcagc

SEQ ID NO: 23233 - DNA, 653 bp, Homo sapiens
  misc_feature 1..653: note = ENST00000570627
  source 1..653: mol_type = unassigned DNA
gctgccggcgtgtgggcgaggctcggggcgcgaggaccgagcagggcgcaatccaagtcctgggcactgtcaaatggttcaacgtccggaatggttacggattcatcaacaggaatgacaccaaggaagatgtctttgttcaccaggaagcactgaggcagttttcagagggagaaggtccttgggtgcagtggttctcaaagcgtggcccctgcaccagcggcagcagcatcacctgacatccgaattctcaggtcccaccccagacctggtgaatcaatcagagctggggctggggctccacaatcggtttaacgagctctccaggtgattctgatgcacgctacagcttgagaaccactgcttggtggaaagagctctcactgggactgagacagctattaaaagaaacaaccccaggaagtttctgcgcagcgttggagatggggagactgtggaatttgatgtcgtggaaggagagaagggcgcagaagccactaatgtaactgggcctgggggagtacccgtgaagggcagccgttatgcccccaaccgacgtaagtcccgccgattcatcccccggcctccctcagttgccccaccacccatggtggcagagatcccctcggcggggacaggacctggcagtaaag

SEQ ID NO: 23234 - DNA, 791 bp, Homo sapiens
  misc_feature 1..791: note = ENST00000571127
  source 1..791: mol_type = unassigned DNA
agccggggggaggggccggggcggtggcggctgtggccggtactggacccggcgggatgagcgaggtggaggcggcagcgggggctacagcggtccccgcggcgacggtgcccgcgacggcggcaggggtggtagcggtggtggtaccggtgcccgcaggggagccgcagaaaggcggcggggcgggcggcgggggcggagccgcctcgggccccgctgctgggaccccctcggcgccgggctcccgcacccctggcaatccggcgacggcggtctcgggaacccccgcccccccggcccggagtcaggcggacaagccggtgctggcaatccaagtcctgggcactgtcaaatggttcaacgtccggaatggttacggattcatcaacaggtatccaaggaacccagggcgggggtggaatgggtgtcttcccagctggcctgtgggactggacacccgcccaacctcatcgacccctgcggaggcacatggttgcaatgtccagctgatgctggttgaaagcctttaaccgcagcacaaatgtgtgcttcgtgacaagaggaagcctcctccgcatcttcaagggtagcggaggattaatgattcaggaacttggcaaacctggctctgaccctgccagcttctcatctcaccttctggaattgcttcattacttttactctgacatgcctttggggcagaatgtattatagggttctctgtgcctcagggcccccggctggaatcctcaactgatttcctgttatggcagcactcacaactcaactcc

SEQ ID NO: 23235 - DNA, 4554 bp, Homo sapiens
  misc_feature 1..4554: note = ENST00000577961
  source 1..4554: mol_type = unassigned DNA
gctgtggaagagagccaccattatcaaaatgatcacagttgcaaacattcgtgcttcaaataccagccactatgttagatttgataatgggctgcattaaaagtaaagaaaacaaaagtccagccattaaatacagacctgaaaatactccagagcctgtcagtacaagtgtgagccattatggagcagaacccactacagtgtcaccatgtccgtcatcttcagcaaagggaacagcagttaatttcagcagtctttccatgacaccatttggaggatcctcaggggtaacgccttttggaggtgcatcttcctcattttcagtggtgccaagttcatatcctgctggtttaacaggtggtgttactatatttgtggccttatatgattatgaagctagaactacagaagacctttcatttaagaagggtgaaagatttcaaataattaacaatacggaaggagattggtgggaagcaagatcaatcgctacaggaaagaatggttatatcccgagcaattatgtagcgcctgcagattccattcaggcagaagaatggtattttggcaaaatggggagaaaagatgctgaaagattacttttgaatcctggaaatcaacgaggtattttcttagtaagagagagtgaaacaactaaaggtgcttattccctttctattcgtgattgggatgagataaggggtgacaatgtgaaacactacaaaattaggaaacttgacaatggtggatactatatcacaaccagagcacaatttgatactctgcagaaattggtgaaacactacacagaacatgctgatggtttatgccacaagttgacaactgtgtgtccaactgtgaaacctcagactcaaggtctagcaaaagatgcttgggaaatccctcgagaatctttgcgactagaggttaaactaggacaaggatgtttcggcgaagtgtggatgggaacatggaatggaaccacgaaagtagcaatcaaaacactaaaaccaggtacaatgatgccagaagctttccttcaagaagctcagataatgaaaaaattaagacatgataaacttgttccactatatgctgttgtttctgaagaaccaatttacattgtcactgaatttatgtcaaaaggaagcttattagatttccttaaggaaggagatggaaagtatttgaagcttccacagctggttgatatggctgctcagattgctgatggtatggcatatattgaaagaatgaactatattcaccgagatcttcgggctgctaatattcttgtaggagaaaatcttgtgtgcaaaatagcagactttggtttagcaaggttaattgaagacaatgaatacacagcaagacaaggtgcaaaatttccaatcaaatggacagctcctgaagctgcactgtatggtcggtttacaataaagtctgatgtctggtcatttggaattctgcaaacagaactagtaacaaagggccgagtgccatatccaggtatggtgaaccgtgaagtattagaacaagtggagcgaggatacaggatgccgtgccctcagggctgtccagaatccctccatgaattgatgaatctgtgttggaagaaggaccctgatgaaagaccaacatttgaatatattcagtccttcttggaagactacttcactgctacagagccacagtaccagccaggagaaaatttataattcaagtagcctattttatatgcacaaatctgccaaaatataaagaacttgtgtagattttctacaggaatcaaaagaagaaaatcttctttactctgcatgtttttaatggtaaactggaatcccagatatggttgcacaaaaccacttttttttccccaagtattaaactctaatgtaccaatgatgaatttatcagcgtatttcagggtccaaacaaaatagagctaagatactgatgacagtgtgggtgacagcatggtaatgaaggacagtgaggctcctgcttatttataaatcatttcctttctttttttccccaaagtcagaattgctcaaagaaaattatttattgttacagataaaacttgagagataaaaagctataccataataaaatctaaaattaaggaatatcatgggaccaaataattccattccagttttttaaagtttcttgcatttattattctcaaaagttttttctaagttaaacagtcagtatgcaatcttaatatatgctttcttttgcatggacatgggccaggtttttcaaaaggaatataaacaggatctcaaacttgattaaatgttagaccacagaagtggaatttgaaagtataatgcagtacattaatattcatgttcatggaactgaaagaataagaactttttcacttcagtccttttctgaagagtttgacttagaataatgaaggtaactagaaagtgagttaatcttgtatgaggttgcattgattttttaaggcaatatataattgaaactactgtccaatcaaaggggaaatgttttgatctttagatagcatgcaaagtaagacccagcattttaaaagccctttttaaaaactagacttcgtactgtgagtattgcttatatgtccttatggggatgggtgccacaaatagaaaatatgaccagatcagggacttgaatgcacttttgctcatggtgaatatagatgaacagagaggaaaatgtatttaaaagaaatacgagaaaagaaagtgaaagttttacaagttagagggatggaaggtaatgtttaatgttgatgtcatggagtgacagaatggctttgctggcactcagagctcctcacttagctatattctgagactttgaagagttataaagtataactataaaactaatttttcttacacactaaatgggtatttgttcaaaataatgaagttatggcttcacattcattgcagtgggatatggtttttatgtaaaacatttttagaactccagttttcaaatcatgtttgaatctacattcacttttttttgttttcttttttgagacggagtctcgctctgtcgcccaggctggagtgcagtggcgcgatctcggctcactgcaagctctgcctcccaggttcacaccattctcctgcctcagcctcccgagtagctgggactacaggtgcccaccaccacgcctggctagttttttgtatttttagtagagacgcagtttcaccgtgttagccaggatagtctcgatctcctgaccttgtgatctgcccgcctcggcctcccaaagtgctgggattacaggcgtgagccaccgcgcccagcctacattcacttctaaagtctatgtaatggtggtcattttttcccttttagaatacattaaatggttgatttggggaggaaaacttattctgaatattaacggtggtgaaaaggggacagtttttaccctaaagtgcaaaagtgaaacatacaaaataagactaatttttaagagtaactcagtaatttcaaaatacagatttgaatagcagcattagtggtttgagtgtctagcaaaggaaaaattgatgaataaaatgaaggtctggtgtatatgttttaaaatactctcatatagtcacactttaaattaagccttatattaggcccctctattttcaggatataattcttaactatcattatttacctgattttaatcatcagattcgaaattctgtgccatggcatatatgttcaaattcaaaccatttttaaaatgtgaagatggacttcatgcaagttggcagtggttctggtactaaaaattgtggttgttttttctgtttacgtaacctgcttagtattgacactctctaccaagagggtcttcctaagaagagtgctgtcattatttcctcttatcaacaacttgtgacatgagattttttaagggctttatgtgaactatgatattgtaatttttctaagcatattcaaaagggtgacaaaattacgtttatgtactaaatctaatcaggaaagtaaggcaggaaaagttgatggtattcattaggttttaactgaatggagcagttccttatataataacaattgtatagtagggataaaacactaacttaatgtgtattcattttaaattgttctgtatttttaaattgccaagaaaaacaactttgtaaatttggagatattttccaacagcttttcgtcttcagtgtcttaatgtggaagttaacccttaccaaaaaaggaagttggcaaaaacagccttctagcacacttttttaaatgaataatggtagcctaaacttaatatttttataaagtattgtaatattgttttgtggataattgaaataaaaagttctcattgaatgcacctattaatcgttttagttgctattcatattctcattcgttttttaaaaactgatatattctgaatttattcttccattgagaaaaaaatgttcagttacttgtaactactgagcagaatttaatcaatcctttattaaattcagaacattattgaactca

SEQ ID NO: 23236 - DNA, 4639 bp, Homo sapiens
  misc_feature 1..4639: note = ENST00000584307
  source 1..4639: mol_type = unassigned DNA
ggtcgggagaagtgacacggaccggtcgcctatcctgaccacagcaaagcggcccggagcccgcggaggggacctgacgggggcgtaggcgccggaaggctgggggccccggagccgggccggcgtggcccgagttccggtgagcggacggcggcgcgcgcagatttgataatgggctgcattaaaagtaaagaaaacaaaagtccagccattaaatacagacctgaaaatactccagagcctgtcagtacaagtgtgagccattatggagcagaacccactacagtgtcaccatgtccgtcatcttcagcaaagggaacagcagttaatttcagcagtctttccatgacaccatttggaggatcctcaggggtaacgccttttggaggtgcatcttcctcattttcagtggtgccaagttcatatcctgctggtttaacaggtggtgttactatatttgtggccttatatgattatgaagctagaactacagaagacctttcatttaagaagggtgaaagatttcaaataattaacaatacggaaggagattggtgggaagcaagatcaatcgctacaggaaagaatggttatatcccgagcaattatgtagcgcctgcagattccattcaggcagaagaatggtattttggcaaaatggggagaaaagatgctgaaagattacttttgaatcctggaaatcaacgaggtattttcttagtaagagagagtgaaacaactaaaggtgcttattccctttctattcgtgattgggatgagataaggggtgacaatgtgaaacactacaaaattaggaaacttgacaatggtggatactatatcacaaccagagcacaatttgatactctgcagaaattggtgaaacactacacagaacatgctgatggtttatgccacaagttgacaactgtgtgtccaactgtgaaacctcagactcaaggtctagcaaaagatgcttgggaaatccctcgagaatctttgcgactagaggttaaactaggacaaggatgtttcggcgaagtgtggatgggaacatggaatggaaccacgaaagtagcaatcaaaacactaaaaccaggtacaatgatgccagaagctttccttcaagaagctcagataatgaaaaaattaagacatgataaacttgttccactatatgctgttgtttctgaagaaccaatttacattgtcactgaatttatgtcaaaaggaagcttattagatttccttaaggaaggagatggaaagtatttgaagcttccacagctggttgatatggctgctcagattgctgatggtatggcatatattgaaagaatgaactatattcaccgagatcttcgggctgctaatattcttgtaggagaaaatcttgtgtgcaaaatagcagactttggtttagcaaggttaattgaagacaatgaatacacagcaagacaaggtgcaaaatttccaatcaaatggacagctcctgaagctgcactgtatggtcggtttacaataaagtctgatgtctggtcatttggaattctgcaaacagaactagtaacaaagggccgagtgccatatccaggtatggtgaaccgtgaagtattagaacaagtggagcgaggatacaggatgccgtgccctcagggctgtccagaatccctccatgaattgatgaatctgtgttggaagaaggaccctgatgaaagaccaacatttgaatatattcagtccttcttggaagactacttcactgctacagagccacagtaccagccaggagaaaatttataattcaagtagcctattttatatgcacaaatctgccaaaatataaagaacttgtgtagattttctacaggaatcaaaagaagaaaatcttctttactctgcatgtttttaatggtaaactggaatcccagatatggttgcacaaaaccacttttttttccccaagtattaaactctaatgtaccaatgatgaatttatcagcgtatttcagggtccaaacaaaatagagctaagatactgatgacagtgtgggtgacagcatggtaatgaaggacagtgaggctcctgcttatttataaatcatttcctttctttttttccccaaagtcagaattgctcaaagaaaattatttattgttacagataaaacttgagagataaaaagctataccataataaaatctaaaattaaggaatatcatgggaccaaataattccattccagttttttaaagtttcttgcatttattattctcaaaagttttttctaagttaaacagtcagtatgcaatcttaatatatgctttcttttgcatggacatgggccaggtttttcaaaaggaatataaacaggatctcaaacttgattaaatgttagaccacagaagtggaatttgaaagtataatgcagtacattaatattcatgttcatggaactgaaagaataagaactttttcacttcagtccttttctgaagagtttgacttagaataatgaaggtaactagaaagtgagttaatcttgtatgaggttgcattgattttttaaggcaatatataattgaaactactgtccaatcaaaggggaaatgttttgatctttagatagcatgcaaagtaagacccagcattttaaaagccctttttaaaaactagacttcgtactgtgagtattgcttatatgtccttatggggatgggtgccacaaatagaaaatatgaccagatcagggacttgaatgcacttttgctcatggtgaatatagatgaacagagaggaaaatgtatttaaaagaaatacgagaaaagaaagtgaaagttttacaagttagagggatggaaggtaatgtttaatgttgatgtcatggagtgacagaatggctttgctggcactcagagctcctcacttagctatattctgagactttgaagagttataaagtataactataaaactaatttttcttacacactaaatgggtatttgttcaaaataatgaagttatggcttcacattcattgcagtgggatatggtttttatgtaaaacatttttagaactccagttttcaaatcatgtttgaatctacattcacttttttttgttttcttttttgagacggagtctcgctctgtcgcccaggctggagtgcagtggcgcgatctcggctcactgcaagctctgcctcccaggttcacaccattctcctgcctcagcctcccgagtagctgggactacaggtgcccaccaccacgcctggctagttttttgtatttttagtagagacgcagtttcaccgtgttagccaggatagtctcgatctcctgaccttgtgatctgcccgcctcggcctcccaaagtgctgggattacaggcgtgagccaccgcgcccagcctacattcacttctaaagtctatgtaatggtggtcattttttcccttttagaatacattaaatggttgatttggggaggaaaacttattctgaatattaacggtggtgaaaaggggacagtttttaccctaaagtgcaaaagtgaaacatacaaaataagactaatttttaagagtaactcagtaatttcaaaatacagatttgaatagcagcattagtggtttgagtgtctagcaaaggaaaaattgatgaataaaatgaaggtctggtgtatatgttttaaaatactctcatatagtcacactttaaattaagccttatattaggcccctctattttcaggatataattcttaactatcattatttacctgattttaatcatcagattcgaaattctgtgccatggcatatatgttcaaattcaaaccatttttaaaatgtgaagatggacttcatgcaagttggcagtggttctggtactaaaaattgtggttgttttttctgtttacgtaacctgcttagtattgacactctctaccaagagggtcttcctaagaagagtgctgtcattatttcctcttatcaacaacttgtgacatgagattttttaagggctttatgtgaactatgatattgtaatttttctaagcatattcaaaagggtgacaaaattacgtttatgtactaaatctaatcaggaaagtaaggcaggaaaagttgatggtattcattaggttttaactgaatggagcagttccttatataataacaattgtatagtagggataaaacactaacttaatgtgtattcattttaaattgttctgtatttttaaattgccaagaaaaacaactttgtaaatttggagatattttccaacagcttttcgtcttcagtgtcttaatgtggaagttaacccttaccaaaaaaggaagttggcaaaaacagccttctagcacacttttttaaatgaataatggtagcctaaacttaatatttttataaagtattgtaatattgttttgtggataattgaaataaaaagttctcattgaatgcacctattaatcgttttagttgctattcatattctcattcgttttttaaaaactgatatattctgaatttattcttccattgagaaaaaaatgttcagttacttgtaactactgagcagaatttaatcaatcctttattaaattcagaacattattgaactca

SEQ ID NO: 23237 - DNA, 4441 bp, Homo sapiens
  misc_feature 1..4441: note = ENST00000314574
  source 1..4441: mol_type = unassigned DNA
ttgctgccgccgggcgccccgggacgaggaggtggaggagggagagggcccgcgggcctcgcctccgccctccgccacctcgagctgcggtagcagcgactcatgagagcgcggccggaggacagatttgataatgggctgcattaaaagtaaagaaaacaaaagtccagccattaaatacagacctgaaaatactccagagcctgtcagtacaagtgtgagccattatggagcagaacccactacagtgtcaccatgtccgtcatcttcagcaaagggaacagcagttaatttcagcagtctttccatgacaccatttggaggatcctcaggggtaacgccttttggaggtgcatcttcctcattttcagtggtgccaagttcatatcctgctggtttaacaggtggtgttactatatttgtggccttatatgattatgaagctagaactacagaagacctttcatttaagaagggtgaaagatttcaaataattaacaatacggaaggagattggtgggaagcaagatcaatcgctacaggaaagaatggttatatcccgagcaattatgtagcgcctgcagattccattcaggcagaagaatggtattttggcaaaatggggagaaaagatgctgaaagattacttttgaatcctggaaatcaacgaggtattttcttagtaagagagagtgaaacaactaaaggtgcttattccctttctattcgtgattgggatgagataaggggtgacaatgtgaaacactacaaaattaggaaacttgacaatggtggatactatatcacaaccagagcacaatttgatactctgcagaaattggtgaaacactacacagaacatgctgatggtttatgccacaagttgacaactgtgtgtccaactgtgaaacctcagactcaaggtctagcaaaagatgcttgggaaatccctcgagaatctttgcgactagaggttaaactaggacaaggatgtttcggcgaagtgtggatgggaacatggaatggaaccacgaaagtagcaatcaaaacactaaaaccaggtacaatgatgccagaagctttccttcaagaagctcagataatgaaaaaattaagacatgataaacttgttccactatatgctgttgtttctgaagaaccaatttacattgtcactgaatttatgtcaaaaggaagcttattagatttccttaaggaaggagatggaaagtatttgaagcttccacagctggttgatatggctgctcagattgctgatggtatggcatatattgaaagaatgaactatattcaccgagatcttcgggctgctaatattcttgtaggagaaaatcttgtgtgcaaaatagcagactttggtttagcaaggttaattgaagacaatgaatacacagcaagacaaggtgcaaaatttccaatcaaatggacagctcctgaagctgcactgtatggtcggtttacaataaagtctgatgtctggtcatttggaattctgcaaacagaactagtaacaaagggccgagtgccatatccaggtatggtgaaccgtgaagtattagaacaagtggagcgaggatacaggatgccgtgccctcagggctgtccagaatccctccatgaattgatgaatctgtgttggaagaaggaccctgatgaaagaccaacatttgaatatattcagtccttcttggaagactacttcactgctacagagccacagtaccagccaggagaaaatttataattcaagtagcctattttatatgcacaaatctgccaaaatataaagaacttgtgtagattttctacaggaatcaaaagaagaaaatcttctttactctgcatgtttttaatggtaaactggaatcccagatatggttgcacaaaaccacttttttttccccaagtattaaactctaatgtaccaatgatgaatttatcagcgtatttcagggtccaaacaaaatagagctaagatactgatgacagtgtgggtgacagcatggtaatgaaggacagtgaggctcctgcttatttataaatcatttcctttctttttttccccaaagtcagaattgctcaaagaaaattatttattgttacagataaaacttgagagataaaaagctataccataataaaatctaaaattaaggaatatcatgggaccaaataattccattccagttttttaaagtttcttgcatttattattctcaaaagttttttctaagttaaacagtcagtatgcaatcttaatatatgctttcttttgcatggacatgggccaggtttttcaaaaggaatataaacaggatctcaaacttgattaaatgttagaccacagaagtggaatttgaaagtataatgcagtacattaatattcatgttcatggaactgaaagaataagaactttttcacttcagtccttttctgaagagtttgacttagaataatgaaggtaactagaaagtgagttaatcttgtatgaggttgcattgattttttaaggcaatatataattgaaactactgtccaatcaaaggggaaatgttttgatctttagatagcatgcaaagtaagacccagcattttaaaagccctttttaaaaactagacttcgtactgtgagtattgcttatatgtccttatggggatgggtgccacaaatagaaaatatgaccagatcagggacttgaatgcacttttgctcatggtgaatatagatgaacagagaggaaaatgtatttaaaagaaatacgagaaaagaaagtgaaagttttacaagttagagggatggaaggtaatgtttaatgttgatgtcatggagtgacagaatggctttgctggcactcagagctcctcacttagctatattctgagactttgaagagttataaagtataactataaaactaatttttcttacacactaaatgggtatttgttcaaaataatgaagttatggcttcacattcattgcagtgggatatggtttttatgtaaaacatttttagaactccagttttcaaatcatgtttgaatctacattcacttttttttgttttcttttttgagacggagtctcgctctgtcgcccaggctggagtgcagtggcgcgatctcggctcactgcaagctctgcctcccaggttcacaccattctcctgcctcagcctcccgagtagctgggactacaggtgcccaccaccacgcctggctagttttttgtatttttagtagagacgcagtttcaccgtgttagccaggatagtctcgatctcctgaccttgtgatctgcccgcctcggcctcccaaagtgctgggattacaggcgtgagccaccgcgcccagcctacattcacttctaaagtctatgtaatggtggtcattttttcccttttagaatacattaaatggttgatttggggaggaaaacttattctgaatattaacggtggtgaaaaggggacagtttttaccctaaagtgcaaaagtgaaacatacaaaataagactaatttttaagagtaactcagtaatttcaaaatacagatttgaatagcagcattagtggtttgagtgtctagcaaaggaaaaattgatgaataaaatgaaggtctggtgtatatgttttaaaatactctcatatagtcacactttaaattaagccttatattaggcccctctattttcaggatataattcttaactatcattatttacctgattttaatcatcagattcgaaattctgtgccatggcatatatgttcaaattcaaaccatttttaaaatgtgaagatggacttcatgcaagttggcagtggttctggtactaaaaattgtggttgttttttctgtttacgtaacctgcttagtattgacactctctaccaagagggtcttcctaagaagagtgctgtcattatttcctcttatcaacaacttgtgacatgagattttttaagggctttatgtgaactatgatattgtaatttttctaagcatattcaaaagggtgacaaaattacgtttatgtactaaatctaatcaggaaagtaaggcaggaaaagttgatggtattcattaggttttaactgaatggagcagttccttatataataacaattgtatagtagggataaaacactaacttaatgtgtattcattttaaattgttctgtatttttaaattgccaagaaaaacaactttgtaaatttggagatattttccaacagcttttcgtcttcagtgtcttaatgtggaagttaacccttaccaaaaaaggaagttggcaaaaacagccttctagcacacttttttaaatgaataatggtagcctaaacttaatatttttataaagtattgtaatattgttttgtggataattgaaataaaaagttctcattgaatgcac

SEQ ID NO: 23238 - DNA, 568 bp, Homo sapiens
  misc_feature 1..568: note = ENST00000577611
  source 1..568: mol_type = unassigned DNA
aacgcgtcccgggccggctctgccgtcgttgctgccgccgggcgccccgggacgaggaggtggaggagggagagggcccgcgggcctcgcctccgccctccgccacctcgagctgcggtagcagcgactcatgagagcgcggccggaggacagataaggaaactgggacacagaaaggttgagtaacttgttgaagttcacccagctaatttgataatgggctgcattaaaagtaaagaaaacaaaagtccagccattaaatacagacctgaaaatactccagagcctgtcagtacaagtgtgagccattatggagcagaacccactacagtgtcaccatgtccgtcatcttcagcaaagggaacagcagttaatttcagcagtctttccatgacaccatttggaggatcctcaggggtaacgccttttggaggtgcatcttcctcattttcagtggtgccaagttcatatcctgctggtttaacaggtggtgttactatatttgtggccttatatgattatgaagctagaactacagaagacctttcatttaagaagggtgaaagat

SEQ ID NO: 23239 - DNA, 487 bp, Homo sapiens
  misc_feature 1..487: note = ENST00000581960
  source 1..487: mol_type = unassigned DNA
aagtcagggggcggggccggggggggggggcggaggaggtggagagtgaggccgaggcgtggggagcccgggaactccctcctcctgaagtaacgcgtcccgggccggctctgccgtcgttgctgccgccgggcgccccgggacgaggaggtggaggagggagagggcccgcgggcctcgcctccgccctccgccacctcgagctgcggtagcagcgactcatgagagcgcggccggaggacagcgttgatgccttacctggacatttcgaggctaaagcagttgttgaactccagagcattatcaagtcttcacagcttaaaaacagatttgataatgggctgcattaaaagtaaagaaaacaaaagtccagccattaaatacagacctgaaaatactccagagcctgtcagtacaagtgtgagccattatggagcagaacccactacagtgtcaccatgtccgtcatcttcagcaaagggaacag

SEQ ID NO: 23240 - DNA, 3147 bp, Homo sapiens
  misc_feature 1..3147: note = ENST00000274496
  source 1..3147: mol_type = unassigned DNA
ggaagccgttctttggccctgtgacacgtagcaacggggctggttcagggtctgaaacagagtttgggggttgtttgggattagtgaagctactgcctttgccgccagcgcagcctcagagtttgattatttgcaatgtcaggctttgaaaacttaaacacggatttctaccagacaagttacagcatcgatgatcagtcacagcagtcctatgattatggaggaagtggaggaccctatagcaaacagtatgctggctatgactattcgcagcaaggcagatttgtccctccagacatgatgcagccacaacagccatacaccgggcagatttaccagccaactcaggcatatactccagcttcacctcagcctttctatggaaacaactttgaggatgagccacctttattagaagagttaggtatcaattttgaccacatctggcaaaaaacactaacagtattacatccgttaaaagtagcagatggcagcatcatgaatgaaactgatttggcaggtccaatggttttttgccttgcttttggagccacattgctactggctggcaaaatccagtttggctatgtatacgggatcagtgcaattggatgtctaggaatgttttgtttattaaacttaatgagtatgacaggtgtttcatttggttgtgtggcaagtgtccttggatattgtcttctgcccatgatcctactttccagctttgcagtgatattttctttgcaaggaatggtaggaatcattctcactgctgggattattggatggtgtagtttttctgcttccaaaatatttatttctgcattagccatggaaggacagcaacttttagtagcatatccttgcgctttgttatatggagtctttgccctgatttccgtcttttgaaaatttatctgggatgtggacatcagtgggccagatgtacaaaaaggaccttgaactcttaaattggaccagcaaactgctgcagcgcaactctcatgcagatttacatttgactgttggagcaatgaaagtaaacgtgtatctcttgttcatttttatagaacttttgcatactatattggatttacctgcggtgtgactagctttaaatgtttgtgtttatacagataagaaatgctatttctttctggttcctgcagccattgaaaaacctttttccttgcaaattataatgtttttgatagatttttatcaactgtgggaaaccaaacacaaagctgataacctttcttaaaaacgacccagtcacagtaaagaagacacaagacggccgggcgtggtagctcacgcctgtaatcccagcactttgggaggccgaggcgggcggatcacaagggcaggagatcgagaccatcctggttaacacggtgaaaccccgactctactaaaactacaaaaaaaattagctgggcgtggtggcgggcgcctgtagtcccagctactcaggaggctgaggcaggagaagtgtgaacccaggaggcggagcttgcagtgagccgagatcacaccactgcactccatccagcctgggtgacagggtgagactctgtctcaaaaaaaaaaaaaaaaggagacacaagacttactgcaaaaatatttttccaaggatttaggaaagaaaaattgccttgtattctcaagtcaggtaactcaaagcaaaaaagtgatccaaatgtagagtatgagtttgcactccaaaaatttgacattactgtaaattatctcatggaatttttgctaaaattcagagatacgggaagttcacaatctaccttattgtagacatgaaatgcgaacacttacttacatattaatgttaactcaaccttagggacctggaatggttgcattaatgctataatcgttggatcgccacatttcccaaaaataataaaaaaatcactaaccttttttaaggaaaatatttaaagttttacaaaattcaatattgcaattatcaatgtaaagtacatttgaatgcttattaaaactttcccaattaattttaactgtgttattgaatttacttttactaaactactgttctctttgtctcttttttaactaggctctgattttgacccctaatttaagctttaagaatagaaatcagctaatatagaatcagacaaaaaggggattaaatgagcagtttgagttacattattttattgtattaaatttatttgatttatattgtcatgttctcttgccagagagaatctgtaggaaaatactgtatcttgtatactgatcattggctttttctagaaaaactgtctctgattctggacaaagctcagttatagttacgagaaagatatggtacagggaggaaaatactgccttttttttttttttaaagagattttcagactaaatagaaatgtcaaaatgatgtatcaatggttcttttttagaacaagttttcaaagcataaaaagaggttgagagaaataacatatttattgattcacataagtatgtttttcttcattaatcgtctggagaaacccacttgtcattaatttgttttgggctaggttttcaaacttaccaaattgctttaaaaaagcaatttggaaggtaatttgataggctttccaacttaaccaaattttttattgtaattcttggatagtatttttgtctttttcaattcatttgtctttttcagtatagtttttgttaaggcaaatgtcttcccttaatatccaaatattgctaataaacggtagaagatgctttggaaattaaaattatctcgctgttggttagacttaacactgttaatcttcagccaaatatcacatatggatcaaattattttcttttttgttgtttaccctatcctcaacaacatttttagtttaaattattgtagagattttttttgtggtggttattttttattttgctccaaaataataaggtgcaaagctattttatgcttaactgttgctctgtcaaaacagctatgcagtggagttgcatttgatgttctagagtttgattacatgcagagttgtatatagccaaaacttctcttatcaaactctgttatgtaggcatatttatatatacattaaagactgttgtactgtgtctcaaaaagta

SEQ ID NO: 23241 - DNA, 2255 bp, Homo sapiens
  misc_feature 1..2255: note = ENST00000448443
  source 1..2255: mol_type = unassigned DNA
agcaacggggctggttcagggtctgaaacagagtttgggggttgtttgggattagtgaagctactgcctttgccgccagcgcagcctcagagtttggtgagtgacccaggcccgtggcacagtgttcagcttctctccacacccgtgcaaatgggcttgttgccgtctttcggcgccgcgccctggtcctttcgctcagaccctcgctctcattcaagcccttgccctgacgcggtcccctgcacctcaggcgcgaccttccagattctgcactttttcctggcaggccgcaggccttattttgcaaggaagcagtcgccttgtcagctgtaaagcccagtcctaagattatttgcaatgtcaggctttgaaaacttaaacacggatttctaccagacaagttacagcatcgatgatcagtcacagcagtcctatgattatggaggaagtggaggaccctatagcaaacagtatgctggctatgactattcgcagcaaggcagatttgtccctccagacatgatgcagccacaacagccatacaccgggcagatttaccagccaactcaggcatatactccagcttcacctcagcctttctatggaaacaactttgaggatgagccacctttattagaagagttaggtatcaattttgaccacatctggcaaaaaacactaacagtattacatccgttaaaagtagcagatggcagcatcatgaatgaaactgatttggcaggtccaatggttttttgccttgcttttggagccacattgctactggctggcaaaatccagtttggctatgtatacgggatcagtgcaattggatgtctaggaatgttttgtttattaaacttaatgagtatgacaggtgtttcatttggttgtgtggcaagtgtccttggatattgtcttctgcccatgatcctactttccagctttgcagtgatattttctttgcaaggaatggtaggaatcattctcactgctgggattattggatggtgtagtttttctgcttccaaaatatttatttctgcattagccatggaaggacagcaacttttagtagcatatccttgcgctttgttatatggagtctttgccctgatttccgtcttttgaaaatttatctgggatgtggacatcagtgggccagatgtacaaaaaggaccttgaactcttaaattggaccagcaaactgctgcagcgcaactctcatgcagatttacatttgactgttggagcaatgaaagtaaacgtgtatctcttgttcatttttatagaacttttgcatactatattggatttacctgcggtgtgactagctttaaatgtttgtgtttatacagataagaaatgctatttctttctggttcctgcagccattgaaaaacctttttccttgcaaattataatgtttttgatagatttttatcaactgtgggaaaccaaacacaaagctgataacctttcttaaaaacgacccagtcacagtaaagaagacacaagacggccgggcgtggtagctcacgcctgtaatcccagcactttgggaggccgaggcgggcggatcacaagggcaggagatcgagaccatcctggttaacacggtgaaaccccgactctactaaaactacaaaaaaaattagctgggcgtggtggcgggcgcctgtagtcccagctactcaggaggctgaggcaggagaagtgtgaacccaggaggcggagcttgcagtgagccgagatcacaccactgcactccatccagcctgggtgacagggtgagactctgtctcaaaaaaaaaaaaaaaaggagacacaagacttactgcaaaaatatttttccaaggatttaggaaagaaaaattgccttgtattctcaagtcaggtaactcaaagcaaaaaagtgatccaaatgtagagtatgagtttgcactccaaaaatttgacattactgtaaattatctcatggaatttttgctaaaattcagagatacgggaagttcacaatctaccttattgtagacatgaaatgcgaacacttacttacatattaatgttaactcaaccttagggacctggaatggttgcattaatgctataatcgttggatcgccacatttcccaaaaataataaaaaaatcactaaccttttttaaggaaaatatttaaagttttacaaaattcaatattgcaattatcaatgtaaagtacatttgaatgcttattaaaactttcccaattaa

SEQ ID NO: 23242 - DNA, 2135 bp, Homo sapiens
  misc_feature 1..2135: note = ENST00000513112
  source 1..2135: mol_type = unassigned DNA
agcaacggggctggttcagggtctgaaacagagtttgggggttgtttgggattagtgaagctactgcctttgccgccagcgcagcctcagagtttggtgagtgacccaggcccgtggcacagtgttcagcttctctccacacccgtgcaaatgggcttgttgccgtctttcggcgccgcgccctggtcctttcgctcagaccctcgctctcattcaagcccttgccctgacgcggtcccctgcacctcaggcgcgaccttccagattctgcactttttcctggcaggccgcaggccttattttgcaaggaagcagtcgccttgtcagctgtaaagcccagtcctaagacagtatgctggctatgactattcgcagcaaggcagatttgtccctccagacatgatgcagccacaacagccatacaccgggcagatttaccagccaactcaggcatatactccagcttcacctcagcctttctatggaaacaactttgaggatgagccacctttattagaagagttaggtatcaattttgaccacatctggcaaaaaacactaacagtattacatccgttaaaagtagcagatggcagcatcatgaatgaaactgatttggcaggtccaatggttttttgccttgcttttggagccacattgctactggctggcaaaatccagtttggctatgtatacgggatcagtgcaattggatgtctaggaatgttttgtttattaaacttaatgagtatgacaggtgtttcatttggttgtgtggcaagtgtccttggatattgtcttctgcccatgatcctactttccagctttgcagtgatattttctttgcaaggaatggtaggaatcattctcactgctgggattattggatggtgtagtttttctgcttccaaaatatttatttctgcattagccatggaaggacagcaacttttagtagcatatccttgcgctttgttatatggagtctttgccctgatttccgtcttttgaaaatttatctgggatgtggacatcagtgggccagatgtacaaaaaggaccttgaactcttaaattggaccagcaaactgctgcagcgcaactctcatgcagatttacatttgactgttggagcaatgaaagtaaacgtgtatctcttgttcatttttatagaacttttgcatactatattggatttacctgcggtgtgactagctttaaatgtttgtgtttatacagataagaaatgctatttctttctggttcctgcagccattgaaaaacctttttccttgcaaattataatgtttttgatagatttttatcaactgtgggaaaccaaacacaaagctgataacctttcttaaaaacgacccagtcacagtaaagaagacacaagacggccgggcgtggtagctcacgcctgtaatcccagcactttgggaggccgaggcgggcggatcacaagggcaggagatcgagaccatcctggttaacacggtgaaaccccgactctactaaaactacaaaaaaaattagctgggcgtggtggcgggcgcctgtagtcccagctactcaggaggctgaggcaggagaagtgtgaacccaggaggcggagcttgcagtgagccgagatcacaccactgcactccatccagcctgggtgacagggtgagactctgtctcaaaaaaaaaaaaaaaaggagacacaagacttactgcaaaaatatttttccaaggatttaggaaagaaaaattgccttgtattctcaagtcaggtaactcaaagcaaaaaagtgatccaaatgtagagtatgagtttgcactccaaaaatttgacattactgtaaattatctcatggaatttttgctaaaattcagagatacgggaagttcacaatctaccttattgtagacatgaaatgcgaacacttacttacatattaatgttaactcaaccttagggacctggaatggttgcattaatgctataatcgttggatcgccacatttcccaaaaataataaaaaaatcactaaccttttttaaggaaaatatttaaagttttacaaaattcaatattgcaattatcaatgtaaagtacatttgaatgcttattaaaactttcccaattaa

SEQ ID NO: 23243 - DNA, 684 bp, Homo sapiens
  misc_feature 1..684: note = ENST00000519064
  source 1..684: mol_type = unassigned DNA
cacgtagcaacggggctggttcagggtctgaaacagagtttgggggttgtttgggattagtgaagctactgcctttgccgccagcgcagcctcagagtttgacagtatgctggctatgactattcgcagcaaggcagatttgtccctccagacatgatgcagccacaacagccatacaccgggcagatttaccagccaactcaggcatatactccagcttcacctcagcctttctatggaaacaactttgaggatgagccacctttattagaagagttaggtatcaattttgaccacatctggcaaaaaacactaacagtattacatccgttaaaagtagcagatggcagcatcatgaatgaaactgatttggcaggtccaatggttttttgccttgcttttggagccacattgctactggctggcaaaatccagtttggctatgtatacgggatcagtgcaattggatgtctaggaatgttttgtttattaaacttaatgagtatgacaggtgtttcatttggttgtgtggcaagtgtccttggatattgtcttctgcccatgatcctactttccagctttgcagtgatattttctttgcaaggaatggtaggaatcattctcactgctgggattattggatggtgtagtttttctgcttccaaaatatttatttctgcatta

SEQ ID NO: 23244 - DNA, 653 bp, Homo sapiens
  misc_feature 1..653: note = ENST00000522203
  source 1..653: mol_type = unassigned DNA
ctcccgcccaccggtgcccaacctgctaacacgcctgcgcgagcgggcgtgccccggaagccgttctttggccctgtgacacgtagcaacggggctggttcagggtctgaaacagagtttgggggttgtttgggattagtgaagctactgcctttgccgccagcgcagcctcagagtttgattatttgcaatgtcaggctttgaaaacttaaacacggatttctaccagacaagttacagcatcgatgatcagtcacagcagtcctatgattatggaggaagtggaggaccctatagcaatatgctggctatgactattcgcagcaaggcagatttgtccctccagacatgatgcagccacaacagccatacaccgggcagatttaccagccaactcaggcatatactccagcttcacctcagcctttctatggaaacaactttgaggatgagccacctttattagaagagttaggtatcaattttgaccacatctggcaaaaaacactaacagtattacatccgttaaaagtagcagatggcagcatcatgaatgaaactgatttggcaggtccaatggttttttgccttgcttttggagccacattgctactggctggcaaaatccagtttggctatgtatacgggatcag

SEQ ID NO: 23245 - DNA, 793 bp, Homo sapiens
  misc_feature 1..793: note = ENST00000508754
  source 1..793: mol_type = unassigned DNA
tgtgacacgtagcaacggggctggttcagggtctgaaacagagtttgggggttgtttgggattagtgaagctactgcctttgccgccagcgcagcctcagagtttgattatttgcaatgtcaggctttgaaaacttaaacacggatttctaccagacaagttacagcatcgatgatcagtcacagcagtcctatgattatggaggaagtggaggaccctatagcaaacagtatgctggctatgactattcgcagcaaggcagatttgtccctccagacatgatgcagccacaacagccatacaccgggcagatttaccagccaactcaggcatatactccagcttcacctcagcctttctatggaaacaactttgaggatgagccacctttattagaagagttaggtatcaattttgaccacatctggcaaaaaacactaacagtattacatccgttaaaagtagcagatggcagcatcatgaatgaaactgatttggcaggtccaatggttttttgccttgcttttggagccacattgctactggtaagattttcatttcaaccttcagggtgcaattaaagaacagcctttaaattttaaatgttctaccaaaagccattttgaaactccgctttacacctcaagtctttgatgtgtttggaatagtactgagttgcttgtatttatacctattcattagttctccatctatagtaagtgtagcatgttttaaaaatcatttctttttctaagaaatgattaaattattaggggaaaaaacaaaaaaaaaa

SEQ ID NO: 23246 - DNA, 1196 bp, Homo sapiens
  misc_feature 1..1196: note = ENST00000415895
  source 1..1196: mol_type = unassigned DNA
accaatggatttgcttaaaatttctcacacaaagctacatttactggaggatctttctataaaaaataaacagaggatgtcaaacttggcacaatttgactctgatttttaccaatctaattttactattgataaccaggagcagagtggtaatgactctaatgcctatggaaatctttatggatctagaaaacaacaagctggtgagcagcctcagcctgcctcctttgttccatcagagatgctcatgtcatcgggttacgcaggacaattttttcagccagcatccaactcagattattattcacaatctccttacattgacagttttgatgaagagcctcctttgctagaagaacttggaatccattttgatcacatatggcaaaaaactttgacagtgttaaacccaatgaagccagtagatggcagcattatgaatgaaacggacctcactggacccattcttttttgcgtagccctgggagccaccttgcttctggcaggaaaagttcagtttggttatgtgtatggcatgagtgccattggctgccttgtgattcatgccttgctgaacctgatgagctcttcaggggtgtcgtacggctgtgtggccagcgtgctgggttactgcctgctccccatggtcatcctgtctggttgcgccatgttcttttcactgcagggcatctttggaatcatgtcatccctggtcatcattggctggtgtagtctctcagcttccaagatcttcattgcagccttgcacatggaaggacagcagcttcttgttgcctacccttgtgccatactttatggactttttgccctcctaacaattttctaaagaatgtttgagatggcatttcaagactctgtttgctgtccagattattttggaaatatattaacattcaaatttggtgatatgatttctgttttattgcttttgagagagtaataagcagagagacaaagcagcacttaagggtggtgctctaatagcctgttggtttgaatgatgttttgcttttgagtttggtgcattaaaacatttcaaaatacttaaaatcaaaagggatacagttgctgtactgatcaaccctgcttttctcaatagaggtatttctgagaaaagtaagtaaataaactcatatgtttactaaaaggaaatctctagtaagccttttgagaaa

SEQ ID NO: 23247 - DNA, 752 bp, Homo sapiens
  misc_feature 1..752: note = ENST00000510035
  source 1..752: mol_type = unassigned DNA
atgtcatcttttcaccaatggatttgcttaaaatttctcacacaaagctacatttactggaggatctttctataaaaaataaacagaggatgtcaaacttggcacaatttgactctgatttttaccaatctaattttactattgataaccaggagcagagtggtaatgactctaatgcctatggaaatctttatggatctagaaaacaacaagctggtgagcagcctcagcctgcctcctttgttccatcagagatgctcatgtcatcgggttacgcaggacaattttttcagccagcatccaactcagattattattcacaatctccttacattgacagttttgatgaagagcctcctttgctagaagataagaacttggaatccattttgatcacatatggcaaaaaactttgacagtgttaaacccaatgaagccagtagatggcagcattatgaatgaaacggacctcactggacccattcttttttgcgtagccctgggagccaccttgcttctggtaatgtgtcacaggaagcaccagattttaatgcttgtcctttccagtgctggctttgaagcaatctgtataaatataagagaaactgtgtcaccttacatagtgaattttttaagtgagagagaataatttaaccatagtgacaaaaatatgctaccattatgcattgcaacagctaaaaagtataaatttaaatagaatttcaaaaatcaagaagcagatcaaagcagga

SEQ ID NO: 23248 - DNA, 583 bp, Homo sapiens
  misc_feature 1..583: note = ENST00000502794
  source 1..583: mol_type = unassigned DNA
atgtcatcttttcaccaatggatttgcttaaaatttctcacacaaagctacatttactggaggatctttctataaaaaataaacagaggatgtcaaacttggcacaatttgactctgatttttaccaatctaattttactattgataaccaggagcagagtggtaatgactctaatgcctatggaaatctttatggatctagaaaaacttggaatccattttgatcacatatggcaaaaaactttgacagtgttaaacccaatgaagccagtagatggcagcattatgaatgaaacggacctcactggacccattcttttttgcgtagccctgggagccaccttgcttctggtaatgtgtcacaggaagcaccagattttaatgcttgtcctttccagtgctggctttgaagcaatctgtataaatataagagaaactgtgtcaccttacatagtgaattttttaagtgagagagaataatttaaccatagtgacaaaaatatgctaccattatgcattgcaacagctaaaaagtataaatttaaatagaatttcaaaaatcaagaagcagatcaaagcagga

SEQ ID NO: 23249 - DNA, 484 bp, Homo sapiens
  misc_feature 1..484: note = ENST00000508947
  source 1..484: mol_type = unassigned DNA
cgaaggtaccccccgtaggatccggtggacaggactcaaacagatcctgtgaagcgaagacaatgaaccccggggagctctgcccaagtaccagatccggaagcaacccgaagcggcggcgcagcttgccgacgtctgcacgccgcacgctgtcgtgacatcagcgcgtcttggcgccgggtagtggagtggtcactttgggaaagtcaggcaggaatgacttgtttctgtgatgtctgtggcctcaactgggatgactcgaccagctggggacttgaaaatcgggcatctctttctctctcatcttgtagtcacagtctctccatgtggtctccccatacagcctcttcagcatcacaatctcaggatgtcaaacttggcacaatttgactctgatttttaccaatctaattttactattgataaccaggagcagagtggtaatgactctaatgcctatggaaatctttatggatctagaaag

SEQ ID NO: 23250 - DNA, 937 bp, Homo sapiens
  misc_feature 1..937: note = ENST00000332990
  source 1..937: mol_type = unassigned DNA
atgtcatcttttcaccaatggatttgcttaaaatttctcacacaaagctacatttactggaggatctttctataaaaaataaacagaggatgtcaaacttggcacaatttgactctgatttttaccaatctaattttactattgataaccaggagcagagtggtaatgactctaatgcctatggaaatctttatggatctagaaaacaacaagctggtgagcagcctcagcctgcctcctttgttccatcagagatgctcatgtcatcgggttacgcaggacaattttttcagccagcatccaactcagattattattcacaatctccttacattgacagttttgatgaagagcctcctttgctagaagaacttggaatccattttgatcacatatggcaaaaaactttgacagtgttaaacccaatgaagccagtagatggcagcattatgaatgaaacggacctcactggacccattcttttttgcgtagccctgggagccaccttgcttctggcaggaaaagttcagtttggttatgtgtatggcatgagtgccattggctgccttgtgattcatgccttgctgaacctgatgagctcttcaggggtgtcgtacggctgtgtggccagcgtgctgggttactgcctgctccccatggtcatcctgtctggttgcgccatgttcttttcactgcagggcatctttggaatcatgtcatccctggtcatcattggctggtgtagtctctcagcttccaagatcttcattgcagccttgcacatggaaggacagcagcttcttgttgcctacccttgtgccatactttatggactttttgccctcctaacaattttctaaagaatgtttgagatggcatttcaagactctgtttgctgtccagattattttggaaatatattaacattcaaatttgg

SEQ ID NO: 23251 - DNA, 2523 bp, Homo sapiens
  misc_feature 1..2523: note = ENST00000335953
  source 1..2523: mol_type = unassigned DNA
gggctcggccgccagcactaaagatggagaggcgccggggccttgcaggggagggggctcggcgttgacgtgggacgcggcggaggcgcagcagccggtggtgatttgctaacctcgcagcagagaggagttgagggcgatgagagcgggtactgcgaactgccgggcgatgctgtcgctgccgccgtgatacggagagcaacagttccccagcaacacccctccccgacacaggcacacaccccccgacaggcacgcacacccaccccacagtgcccggctcggctgcgcctcctctattggcccaggaagcccacccagccccgccacgcagagcccagaaggaaagaaagcctcatgcctgagccgaggggagcaccatggatctgacaaaaatgggcatgatccagctgcagaaccctagccaccccacggggctactgtgcaaggccaaccagatgcggctggccgggactttgtgcgatgtggtcatcatggtggacagccaggagttccacgcccaccggacggtgctggcctgcaccagcaagatgtttgagatcctcttccaccgcaatagtcaacactatactttggacttcctctcgccaaagaccttccagcagattctggagtatgcatatacagccacgctgcaagccaaggcggaggacctggatgacctgctgtatgcggccgagatcctggagatcgagtacctggaggaacagtgcctgaagatgctggagaccatccaggcctcagacgacaatgacacggaggccaccatggccgatggcggggccgaggaagaagaggaccgcaaggctcggtacctcaagaacatcttcatctcgaagcattccagcgaggagagtgggtatgccagtgtggctggacagagcctccctgggcccatggtggaccagagcccttcagtctccacttcatttggtctttcagccatgagtcccaccaaggctgcagtggacagtttgatgaccataggacagtctctcctgcagggaactcttcagccacctgcagggcccgaggagccaactctggctgggggtgggcggcaccctggggtggctgaggtgaagacggagatgatgcaggtggatgaggtgcccagccaggacagccctggggcagccgagtccagcatctcaggagggatgggggacaaggttgaggaaagaggcaaagaggggcctgggaccccgactcgaagcagcgtcatcaccagtgctagggagctacactatgggcgagaggagagtgccgagcaggtgccacccccagctgaggctggccaggcccccactggccgacctgagcacccagcacccccgcctgagaagcatctgggcatctactccgtgttgcccaaccacaaggctgacgctgtattgagcatgccgtcttccgtgacctctggcctccacgtgcagcctgccctggctgtctccatggacttcagcacctatggggggctgctgccccagggcttcatccagagggagctgttcagcaagctgggggagctggctgtgggcatgaagtcagagagccggaccatcggagagcagtgcagcgtgtgtggggtcgagcttcctgataacgaggctgtggagcagcacaggaagctgcacagtgggatgaagacgtacgggtgcgagctctgcgggaagcggttcctggatagtttgcggctgagaatgcacttactggctcattcagcgggtgccaaagcctttgtctgtgatcagtgcggtgcacagttttcgaaggaggatgccctggagacacacaggcagacccatactggcactgacatggccgtcttctgtctgctgtgtgggaagcgcttccaggcgcagagcgcactgcagcagcacatggaggtccacgcgggcgtgcgcagctacatctgcagtgagtgcaaccgcaccttccccagccacacggctctcaaacgccacctgcgctcacatacaggcgaccacccctacgagtgtgagttctgtggcagctgcttccgggatgagagcacactcaagagccacaaacgcatccacacgggtgagaaaccctacgagtgcaatggctgtggcaagaagttcagcctcaagcatcagctggagacgcactatagggtgcacacaggtgagaagccctttgagtgtaagctctgccaccagcgctcccgggactactcggccatgatcaagcacctgagaacgcacaacggcgcctcgccctaccagtgcaccatctgcacagagtactgccccagcctctcctccatgcagaagcacatgaagggccacaagcccgaggagatcccgcccgactggaggatagagaagacgtacctctacctgtgctatgtgtgaagggaggcccgcggcggtggagccgagcggggagccaggaaagaagagttggagtgagatgaaggaaggactatgacaaataaaaaaggaaaagaaaaaaaaaaacagaaggaaaaggaaa

SEQ ID NO: 23252 - DNA, 4427 bp, Homo sapiens
  misc_feature 1..4427: note = ENST00000541602
  source 1..4427: mol_type = unassigned DNA
gagggcgatgagagcgggtactgcgaactgccgggcgatgctgtcgctgccgccgtgatacggagagcaacagttccccagcaacacccctccccgacacaggcacacaccccccgacaggcacgcacacccaccccacagtgcccggctcggctgcgcctcctctattggcccaggaagcccacccagccccgccacgcagagcccagaaggaaagaaagcctcatgcctgagccgaggggagcaccatggatctgacaaaaatgggcatgatccagctgcagaaccctagccaccccacggggctactgtgcaaggccaaccagatgcggctggccgggactttgtgcgatgtggtcatcatggtggacagccaggagttccacgcccaccggacggtgctggcctgcaccagcaagatgtttgagatcctcttccaccgcaatagtcaacactatactttggacttcctctcgccaaagaccttccagcagattctggagtatgcatatacagccacgctgcaagccaaggcggaggacctggatgacctgctgtatgcggccgagatcctggagatcgagtacctggaggaacagtgcctgaagatgctggagaccatccaggcctcagacgacaatgacacggaggccaccatggccgatggcggggccgaggaagaagaggaccgcaaggctcggtacctcaagaacatcttcatctcgaagcattccagcgaggagagtgggtatgccagtgtggctggacagagcctccctgggcccatggtggaccagagcccttcagtctccacttcatttggtctttcagccatgagtcccaccaaggctgcagtggacagtttgatgaccataggacagtctctcctgcagggaactcttcagccacctgcagggcccgaggagccaactctggctgggggtgggcggcaccctggggtggctgaggtgaagacggagatgatgcaggtggatgaggtgcccagccaggacagccctggggcagccgagtccagcatctcaggagggatgggggacaaggttgaggaaagaggcaaagaggggcctgggaccccgactcgaagcagcgtcatcaccagtgctagggagctacactatgggcgagaggagagtgccgagcaggtgccacccccagctgaggctggccaggcccccactggccgacctgagcacccagcacccccgcctgagaagcatctgggcatctactccgtgttgcccaaccacaaggctgacgctgtattgagcatgccgtcttccgtgacctctggcctccacgtgcagcctgccctggctgtctccatggacttcagcacctatggggggctgctgccccagggcttcatccagagggagctgttcagcaagctgggggagctggctgtgggcatgaagtcagagagccggaccatcggagagcagtgcagcgtgtgtggggtcgagcttcctgataacgaggctgtggagcagcacaggaagctgcacagtgggatgaagacgtacgggtgcgagctctgcgggaagcggttcctggatagtttgcggctgagaatgcacttactggctcattcagcgggtgccaaagcctttgtctgtgatcagtgcggtgcacagttttcgaaggaggatgccctggagacacacaggcagacccatactggtgagttgacttggattcctgttctccaggttttccacagtgttggtagcacatggacatgaactgtctgggtggcaacctctttttagcaaatgtgacatccagtaatttcctgggcgagctgtgagtaggatgggcttctgccacgttcagctactcttgtctgtgtggctggcccagcagaagtttacaagtatgacatggccccatgagaatggctgtcctagattaggccaagatctgtctctaaccagccactgagagctcatgttcttggaggtatctagtatgctcttgttgaggccttagtctgtgttgttatcaaaacatcttcttcccttggtcaggaaatctctcacacccatctgatgaaactgaaaccctcgtgtggccacagttggctggtcctccctctgcgagagctgagacattgtctaaaatcagcgtgtacgcaggatgcatttgaacaatattaactcacgatgatagagctttatttgatttcaaagggattgatttcaccgcaccaaagtcatctgatcattgtgatcagagtcgttgtcatcacatcatcacagcagctcacacttaacactcacagtgaggcaggcactgttctcagtgctttatgtcaggggtccccaaccctgggatcatggactggtgtctgtggtggtctgttaggaaccaggctgcatggcaagaggcaagcggtgggcaggcaagtgaaacttcatctgtatttactgctgttcctcattgctcgtattaccacctgagctcctcctcatgtcagagcagcagcagcagcagcagcattagattctcataggagcacaaatcctattgtgaactgtgcatgcaagggatcaaggttgcatgctccttatgagaatctaatgcctgatgatctgtcactgtctcttgtcaaccccagatgggaccatctagttgcaggaaaacaagctcagggctcccactaattctacattatgtgagttgtataattagttcattatatattataatgtaataatagaaataaagtacacaataaatgtaatgtgcttaaatcatcccaggaccaccctcctgtactccgctgtatgtgaaaaggttgtcttccataaaactggtccctggtgcctaaaaggttggggaccactgctttacgtgatcccatctggccaatctctcagtaaccctgtaaggtaaggttggaagctactcttatgtcatagatgaggaaactgaggctgaaaggagggaaagtgacttgctggagttggtagtggggacaggcgtggtagagtcttatagttcagagctgagactgcatgggtttaatcctgactctgccacttcctatttgtggggccatggataaattatttaaactctcttaatttagatttctcatctgttagaaaagtggagtaatattagtgtctacctcatagcattagggttgttgtggggatgaaataaggtattttatttgaagtatttcatggagtgtttggctcatagtaagcactcaataaatagtagtaggtatatttaatgtaatagatatttattgagtttctacaaggtgctggcactgtttaggcatttaagatgtagtaatgcatgagacagacgacattgctgcctctcatggaactgagcttctagctgggagacagaatcagcaaataaatatacgatatcatgtctgcttatacatattaagtgctactggaaaaggataaggagtagagaataatagggagaaaagaaatattgtggatatttagggagaaatgttgtggataaaatggttagggaaggcctctccaagaaggtggtatctgggcagagtcttaaaaagtgaaggagtgagccactcaaaaatttctgggaagaatgtctaagcaaagggagtgagcatttgcagaagccctgaggctggatcaagcctgacaagtttaaggacccacacgcagagcagtggtggccagagagctgggagtgacgtgtagagagtggtgagggatgaggacaggatctgtcaagtctctcagccctggtaaaagatttgggttttactctgcatgtgctgagtcctttggagggtgacaaaatatttgcaaatcatatatttgatgaggaacttatagctagaaatagaaagaggtcttataattcaaaaaacataaacaaataatcaaattaaataatgggcaaaggttctgaacagacatgtctccaaagatagacaaatagccaatgagcacatgaaaaagatgctcaactgcattcaccatcagagagatgcaaatcaaaaccacagtgagatactgcttcacacccactacaatgtggctacaataaaaaatacagatagttacaagtgttatcaaagatgtggaaaaaccagaactctcatgggagtgtaaaatggtgtagccactttggaaaacattctggcaattcctcaagaggttagctgaggcaggcagatcatgaggtcaggagatcgagaccatcctggccaacatggtgaaaccccgtctctactaaaaaaatagaaaaattagctgggcgtggtggcatgtgcttgtaatctcagctacttgggaggctgaggcaggagaatcacttgaaccagggagtcggaagttgcagtgagctgagattgagccactgcactccagcctggcgtcagagtgagaccccgtctc

SEQ ID NO: 23253 - DNA, 773 bp, Homo sapiens
  misc_feature 1..773: note = ENST00000544220
  source 1..773: mol_type = unassigned DNA
agcgggtactgcgaactgccgggcgatgctgtcgctgccgccgtgatacggagagcaacagttccccagcaacacccctccccgacacaggcacacaccccccgacaggcacgcacacccaccccacagtgcccggctcggctgcgttctcagaaaccccgatgtctgcgggaaagcacgcggtggctcggctcggctgaatgctcatcccaaccttgacggcctccgtccccaccccggggcgggcagcaaaaatgtcttgaccagccgtcctgtgaatcctttctgcgtgagcttggtggctcctgaactgatagagctccttctgggggtggagcctcctctattggcccaggaagcccacccagccccgccacgcagagcccagaaggaaagaaagcctcatgcctgagccgaggggagcaccatggatctgacaaaaatgggcatgatccagctgcagaaccctagccaccccacggggctactgtgcaaggccaaccagatgcggctggccgggactttgtgcgatgtggtcatcatggtggacagccaggagttccacgcccaccggacggtgctggcctgcaccagcaagatgtttgagatcctcttccaccgcaatagtcaacactatactttggacttcctctcgccaaagaccttccagcagattctggagtatgcatatacagccacgctgcaagccaaggcggaggacctggatgacctgctgtatgcggccgagatcctggagatcgagtacctggagg

SEQ ID NO: 23254 - DNA, 572 bp, Homo sapiens
  misc_feature 1..572: note = ENST00000535700
  source 1..572: mol_type = unassigned DNA
tcttatgtatgcggaccggtgcgcgggcgcaagataagcctcctctattggcccaggaagcccacccagccccgccacgcagagcccagaaggaaagaaagcctcatgcctgagccgaggggagcaccatggatctgacaaaaatgggcatgatccagctgcagaaccctagccaccccacggggctactgtgcaaggccaaccagatgcggctggccgggactttgtgcgatgtggtcatcatggtggacagccaggagttccacgcccaccggacggtgctggcctgcaccagcaagatgtttgagatcctcttccaccgcaatagtcaacactatactttggacttcctctcgccaaagaccttccagcagattctggagtatgcatatacagccacgctgcaagccaaggcggaggacctggatgacctgctgtatgcggccgagatcctggagatcgagtacctggaggaacagtgcctgaagatgctggagaccatccaggcctcagacgacaatgacacggaggccaccatggccgatggcggggccgaggaagaagaggaccgc

SEQ ID NO: 23255 - DNA, 2287 bp, Homo sapiens
  misc_feature 1..2287: note = ENST00000392996
  source 1..2287: mol_type = unassigned DNA
agcgctgcgggccctcctcggctctcggcgggaccggcggtgacaccggagctcgccgtgcgctcccggccgctctcgcctcctctattggcccaggaagcccacccagccccgccacgcagagcccagaaggaaagaaagcctcatgcctgagccgaggggagcaccatggatctgacaaaaatgggcatgatccagctgcagaaccctagccaccccacggggctactgtgcaaggccaaccagatgcggctggccgggactttgtgcgatgtggtcatcatggtggacagccaggagttccacgcccaccggacggtgctggcctgcaccagcaagatgtttgagatcctcttccaccgcaatagtcaacactatactttggacttcctctcgccaaagaccttccagcagattctggagtatgcatatacagccacgctgcaagccaaggcggaggacctggatgacctgctgtatgcggccgagatcctggagatcgagtacctggaggaacagtgcctgaagatgctggagaccatccaggcctcagacgacaatgacacggaggccaccatggccgatggcggggccgaggaagaagaggaccgcaaggctcggtacctcaagaacatcttcatctcgaagcattccagcgaggagagtgggtatgccagtgtggctggacagagcctccctgggcccatggtggaccagagcccttcagtctccacttcatttggtctttcagccatgagtcccaccaaggctgcagtggacagtttgatgaccataggacagtctctcctgcagggaactcttcagccacctgcagggcccgaggagccaactctggctgggggtgggcggcaccctggggtggctgaggtgaagacggagatgatgcaggtggatgaggtgcccagccaggacagccctggggcagccgagtccagcatctcaggagggatgggggacaaggttgaggaaagaggcaaagaggggcctgggaccccgactcgaagcagcgtcatcaccagtgctagggagctacactatgggcgagaggagagtgccgagcaggtgccacccccagctgaggctggccaggcccccactggccgacctgagcacccagcacccccgcctgagaagcatctgggcatctactccgtgttgcccaaccacaaggctgacgctgtattgagcatgccgtcttccgtgacctctggcctccacgtgcagcctgccctggctgtctccatggacttcagcacctatggggggctgctgccccagggcttcatccagagggagctgttcagcaagctgggggagctggctgtgggcatgaagtcagagagccggaccatcggagagcagtgcagcgtgtgtggggtcgagcttcctgataacgaggctgtggagcagcacaggaagctgcacagtgggatgaagacgtacgggtgcgagctctgcgggaagcggttcctggatagtttgcggctgagaatgcacttactggctcattcagcgggtgccaaagcctttgtctgtgatcagtgcggtgcacagttttcgaaggaggatgccctggagacacacaggcagacccatactggcactgacatggccgtcttctgtctgctgtgtgggaagcgcttccaggcgcagagcgcactgcagcagcacatggaggtccacgcgggcgtgcgcagctacatctgcagtgagtgcaaccgcaccttccccagccacacggctctcaaacgccacctgcgctcacatacaggcgaccacccctacgagtgtgagttctgtggcagctgcttccgggatgagagcacactcaagagccacaaacgcatccacacgggtgagaaaccctacgagtgcaatggctgtggcaagaagttcagcctcaagcatcagctggagacgcactatagggtgcacacaggtgagaagccctttgagtgtaagctctgccaccagcgctcccgggactactcggccatgatcaagcacctgagaacgcacaacggcgcctcgccctaccagtgcaccatctgcacagagtactgccccagcctctcctccatgcagaagcacatgaagggccacaagcccgaggagatcccgcccgactggaggatagagaagacgtacctctacctgtgctatgtgtgaagggaggcccgcggcggtggagccgagcggggagccaggaaagaagagttggagtgagatgaaggaaggactatgacaaataaaaaaggaaaagaaa

SEQ ID NO: 23256 - DNA, 757 bp, Homo sapiens
  misc_feature 1..757: note = ENST00000539918
  source 1..757: mol_type = unassigned DNA
atggggggctgctgccccagggcttcatccagagggagctgttcagcaagctgggggagctggctgtgggcatgaagtcagagagccggaccatcggagagcagtgcagcgtgtgtggggtcgagcttcctgataacgaggctgtggagcagcacagggtcttctagcataacctttgttcctgttggcaacacttcattttggactgtcaagatgcatttcctgagatgtgagatgtcatgaccctgtgtttggaagctgcacagtgggatgaagacgtacgggtgcgagctctgcgggaagcggttcctggatagtttgcggctgagaatgcacttactggctcattcagcgggtgccaaagcctttgtctgtgatcagtgcggtgcacagttttcgaaggaggatgccctggagacacacaggcagacccatactggcactgacatggccgtcttctgtctgctgtgtgggaagcgcttccaggcgcagagcgcactgcagcagcacatggaggtccacgcgggcgtgcgcagctacatctgcagtgagtgcaaccgcaccttccccagccacacggctctcaaacgccacctgcgctcacatacaggcgaccacccctacgagtgtgagttctgtggcagctgcttccgggatgagagcacactcaagagccacaaacgcatccacacgggtgagaaaccctacgagtgcaatggctgtggcaagaagttcagcctcaagcatcagctggaga

SEQ ID NO: 23257 - DNA, 534 bp, Homo sapiens
  misc_feature 1..534: note = ENST00000545851
  source 1..534: mol_type = unassigned DNA
gggcacagactgtatgccaggcatggcgcagggtatcagggatatggtaaagcccaagacaggtgggaacctgctctcacagagcttacagtccactgggaagatggaagagagctccaaatacaggacagttgaatggggctccaggggcttgtccagagaagatttcagagccagcgggtgccaaagcctttgtctgtgatcagtgcggtgcacagttttcgaaggaggatgccctggagacacacaggcagacccatactggcactgacatggccgtcttctgtctgctgtgtgggaagcgcttccaggcgcagagcgcactgcagcagcacatggaggtccacgcgggcgtgcgcagctacatctgcagtgagtgcaaccgcaccttccccagccacacggctctcaaacgccacctgcgctcacatacaggcgaccacccctacgagtgtgagttctgtggcagctgcttccgggatgagagcacactcaagagccacaaacgcatccacacgggtgagaaaccctacg

SEQ ID NO: 23258 - DNA, 705 bp, Homo sapiens
  misc_feature 1..705: note = ENST00000535379
  source 1..705: mol_type = unassigned DNA
ggccatcattggctctgtgaccacattataaagttttttcgtgtggatatctcattcgatgttcttgataaccacagtggcagataaggagcaaatggatctggtgaaaagaatgacttgctcggggccacaaggcactgacatggccgtcttctgtctgctgtgtgggaagcgcttccaggcgcagagcgcactgcagcagcacatggaggtccacgcgggcgtgcgcagctacatctgcagtgagtgcaaccgcaccttccccagccacacggctctcaaacgccacctgcgctcacatacaggcgaccacccctacgagtgtgagttctgtggcagctgcttccgggatgagagcacactcaagagccacaaacgcatccacacgggtgagaaaccctacgagtgcaatggctgtggcaagaagttcagcctcaagcatcagctggagacgcactatagggtgcacacaggtgagaagccctttgagtgtaagctctgccaccagcgctcccgggactactcggccatgatcaagcacctgagaacgcacaacggcgcctcgccctaccagtgcaccatctgcacagagtactgccccagcctctcctccatgcagaagcacatgaagggccacaagcccgaggagatcccgcccgactggaggatagagaagacgtacctctacctgtgctatgtgtgaag

SEQ ID NO: 23259 - DNA, 727 bp, Homo sapiens
  misc_feature 1..727: note = ENST00000535509
  source 1..727: mol_type = unassigned DNA
ggagagatttctttgaaggttggggagtcaggctggagtgactttcacccttaacctaaaggaaggggagaagaggtcatctgagaagcaagatggtgaggtctcatgtatccacaagggggcttgctttctggggactgctgtccatccctgaaccaaatgggctctctttcccaggactggcccttgccccacagatgatcatggggccacagtaaagtatggtcatgtgtgaagacaggtattgcttgtttattcaatggaggtgtggccgtggatccttaagttgtctttggaggtggtgaatacaggccgtcgcatccttctcatgcacagaatgtgccctactgtcccctgaagagggggcagggagaggcaaaggcctgatccagccccttgtctccacaggcgaccacccctacgagtgtgagttctgtggcagctgcttccgggatgagagcacactcaagagccacaaacgcatccacacgggtgagaaaccctacgagtgcaatggctgtggcaagaagttcagcctcaagcatcagctggagacgcactatagggtgcacacaggtgagaagccctttgagtgtaagctctgccaccagcgctcccgggactactcggccatgatcaagcacctgagaacgcacaacggcgcctcgccctaccagtgcaccatctgcacagagtactgccccagcctctcctccatgcagaagca

SEQ ID NO: 23260 - DNA, 6846 bp, Homo sapiens
  misc_feature 1..6846: note = ENST00000398505
  source 1..6846: mol_type = unassigned DNA
gtcaaattcaagatggatggaatcacagcggcagcggcggctgcggcgcgcgcgagccgagtgtgagcggaaaggggcccggcgtctgcctcgagactgaagaccgaagacatgaagtagaaacaatccaggaaggctttgggaagctatttgtgtgcgaggatcaaagtgataaactcaagccatggagggattactgcattacatcaaccctgcacacgccatttctctcctaagtgccctgaatgaggagcgtctcaaaggacagctgtgtgatgtgctgctgattgttggagaccaaaagttccgagctcataaaaacgtcttggctgccagcagcgaatactttcagagtttattcacaaataaggaaaatgagtcacaaactgtatttcagcttgacttctgtgagccagatgcttttgataatgttttaaactacatttattcttcctctctatttgttgagaagagcagccttgctgctgtgcaagaacttggctatagtcttgggatttcctttctgactaacatcgtttctaaaacacctcaagccccctttccaacgtgtcctaatagaaaaaaagtgtttgtagaagatgatgaaaacagttctcaaaagagaagtgtcattgtttgtcaaagtagaaacgaagcgcaaggaaaaactgttagtcaaaatcaacccgatgtaagccatacttcccggccctctcctagcattgcagtcaaggccaataccaataagccacatgtcccaaaaccaatagaaccacttcataatttgtcattaactgaaaagagttggccgaaagatagttctgtggtatatgcaaagtctcttgagcattctggatctttggatgatcctaatagaatcagtttggtgaaaagaaatgcagtgttgccttcaaagcctctgcaagacagagaagctatggatgataaaccaggtgtgagtggtcagcttccaaaaggaaaagctctagagctggctttgaagagaccacggccacctgttttgtctgtttgtagctcatcagagactccctatctattaaaagaaactaacaaaggaaatggtcaaggtgaagatagaaacttgttgtactattcaaagttaggcttagtgatcccatccagtggatctggttctggaaaccaaagcattgacaggagtggcccacttgttaagagtctcctcagacggtcattgtcgatggatagccaggttcctgtctattcaccttccatagatttgaaatcttcccagggatcatcttcggtgtccagtgatgcaccagggaatgtgttgtgtgctttatctcagaagtcatctttaaaagattgtagtgaaaaaacagccctagatgacaggcctcaagtgctacaaccgcatcgcctcaggtcctttagtgcttctcagtcaacagacagggagggagcttcccctgtgactgaggtgcgcataaagactgagcccagcagcccgctgtcggacccctcggacatcatccgcgtcactgtgggagatgcggcaacaacagcagctgcctcatcttcgtcggtcacaagagacctgtctctgaaaacagaagatgaccaaaaagacatgagcagactcccagcaaaaaggaggttccaagcggaccgaagattgccgtttaagaagttaaaggtgaatgagcacgggtctcctgtgtcagaagataattttgaggaaggctcaagccctactctccttgatgcagattttccagattctgatttgaataaagacgaatttgagcaaggaagccacgagcggctgtgccggaacgcggccgtctgcccttactgcagcctcaggtttttctcgcccgagctgaagcaagaacacgagagcaagtgtgagtataagaagctgacctgcctcgagtgcatgcgcaccttcaagtcctctttcagcatctggcggcaccaggttgaagtccataatcagaacaacatggcacccaccgaaaacttttctttgcccgttttggaccacaatggtgatgtgactggttcttcaaggccccaatcccagcctgagcccaacaaagtaaaccacatcgtcaccacaaaagacgacaacgtgttcagtgattcttcagaacaagttaacttcgactcggaagattcctcttgtcttcccgaagaccttagtctttccaagcaactgaaaatccaagtcaaagaggagcctgtggaggaggctgaagaagaggcacccgaggccagcacagcccccaaagaagcgggtcctagcaaagaagccagcctgtggccctgcgagaagtgtgggaagatgttcacggtgcataagcagctggagcgtcaccaggagcttctgtgctctgtgaaaccatttatttgtcacgtgtgcaacaaagcttttcgcactaattttcgactctggagtcacttccaatcgcacatgtctcaggcttcagaggaatcggcacataaggaatctgaggtgtgccctgttcccacaaactctccctctccaccacctctgccaccgccaccaccactgcccaagatccagcctctggagcctgacagccccacaggcctgtccgaaaacccaactccagccacagaaaaactgtttgtgccccaagaatcagacacccttttttaccatgccccacccctttcagcaatcacatttaaaagacagtttatgtgtaaactttgccacaggacattcaagactgcatttagtctttggagtcacgaacaaacacacaattgaaagaccaacactttttacctatgggaggcagtccccagatttcaacctgaattgtgaaatgtgtcataagaaacaaaatattttttaaacaagaataataaaggttggagattgttacgcttgaaattaagttggaggcaaattgataattacttagtaatgtccttaactttagaaatacagcttttaaaatattgtggttctggaccttacaagaacaagatggtttgatttcattaatgttgaaattggattagtcttgattgtgtgcatggttcctcattccatggtgtcagtataatcatttaattgaggtttttggttttttattgattagtggaatactgtcgaagtattccttcttttaattattttagacacttgagttctagttaaatcttaaccatgttcttaagtccaaaataggaagaagtggagtagtttgcagtattgatttatatcttagactactttagcaataaaagataaatctcaactttaataagttatcctgacacttgataaaaataaatatttggtattttgtggtcatgtaaaacttctttttgtatgaaaattgtgagaaatttaaatcagcaatagtaacacttagatttttataaactaacaaaaacttgctctcagtcaatataataaatgatagttaaactctaaggaagacctgggaaatgaaaacaatttatggaagtcccctacagtcagtttataagggcttcagtagtgatagacattgttataaaaacttgtaccatgttacatgtacactgcaccacagtctaaattcagaccagcatttgaaggactgcacatatttcatttcctctgatttatgctgtcacaaattgaaaatctgagtgtagttaggacaaaaaacaaagctaaccatatggcactaattttgattttaacattagtgtaacaaataaggtcgggacatatatttacatagatcccagacactcaagaattagcacagctgatgtaaaattctaaattaccatttacttccagatagagcagaggagaaacacctcactgcagtttcaacatgctttccaagaacaatatatacgacatatacattttcctgcctctctcttgtgacaatttctgttagaatttgttgggggtctgatggttaaaatcatgggcaaggccattctctacatcattgcttaatatttcaaaaataggtattagagcactatcagtggtccaaaattagttttagctacttattttgctccatgggttttgggcttttcaaagaatactatgtataatttgtaattgaaagcctttcagtaggatatccaaagttcaatgtgtttcaaaagggaaaacttttacttgtgggggtgggagttagatgtattaaaaaaacgaaactacaaaatccttttaagaaagtaataccaatttagactctagtttgtgttacgaggtattctttcaaattttttttaaaagccaactactgtcattaagaaataattttagatttgtgctctagcagaaaataactctgtacccatcaatcttattgccaacattccataccagtggtaggaaagatattctcattttttttattgaaccagacatttttataaaatactgattgactttgtacattatggatattatatatgaaattttgccttgtattctttcacttgaaaaaactccaaaattccacaatattttagtagttaacttcctattctttcttaaatttgatggagaagggaaaataaattgcagttattgattcttgccatctttgttttcttaaagaaatctatgcattttaaggataaaactaaagcatatgggtttacatgaaacatcaggatggattattgtacattgaattcattccgcgtataatgtggtatttcttactctgtccatcttggtagctgtcacttcaaaagaagacagtttccctgagtaatcatcacctacatggccattagagtatctatcggtgataattccatgatacagagtatcttggcattataaattcagtatcccaggacctaaacctttatgctacattttcgaagattttttaaaaataatattgttaatcagtaaaaaaaaaaaatatttttgatctaaacataggttctgcatatctgttagattttaaaaatgactggtgttttgtcttcacatttttgtctaagcaaggaatataagatttcaaataaaattttgaaccaaaaacatttataatgccgttctggtttttctattactttttatactgtactttaaaagcattaggctgaaagagtttattttggtggtcaaaaaaaatatgcttccactcatgtaactattttaaatgttaagaagtaaaataatgaaagatatgttaattactttattcagtaaagttttttaagaatgtttatctcagccagtaggcaaatacttggtgtaaaacaagttggtcttaaattgttgcaactcattagctagtgaagatattcatgtaaatatattttaggattgtaattaattttgaaaatgtagaaagctctttattccatgtaagtatgcaggatgcctgcttttttatgcagttgtggaaagaatgtaaaatgttttaatatattctttgttaatctgagaacttgatactgaatcgtttatgtgggagaaggaaggagtaacataaaacatgtttttatcactcaaagtaagcaatggaggtaacaaatattgtgcattttaacagtaatatttgaagatttgtagaatattcacctttaaaactagttagtatgcatttataattttaccagaatatacaactaacaattcaacagtgatgttctttgcatttgtggggagatgtgtgatgttcttggttttctggtttggaatggaacgtttatagccttgcctgtaaaaatgtgccccagcacttaatgagtgaccgtttgaatccatatgtagtcccattggtgctaatgagagtagctgctgtgaaacaggaataaaatgtgtctgttcacggaggtgcggtgtggatgcacctacaaggccaactctctgatcagggtgagggagagatggaagaattaacagatctaaagttggcctttgttgtctcaaattgggtttgtacacacatgcatgcatgtgtgtatacaactgtaatctggaacttcaggaagtaaaattatttgaagtttcttagtaaaaagtaattaggtataattccaaatagatttctgtataaattgtatctaactggattacaagtcagtttgacaatttacgatgtctcagtgatgtttctgcaataattgtgaaatgcattattgatttaaataatgctgacacgtactctttaaaagtgttctttaacactgactactaaactttaagttttaaaaaataggttttcatttatggctttttgtggttttagcactttaagaagtttaattttttgtaatttttaatatgctctttcagtgtatctcagcgggtactccagcttgtggcattcccatgtgactggggagaagacaaaattggtgtttagattctggaggagaaaaaatgagttacaatgtcaggtgtttttaaaaattccttttagagacagtcttttgggaaccaaagtattttactgtaaatctttaaaataacagaattcagtgctctttcatttgttaatgctgtccagatttttcacacagttatactcagttaatactagttttcagaacattagtccaaggctatttcaagttttccattgaatatatgcttatggttaaaagaaaaacgaatggttttataattctgtgtattttgtcatatgccttagcagagtaagtcatttttccattttacttaggaataagctttttcgaactgaaaattcatggtaaaataggatttctatctaatgttaatccattgcttatttgtattcaattccattgtctacagtttgcttaaatgttgactaagaatgattggagtcaataaatttgtactgtattttgcttcga

SEQ ID NO: 23261 - DNA, 7449 bp, Homo sapiens
  misc_feature 1..7449: note = ENST00000310826
  source 1..7449: mol_type = unassigned DNA
gtcaaattcaagatggatggaatcacagcggcagcggcggctgcggcgcgcgcgagccgagtgtgagcggaaaggggcccggcgtctgcctcgagactgaagaccgaagacatgaagtagaaacaatccaggaaggctttgggaagctatttgtgtgcgaggatcaaagtgataaactcaagccatggagggattactgcattacatcaaccctgcacacgccatttctctcctaagtgccctgaatgaggagcgtctcaaaggacagctgtgtgatgtgctgctgattgttggagaccaaaagttccgagctcataaaaacgtcttggctgccagcagcgaatactttcagagtttattcacaaataaggaaaatgagtcacaaactgtatttcagcttgacttctgtgagccagatgcttttgataatgttttaaactacatttattcttcctctctatttgttgagaagagcagccttgctgctgtgcaagaacttggctatagtcttgggatttcctttctgactaacatcgtttctaaaacacctcaagccccctttccaacgtgtcctaatagaaaaaaagtgtttgtagaagatgatgaaaacagttctcaaaagagaagtgtcattgtttgtcaaagtagaaacgaagcgcaaggaaaaactgttagtcaaaatcaacccgatgtaagccatacttcccggccctctcctagcattgcagtcaaggccaataccaataagccacatgtcccaaaaccaatagaaccacttcataatttgtcattaactgaaaagagttggccgaaagatagttctgtggtatatgcaaagtctcttgagcattctggatctttggatgatcctaatagaatcagtttggtgaaaagaaatgcagtgttgccttcaaagcctctgcaagacagagaagctatggatgataaaccaggtgtgagtggtcagcttccaaaaggaaaagctctagagctggctttgaagagaccacggccacctgttttgtctgtttgtagctcatcagagactccctatctattaaaagaaactaacaaaggaaatggtcaaggtgaagatagaaacttgttgtactattcaaagttaggcttagtgatcccatccagtggatctggttctggaaaccaaagcattgacaggagtggcccacttgttaagagtctcctcagacggtcattgtcgatggatagccaggttcctgtctattcaccttccatagatttgaaatcttcccagggatcatcttcggtgtccagtgatgcaccagggaatgtgttgtgtgctttatctcagaagtcatctttaaaagattgtagtgaaaaaacagccctagatgacaggcctcaagtgctacaaccgcatcgcctcaggtcctttagtgcttctcagtcaacagacagggagggagcttcccctgtgactgaggtgcgcataaagactgagcccagcagcccgctgtcggacccctcggacatcatccgcgtcactgtgggagatgcggcaacaacagcagctgcctcatcttcgtcggtcacaagagacctgtctctgaaaacagaagatgaccaaaaagacatgagcagactcccagcaaaaaggaggttccaagcggaccgaagattgccgtttaagaagttaaaggtgaatgagcacgggtctcctgtgtcagaagataattttgaggaaggctcaagccctactctccttgatgcagattttccagattctgatttgaataaagacgaatttggtgagttggaggggacgagaccaaacaaaaaatttaaatgcaaacattgccttaagatctttagatcaacagcaggtcttcaccgtcatgttaacatgtaccataacccagaaaagccctacgcttgtgacatctgtcacaagaggtttcacaccaacttcaaagtgtggacacactgtcagacccaacacggcatagtgaagaacccatcaccagcctctagttcacatgctgttttggatgaaaaattccaaagaaagctgattgacatagtgagagagagagaaattaagaaggccctgatcattaagttaaggcgcggcaagcctggttttcagggacagagtagctcccaagcacagcaagtcatcaagaggaacttgagatctcgagccaaaggagcttacatttgtacttactgcggaaaagcgtaccgctttctctctcaatttaagcagcatataaaaatgcatccaggagaaaaaccccttggagtaaataaagttgctaaaccaaaagagcatgctcctcttgcaagtccagtagaaaacaaggaggtttaccagtgccgcctctgtaatgctaagctctcttctctcctagagcaaggaagccacgagcggctgtgccggaacgcggccgtctgcccttactgcagcctcaggtttttctcgcccgagctgaagcaagaacacgagagcaagtgtgagtataagaagctgacctgcctcgagtgcatgcgcaccttcaagtcctctttcagcatctggcggcaccaggttgaagtccataatcagaacaacatggcacccaccgaaaacttttctttgcccgttttggaccacaatggtgatgtgactggttcttcaaggccccaatcccagcctgagcccaacaaagtaaaccacatcgtcaccacaaaagacgacaacgtgttcagtgattcttcagaacaagttaacttcgactcggaagattcctcttgtcttcccgaagaccttagtctttccaagcaactgaaaatccaagtcaaagaggagcctgtggaggaggctgaagaagaggcacccgaggccagcacagcccccaaagaagcgggtcctagcaaagaagccagcctgtggccctgcgagaagtgtgggaagatgttcacggtgcataagcagctggagcgtcaccaggagcttctgtgctctgtgaaaccatttatttgtcacgtgtgcaacaaagcttttcgcactaattttcgactctggagtcacttccaatcgcacatgtctcaggcttcagaggaatcggcacataaggaatctgaggtgtgccctgttcccacaaactctccctctccaccacctctgccaccgccaccaccactgcccaagatccagcctctggagcctgacagccccacaggcctgtccgaaaacccaactccagccacagaaaaactgtttgtgccccaagaatcagacacccttttttaccatgccccacccctttcagcaatcacatttaaaagacagtttatgtgtaaactttgccacaggacattcaagactgcatttagtctttggagtcacgaacaaacacacaattgaaagaccaacactttttacctatgggaggcagtccccagatttcaacctgaattgtgaaatgtgtcataagaaacaaaatattttttaaacaagaataataaaggttggagattgttacgcttgaaattaagttggaggcaaattgataattacttagtaatgtccttaactttagaaatacagcttttaaaatattgtggttctggaccttacaagaacaagatggtttgatttcattaatgttgaaattggattagtcttgattgtgtgcatggttcctcattccatggtgtcagtataatcatttaattgaggtttttggttttttattgattagtggaatactgtcgaagtattccttcttttaattattttagacacttgagttctagttaaatcttaaccatgttcttaagtccaaaataggaagaagtggagtagtttgcagtattgatttatatcttagactactttagcaataaaagataaatctcaactttaataagttatcctgacacttgataaaaataaatatttggtattttgtggtcatgtaaaacttctttttgtatgaaaattgtgagaaatttaaatcagcaatagtaacacttagatttttataaactaacaaaaacttgctctcagtcaatataataaatgatagttaaactctaaggaagacctgggaaatgaaaacaatttatggaagtcccctacagtcagtttataagggcttcagtagtgatagacattgttataaaaacttgtaccatgttacatgtacactgcaccacagtctaaattcagaccagcatttgaaggactgcacatatttcatttcctctgatttatgctgtcacaaattgaaaatctgagtgtagttaggacaaaaaacaaagctaaccatatggcactaattttgattttaacattagtgtaacaaataaggtcgggacatatatttacatagatcccagacactcaagaattagcacagctgatgtaaaattctaaattaccatttacttccagatagagcagaggagaaacacctcactgcagtttcaacatgctttccaagaacaatatatacgacatatacattttcctgcctctctcttgtgacaatttctgttagaatttgttgggggtctgatggttaaaatcatgggcaaggccattctctacatcattgcttaatatttcaaaaataggtattagagcactatcagtggtccaaaattagttttagctacttattttgctccatgggttttgggcttttcaaagaatactatgtataatttgtaattgaaagcctttcagtaggatatccaaagttcaatgtgtttcaaaagggaaaacttttacttgtgggggtgggagttagatgtattaaaaaaacgaaactacaaaatccttttaagaaagtaataccaatttagactctagtttgtgttacgaggtattctttcaaattttttttaaaagccaactactgtcattaagaaataattttagatttgtgctctagcagaaaataactctgtacccatcaatcttattgccaacattccataccagtggtaggaaagatattctcattttttttattgaaccagacatttttataaaatactgattgactttgtacattatggatattatatatgaaattttgccttgtattctttcacttgaaaaaactccaaaattccacaatattttagtagttaacttcctattctttcttaaatttgatggagaagggaaaataaattgcagttattgattcttgccatctttgttttcttaaagaaatctatgcattttaaggataaaactaaagcatatgggtttacatgaaacatcaggatggattattgtacattgaattcattccgcgtataatgtggtatttcttactctgtccatcttggtagctgtcacttcaaaagaagacagtttccctgagtaatcatcacctacatggccattagagtatctatcggtgataattccatgatacagagtatcttggcattataaattcagtatcccaggacctaaacctttatgctacattttcgaagattttttaaaaataatattgttaatcagtaaaaaaaaaaaatatttttgatctaaacataggttctgcatatctgttagattttaaaaatgactggtgttttgtcttcacatttttgtctaagcaaggaatataagatttcaaataaaattttgaaccaaaaacatttataatgccgttctggtttttctattactttttatactgtactttaaaagcattaggctgaaagagtttattttggtggtcaaaaaaaatatgcttccactcatgtaactattttaaatgttaagaagtaaaataatgaaagatatgttaattactttattcagtaaagttttttaagaatgtttatctcagccagtaggcaaatacttggtgtaaaacaagttggtcttaaattgttgcaactcattagctagtgaagatattcatgtaaatatattttaggattgtaattaattttgaaaatgtagaaagctctttattccatgtaagtatgcaggatgcctgcttttttatgcagttgtggaaagaatgtaaaatgttttaatatattctttgttaatctgagaacttgatactgaatcgtttatgtgggagaaggaaggagtaacataaaacatgtttttatcactcaaagtaagcaatggaggtaacaaatattgtgcattttaacagtaatatttgaagatttgtagaatattcacctttaaaactagttagtatgcatttataattttaccagaatatacaactaacaattcaacagtgatgttctttgcatttgtggggagatgtgtgatgttcttggttttctggtttggaatggaacgtttatagccttgcctgtaaaaatgtgccccagcacttaatgagtgaccgtttgaatccatatgtagtcccattggtgctaatgagagtagctgctgtgaaacaggaataaaatgtgtctgttcacggaggtgcggtgtggatgcacctacaaggccaactctctgatcagggtgagggagagatggaagaattaacagatctaaagttggcctttgttgtctcaaattgggtttgtacacacatgcatgcatgtgtgtatacaactgtaatctggaacttcaggaagtaaaattatttgaagtttcttagtaaaaagtaattaggtataattccaaatagatttctgtataaattgtatctaactggattacaagtcagtttgacaatttacgatgtctcagtgatgtttctgcaataattgtgaaatgcattattgatttaaataatgctgacacgtactctttaaaagtgttctttaacactgactactaaactttaagttttaaaaaataggttttcatttatggctttttgtggttttagcactttaagaagtttaattttttgtaatttttaatatgctctttcagtgtatctcagcgggtactccagcttgtggcattcccatgtgactggggagaagacaaaattggtgtttagattctggaggagaaaaaatgagttacaatgtcaggtgtttttaaaaattccttttagagacagtcttttgggaaccaaagtattttactgtaaatctttaaaataacagaattcagtgctctttcatttgttaatgctgtccagatttttcacacagttatactcagttaatactagttttcagaacattagtccaaggctatttcaagttttccattgaatatatgcttatggttaaaagaaaaacgaatggttttataattctgtgtattttgtcatatgccttagcagagtaagtcatttttccattttacttaggaataagctttttcgaactgaaaattcatggtaaaataggatttctatctaatgttaatccattgcttatttgtattcaattccattgtctacagtttgcttaaatgttgactaagaatgattggagtcaataaatttgtactgtattttgcttcga

SEQ ID NO: 23262 - DNA, 5806 bp, Homo sapiens
  misc_feature 1..5806: note = ENST00000398499
  source 1..5806: mol_type = unassigned DNA
tgggatgacgtcaaattcaagatggatggaatcacagcggcagcggcggctgcggcgcgcgcgagccgagtgtgagcggaaaggggcccggcgtctgcctcgagactgaagaccgaagacatgaagtagaaacaatccaggaaggctttgggaagctatttgtgtgcgaggatcaaagtgcagaagagcagagaaatcaaaagtttttgaggattcggtgtacacagccaccagccacaaacagtcttgctggattatctcgtgatcgtcagcagttgtgattttccccctttttacttacattcttgatggatggagcattttatatttttagataaactcaagccatggagggattactgcattacatcaaccctgcacacgccatttctctcctaagtgccctgaatgaggagcgtctcaaaggacagctgtgtgatgtgctgctgattgttggagaccaaaagttccgagctcataaaaacgtcttggctgccagcagcgaatactttcagagtttattcacaaataaggaaaatgagtcacaaactgtatttcagcttgacttctgtgagccagatgcttttgataatgttttaaactacatttattcttcctctctatttgttgagaagagcagccttgctgctgtgcaagaacttggctatagtcttgggatttcctttctgactaacatcgtttctaaaacacctcaagccccctttccaacgtgtcctaatagaaaaaaagtgtttgtagaagatgatgaaaacagttctcaaaagagaagtgtcattgtttgtcaaagtagaaacgaagcgcaaggaaaaactgttagtcaaaatcaacccgatgtaagccatacttcccggccctctcctagcattgcagtcaaggccaataccaataagccacatgtcccaaaaccaatagaaccacttcataatttgtcattaactgaaaagagttggccgaaagatagttctgtggtatatgcaaagtctcttgagcattctggatctttggatgatcctaatagaatcagtttggtgaaaagaaatgcagtgttgccttcaaagcctctgcaagacagagaagctatggatgataaaccaggtgtgagtggtcagcttccaaaaggaaaagctctagagctggctttgaagagaccacggccacctgttttgtctgtttgtagctcatcagagactccctatctattaaaagaaactaacaaaggaaatggtcaaggtgaagatagaaacttgttgtactattcaaagttaggcttagtgatcccatccagtggatctggttctggaaaccaaagcattgacaggagtggcccacttgttaagagtctcctcagacggtcattgtcgatggatagccaggttcctgtctattcaccttccatagatttgaaatcttcccagggatcatcttcggtgtccagtgatgcaccagggaatgtgttgtgtgctttatctcagaagtcatctttaaaagattgtagtgaaaaaacagccctagatgacaggcctcaagtgctacaaccgcatcgcctcaggtcctttagtgcttctcagtcaacagacagggagggagcttcccctgtgactgaggtgcgcataaagactgagcccagcagcccgctgtcggacccctcggacatcatccgcgtcactgtgggagatgcggcaacaacagcagctgcctcatcttcgtcggtcacaagagacctgtctctgaaaacagaagatgaccaaaaagacatgagcagactcccagcaaaaaggaggttccaagcggaccgaagattgccgtttaagaagttaaaggtgaatgagcacgggtctcctgtgtcagaagataattttgaggaaggctcaagccctactctccttgatgcagattttccagattctgatttgaataaagacgaatttggtgagttggaggggacgagaccaaacaaaaaatttaaatgcaaacattgccttaagatctttagatcaacagcaggtcttcaccgtcatgttaacatgtaccataacccagaaaagccctacgcttgtgacatctgtcacaagaggtttcacaccaacttcaaagtgtggacacactgtcagacccaacacggcatagtgaagaacccatcaccagcctctagttcacatgctgttttggatgaaaaattccaaagaaagctgattgacatagtgagagagagagaaattaagaaggccctgatcattaagttaaggcgcggcaagcctggttttcagggacagagtagctcccaagcacagcaagtcatcaagaggaacttgagatctcgagccaaaggagcttacatttgtacttactgcggaaaagcgtaccgctttctctctcaatttaagcagcatataaaaatgcatccaggagaaaaaccccttggagtaaataaagttgctaaaccaaaagagcatgctcctcttgcaagtccagtagaaaacaaggaggtttaccagtgccgcctctgtaatgctaagctctcttctctcctagagcaaggaagccacgagcggctgtgccggaacgcggccgtctgcccttactgcagcctcaggtttttctcgcccgagctgaagcaagaacacgagagcaagtgtgagtataagaagctgacctgcctcgagtgcatgcgcaccttcaagtcctctttcagcatctggcggcaccaggttgaagtccataatcagaacaacatggcacccaccgaaaacttttctttgcccgttttggaccacaatggtgatgtgactggttcttcaaggccccaatcccagcctgagcccaacaaagtaaaccacatcgtcaccacaaaagacgacaacgtgttcagtgattcttcagaacaagttaacttcgactcggaagattcctcttgtcttcccgaagaccttagtctttccaagcaactgaaaatccaagtcaaagaggagcctgtggaggaggctgaagaagaggcacccgaggccagcacagcccccaaagaagcgggtcctagcaaagaagccagcctgtggccctgcgagaagtgtgggaagatgttcacggtgcataagcagctggagcgtcaccaggagcttctgtgctctgtgaaaccatttatttgtcacgtgtgcaacaaagcttttcgcactaattttcgactctggagtcacttccaatcgcacatgtctcaggcttcagaggaatcggcacataaggaatctgaggtgtgccctgttcccacaaactctccctctccaccacctctgccaccgccaccaccactgcccaagatccagcctctggagcctgacagccccacaggcctgtccgaaaacccaactccagccacagaaaaactgtttgtgccccaagaatcagacacccttttttaccatgccccacccctttcagcaatcacatttaaaagacagtttatgtgtaaactttgccacaggacattcaagactgcatttagtctttggagtcacgaacaaacacacaattgaaagaccaacactttttacctatgggaggcagtccccagatttcaacctgaattgtgaaatgtgtcataagaaacaaaatattttttaaacaagaataataaaggttggagattgttacgcttgaaattaagttggaggcaaattgataattacttagtaatgtccttaactttagaaatacagcttttaaaatattgtggttctggaccttacaagaacaagatggtttgatttcattaatgttgaaattggattagtcttgattgtgtgcatggttcctcattccatggtgtcagtataatcatttaattgaggtttttggttttttattgattagtggaatactgtcgaagtattccttcttttaattattttagacacttgagttctagttaaatcttaaccatgttcttaagtccaaaataggaagaagtggagtagtttgcagtattgatttatatcttagactactttagcaataaaagataaatctcaactttaataagttatcctgacacttgataaaaataaatatttggtattttgtggtcatgtaaaacttctttttgtatgaaaattgtgagaaatttaaatcagcaatagtaacacttagatttttataaactaacaaaaacttgctctcagtcaatataataaatgatagttaaactctaaggaagacctgggaaatgaaaacaatttatggaagtcccctacagtcagtttataagggcttcagtagtgatagacattgttataaaaacttgtaccatgttacatgtacactgcaccacagtctaaattcagaccagcatttgaaggactgcacatatttcatttcctctgatttatgctgtcacaaattgaaaatctgagtgtagttaggacaaaaaacaaagctaaccatatggcactaattttgattttaacattagtgtaacaaataaggtcgggacatatatttacatagatcccagacactcaagaattagcacagctgatgtaaaattctaaattaccatttacttccagatagagcagaggagaaacacctcactgcagtttcaacatgctttccaagaacaatatatacgacatatacattttcctgcctctctcttgtgacaatttctgttagaatttgttgggggtctgatggttaaaatcatgggcaaggccattctctacatcattgcttaatatttcaaaaataggtattagagcactatcagtggtccaaaattagttttagctacttattttgctccatgggttttgggcttttcaaagaatactatgtataatttgtaattgaaagcctttcagtaggatatccaaagttcaatgtgtttcaaaagggaaaacttttacttgtgggggtgggagttagatgtattaaaaaaacgaaactacaaaatccttttaagaaagtaataccaatttagactctagtttgtgttacgaggtattctttcaaattttttttaaaagccaactactgtcattaagaaataattttagatttgtgctctagcagaaaataactctgtacccatcaatcttattgccaacattccataccagtggtaggaaagatattctcattttttttattgaaccagacatttttataaaatactgattgactttgtacattatggatattatatatgaaattttgccttgtattctttcacttgaaaaaactccaaaattccacaatattttagtagttaacttcctattctttcttaaatttgatggagaagggaaaataaattgcagttattgattcttgccatctttgttttcttaaagaaatctatgcattttaaggataaaactaaagcatatgggtttacatgaaacatcaggatggattattgtacattgaattcattccgcgtataatgtggtatttcttactctgtccatcttggtagctgtcacttcaaaagaagacagtttccctgagtaatcatcacctacatggccattagagtatctatcggtgataattccatgatacagagtatcttggcattataaattcagtatcccaggacctaaacctttatgctacattttcgaagattttttaaaaataatattgttaatcagtaaaaaaaaaaaatatttttgatctaaacataggttctgcatatctgttagattttaaaaatgactggtgttttgtcttcacatttttgtctaagcaaggaatataagatttcaaataaaattttgaaccaaaaaca

SEQ ID NO: 23263 - DNA, 5608 bp, Homo sapiens
  misc_feature 1..5608: note = ENST00000398511
  source 1..5608: mol_type = unassigned DNA
gcgatgacctcatccctggtgtgggatgacgtcaaattcaagatggatggaatcacagcggcagcggcggctgcggcgcgcgcgagccgagtgtgagcggaaaggggcccggcgtctgcctcgagactgaagaccgataaactcaagccatggagggattactgcattacatcaaccctgcacacgccatttctctcctaagtgccctgaatgaggagcgtctcaaaggacagctgtgtgatgtgctgctgattgttggagaccaaaagttccgagctcataaaaacgtcttggctgccagcagcgaatactttcagagtttattcacaaataaggaaaatgagtcacaaactgtatttcagcttgacttctgtgagccagatgcttttgataatgttttaaactacatttattcttcctctctatttgttgagaagagcagccttgctgctgtgcaagaacttggctatagtcttgggatttcctttctgactaacatcgtttctaaaacacctcaagccccctttccaacgtgtcctaatagaaaaaaagtgtttgtagaagatgatgaaaacagttctcaaaagagaagtgtcattgtttgtcaaagtagaaacgaagcgcaaggaaaaactgttagtcaaaatcaacccgatgtaagccatacttcccggccctctcctagcattgcagtcaaggccaataccaataagccacatgtcccaaaaccaatagaaccacttcataatttgtcattaactgaaaagagttggccgaaagatagttctgtggtatatgcaaagtctcttgagcattctggatctttggatgatcctaatagaatcagtttggtgaaaagaaatgcagtgttgccttcaaagcctctgcaagacagagaagctatggatgataaaccaggtgtgagtggtcagcttccaaaaggaaaagctctagagctggctttgaagagaccacggccacctgttttgtctgtttgtagctcatcagagactccctatctattaaaagaaactaacaaaggaaatggtcaaggtgaagatagaaacttgttgtactattcaaagttaggcttagtgatcccatccagtggatctggttctggaaaccaaagcattgacaggagtggcccacttgttaagagtctcctcagacggtcattgtcgatggatagccaggttcctgtctattcaccttccatagatttgaaatcttcccagggatcatcttcggtgtccagtgatgcaccagggaatgtgttgtgtgctttatctcagaagtcatctttaaaagattgtagtgaaaaaacagccctagatgacaggcctcaagtgctacaaccgcatcgcctcaggtcctttagtgcttctcagtcaacagacagggagggagcttcccctgtgactgaggtgcgcataaagactgagcccagcagcccgctgtcggacccctcggacatcatccgcgtcactgtgggagatgcggcaacaacagcagctgcctcatcttcgtcggtcacaagagacctgtctctgaaaacagaagatgaccaaaaagacatgagcagactcccagcaaaaaggaggttccaagcggaccgaagattgccgtttaagaagttaaaggtgaatgagcacgggtctcctgtgtcagaagataattttgaggaaggctcaagccctactctccttgatgcagattttccagattctgatttgaataaagacgaatttggtgagttggaggggacgagaccaaacaaaaaatttaaatgcaaacattgccttaagatctttagatcaacagcaggtcttcaccgtcatgttaacatgtaccataacccagaaaagccctacgcttgtgacatctgtcacaagaggtttcacaccaacttcaaagtgtggacacactgtcagacccaacacggcatagtgaagaacccatcaccagcctctagttcacatgctgttttggatgaaaaattccaaagaaagctgattgacatagtgagagagagagaaattaagaaggccctgatcattaagttaaggcgcggcaagcctggttttcagggacagagtagctcccaagcacagcaagtcatcaagaggaacttgagatctcgagccaaaggagcttacatttgtacttactgcggaaaagcgtaccgctttctctctcaatttaagcagcatataaaaatgcatccaggagaaaaaccccttggagtaaataaagttgctaaaccaaaagagcatgctcctcttgcaagtccagtagaaaacaaggaggtttaccagtgccgcctctgtaatgctaagctctcttctctcctagagcaaggaagccacgagcggctgtgccggaacgcggccgtctgcccttactgcagcctcaggtttttctcgcccgagctgaagcaagaacacgagagcaagtgtgagtataagaagctgacctgcctcgagtgcatgcgcaccttcaagtcctctttcagcatctggcggcaccaggttgaagtccataatcagaacaacatggcacccaccgaaaacttttctttgcccgttttggaccacaatggtgatgtgactggttcttcaaggccccaatcccagcctgagcccaacaaagtaaaccacatcgtcaccacaaaagacgacaacgtgttcagtgattcttcagaacaagttaacttcgactcggaagattcctcttgtcttcccgaagaccttagtctttccaagcaactgaaaatccaagtcaaagaggagcctgtggaggaggctgaagaagaggcacccgaggccagcacagcccccaaagaagcgggtcctagcaaagaagccagcctgtggccctgcgagaagtgtgggaagatgttcacggtgcataagcagctggagcgtcaccaggagcttctgtgctctgtgaaaccatttatttgtcacgtgtgcaacaaagcttttcgcactaattttcgactctggagtcacttccaatcgcacatgtctcaggcttcagaggaatcggcacataaggaatctgaggtgtgccctgttcccacaaactctccctctccaccacctctgccaccgccaccaccactgcccaagatccagcctctggagcctgacagccccacaggcctgtccgaaaacccaactccagccacagaaaaactgtttgtgccccaagaatcagacacccttttttaccatgccccacccctttcagcaatcacatttaaaagacagtttatgtgtaaactttgccacaggacattcaagactgcatttagtctttggagtcacgaacaaacacacaattgaaagaccaacactttttacctatgggaggcagtccccagatttcaacctgaattgtgaaatgtgtcataagaaacaaaatattttttaaacaagaataataaaggttggagattgttacgcttgaaattaagttggaggcaaattgataattacttagtaatgtccttaactttagaaatacagcttttaaaatattgtggttctggaccttacaagaacaagatggtttgatttcattaatgttgaaattggattagtcttgattgtgtgcatggttcctcattccatggtgtcagtataatcatttaattgaggtttttggttttttattgattagtggaatactgtcgaagtattccttcttttaattattttagacacttgagttctagttaaatcttaaccatgttcttaagtccaaaataggaagaagtggagtagtttgcagtattgatttatatcttagactactttagcaataaaagataaatctcaactttaataagttatcctgacacttgataaaaataaatatttggtattttgtggtcatgtaaaacttctttttgtatgaaaattgtgagaaatttaaatcagcaatagtaacacttagatttttataaactaacaaaaacttgctctcagtcaatataataaatgatagttaaactctaaggaagacctgggaaatgaaaacaatttatggaagtcccctacagtcagtttataagggcttcagtagtgatagacattgttataaaaacttgtaccatgttacatgtacactgcaccacagtctaaattcagaccagcatttgaaggactgcacatatttcatttcctctgatttatgctgtcacaaattgaaaatctgagtgtagttaggacaaaaaacaaagctaaccatatggcactaattttgattttaacattagtgtaacaaataaggtcgggacatatatttacatagatcccagacactcaagaattagcacagctgatgtaaaattctaaattaccatttacttccagatagagcagaggagaaacacctcactgcagtttcaacatgctttccaagaacaatatatacgacatatacattttcctgcctctctcttgtgacaatttctgttagaatttgttgggggtctgatggttaaaatcatgggcaaggccattctctacatcattgcttaatatttcaaaaataggtattagagcactatcagtggtccaaaattagttttagctacttattttgctccatgggttttgggcttttcaaagaatactatgtataatttgtaattgaaagcctttcagtaggatatccaaagttcaatgtgtttcaaaagggaaaacttttacttgtgggggtgggagttagatgtattaaaaaaacgaaactacaaaatccttttaagaaagtaataccaatttagactctagtttgtgttacgaggtattctttcaaattttttttaaaagccaactactgtcattaagaaataattttagatttgtgctctagcagaaaataactctgtacccatcaatcttattgccaacattccataccagtggtaggaaagatattctcattttttttattgaaccagacatttttataaaatactgattgactttgtacattatggatattatatatgaaattttgccttgtattctttcacttgaaaaaactccaaaattccacaatattttagtagttaacttcctattctttcttaaatttgatggagaagggaaaataaattgcagttattgattcttgccatctttgttttcttaaagaaatctatgcattttaaggataaaactaaagcatatgggtttacatgaaacatcaggatggattattgtacattgaattcattccgcgtataatgtggtatttcttactctgtccatcttggtagctgtcacttcaaaagaagacagtttccctgagtaatcatcacctacatggccattagagtatctatcggtgataattccatgatacagagtatcttggcattataaattcagtatcccaggacctaaacctttatgctacattttcgaagattttttaaaaataatattgttaatcagtaaaaaaaaaaaatatttttgatctaaacataggttctgcatatctgttagattttaaaaatgactggtgttttgtcttcacatttttgtctaagcaaggaatataagatttcaaataaaattttgaaccaaaaaca

SEQ ID NO: 23264 - DNA, 631 bp, Homo sapiens
  misc_feature 1..631: note = ENST00000465968
  source 1..631: mol_type = unassigned DNA; mol_type = unassigned DNA
acagcggcagcggcggctgcggcgcgcgcgagccgagtgtgagcggaaaggggcccggcgtctgcctcgagactgaagaccgaagacatgaagtagaaacaatccaggaaggctttgggaagctatttgtgtgcgaggatcaaagtgagcaaggaagccacgagcggctgtgccggaacgcggccgtctgcccttactgcagcctcaggtttttctcgcccgagctgaagcaagaacacgagagcaagtgtgagtataagaagctgacctgcctcgagtgcatgcgcaccttcaagtcctctttcagcatctggcggcaccaggttgaagtccataatcagaacaacatggcacccaccgaaaacttttctttgcccgttttggaccacaatggtgatgtgactggttcttcaaggccccaatcccagcctgagcccaacaaagtaaaccacatcgtcaccacaaaagacgacaacgtgttcagtgattcttcagaacaagttaacttcgactcggaagattcctcttgtcttcccgaagaccttagtctttccaagcaactgaaaatccaagtcaaagaggagcctgtggaggaggctgaagaagaggcacccgaggccagcacagcccc

SEQ ID NO: 23265 - DNA, 607 bp, Homo sapiens
  misc_feature 1..607: note = ENST00000425521
  source 1..607: mol_type = unassigned DNA; mol_type = unassigned DNA
aaacagatgtgggagcagggacgagagttgtggagtttaagtaccatgctggacctgaggatatactgtgatggaaccgttcagtaggtacctgagaggctggagcctcaagagtctaaacagagatacagatttgggaatcatcgtccagtagtgattaaagtcacaaggtctaatagaaaaagcaaagaatactgccacgttttggggctctgtaacggatgctggagaaataaagataaactcaagccatggagggattactgcattacatcaaccctgcacacgccatttctctcctaagtgccctgaatgaggagcgtctcaaaggacagctgtgtgatgtgctgctgattgttggagaccaaaagttccgagctcataaaaacgtcttggctgccagcagcgaatactttcagagtttattcacaaataaggaaaatgagtcacaaactgtatttcagcttgacttctgtgagccagatgcttttgataatgttttaaactacatttattcttcctctctatttgttgagaagagcagccttgctgctgtgcaagaacttggctatagtcttgggatttcctttctgactaacatcgtttc

SEQ ID NO: 23266 - DNA, 463 bp, Homo sapiens
  misc_feature 1..463: note = ENST00000449949
  source 1..463: mol_type = unassigned DNA; mol_type = unassigned DNA
gtcaaattcaagatggatggaatcacagcggcagcggcggctgcggcgcgcgcgagccgagtgtgagcggaaaggggcccggcgtctgcctcgagactgaagaccgagcccccgcagaccttgtctgggacttcccggcggtcccgcagagcatagcaccctccgccggccaggagccctgctgctcggccggcgaccgtctccccgcttggaggagcccccttccccccgtccgagaagacatgaagtagaaacaatccaggaaggctttgggaagctatttgtgtgcgaggatcaaagtgataaactcaagccatggagggattactgcattacatcaaccctgcacacgccatttctctcctaagtgccctgaatgaggagcgtctcaaaggacagctgtgtgatgtgctgctgattgttggagaccaaaagttccgagctcataaaaacgtcttggctg

SEQ ID NO: 23267 - DNA, 555 bp, Homo sapiens
  misc_feature 1..555: note = ENST00000398497
  source 1..555: mol_type = unassigned DNA; mol_type = unassigned DNA
tgggatgacgtcaaattcaagatggatggaatcacagcggcagcggcggctgcggcgcgcgcgagccgagtgtgagcggaaaggggcccggcgtctgcctcgagactgaagaccgaagacatgaagtagaaacaatccaggaaggctttgggaagctatttgtgtgcgaggatcaaagtgatctgaaaaatacactgaggagaaagtacacccggcaacaaagctcgccttatctgacagcagaagagcagagaaatcaaaagtttttgaggattcggtgtacacagccaccagccacaaacagtcttgctggattatctcgtgatcgtcagcagttgtgattttccccctttttacttacattcttgatggatggagcattttatatttttagataaactcaagccatggagggattactgcattacatcaaccctgcacacgccatttctctcctaagtgccctgaatgaggagcgtctcaaaggacagctgtgtgatgtgctgctgattgttggagaccaaaagttccgagctcataaaaacgtcttggctg

SEQ ID NO: 23268 - DNA, 5185 bp, Homo sapiens
  misc_feature 1..5185: note = ENST00000245663
  source 1..5185: mol_type = unassigned DNA; mol_type = unassigned DNA
ggcgagcgcgcagctcggacccgcccggacgcagcgccctcccggcggcggcggcgatcaccggcgccggcccggcggccgcggcgcccgccctcgcccgcgccccatggggtcacagagtctgtagaagaggcgacaccagggcttccaaatgaacaaccgaaaggaagatatggaaatcacgtcccactaccggcacctgctgcgggagctcaacgagcagaggcagcacggcgtcctgtgcgacgtctgcgtggtcgtggagggcaaggtcttcaaggcgcacaagaacgtcctgctgggcagcagccgctacttcaagacgctctactgccaggtgcagaagacgtcggagcaggccacggtcacgcacctggacatcgtcacggcccagggcttcaaggccatcatcgacttcatgtactcagcgcacctggcgctcaccagcaggaacgtcatcgaggtgatgtcagccgccagcttcctgcagatgacggacatcgtgcaagcctgccacgacttcatcaaggcggcgctggacatcagcatcaagtcggacgcctcagatgagcttgcggagttcgagatcggcgcctcgtccagcagcagcacggaagctctcatctcggccgtgatggctgggaggagcatctccccgtggctggcacggcgaacgagtcctgccaattcttccggagactcggccatcgccagctgtcacgacggagggagcagctacgggaaagaggatcaggagcccaaggccgatggccctgatgatgtttcttcacagcctctatggcctggagacgtgggctacgggcctctgcgcatcaaggaagagcaggtttcaccgtctcagtacggagggagcgagctgccttctgccaaggacggtgcagtacagaactctttctcagagcagagtgctggtgatgcctggcagcccacgggccgaaggaagaatcggaaaaacaaagagaccgtccggcacatcacacagcaggtggaagatgacagccgggccagctccccggtgccgtccttcctgccgacgtcggggtggccgttcagcagccgagactcaaatgcggacctgtccgtcaccgaagccagcagctccgacagccgaggagagagggccgagctctatgcacaggtggaggagggtctcctgggaggagaagccagctatctgggccctcccctcaccccagagaaggacgacgccctgcatcaggccaccgcggtggccaacctgcgcgcggcgctcatgagtaagaacagcctgctgtcgctgaaggccgacgtgctgggggatgacggctccctgctgttcgagtacctgcccagaggggcccactcgctgtccctgaatgagttcacggtgatcaggaagaagttcaagtgtccgtactgcagcttctcggccatgcaccagtgcatcctcaagcgacacatgcgctcgcacacgggagagcggccctacccctgcgagatctgcgggaagaagttcacgcggcgcgagcacatgaagcgccacacgctggtccacagcaaggacaagaagtatgtgtgcaaggtgtgcagccgcgtcttcatgtccgccgccagcgtgggcatcaggcatggctccaggcgccacggtgtgtgcaccgactgtgctggccgcggcatggccgggcccctggaccatggcggcggaggcggcgagggctctccagaggcgctgttcccaggcgacgggccctatctggaggaccctgaggacccacgaggggaggcggaggagctgggcgaggacgacgagggcctggcccctgaggatgcgctgttggcggacgacaaggatgaggaagactcgccgcggccgcgcagccccccaggaggccctgacaaggacttcgcctggctctcctaggcccgcccgccggcagggtcggtggctgcctcgctccgtccacccgtgtgtgtgtccggtgggtctccactgcggggccagggccacgctcacccctctcgcggcccctcctctgcttccccctgaacccaccccccacggaaaccagccctgcgggctaagcaggtgcgaccccagcaagaggggtgctctgggaccagacatgaagtgagttgggggagggcacagggtgggtttgagtgaagggagagcacggtcctaagtccccagcaggtggtgcgggtgtgtgagtggcccctgtgatggccagcctggcttggacacgtgatgggcctgtggccgggtccagtgggcactgggcggggtggtgtgttcggcccagaggcccctggcctgagcaggtgcagagttttacagacacccggtcagcccggctggagcccgccctcccctcccctagcagccaggtcactgcctgtggctgcagccgtggcccgtggtgcagccgtggcccatggcagcctgtagaatccaggtgcacagagagccctgccaccgtcttacctctgggctttggtgcttaacacacaacacagctgcagaccctgctggaggccgagggctccaggtgctatcttaggtggacacagccctgggggctccttccaggaggggaccctcagccctgtgccccccaccacttcaggccacaccaggttccctctgcaagggcctcggctcagtcgtgtgcacttcctcggagagccttgggctgccacgtccaccccgggctctgcccgtcctgttctgcccatggcccagcccggccgctcctgctgacccctcctggacgggctggagctgggctcctgcctttgctgctaacactggaggcggtgttcctaactgcagtgtgctgcttacacctccccgcgtgggtaaccaaatttttaagtagtcagagacatatcgaggtagttacataaaattattttgtttggcattatttttctcactcgaagaaactatatagggttgtttttcctttagcttgtgctcaagtcctcttgctgtgttttcagaagcactcacatgttctttcttttcctgagtgaaaagcaaaggtcccacggtgtgtgctgtggtgcaccgcctggctttgggggtcccggaggcaggctgcctagactcacagcctcgggaccgttgccacggcctgtcttctcgttcaggcctgcctctgacagcactcaccatgaggacattccatccttcaccccctcctctggcacaggccaccactgcggtgctgtgccttcagatgggaggtgggcgcggtggcctcctccttccctccaggacctgcccgtgtgaagaccccccggagtgctgagcttcagggctgcgtggaaagagtttttactctctttttctagcctgtataccaggcttttccccacattgtcaggtagagcaccagcttccctgaccgctgctgctcggggagggctggggctggccgggggtcctgtggaggagtacatggaggactccaggtacagcgcaggagtcacggcttttgttttttgacattggcccccggttctaccaatgacagggtgccctggctggagctgtcatcacacacacccctcagctcggaggctgtgggctcctcaaagctggagaaagaggccaagatttttctgcacacggagtgtggggataggagccgggccaagcgctggcccctcagcggtgagccctgcccactcttaccgagcaaggtgggtggctctggcacgagtcccccagggggagagcatggctaccagggagctgcagcggagccctccagccctcaccccaggccagccccaccccggcctctttgagaattctcagaactttgtacctttcccctgatttttaaaccctttttctaaacagactgactttcttacaaaatgcatttggaaaccagacctttgctacccaccaatgtctctgggttttgtaccagtccctgctctcaggccaccctgcccaggacccaggcccgcctccccctccacactcaggatgtcctgctccatctggccggctcactccgtgtggcctgcctttgctgaccgttttggggttccccgccggagctacaggggcattttcttccctaaaaccaacagtgtcccactgacctccccaagtgtttgctgcgtggcagatttcctgttcttgttcgcagtttgccgactgaagagtgtgggatttccgaggcccaggtgagcacgtccatctcaggaggcgtggagggaaaagacatgtcatgaagggttttttttatgtgactgatttttttttaaatcgatgttcaaactaataaatatttttttatgaagaggaaaaatgtgtagattacatttcacattttgtatttttgtttgtgtctgtttgtattttggtgtttacaacaccaaagtgggaaatacagtccattggggatggtgttatttgggggcggggagggggcagggacaccacgatttttctgtcaagctctggatcctgaccaggttgtacactggggctctctgagctttgggacacaggacactgccagggctacgtagggaactgactcagaagacgcagcttactgcttccaactttgcacatcttcctctttaaaaaactgagaaaatgcaaaaactggaactttttgcaatattataaaagaagtaatcttattttagctcattctgtgacatgtgcgactcttaagaaagccatacttaatggtggtggttttttttagatcttatattgtgttttgtatgcagcccttttagaactacttgtagtgagggtgctgtgtgtgcttttcttaaatatttatttttttcaacatgctttcaacctgtcaacaaaaacaaaacacacaaaaaaagggcagtgtttgaagattgttgatttttttctggggataatctatattatattgacttcctattacttattataaacctgtgtttgtattggagatgtgtctactattgggggaagaggttctcgtaatcgctcggtgggaaatcatggctctgccgtcctgcctctctgtggccgtgggttcacgtggcctctgcggtgagtctccaagtttctgcctaggcgcctgtgcgtttcctttctgtgacgggattagcttagacatccttgcaaagcgatcactttcaataaattgggaaattgctgctccagcag

SEQ ID NO: 23269 - DNA, 431 bp, Homo sapiens
  misc_feature 1..431: note = ENST00000460757
  source 1..431: mol_type = unassigned DNA; mol_type = unassigned DNA
atgcggacctgtccgtcaccgaagccagcagctccgacagccgaggagagagggccgagctctatgcacaggtggaggagggtctcctgggaggagaagccagctatctgggccctcccctcaccccagagaaggacgacgccctgcatcaggccaccgcggtggccaacctgcgcgcggcgctcatgagtaagaacagcctgctgtcgctgaaggccgacgtgctgggggatgacggctccctgctgttcgagtacctgcccagaggggcccactcgctgtcccgagtcgttggctgaatgcgagctcgtccgggtcgcgcaggggccgggggtctttgtgctccagagacgggctcgggcgccccctgccggcccctctgtcgccttcgtgctgaggctcgtttcgcgcaagggagatgggggcggccg

SEQ ID NO: 23270 - DNA, 629 bp, Homo sapiens
  misc_feature 1..629: note = ENST00000480766
  source 1..629: mol_type = unassigned DNA; mol_type = unassigned DNA
tgccgacgtcggggtggccgttcagcagccgagactcaagctgtggcccaagtcaaggaaggatatttggagttgggtgtggtgttgcctgtgcctgtacttcagctacttgggaggctgaggcgggaggatggcttgagcccaagatgtccaggctgcagtgagccgtgattgcactgctgccctccagcctggacgacagagccagaccctgtctcttaattaaaggaaagaagaaatggaggtgtcctagcaggtgctgcccgtggggaggttcctccaggatgaagcctggaaatgaacgtgggagggcgtgagtggacagaggaggacgaaagacagcaagccgcagggtgggaggccctgaaaaatgtcgcagatgccgtgtgtgggtggcgcagtgggagacgctgcctgcccccctggctggagggcttcctgggcagggcgggtgtggcctcttctcctgaccctggtccctcctctccgtcgctgagagatctgcgagagccgggagtgaacacagctcgataatacgttaacttttatcattgtggtagaacatacataatgtaaaccttaccattttaaccattttcaaatgtacatttcactggcattaaagtcac

SEQ ID NO: 23271 - DNA, 2335 bp, Homo sapiens
  misc_feature 1..2335: note = ENST00000302995
  source 1..2335: mol_type = unassigned DNA; mol_type = unassigned DNA
gacggacggacggacggaccgagcagccccggcgagcgcgcagctcggacccgcccggacgcagcgccctcccggcggcggcggcgatcaccggcgccggcccggcggccgcggcgcccgccctcgcccgcgccccatggggtcacagagtctgtagaagaggcgacaccagggcttccaaatgaacaaccgaaaggaagatatggaaatcacgtcccactaccggcacctgctgcgggagctcaacgagcagaggcagcacggcgtcctgtgcgacgtctgcgtggtcgtggagggcaaggtcttcaaggcgcacaagaacgtcctgctgggcagcagccgctacttcaagacgctctactgccaggtgcagaagacgtcggagcaggccacggtcacgcacctggacatcgtcacggcccagggcttcaaggccatcatcgacttcatgtactcagcgcacctggcgctcaccagcaggaacgtcatcgaggtgatgtcagccgccagcttcctgcagatgacggacatcgtgcaagcctgccacgacttcatcaaggcggcgctggacatcagcatcaagtcggacgcctcagatgagcttgcggagttcgagatcggcgcctcgtccagcagcagcacggaagctctcatctcggccgtgatggctgggaggagcatctccccgtggctggcacggcgaacgagtcctgccaattcttccggagactcggccatcgccagctgtcacgacggagggagcagctacgggaaagaggatcaggagcccaaggccgatggccctgatgatgtttcttcacagcctctatggcctggagacgtgggctacgggcctctgcgcatcaaggaagagcaggtttcaccgtctcagtacggagggagcgagctgccttctgccaaggacggtgcagtacagaactctttctcagagcagagtgctggtgatgcctggcagcccacgggccgaaggaagaatcggaaaaacaaagagaccgtccggcacatcacacagcaggtggaagatgacagccgggccagctccccggtgccgtccttcctgccgacgtcggggtggccgttcagcagccgagactcaaatgcggacctgtccgtcaccgaagccagcagctccgacagccgaggagagagggccgagctctatgcacaggtggaggagggtctcctgggaggagaagccagctatctgggccctcccctcaccccagagaaggacgacgccctgcatcaggccaccgcggtggccaacctgcgcgcggcgctcatgagtaagaacagcctgctgtcgctgaaggccgacgtgctgggggatgacggctccctgctgttcgagtacctgcccagaggggcccactcgctgtccctgaatgagttcacggtgatcaggaagaagttcaagtgtccgtactgcagcttctcggccatgcaccagtgcatcctcaagcgacacatgcgctcgcacacgggagagcggccctacccctgcgagatctgcgggaagaagttcacgcggcgcgagcacatgaagcgccacacgctggtccacagcaaggacaagaagtatgtgtgcaaggtgtgcagccgcgtcttcatgtccgccgccagcgtgggcatcaggcatggctccaggcgccacggtgtgtgcaccgactgtgctggccgcggcatggccgggcccctggaccatggcggcggaggcggcgagggctctccagaggcgctgttcccaggcgacgggccctatctggaggaccctgaggacccacgaggggaggcggaggagctgggcgaggacgacgagggcctggcccctgaggatgcgctgttggcggacgacaaggatgaggaagactcgccgcggccgcgcagccccccaggaggccctgacaaggacttcgcctggctctcctaggcccgcccgccggcagggtcggtggctgcctcgctccgtccacccgtgtgtgtgtccgggtgccctggctggagctgtcatcacacacacccctcagctcggaggctgtgggctcctcaaagctggagaaagaggccaagatttttctgcacacggagtgtggggataggagccgggccaagcgctggcccctcagcggtgagccctgcccactcttaccgagcaagtttgccgactgaagagtgtgggatttccgaggcccaggtgagcacgtccatctcaggaggcgtggagggaaaagacatgtcatgaagggttttttttatgtgactgatttttttttaaatcgatgttcaaactaataaatatttttttatgaagagg

SEQ ID NO: 23272 - DNA, 5198 bp, Homo sapiens
  misc_feature 1..5198: note = ENST00000395104
  source 1..5198: mol_type = unassigned DNA; mol_type = unassigned DNA
gatgggctctcgcgtgggtcgtcctcccactggccgcactctgtgccccatggccctcctgcgccccgcccggcgtcctctcacggcctctgtctgtgctgagcttgggtaactcttgttcttacctccacagagtctgtagaagaggcgacaccagggcttccaaatgaacaaccgaaaggaagatatggaaatcacgtcccactaccggcacctgctgcgggagctcaacgagcagaggcagcacggcgtcctgtgcgacgtctgcgtggtcgtggagggcaaggtcttcaaggcgcacaagaacgtcctgctgggcagcagccgctacttcaagacgctctactgccaggtgcagaagacgtcggagcaggccacggtcacgcacctggacatcgtcacggcccagggcttcaaggccatcatcgacttcatgtactcagcgcacctggcgctcaccagcaggaacgtcatcgaggtgatgtcagccgccagcttcctgcagatgacggacatcgtgcaagcctgccacgacttcatcaaggcggcgctggacatcagcatcaagtcggacgcctcagatgagcttgcggagttcgagatcggcgcctcgtccagcagcagcacggaagctctcatctcggccgtgatggctgggaggagcatctccccgtggctggcacggcgaacgagtcctgccaattcttccggagactcggccatcgccagctgtcacgacggagggagcagctacgggaaagaggatcaggagcccaaggccgatggccctgatgatgtttcttcacagcctctatggcctggagacgtgggctacgggcctctgcgcatcaaggaagagcaggtttcaccgtctcagtacggagggagcgagctgccttctgccaaggacggtgcagtacagaactctttctcagagcagagtgctggtgatgcctggcagcccacgggccgaaggaagaatcggaaaaacaaagagaccgtccggcacatcacacagcaggtggaagatgacagccgggccagctccccggtgccgtccttcctgccgacgtcggggtggccgttcagcagccgagactcaaatgcggacctgtccgtcaccgaagccagcagctccgacagccgaggagagagggccgagctctatgcacaggtggaggagggtctcctgggaggagaagccagctatctgggccctcccctcaccccagagaaggacgacgccctgcatcaggccaccgcggtggccaacctgcgcgcggcgctcatgagtaagaacagcctgctgtcgctgaaggccgacgtgctgggggatgacggctccctgctgttcgagtacctgcccagaggggcccactcgctgtccctgaatgagttcacggtgatcaggaagaagttcaagtgtccgtactgcagcttctcggccatgcaccagtgcatcctcaagcgacacatgcgctcgcacacgggagagcggccctacccctgcgagatctgcgggaagaagttcacgcggcgcgagcacatgaagcgccacacgctggtccacagcaaggacaagaagtatgtgtgcaaggtgtgcagccgcgtcttcatgtccgccgccagcgtgggcatcaggcatggctccaggcgccacggtgtgtgcaccgactgtgctggccgcggcatggccgggcccctggaccatggcggcggaggcggcgagggctctccagaggcgctgttcccaggcgacgggccctatctggaggaccctgaggacccacgaggggaggcggaggagctgggcgaggacgacgagggcctggcccctgaggatgcgctgttggcggacgacaaggatgaggaagactcgccgcggccgcgcagccccccaggaggccctgacaaggacttcgcctggctctcctaggcccgcccgccggcagggtcggtggctgcctcgctccgtccacccgtgtgtgtgtccggtgggtctccactgcggggccagggccacgctcacccctctcgcggcccctcctctgcttccccctgaacccaccccccacggaaaccagccctgcgggctaagcaggtgcgaccccagcaagaggggtgctctgggaccagacatgaagtgagttgggggagggcacagggtgggtttgagtgaagggagagcacggtcctaagtccccagcaggtggtgcgggtgtgtgagtggcccctgtgatggccagcctggcttggacacgtgatgggcctgtggccgggtccagtgggcactgggcggggtggtgtgttcggcccagaggcccctggcctgagcaggtgcagagttttacagacacccggtcagcccggctggagcccgccctcccctcccctagcagccaggtcactgcctgtggctgcagccgtggcccgtggtgcagccgtggcccatggcagcctgtagaatccaggtgcacagagagccctgccaccgtcttacctctgggctttggtgcttaacacacaacacagctgcagaccctgctggaggccgagggctccaggtgctatcttaggtggacacagccctgggggctccttccaggaggggaccctcagccctgtgccccccaccacttcaggccacaccaggttccctctgcaagggcctcggctcagtcgtgtgcacttcctcggagagccttgggctgccacgtccaccccgggctctgcccgtcctgttctgcccatggcccagcccggccgctcctgctgacccctcctggacgggctggagctgggctcctgcctttgctgctaacactggaggcggtgttcctaactgcagtgtgctgcttacacctccccgcgtgggtaaccaaatttttaagtagtcagagacatatcgaggtagttacataaaattattttgtttggcattatttttctcactcgaagaaactatatagggttgtttttcctttagcttgtgctcaagtcctcttgctgtgttttcagaagcactcacatgttctttcttttcctgagtgaaaagcaaaggtcccacggtgtgtgctgtggtgcaccgcctggctttgggggtcccggaggcaggctgcctagactcacagcctcgggaccgttgccacggcctgtcttctcgttcaggcctgcctctgacagcactcaccatgaggacattccatccttcaccccctcctctggcacaggccaccactgcggtgctgtgccttcagatgggaggtgggcgcggtggcctcctccttccctccaggacctgcccgtgtgaagaccccccggagtgctgagcttcagggctgcgtggaaagagtttttactctctttttctagcctgtataccaggcttttccccacattgtcaggtagagcaccagcttccctgaccgctgctgctcggggagggctggggctggccgggggtcctgtggaggagtacatggaggactccaggtacagcgcaggagtcacggcttttgttttttgacattggcccccggttctaccaatgacagggtgccctggctggagctgtcatcacacacacccctcagctcggaggctgtgggctcctcaaagctggagaaagaggccaagatttttctgcacacggagtgtggggataggagccgggccaagcgctggcccctcagcggtgagccctgcccactcttaccgagcaaggtgggtggctctggcacgagtcccccagggggagagcatggctaccagggagctgcagcggagccctccagccctcaccccaggccagccccaccccggcctctttgagaattctcagaactttgtacctttcccctgatttttaaaccctttttctaaacagactgactttcttacaaaatgcatttggaaaccagacctttgctacccaccaatgtctctgggttttgtaccagtccctgctctcaggccaccctgcccaggacccaggcccgcctccccctccacactcaggatgtcctgctccatctggccggctcactccgtgtggcctgcctttgctgaccgttttggggttccccgccggagctacaggggcattttcttccctaaaaccaacagtgtcccactgacctccccaagtgtttgctgcgtggcagatttcctgttcttgttcgcagtttgccgactgaagagtgtgggatttccgaggcccaggtgagcacgtccatctcaggaggcgtggagggaaaagacatgtcatgaagggttttttttatgtgactgatttttttttaaatcgatgttcaaactaataaatatttttttatgaagaggaaaaatgtgtagattacatttcacattttgtatttttgtttgtgtctgtttgtattttggtgtttacaacaccaaagtgggaaatacagtccattggggatggtgttatttgggggcggggagggggcagggacaccacgatttttctgtcaagctctggatcctgaccaggttgtacactggggctctctgagctttgggacacaggacactgccagggctacgtagggaactgactcagaagacgcagcttactgcttccaactttgcacatcttcctctttaaaaaactgagaaaatgcaaaaactggaactttttgcaatattataaaagaagtaatcttattttagctcattctgtgacatgtgcgactcttaagaaagccatacttaatggtggtggttttttttagatcttatattgtgttttgtatgcagcccttttagaactacttgtagtgagggtgctgtgtgtgcttttcttaaatatttatttttttcaacatgctttcaacctgtcaacaaaaacaaaacacacaaaaaaagggcagtgtttgaagattgttgatttttttctggggataatctatattatattgacttcctattacttattataaacctgtgtttgtattggagatgtgtctactattgggggaagaggttctcgtaatcgctcggtgggaaatcatggctctgccgtcctgcctctctgtggccgtgggttcacgtggcctctgcggtgagtctccaagtttctgcctaggcgcctgtgcgtttcctttctgtgacgggattagcttagacatccttgcaaagcgatcactttcaataaattgggaaattgctgctccagc

SEQ ID NO: 23273 - DNA, 2613 bp, Homo sapiens
  misc_feature 1..2613: note = ENST00000340433
  source 1..2613: mol_type = unassigned DNA; mol_type = unassigned DNA
accattggccttttccatgaagaagaggcaacattgagtggcggacaacactttttggcatctctccaattcagctgttagcatctcctagtgtcttcttcacagctaacagctttggctacttgctcatgacactccgtctctgatcacagagcaaatccactgtctccattggtttccagtactagtactcaattctactcaatcccacctgattccaggagacataatggagaagtgcacgaaatcatcatctaccatgcaggtagagccttcctttcttcaggcagagaatctgattctgcggcttcaaatgcagcatccaaccacggagaacactgctaaaaggggccaagtcatgcctgccctggccaccacagtgatgcctgtaccatactcacttgagcatctcacccagtttcatggtgaccctgccaattgctcagagttcctcactcaggtgactacctacttgacagctctccaaatctctaatcctgcaaatgatgcccagatcaaactcttttttgattacctatctcagcagttagaaagttgtgggatcatatctgggcctgacaagagtaccttactgaagcaatatgagaatcttattcttgagttccagcagtcatttggtaaacccacaaaacaggaaatcaatcctctgatgaatgctaagtttgacaaaggagacaactcctctcagcaggaccctgctactttccacctcctcgctcaaaatctgatctgtaatgaaaccaatcagagtggtcagttcgaaaaggcactagctgatcccaaccaggatgaagagagtgtcactgatatgatggacaatcttccagacctgatcactcagtgcattcagttggacaagaaacatagtgacaggccagagctcctacagtcagagacccagctcccattgttggcttccttgatccaacaccaagccctctttagccccacagatccaccacccaagaaagggcctatacagctgcgagaaggccagctgcctctcaccccagccaaacgagcccgccagcaagaaactcagttgtgcctctactgcagccaatctggtcacttcacaagagattgccttgccaaacgttctcgagctccggcaacgacaaataacacagctcaccagtaagaggagaccaggaaagtcactttttaaacttacatcccagccttactgatttataacctgcattaacttttaaaatacagatggggaactgtgacaccactttataggcagttatgaactgacacgctttgggggaatttaaacaatcagatcttgttcattggcaaattacccctcacgaaacctaacccgagaatgatgaaaacaattcacaggcactttctgcagttgggattaattctccaagagcaccaaaaacctgcaggcaaaactttgcccagtctgagccaatgaaaataaccgtggaagcacattgggaaccttatcctgaccaatgggtgacatctgggttgagtttgtgtcccaaatcctgaatcttgtgtgcctagaaatgagcccaagacttttaccttcacctttattggtctgtatcctagtttcctgttggcttaggacctttggctgaagtccaaatgacattcctataatctgcttatattctcctcctagagtttggaccatgcttcacctattgactacgatctaccttcagcataaatcaaccttcctggaaccacagctctgccacccttccatagagctatatgttttgtttccatctaaagactcatgctttcccaacaaacagaacctcctggctatttacaaaccagattgaatgggcatttgaatactgcttggaactgttggtccctttttctttgcaggctagcccatcaggcaggtgtatgcttttagccaagcccaccaattccaacttattcctctcttctccaacaaccctacttgaggttccagcatgtcttatagccaagtcaatatgctctaggataaggatttctgaaaggtatttagtgagagttggggatggtgtgtcataattactgtatctgtagcatgtccttgctgccttggacaagggacctggccaaataaatctccactgaagactgacagccagaccctgcagtagtttctaactctagaagcctcaatgtagtcaccatctaggattactactcattgctattgagctctacctttatggaccacctctgaagtccttcatctaattgaggatcttaaaaaacaatgaatggcaaaaaacttcctacactatctcatctgaaaaatcctggggcacatacattaaaaccatttgtgcacaaaactcaggaagtcgggattttattgcttatgttttactcttggtacacaccagctttgtgtagattcctgatgcttctgaacaaaagtagtgttatgctagaaaggcaaaactccctaaaatgttaaaactgttcagcaatgatcactgctggtaattaccagccctctgttccctgcttcttgtttctgatgtatgtccccaaaatggatatcctggagaaatatcagtaatcacatattccctagcaaccatcaaggcc

SEQ ID NO: 23274 - DNA, 4933 bp, Homo sapiens
  misc_feature 1..4933: note = ENST00000372336
  source 1..4933: mol_type = unassigned DNA; mol_type = unassigned DNA
cgcagtcggggggaggcggcggcagcggcagcggctgcgggcagcgcgcggggcgcagggcgcggggcgatcaccgtcggggctcgggaggcgggcagtgggcacaggctccccggtgcccgcccctccgctgcggaggggggccgcgagcgggcggccggggaggggccggcaccgccgccacaaaatgagcctgctgtcggccatcgacacgagcgccgcctcggtgtaccagcccgcccagctgctcaactgggtctacctgtcgctgcaggacacgcaccaggctagcgccttcgatgccttccggcccgagccgaccgccggcgccgcacccccggagctggccttcggcaagggccgccccgagcagctgggctcgcccctgcactccagctatctcaacagcttcttccagctgcagcgcggagaggcgctgagcaacagtgtgtacaagggcgcctcaccctatggctccctcaacaacatcgccgatggcctcagctccctcaccgagcacttctcagacctgaccctcacctccgaggctcgcaagcccagcaagcggcccccacccaactacctgtgccacctgtgcttcaacaaaggacactacatcaaggactgcccccaggcacgccccaaaggcgagggcctgactccataccagggcaaaaagcgctgcttcggcgagtacaagtgtcccaagtgcaagagaaaatggatgagcgggaactcctgggccaacatggggcaggagtgcatcaagtgccacatcaacgtgtatccacacaagcagagacccctggagaagcccgacggcctggacgtgtccgaccagagcaaggagcacccgcagcacctctgcgagaagtgcaaggtcctgggctactactgccgtcgcgtgcagtgacgggctgcccgcccgcacccagagccaccccccgccagcccgaggagacgctgcttccctgtgctactccgaggggctgcgtgtcgccctgtgcatggggtgccctcgcaggcctgcggggctgggccgggggctcttagcgtccttgtcttgtgtgtgttgacaaacagtgttactgacattgctgccccccacaggccagggaaagcagggagtctggggctttttgcaggcgggcctggggtctcagtggaggggacaaaggcaagcaaaagcccatgtccaggagccctgggtgtccccacaggctcgcctctgagagcctctttggggtgagcagccttgtattggccacaggtgcactaaattgactgtgaatcccaaacctccccagaccagccaggccgcctgcccccacccagaaccttccggtttgccctgtatggaaagccactctcagaaatccctctttcctgagtcagcaatcgtggcaaggggacatgtgttccaacagcggctggggagtggacctctctgtcccttgcccaccttaagccccaaatccagaccccctctgacatcactggcattgcacctgggtgtgcccccctccccacgctatggacccagataggaggggttaggcatgggggaggcacagaatgctggagagatgcgtcctggtgaacgtggggcagcccctcccacgacccccaccagactgccttaggttttgtcagccccactccctttccttcccctctgcctcccacccactctgggggtccacatcaagatagctgggcccagtgtggaagcccagcgtgtctgttccagcagaaaggacacaagcctggtgttctggagacctcggctcaagtctttgccctgctgccgacgcattgtgtcaccttgggcaaggacttcgcatctccaggcctcagtttccccattagttaaatgacagcataacactagagagcagagggcccatttcagctctgttgttctgggattcaggctggccggtgctgtgtcctggagctttatttggggagtttcacccagaatggtgggagaaacctcccaggtgccaggtaccccgcatcgtgacccttcacttggtgtcttaggaagtcaagctgagggatgctgagtcctcccctgctggcccctgcagccccagccctgcttttcatcccccacccctgcaaacatggaggagccccctccttctcacctcggtctcctagcccctgacatggagaaccctgagacaagccacagaacccctcttttctaaaatggagacaataatttcctacctcccaagggagcagagaggcctcgtggcacgtccgtggccagggagcccactgtcctggctggcggcgggatcgtgcgctcctctgtctcccggatgagaagccccgtttccatggtcttgacccttcctttctcccggctgtcagaactgggtctcttgattttgcccctacattatgcctctgtgggaaaaaaaaaaaatcagaccaagaaatgagcctgaaattcagtgtttaccatggctcaaggatgcccatctggtgtccagttgccttttgtattcaaatgaaaatgctttgtacaactgaggagttacagtgaagtgttaaccaggggtccagggagcgagttgaaaagatggagtgagtgtatttgcagccagggagctgcagggtggatttgaggggccataccctctgagcacttaaaaaaggtatttgctccaggccaggcagcaggctgtggacacccttgccaccactggggactgccactgaggactccccgagcacgttgttccccgtcttctccaaggtgttgaggtgagctggggttggccccggcccaggcttctgtcccaaggagaagctgccactgacagtcatcctaccgcactgctaaagagaatgttcgcagtggtgggcggcgtgcctgtgccaacccttccagggacccggccatgggggaccttggcccaaggatgcctggggcctgccagctgtgctgcaaaggtggggggcccacaccctaaaactaacccaggccccagaccactggaggccagggcttccctgcacgggctaaggggagttgggatatcaccccaaagtgaccttgccagtgagctgttcagcaggtagccactgccctgccatctgtgcagagccagccaccttgggggctggggttcccgctttgaggcccaccttccatactccccttgactcggctctggctgaactggggaactctcttgtggtcagcaaagcccctgccatgcaggccaggtgccattgagaattaagtgctcagagggccaggagcccaggggatgggaaagtgtgtggttttagtacgttcaaaagggacaatcgcttgcagttggtagatctagcgatctagttgggagataatggtgtttaccccatatgaagtattcaatagttctacttgtgaatttgtatttattttgagttatacttgacacagaattccttttttaaaaaaatatgtgtgtattttggaaaaaaaattcatagatgttaaaatttctgcatggttaccagtttttctcacaacactgaatttggtagcttttcccgaaaaaatcttcacagtaattttttgtctgtatatatttgagggcctttttttaaaaaaaaaaaaagaaaagaaaaatataattgtttgatttttgagattaaaacaaacaaaaagagaggcattttcaaaatttcagaactttcaggagggcaagagaatatcaaacaaagatttctggaagtattttgccaaccttctggttgagctgcaagaaaatatttatggtgagaacttttctgtttcccgttattgggtttttggttggtttttgtttgttttttactatgctttggtctgtaaaaatatgcaactgaactacattcagaaggaaatattgtctacatagaatattatatgaagttggtacataattctgatgaggaaaaaaaatctttgcaattctttaagccatattgttgtttttctgtgttgttttccctggatgaaaatatcagtattaagtagacagcatattattcaagtgtttagacttattaatatgttcttgtcctgtatttatacatatgtgtattttggaaagtattgccttttttaagggaagctataattcgatacatagtgaaaaagggaatggtgacccctttgtgcctcttccactgaggataacaaacagcattgtaatccattctcttgcaccttcttcttcttatcttgttattacggttttattaattttgtagagggacagggagtgggcaaggggaagaagcagcttatttgactaaccagcccctctgtggtccaccagcgtcttggcttggtgggagggctctcaatcagcagggccccaggagggaagaagaagtggggcaaagcctggcctcgccgctcgggagctttgccatctgagccacgcctcctccaggccatgctccttgaacttggaaatgtcaaccggagcccttacaccagccctccagcatctaatagacttgaatctactctaaacgaatatttaatccaacctcactacattgtagctcagtccaacgactaaccctgaaatgggggtgttccagccttcagcgagatggccaagcggtcccctgggggctgtggcagcgggcttatccttctctgttgccaaccttgccgtccgacctcctccgcccccatgcggtgaccccgtccgtgtctgtgtctgtccatacgtgtgagtccagctaaaaagacaaaacagaacccgtgggcccagctcggaaggtgcgtggagaaggctccgacgtctccgaagtgcagcccttgggatggcattccgttgtgtgccttattcctggagaatctgtatacggctcgcctatagaaatatagcctcttcatgctgtattaaaaggacttttaaaagcaaaa

SEQ ID NO: 23275 - DNA, 906 bp, Homo sapiens
  misc_feature 1..906: note = ENST00000372333
  source 1..906: mol_type = unassigned DNA; mol_type = unassigned DNA
acccatctgtggccttcacttcctccccttgtgggggttttctctgcaaagatgcaagaggtgtgttcgggggaggacacacatgggggtcactttccttccagacctgggcacaccggcgctgagcaacagtgtgtacaagggcgcctcaccctatggctccctcaacaacatcgccgatggcctcagctccctcaccgagcacttctcagacctgaccctcacctccgaggctcgcaagcccagcaagcggcccccacccaactacctgtgccacctgtgcttcaacaaaggacactacatcaaggactgcccccaggcacgccccaaaggcgagggcctgactccataccagggcaaaaagcgctgcttcggcgagtacaagtgtcccaagtgcaagagaaaatggatgagcgggaactcctgggccaacatggggcaggagtgcatcaagtgccacatcaacgtgtatccacacaagcagagacccctggagaagcccgacggcctggacgtgtccgaccagagcaaggagcacccgcagcacctctgcgagaagtgcaaggtcctgggctactactgccgtcgcgtgcagtgacgggctgcccgcccgcacccagagccaccccccgccagcccgaggagacgctgcttccctgtgctactccgaggggctgcgtgtcgccctgtgcatggggtgccctcgcaggcctgcggggctgggccgggggctcttagcgtccttgtcttgtgtgtgttgacaaacagtgttactgacattgctgccccccacaggccagggaaagcagggagtctggggctttttgcaggcgggcctggggtctcagtggaggggacaaaggcaagcaaaagcccatgtccaggagccctgggtgtccccacagg

SEQ ID NO: 23276 - DNA, 3134 bp, Homo sapiens
  misc_feature 1..3134: note = ENST00000414563
  source 1..3134: mol_type = unassigned DNA; mol_type = unassigned DNA
cgcccacccggcccggaggaggcggacccactcggagcgccgcgcgcgcgccgggctgagccttgcaaacaagtgtctgtgctgtgtccccgcggccctcctcgcgccggggccgcttcctccgggtaggagggagcaagggagccctcgccgcgcggcccgcgagccgccgccgccctcggcccgcgcatccccgcgcgggggccgcggattcgactaggctgccaggcgcagcgacaccgggtcgcggtgcgagcggcgccccggctctcgccgagaggctcctgacagaaaaacgtgcgtggttgtccccacccctgggaggggttgccggtgccgcgcgcggccgcccagtcgccagcgctctctcctgggaggatccgctgccggaggaaggagtggacccaacctggccgcgccgcagaagtggctcccgaggaagccggcgccggggccgccgcctcgtgtcccctcggggcgcagtgctcgggggtcggcgggccagagccgaggcgcggccggggagccgggggctgcggggccgagcgggcagccgcgcgagggggcgggcgctcggcgacccgggggccggccgggctgagccccgcgccccgggacgcgggctggaagcgacggaggagtgctgccgcgggctgcggaccagcgccgtcccctcacggagcggggattctgctatgacagttgggctccccggagggttaacctgggtgtcctcggcaaagttgtcgccgagccgggagcccgtgtaggggccgcggcgccgcggctcggggggcggccgggcggccggcggcggtcgtggctcggcggggcccgcgcggccggggggctcctgggggtgtgcgcccccagccggctgccctcgtggatgcctcccggcggcggcgggcccatgaaagactgcgagtacagccagatcagcacccacagctcctcccccatggagtcgccccacaagaagaagaaaatcgcggcccggaggaaatgggaggtgttcccgggaagaaacaagttcttctgtaacgggaggatcatgatggcccggcagacgggcgtcttctacctgacgctcgtcctcatcctggtcactagcggactcttcttcgccttcgactgtccgtacctggcggtgaaaatcacccctgccatccctgcagtcgctggcatcctgttcttctttgtgatggggaccctgctccgcaccagcttcagcgaccccggagtcctcccacgagccacgcctgatgaagccgccgatctggaaaggcaaatagatatcgcaaacggcaccagttcaggggggtaccgcccgcctcccagaaccaaagaagtcatcatcaatggccagaccgtgaaacttaaatactgtttcacctgcaagattttccggccccctcgcgcctcccattgcagcctttgtgataactgcgtagaacggtttgatcaccactgtccctgggtaggcaactgtgtggggaaaagaaactacagatttttttatatgtttattttatctctgtcttttctgacagtctttatatttgcattcgttatcacccacgtcattcttcgttcacagcaaacaggattcctaaatgcccttaaggacagtcctgcaagcgtcctggaggctgtggtgtgcttcttctctgtctggtccatcgttggcctctcaggattccacacctacttgatcagctccaaccagacaacaaatgaggacattaaaggatcctggtcaaataaaagaggtaaagaaaattacaatccctacagctacggaaatatctttaccaactgctgtgttgccctgtgtgggcccatctcaccaagcctgatcgacagaagagggtacatccagcccgacacgccgcagccagcagcaccctccaatggcatcaccatgtacggggccacgcagtcacagagtgacatggctgcagccacgcccctgctgcagagcgagcccagcctcaccagcgacgagctgcacctgcccgggaagcctggcctgggcacgccctgcgccagcctcacactgggcccgcccacaccgcccgcctccatgcccaacctcgccgaggccacgctcgcggacgtgatgccccggaaagatgagcacatgggccaccagttcctgacgcccgatgaggcgccctcgccccccaggctactggcggcgggcagccccctggcgcacagccgcaccatgcacgtgctgggcctggccagccaggactccctgcatgaggactctgtgcgcggcctggtgaagctcagctccgtgtgacccacatggccccaggccgggggacaccagaggctcctccatgggcagcaggagtgagcggaggggtgtgtcccacagcgactttcccagccaatgccacggtggagatgacagccccaggtctggggtacagagaccacttaggatggcacagggtggctggccccggatgctgagagcttggtttcatttgaattttcttccccaacctgagtgctttgacaacaatggaaatagagaagtggctgctttcttttggtgaccctccaggggtggaatcggagtgtgtctgcccgcccttgtgacagacacacggaaggcttctgacgcttgtggccagactgcaattgcacttatgtgttatgctactaatatttgaaacagacctgccattccatttgttaattaaaaaaaaaaaaaatcctaaagggaaaaaaccgaccaggtgtggatctgcatgccacgctgccgtctgtgttacagtggtgttgctatttccaaggaagtgctgctttctttttctttttttaattttgtgaattttcaagtgctgttttgttggaagacagtgcaacgaactgagactaatggacagtgtcatcactcagcttactgggctgaggcgtctgtggagaggtggcaccggggctgcagagggcggctggggttccgtcgtgtcgggtgtcacttcaccttctgtttggccgctcgatgaggtctcgtgttgagatattgtgtgccacaacccccacagtcttcacctccgtgtgtgatgaaacttcccgtggacagccaataaaatgacgtcctctgttattttgga

SEQ ID NO: 23277 - DNA, 7380 bp, Homo sapiens
  misc_feature 1..7380: note = ENST00000359775
  source 1..7380: mol_type = unassigned DNA; mol_type = unassigned DNA
cgcccacccggcccggaggaggcggacccactcggagcgccgcgcgcgcgccgggctgagccttgcaaacaagtgtctgtgctgtgtccccgcggccctcctcgcgccggggccgcttcctccgggtaggagggagcaagggagccctcgccgcgcggcccgcgagccgccgccgccctcggcccgcgcatccccgcgcgggggccgcggattcgactaggctgccaggcgcagcgacaccgggtcgcggtgcgagcggcgccccggctctcgccgagaggctcctgacagaaaaacgtgcgtggttgtccccacccctgggaggggttgccggtgccgcgcgcggccgcccagtcgccagcgctctctcctgggaggatccgctgccggaggaaggagtggacccaacctggccgcgccgcagaagtggctcccgaggaagccggcgccggggccgccgcctcgtgtcccctcggggcgcagtgctcgggggtcggcgggccagagccgaggcgcggccggggagccgggggctgcggggccgagcgggcagccgcgcgagggggcgggcgctcggcgacccgggggccggccgggctgagccccgcgccccgggacgcgggctggaagcgacggaggagtgctgccgcgggctgcggaccagcgccgtcccctcacggagcggggattctgctatgacagttgggctccccggagggttaacctgggtgtcctcggcaaagttgtcgccgagccgggagcccgtgtaggggccgcggcgccgcggctcggggggcggccgggcggccggcggcggtcgtggctcggcggggcccgcgcggccggggggctcctgggggtgtgcgcccccagccggctgccctcgtggatgcctcccggcggcggcgggcccatgaaagactgcgagtacagccagatcagcacccacagctcctcccccatggagtcgccccacaagaagaagaaaatcgcggcccggaggaaatgggaggtgttcccgggaagaaacaagttcttctgtaacgggaggatcatgatggcccggcagacgggcgtcttctacctgacgctcgtcctcatcctggtcactagcggactcttcttcgccttcgactgtccgtacctggcggtgaaaatcacccctgccatccctgcagtcgctggcatcctgttcttctttgtgatggggaccctgctccgcaccagcttcagcgaccccggagtcctcccacgagccacgcctgatgaagccgccgatctggaaaggcaaatagatatcgcaaacggcaccagttcaggggggtaccgcccgcctcccagaaccaaagaagtcatcatcaatggccagaccgtgaaacttaaatactgtttcacctgcaagattttccggccccctcgcgcctcccattgcagcctttgtgataactgcgtagaacggtttgatcaccactgtccctgggtaggcaactgtgtggggaaaagaaactacagatttttttatatgtttattttatctctgtcttttctgacagtctttatatttgcattcgttatcacccacgtcattcttcgttcacagcaaacaggattcctaaatgcccttaaggacagtcctgcaagcgtcctggaggctgtggtgtgcttcttctctgtctggtccatcgttggcctctcaggattccacacctacttgatcagctccaaccagacaacaaatgaggacattaaaggatcctggtcaaataaaagaggtaaagaaaattacaatccctacagctacggaaatatctttaccaactgctgtgttgccctgtgtgggcccatctcaccaagcctgatcgacagaagagggtacatccagcccgacacgccgcagccagcagcaccctccaatggcatcaccatgtacggggccacgcagtcacagagtgacatgtgcgaccaagaccagtgcattcagagcaccaaattcgttttgcaggctgcagccacgcccctgctgcagagcgagcccagcctcaccagcgacgagctgcacctgcccgggaagcctggcctgggcacgccctgcgccagcctcacactgggcccgcccacaccgcccgcctccatgcccaacctcgccgaggccacgctcgcggacgtgatgccccggaaagatgagcacatgggccaccagttcctgacgcccgatgaggcgccctcgccccccaggctactggcggcgggcagccccctggcgcacagccgcaccatgcacgtgctgggcctggccagccaggactccctgcatgaggactctgtgcgcggcctggtgaagctcagctccgtgtgacccacatggccccaggccgggggacaccagaggctcctccatgggcagcaggagtgagcggaggggtgtgtcccacagcgactttcccagccaatgccacggtggagatgacagccccaggtctggggtacagagaccacttaggatggcacagggtggctggccccggatgctgagagcttggtttcatttgaattttcttccccaacctgagtgctttgacaacaatggaaatagagaagtggctgctttcttttggtgaccctccaggggtggaatcggagtgtgtctgcccgcccttgtgacagacacacggaaggcttctgacgcttgtggccagactgcaattgcacttatgtgttatgctactaatatttgaaacagacctgccattccatttgttaattaaaaaaaaaaaaaatcctaaagggaaaaaaccgaccaggtgtggatctgcatgccacgctgccgtctgtgttacagtggtgttgctatttccaaggaagtgctgctttctttttctttttttaattttgtgaattttcaagtgctgttttgttggaagacagtgcaacgaactgagactaatggacagtgtcatcactcagcttactgggctgaggcgtctgtggagaggtggcaccggggctgcagagggcggctggggttccgtcgtgtcgggtgtcacttcaccttctgtttggccgctcgatgaggtctcgtgttgagatattgtgtgccacaacccccacagtcttcacctccgtgtgtgatgaaacttcccgtggacagccaataaaatgacgtcctctgttattttggatctgcgtacggttatccttaatagcataaatgaaaacaaagtcatccagatggggagagtttttcttgaaatgtccctagcgaggaatggtccccagacaaccaaaagtcaaatctttgaactgggagatatttatagaataatttcttagataagaggcaagttttccatcatttattttctttaattatctctttttgacaccatcttagtggaatttgctctacgtttgcagtttgccgtgcaacagttgatcggaagtagggagaggggaggggacgctcagggagaaggttctgtcgggcgtcttctgggcttccttctgtgttaacgtgtcactcaatcccagaagtgcaacttgaggtcctagtaaaggtatcagaaaatgaggaggagaaatcggcttacagtctaagctgagatcatgtaggtcatcatccttcctagacactgatcagaatgaaattaagaaaatgaccactttgttcactttcattggtcacctagaagggaacgaactggctctggacttagggagtgtgtcactatgggggcagccacaggggacacagcaactcctctcctggcttctttccagaccataaatctaacagctaaagctactcaagttcaaagccatggccttgctccttataaccatatgaaagacaagacacattgaccaatgatacaagtaacccaagtgatttgcatttatggaaaaaggctattactcctgagaaagagttgccattttatataaaagaaaagaagataggaaaaagaaaagcacacaagttttatttggaatgaaggcaattcacaggtcacaaaataattcatgctgaaagggcctgcagagttcttgcactgtgatgtcttcgagccatctttattgtcatgctgcatgcacgtatagaaaatggaataggtccattctatgtagccatttttgattttctgaaccacctaactacttgtacccacctgcaatgtgtaattcatggggcagtgccctccttacacaaccgcacacgctcacaggcaccaactcacagggattctccttgtccacgctacctgtgagcccaaagtgacagccccacaaaggagcttccacaacttcccaaaccgtctctgctccttgctttcttccacctgctccccagaggccccaggaaggagttggccctgatgagaacggtgctccatgggtgaccgcgaatccggcttagccctcactccggtcccacgtgtggcccagtccattctcagctcattcccctggaaagcaagatcatggtcttcagaggcctcccgcttctaacatttcctaactcagtggttgccactctcctgtgaccagcccttcttcccacctcactgtgaaaaattcccagaagccaggatcacgactcacttgtcttcacataatggatatttacttaatatttattatcaatttccccacctccaaccctgtccctggcacacacttggcatcatttatccaataggggactgggaattttggtgaagtgaatcaaggctattcagggtcaagagagagattaacttgaatgggccaatttgctagataattaatgtcttaaaaaccaaaaccagagagaagcccacagccctgtcctctgtggcttgaaaaagaaacccagcatcagaggaatgagcgatgatgccccctggggcgcccacttctgtttgtcaggagggatggtcggaggggcagctcacctggcgaggtgatggctctgcatttcccacgaacatatatgtgacatgtacataaatataaatacttatgtttataaatgttgaatggttccttctagctgtggctgagtagacgttggtgtttctaacttctttcagtgtgttagagattgattacatgctagctataaaaagtaaaataaatattttaccatgctattaaagcttggaccattatcaaacacacacaaacacacactcattctgctgtttaaaaattcatctgcgttcgttctcccaggagtgctccagggaaccacaggcttcccggcacttgaaggctgaactgagcgtgagtgccctggtccccaggaagcaggcggatgctgcaggaaggtggcagacagcctgcatccaggagggccccaggaagtggggatgctgcaggaaggcggcacaaagcctgcatccgggagggccccaggaagcagggggatgctgcaggaaggtggcagacagactgcatccaggagggcacagtgacctgtcactccgttctgcagaaattggcccagcagttgcgttatgcccaaccaaaagatgctcgttccagctttcaaatgtgatgatttcagcctgtgaggacaatgccatgtccccaccctaagccagcaaaatgcgaaatctctgttctggcccagaatggcacaagggaggagtctttgcagagttccacgccaccccccagcttactgcggccttcaccggctctgtctaggattgccagctgtggttccaagtgaggagcaaacccattttatgagccatgttcctgcggagacctgatgggccaggccttctgtggctttgaaaacccctaagctcttcacctcctgggcctaggccttcttgtctgactcaacagcaagaaaaatgaacttgccaaaattggcagtaggtgtccttgacacaggggcttctgatggcatcgcccagaaaatgctggaaccagaactggtcagagactttgaagggcacagcctggcgggctactccccaagggtctcaggtctctgcccacctgactaccctgcagcaaacgcttctctgtaacctgacttctcccttcagacctcagcctacaaccatcctcttcatgccaggaaccaactgcttctcagcctcggcttagggtcttaagttcaccagaagggatcggggtttgcgttgatattataaggaatcttcccagaaggagctgcccttcatccatccacaagaatacattgagttcatttagttcttgaccaggtaagaaaagaataaaggagaacaaatattaaatactcttttctaattgatgccttactactgttttgaagctgagccgaaatcaaattgatgtttacattttctatcaagtacacatgagctgtgggagtctagcatattcttgtccaaaagagagagactttcaaatgaattcctattcctcttggtcccctccacctattttggaggtctgcatgtggagttgtatgctattttccaaggtacctcatttaaaaaaaaaaaaaaaaaaaaactgcctctcatttgttcccttaaaacgtctctctctctcataaaactaagttatcattgaaatattaaacgatctgaagcgtctttttttttttcaaataaatgtcaaagatggtaatagtttgtaaatcagtaaatcctctgtccatctgcccattgtccatggtcctgataatagagccaagatggattttcacatgtaaggtgttagtccattaatccagccattaaaagtagttgggagattgaagattagatggtttctggagcaaccgaatttgcagctgccacaaaactagataaatagccacaactggagttattttttgatctcataaaccccaggaattacacacagaatggattgaaaagcagacaagcatcttgtgctattgcagagacttttctacccaggaagtgttgaatttttaaaagaaacttgatattggtgataaaggtatgaatgaacaactctcttacttgccctcgatgtttcaagatgcctggtgaaaccgagaggccacatggcatgtccaaggagacatgctttctgggttctatatgaatagagatggttttagcctgcaattaaaaaaaaaaaaaaaaacggttgaagccttgctaactttttcccagagcattctgggttgatatttcacagtcaaacgttttggcatggaaaaaaaaaaaagcattttaaactcttagtgaattcaaagctctaaatccaaacaatggtgaacacatgtacataacatttcatgttttcagagatacgtatgcttatttaagtgcctttcatgttttaatcaatgtttgcagaatttatcttaaacctgagatgaattaaaaaatttttctccttcaataaaaactgctaatggca

SEQ ID NO: 23278 - DNA, 861 bp, Homo sapiens
  misc_feature 1..861: note = ENST00000518214
  source 1..861: mol_type = unassigned DNA; mol_type = unassigned DNA
ctgtccgtacctggcggtgaaaatcacccctgccatccctgcagtcgctggcatcctgttcttctttgtgatggggaccctgctccgcaccagcttcagcgaccccggagtcctcccacgagccacgcctgatgaagccgccgatctggaaaggcaaatagatatcgcaaacggcaccagttcaggggggtaccgcccgcctcccagaaccaaagaagtcatcatcaatggccagaccgtgaaacttaaatactgtttcacctgcaagattttccggccccctcgcgcctcccattgcagcctttgtgataactgcgtagaacggtttgatcaccactgtccctgggttcacagcaaacaggattcctaaatgcccttaaggacagtcctgcaagcgtcctggaggctgtggtgtgcttcttctctgtctggtccatcgttggcctctcaggattccacacctacttgatcagctccaaccagacaacaaatgaggacattaaaggatcctggtcaaataaaagaggtaaagaaaattacaatccctacagctacggaaatatctttaccaactgctgtgttgccctgtgtgggcccatctcaccaagcctgatcgacagaagagggtacatccagcccgacacgccgcagccagcagcaccctccaatggcatcaccatgtacggggccacgcagtcacagagtgacatgtgcgaccaagaccagtgcattcagagcaccaaattcgttttgcaggctgcagccacgcccctgctgcagagcgagcccagcctcaccagcgacgagctgcacctgcccgggaagcctggcctgggcacgccctgcgccagcctcacactg

SEQ ID NO: 23279 - DNA, 571 bp, Homo sapiens
  misc_feature 1..571: note = ENST00000523468
  source 1..571: mol_type = unassigned DNA; mol_type = unassigned DNA
ccgtacctggcggtgaaaatcacccctgccatccctgcagtcgctggcatcctgttcttctttgtgatggggaccctgctccgcaccagcttcagcgaccccggagtcctcccacgagccacgcctgatgaagccgccgatctggaaaggcaaatagatatcgcaaacggcaccagttcaggggggtaccgcccgcctcccagaaccaaagaagtcatcatcaatggccagaccgtgaaacttaaatactgtttcacctgcaagattttccggccccctcgcgcctcccattgcagcctttgtgataactgcgtagaacggtttgatcaccactgtccctgggtaggcaactgtgtggggaaaagaaactacagatttttttatatgtttattttatctctgtcttttctgacagtctttatatttgcattcgttatcacccacgtcattcttcgtaagtatgctggcgaaatcagattacgtatgtaaccatttgcctgactttgattttcctatttgattttgatttaatattttggtcatttcgggctttctctttccctttctttct

SEQ ID NO: 23280 - DNA, 1934 bp, Homo sapiens
  misc_feature 1..1934: note = ENST00000341375
  source 1..1934: mol_type = unassigned DNA; mol_type = unassigned DNA
ctcagtcacgtggcccctgcacgtgtgcaacgaaggaggccggggtcccagcggaggatatcgcaaacggcaccagttcaggggggtaccgcccgcctcccagaaccaaagaagtcatcatcaatggccagaccgtgaaacttaaatactgtttcacctgcaagattttccggccccctcgcgcctcccattgcagcctttgtgataactgcgtagaacggtttgatcaccactgtccctgggtaggcaactgtgtggggaaaagaaactacagatttttttatatgtttattttatctctgtcttttctgacagtctttatatttgcattcgttatcacccacgtcattcttcgttcacagcaaacaggattcctaaatgcccttaaggacagtcctgcaagcgtcctggaggctgtggtgtgcttcttctctgtctggtccatcgttggcctctcaggattccacacctacttgatcagctccaaccagacaacaaatgaggacattaaaggatcctggtcaaataaaagaggtaaagaaaattacaatccctacagctacggaaatatctttaccaactgctgtgttgccctgtgtgggcccatctcaccaagcctgatcgacagaagagggtacatccagcccgacacgccgcagccagcagcaccctccaatggcatcaccatgtacggggccacgcagtcacagagtgacatgtgcgaccaagaccagtgcattcagagcaccaaattcgttttgcaggctgcagccacgcccctgctgcagagcgagcccagcctcaccagcgacgagctgcacctgcccgggaagcctggcctgggcacgccctgcgccagcctcacactgggcccgcccacaccgcccgcctccatgcccaacctcgccgaggccacgctcgcggacgtgatgccccggaaagatgagcacatgggccaccagttcctgacgcccgatgaggcgccctcgccccccaggctactggcggcgggcagccccctggcgcacagccgcaccatgcacgtgctgggcctggccagccaggactccctgcatgaggactctgtgcgcggcctggtgaagctcagctccgtgtgacccacatggccccaggccgggggacaccagaggctcctccatgggcagcaggagtgagcggaggggtgtgtcccacagcgactttcccagccaatgccacggtggagatgacagccccaggtctggggtacagagaccacttaggatggcacagggtggctggccccggatgctgagagcttggtttcatttgaattttcttccccaacctgagtgctttgacaacaatggaaatagagaagtggctgctttcttttggtgaccctccaggggtggaatcggagtgtgtctgcccgcccttgtgacagacacacggaaggcttctgacgcttgtggccagactgcaattgcacttatgtgttatgctactaatatttgaaacagacctgccattccatttgttaattaaaaaaaaaaaaaatcctaaagggaaaaaaccgaccaggtgtggatctgcatgccacgctgccgtctgtgttacagtggtgttgctatttccaaggaagtgctgctttctttttctttttttaattttgtgaattttcaagtgctgttttgttggaagacagtgcaacgaactgagactaatggacagtgtcatcactcagcttactgggctgaggcgtctgtggagaggtggcaccggggctgcagagggcggctggggttccgtcgtgtcgggtgtcacttcaccttctgtttggccgctcgatgaggtctcgtgttgagatattgtgtgccacaacccccacagtcttcacctccgtgtgtgatgaaacttcccgtggacagccaataaaatgacgtcctctgtta

SEQ ID NO: 23281 - DNA, 328 bp, Homo sapiens
  misc_feature 1..328: note = ENST00000340347
  source 1..328: mol_type = unassigned DNA; mol_type = unassigned DNA
caggggggtaccgcccgcctcccagaaccaaagaagtcatcatcaatggccagaccgtgaaacttaaatactgtttcacctgcaagattttccggccccctcgcgcctcccattgcagcctttgtgataactgcgtagtctttatatttgcattcgttatcacccacgtcattcttcgttcacagcaaacaggattcctaaatgcccttaaggacagtcctgcaagcgtcctggaggctgtggtgtgcttcttctctgtctggtccatcgttggcctctcaggattccacacctacttgatcagctccaaccagacaacaaatgagga

SEQ ID NO: 23282 - DNA, 5146 bp, Homo sapiens
  misc_feature 1..5146: note = ENST00000523706
  source 1..5146: mol_type = unassigned DNA; mol_type = unassigned DNA
aatgtttccgtaagtatctgcacaacggcttcacttccttcccaggccgcggtgctcaaaccacaaatggcgtgggctgggctcaggctcacgttaggagtacatcttcctccctttctcttctggtgggttcgtatgggggtggggaagtgggtgggagagaatgttttgcattcattctttttgaatattagtcaaattgggccgttaaatggaacatcccaaattttcataggtactttcaatcctagttgccattctttctgactataatctttcatccaaacgtgacacaaatgtgtaatatgtgcttgagagccatgacttggtgggcttgcaagaggacaatggacacccgccttttccacatcagctgggcaggatgcagacaggggcaccctctccctctattttcaaagtcctcaaaatggcaaaaatgtggctagggtcctatctgtgcattaatagacaaaagaagcagagagaatgactagggcattatatgttattttcaaagaagcagttgttgacacaactagggaagaaatacgaaccgatcctccagcacacacgtaacactgaaaagcagtgtttagacattatttatttttatttttgagatggagtgtcgctctgttgcctcagctggagtgcagtggcgggatctcggctcactgcagcccctgcctcccaggttcaagcaattctcctgcctcgagtagctgggattacaggcgtgggccacagcacccggctgatttttgtatttttagtagagatagggtttcaccatcttggccagactggtctcaaactcctgacctcaggtgatccgcctgcttcggcctcccaaagtgctgggattacaggcgtgagccaccccacccggcctagacattgtatttttatatcacctttcacaacctcaagatgcttttgtgtgtattatgggattgtatttatggccttgtccctgcattgtggatgtcaagggccagttgccacgtgcttagtcatatacctaaactcagggaacacacacacgcatgcttatggactcacacacactcacactcttacccacactcattctagccacactcacactcatatatactcaccaatacgctcacactcacacatatccttacacacccacactctcacatacccttacacacccacacacccttacacactcacactcacggtagccacactcatgtataaccaatatgctcacacatgtacccttacacacccacactcatactagccatactcacactcatatatactcaccaataagctcacacacatacccttacacacccacacaccgccttacacacacatactcgtacacgcccacacacacccttacacacccacacacatacccttacacagccacacacatacccttggacacccacactcactctagccactcatatatactcaccaataagctcacacacacatagccttacacacacatccttacccacatttacacactcatacccttacactgtcacactcacatgtacccttacacacccacactcacacacacccttacccacactcacacacacccttacacacccacactctcacacctttacacacccactcacacacatacccttacccccacacacccttatacacccacactcacactctagctacacccacactcatatatagtcaccaatatgctcacactctcgcactcacatgctgtcgtgctcgctcacataccgttgcacactcacatgctctcacacactctcacggtgaaatctgtgcctgccaccacactcaggttgcgatgtgtgtttcacttttagctcctctaaggttttactcacctggctccaccaaactggattttaccatagtctatacttaaatactgttcatctcttcttctacacaaaagtattaagaatttacctgcctgcaagttattggaatatcctgggcaaaagcaaataaaactttcccttttcccttgtttgacaccccctcatcagtgacccccacgacacgaccccaccaccctatctggcttggcatgtgatgcttcaggaagggcacagggtttccacggctcctgttaccctcttaagcctcagaaaacattggcacaggcagagaggagagctgtcatctgagtctctctgtgggatcctgggctcttagggaaaggccagacagggaggggcgggagagatttctgtggcctccaagattcctgggaaggcgaagtctggatttccttggagaggaaggagggcttaggccagccacataattagggtgcagtagacaaacagaaatcatttcttttggtccctcatctgcctcaaggctgtgtttgctccacatggccgcacaggcacttgcgtctgtgccctttggggctggcagagatggaggagaaagccttaagcaccatctctcctgattagcgctccacgcagcttctcttcacagcccctcccacacactgtgtcccactactcagacacatgggccgtgggcacagagggaaagggaccttgggaagaatagggagccaagccactcttcaccctcccaggtgtcgcccatagtggggcacatggggacacggtggccactcaccccctgccactgagtcccacagtgcagctgggcctgtggtcagatgccacagggacaccatagcacccgtagagtgtgtcatttccttggtgcacgagggccggatgatgtccccagaggctcactggcttcccacagcacagagggacctggcaccgctaccctaagatggaattgttaaaactacctccatttttatttttaaaagtatgatgtcaatgcataaaataaaaattgctttctgtcagatgcttctttattcaagcccctaaagaaatgttttcttgcctaagacagctcatattaaaatgtctaaagcccaagagaagtctaataaatttcagctttatgactttgtttactctgggtgtagaaaaagaattcttttatacgtagcctagtttccagaacttccagggtcaaaagttaacaaatttggggaaaacagaagagaaaagatagcatacagtattctgttttcctattaaaatgaggaaaacaaaggagtcatcagaactataatttacgggaaagtgtgcagacatccatctgcttttattgaaaaaataccctgcagatgttgggcctaattatgaatcctccattttcttgatgaaaaactttagtggcatctcaatctctgatcggtaaactgggtgtcgtagcacttacaaaatagaattatttcattgatctttagccatctattatttttttgtagatgagagagcattcagcatgaaggctgtttctatctgaatactaaatgttggtttcattcccacaggttcacagcaaacaggattcctaaatgcccttaaggacagtcctgcaagcgtcctggaggctgtggtgtgcttcttctctgtctggtccatcgttggcctctcaggattccacacctacttgatcagctccaaccagacaacaaatgaggacgattatctgcctgcacttaatacagatggagaggaagtatgaaaataggaaacaaggccgggcgcggtggctcatgcctgtaatcccagcacttcgggaggccgaggcaggcggatcacgagattaaaggatcctggtcaaataaaagaggtaaagaaaattacaatccctacagctacggaaatatctttaccaactgctgtgttgccctgtgtgggcccatctcaccaagcctgatcgacagaagagggtacatccagcccgacacgccgcagccagcagcaccctccaatggcatcaccatgtacggggccacgcagtcacagagtgacatgtgcgaccaagaccagtgcattcagagcaccaaattcgttttgcaggctgcagccacgcccctgctgcagagcgagcccagcctcaccagcgacgagctgcacctgcccgggaagcctggcctgggcacgccctgcgccagcctcacactgggcccgcccacaccgcccgcctccatgcccaacctcgccgaggccacgctcgcggacgtgatgccccggaaagatgagcacatgggccaccagttcctgacgcccgatgaggcgccctcgccccccaggctactggcggcgggcagccccctggcgcacagccgcaccatgcacgtgctgggcctggccagccaggactccctgcatgaggactctgtgcgcggcctggtgaagctcagctccgtgtgacccacatggccccaggccgggggacaccagaggctcctccatgggcagcaggagtgagcggaggggtgtgtcccacagcgactttcccagccaatgccacggtggagatgacagccccaggtctggggtacagagaccacttaggatggcacagggtggctggccccggatgctgagagcttggtttcatttgaattttcttccccaacctgagtgctttgacaacaatggaaatagagaagtggctgctttcttttggtgaccctccaggggtggaatcggagtgtgtctgcccgcccttgtgacagacacacggaaggcttctgacgcttgtggccagactgcaattgcacttatgtgttatgctactaatatttgaaacagacctgccattccatttgttaattaaaaaaaaaaaaaatcctaaagggaaaaaaccgaccaggtgtggatctgcatgccacgctgccgtctgtgttacagtggtgttgctatttccaaggaagtgctgctttctttttctttttttaattttgtgaattttcaagtgctgttttgttggaagacagtgcaacgaactgagactaatggacagtgtcatcactcagcttactgggctgaggcgtctgtggagaggtggcaccggggctgcagagggcggctggggttccgtcgtgtcgggtgtcacttcaccttctgtttggccgctcgatgaggtctcgtgttgagatattgtgtgccacaacccccacagtcttcacctccgtgtgtgatgaaacttcccgtggacagccaataaaatgacgtcctctgtt

SEQ ID NO: 23283 - DNA, 3646 bp, Homo sapiens
  misc_feature 1..3646: note = ENST00000517432
  source 1..3646: mol_type = unassigned DNA; mol_type = unassigned DNA
tcaagatgcttttgtgtgtattatgggattgtatttatggccttgtccctgcattgtggatgtcaagggccagttgccacgtgcttagtcatatacctaaactcagggaacacacacacgcatgcttatggactcacacacactcacactcttacccacactcattctagccacactcacactcatatatactcaccaatacgctcacactcacacatatccttacacacccacactctcacatacccttacacacccacacacccttacacactcacactcacggtagccacactcatgtataaccaatatgctcacacatgtacccttacacacccacactcatactagccatactcacactcatatatactcaccaataagctcacacacatacccttacacacccacacaccgccttacacacacatactcgtacacgcccacacacacccttacacacccacacacatacccttacacagccacacacatacccttggacacccacactcactctagccactcatatatactcaccaataagctcacacacacatagccttacacacacatccttacccacatttacacactcatacccttacactgtcacactcacatgtacccttacacacccacactcacacacacccttacccacactcacacacacccttacacacccacactctcacacctttacacacccactcacacacatacccttacccccacacacccttatacacccacactcacactctagctacacccacactcatatatagtcaccaatatgctcacactctcgcactcacatgctgtcgtgctcgctcacataccgttgcacactcacatgctctcacacactctcacggtgaaatctgtgcctgccaccacactcaggttgcgatgtgtgtttcacttttagctcctctaaggttttactcacctggctccaccaaactggattttaccatagtctatacttaaatactgttcatctcttcttctacacaaaagtattaagaatttacctgcctgcaagttattggaatatcctgggcaaaagcaaataaaactttcccttttcccttgtttgacaccccctcatcagtgacccccacgacacgaccccaccaccctatctggcttggcatgtgatgcttcaggaagggcacagggtttccacggctcctgttaccctcttaagcctcagaaaacattggcacaggcagagaggagagctgtcatctgagtctctctgtgggatcctgggctcttagggaaaggccagacagggaggggcgggagagatttctgtggcctccaagattcctgggaaggcgaagtctggatttccttggagaggaaggagggcttaggccagccacataattagggtgcagtagacaaacagaaatcatttcttttggtccctcatctgcctcaaggctgtgtttgctccacatggccgcacaggcacttgcgtctgtgccctttggggctggcagagatggaggagaaagccttaagcaccatctctcctgattagcgctccacgcagcttctcttcacagcccctcccacacactgtgtcccactactcagacacatgggccgtgggcacagagggaaagggaccttgggaagaatagggagccaagccactcttcaccctcccaggtgtcgcccatagtggggcacatggggacacggtggccactcaccccctgccactgagtcccacagtgcagctgggcctgtggtcagatgccacagggacaccatagcacccgtagagtgtgtcatttccttggtgcacgagggccggatgatgtccccagaggctcactggcttcccacagcacagagggacctggcaccgctaccctaagatggaattgttaaaactacctccatttttatttttaaaagtatgatgtcaatgcataaaataaaaattgctttctgtcagatgcttctttattcaagcccctaaagaaatgttttcttgcctaagacagctcatattaaaatgtctaaagcccaagagaagtctaataaatttcagctttatgactttgtttactctgggtgtagaaaaagaattcttttatacgtagcctagtttccagaacttccagggtcaaaagttaacaaatttggggaaaacagaagagaaaagatagcatacagtattctgttttcctattaaaatgaggaaaacaaaggagtcatcagaactataatttacgggaaagtgtgcagacatccatctgcttttattgaaaaaataccctgcagatgttgggcctaattatgaatcctccattttcttgatgaaaaactttagtggcatctcaatctctgatcggtaaactgggtgtcgtagcacttacaaaatagaattatttcattgatctttagccatctattatttttttgtagatgagagagcattcagcatgaaggctgtttctatctgaatactaaatgttggtttcattcccacaggttcacagcaaacaggattcctaaatgcccttaaggacagtcctgcaagcgtcctggaggctgtggtgtgcttcttctctgtctggtccatcgttggcctctcaggattccacacctacttgatcagctccaaccagacaacaaatgaggacattaaaggatcctggtcaaataaaagaggtaaagaaaattacaatccctacagctacggaaatatctttaccaactgctgtgttgccctgtgtgggcccatctcaccaagcctgatcgacagaagagggtacatccagcccgacacgccgcagccagcagcaccctccaatggcatcaccatgtacggggccacgcagtcacagagtgacatggctgcagccacgcccctgctgcagagcgagcccagcctcaccagcgacgagctgcacctgcccgggaagcctggcctgggcacgccctgcgccagcctcacactgggcccgcccacaccgcccgcctccatgcccaacctcgccgaggccacgctcgcggacgtgatgccccggaaagatgagcacatgggccaccagttcctgacgcccgatgaggcgccctcgccccccaggctactggcggcgggcagccccctggcgcacagccgcaccatgcacgtgctgggcctggccagccaggactccctgcatgaggactctgtgcgcggcctggtgaagctcagctccgtgtgacccacatggccccaggccgggggacaccagaggctcctccatgggcagcaggagtgagcggaggggtgtgtcccacagcgactttcccagccaatgccacggtggagatgacagccccaggtctggggtacagagaccacttaggatggcacagggtggctggccccggatgctgagagcttggtttcatttgaattttcttccccaacctgagtgctttgacaacaatggaaatagagaagtggctgctttcttttggtgaccctccaggggtggaatcggagtgtgtctgcccgcccttgtgacagacacacggaaggcttctgacgcttgtggccagactgcaattgcacttatgtgttatgctactaatatttgaaacagacctgccattccatttgttaatt

SEQ ID NO: 23284 - DNA, 2883 bp, Homo sapiens
  misc_feature 1..2883: note = ENST00000422910
  source 1..2883: mol_type = unassigned DNA; mol_type = unassigned DNA
ctctcgcactcacatgctgtcgtgctcgctcacataccgttgcacactcacatgctctcacacactctcacggtgaaatctgtgcctgccaccacactcaggttgcgatgtgtgtttcacttttagctcctctaaggttttactcacctggctccaccaaactggattttaccatagtctatacttaaatactgttcatctcttcttctacacaaaagtattaagaatttacctgcctgcaagttattggaatatcctgggcaaaagcaaataaaactttcccttttcccttgtttgacaccccctcatcagtgacccccacgacacgaccccaccaccctatctggcttggcatgtgatgcttcaggaagggcacagggtttccacggctcctgttaccctcttaagcctcagaaaacattggcacaggcagagaggagagctgtcatctgagtctctctgtgggatcctgggctcttagggaaaggccagacagggaggggcgggagagatttctgtggcctccaagattcctgggaaggcgaagtctggatttccttggagaggaaggagggcttaggccagccacataattagggtgcagtagacaaacagaaatcatttcttttggtccctcatctgcctcaaggctgtgtttgctccacatggccgcacaggcacttgcgtctgtgccctttggggctggcagagatggaggagaaagccttaagcaccatctctcctgattagcgctccacgcagcttctcttcacagcccctcccacacactgtgtcccactactcagacacatgggccgtgggcacagagggaaagggaccttgggaagaatagggagccaagccactcttcaccctcccaggtgtcgcccatagtggggcacatggggacacggtggccactcaccccctgccactgagtcccacagtgcagctgggcctgtggtcagatgccacagggacaccatagcacccgtagagtgtgtcatttccttggtgcacgagggccggatgatgtccccagaggctcactggcttcccacagcacagagggacctggcaccgctaccctaagatggaattgttaaaactacctccatttttatttttaaaagtatgatgtcaatgcataaaataaaaattgctttctgtcagatgcttctttattcaagcccctaaagaaatgttttcttgcctaagacagctcatattaaaatgtctaaagcccaagagaagtctaataaatttcagctttatgactttgtttactctgggtgtagaaaaagaattcttttatacgtagcctagtttccagaacttccagggtcaaaagttaacaaatttggggaaaacagaagagaaaagatagcatacagtattctgttttcctattaaaatgaggaaaacaaaggagtcatcagaactataatttacgggaaagtgtgcagacatccatctgcttttattgaaaaaataccctgcagatgttgggcctaattatgaatcctccattttcttgatgaaaaactttagtggcatctcaatctctgatcggtaaactgggtgtcgtagcacttacaaaatagaattatttcattgatctttagccatctattatttttttgtagatgagagagcattcagcatgaaggctgtttctatctgaatactaaatgttggtttcattcccacaggttcacagcaaacaggattcctaaatgcccttaaggacagtcctgcaagcgtcctggaggctgtggtgtgcttcttctctgtctggtccatcgttggcctctcaggattccacacctacttgatcagctccaaccagacaacaaatgaggacattaaaggatcctggtcaaataaaagaggtaaagaaaattacaatccctacagctacggaaatatctttaccaactgctgtgttgccctgtgtgggcccatctcaccaagcctgatcgacagaagagggtacatccagcccgacacgccgcagccagcagcaccctccaatggcatcaccatgtacggggccacgcagtcacagagtgacatgtgcgaccaagaccagtgcattcagagcaccaaattcgttttgcaggctgcagccacgcccctgctgcagagcgagcccagcctcaccagcgacgagctgcacctgcccgggaagcctggcctgggcacgccctgcgccagcctcacactgggcccgcccacaccgcccgcctccatgcccaacctcgccgaggccacgctcgcggacgtgatgccccggaaagatgagcacatgggccaccagttcctgacgcccgatgaggcgccctcgccccccaggctactggcggcgggcagccccctggcgcacagccgcaccatgcacgtgctgggcctggccagccaggactccctgcatgaggactctgtgcgcggcctggtgaagctcagctccgtgtgacccacatggccccaggccgggggacaccagaggctcctccatgggcagcaggagtgagcggaggggtgtgtcccacagcgactttcccagccaatgccacggtggagatgacagccccaggtctggggtacagagaccacttaggatggcacagggtggctggccccggatgctgagagcttggtttcatttgaattttcttccccaacctgagtgctttgacaacaatggaaatagagaagtggctgctttcttttggtgaccctccaggggtggaatcggagtgtgtctgcccgcccttgtgacagacacacggaaggcttctgacgcttgtggccagactgcaattgcacttatgtgttatgctactaatatttgaaacagacctgccattccatttgttaatt

SEQ ID NO: 23285 - DNA, 6377 bp, Homo sapiens
  misc_feature 1..6377: note = ENST00000262096
  source 1..6377: mol_type = unassigned DNA; mol_type = unassigned DNA
cgcaagttgaagcgcgagggttccacgcgggctgcggggacgcgggcctcggtgctgcagactttctcagggcgcctgggtcgcggcaggcgcggagtcccgagcgcagcagctgctccgccggcctcgcctccgacccccgccctgcgccaagcgcggaagcgctcgcgacctaactgccccgggtgccgggcgcctagggaggggccgccaccgcccgctccgccccgggggcctgcgcccagcagcccccgcctccccggaatccagaggccgagccggaggcggcggggccacggtgggagcccgcgaggtggcccgagcgagggccccgcatccccgcagagcccgcccgagggcgcagcctgccacgccaggggaggcggccgggcggcggggaacggcgggggcggagcgcagcctcccgacgccgccgcctcaccgcccccctccgcctcctcggcctccgctcgcagccgccgcctccgcctccgccgggctgaggagccgggagtccgccgcgccggctcggggctgcgggatggggagttagcgccacggcggcggcagtggccgcagcgcaccccgccgccgcccaggagcccgtccagccaggggtgccgggcccgcccagcccgccccggagccaggcccgcgggcggcggcggagctgggcaggtggatgcggctggaagatggcgccctcgggcccgggcagcagcgccaggcggcggtgccggcgggtgctgtactggatcccggtggtgttcatcaccctcctgctcggctggtcctactacgcctacgccatccagctgtgcatagtgtccatggaaaacactggcgaacaagttgtgtgcctgatggcctatcatctactttttgcaatgtttgtctggtcatactggaaaactatctttacattaccaatgaatccttcaaaagaattccatctctcttatgcagagaaagatttgttggagagagagccaagaggagaagcccatcaggaagttcttaggcgagcagccaaggatcttcccatctataccaggaccatgtctggagccatccgatactgtgacagatgccaacttataaaaccagatcgctgccatcactgctccgtctgtgataaatgtattttgaagatggatcatcattgtccatgggtgaacaattgtgttggattttcaaattataagttctttctccttttcttggcttattctctgctctactgcctttttattgcggcaacagatttacagtattttatcaaattttggacaaatggcctacctgatactcaagccaagttccatattatgtttttattctttgctgcagctatgttttctgtcagcttgtcttctctgtttggctatcattgttggctagtcagcaaaaataaatctacattagaggcattcagaagtccagtatttcgacatggaacagataagaatggattcagcttgggtttcagtaaaaacatgcgacaagtttttggtgatgagaagaagtactggttgctacccattttttcaagtctaggtgatggctgctcctttccaacttgccttgttaaccaggatcctgaacaagcatctactcctgcagggctgaattccacagctaaaaatctcgaaaaccatcagtttcctgcaaagccattgagagagtcccagagccaccttcttactgattctcagtcttggacggagagcagcataaacccaggaaaatgcaaagctggtatgagcaatcctgcattaaccatggaaaatgagacttaactcttcaagcaagataaattcatactttataaaagtatcaatgctgtagatggatggaagaggcttcccacaggaaggtgccaccagtcagttgtgcctatgtccctttggctggaaatgcagaatatgaattgattagttctctccaagccattgcttaaaatataacatgttttggatccaatacacacattgttacaactaacacaaattcctattaaatattaaaagtagttctggtttattaatcaacggggaaaacatcttctccaaaaaacttggaataaatccaaggaccagtttttacccaaatatatgggtagcacagtttatcacatagaaactccattaatcatctgattttccgaatctgaaaattgagactattaagatattaggatttcagagatttcaagtcacattataatgataagcattattcataaaacttgttacctttaagaaggtggaagtggcaaaccatacttcttttttttcctctgatgtgaatccagcctcagactgagtgaactgtaataattatgaattcattacagagtccaggtggcctgcagttgaagatcatcaaccatttttgcctcacttaattccagccttttgttttctgctggaaaataagtgtggacattgaagcttgagctctcaaagcagttggctggaatacttttgtcagaatacggtacatttctattacatcagaaatatattttcatctcttcttgttaaattgggaggaaatttatgatagcaattatgaagattgttttatgacattcttttgtcagtttggctttctaaaaatctctttttagattatttctcctgttgaacatagtaaaactattgaatttctcttaagaattcctaataggtcaatagatttaccctccagtgatatctatattatttctttctcgtctcatcaaaatgatgacaggtaaactatatttttccttaaacacctattacagttaaattatgcaaatcattaaataaaaatcatacaacttttggaaagttagttcaacatgaactaaaatggcatgctatttggaaatttagtttgagataaactaaagtgtgttgatgccagaatgttcagcttcagtaaatataataagctcttgtgccttgtatgcactatttaaaaaaagttttttttatttgagtccagtataattcatgtaaatgttaacaattagaataatactctgtatgcttttttgatactgattttgagaatttaaagcagattaccttttaaaactggaccaactaagtaattggtatttaatcaaagagaaaatggtaataaacttttcaaaatctttgttaaaccaaacattcaacacaaaataaactagaaggccagaggataatggaataaaagatcattgcaattacttatccttcctaaaaatatagttttatattaattgtgcttatggaagaaacaatgtcagccaagtccattttatagtttgagtgcaattctttgaacaatagaaatatctgcagtctttcacagatttgtattatgctgaagagtttcatctgacaatctgcttcaagaaatctcagaaaatatgataacattttaactttcattttagagcacgttttggtcatttttaaaaatacctaaagtgccagaccggaacctatagctactgctagaagtcttaaaaaaaccaacagcagcacaggatgtattaagaattatatgaagtcaggtttgtttttttttttttttttttttcaaagcacagtactgttagctgtttttgtggacaggattcgattaagtattccctcttgtcaaactggaagctaggggaaaaagagggatttttatcctttactcttctagagtactgttaatgcccctttcccacagtcttttatataattaaatatatgtcaatacacattagaatcagatttgaaaaagttaaaacaatttcattgttgtaattgttccctttctgttttcatatagtgaataacctttaaagggttgttttgttttgttttgaattataggagttataatctttggagatgattgcatatctcattagatatgcaatataaatttatctgagtgaacaaagtgctaaataaatagatctacattttgtacatatttatataaaatttacctttaagtatttactttaaaaaatttaatggcttaactcgaacttgaagacacatacttcaactgtccttattgtccattaaactgataattttgatttttcttgcttttatagattttactatataggaatcaagatttaagaaattttgcattaaaaatagtgtaccaatgcttcatatacgttagttatttgctattatgtagggaagaggattgttatttcaaagatatattaaagaacagttgcatctgaatataatcatgatgcattcaatgaagttcatatccatgaattcactcctaatataccctaataaagtggttgatcacctacattatctgtctataagaaactgcctttgcactgacaatgtaaattattttaagcataaattttcctaatagtttattagagctactaatggcaaaattcatgtcttcaatgtggccataacataggtcttgggaggggtggtgagaaaataaggtatttactttgtagtagttaagtgattctgaggacaattagaaacagactataaaactcaactacactgtaatcaatagacaactattggaaatatggcatatgttgacaaacacttaactagggaaatcaaagatataaatcatgtttataaaaaattaggcacgcaatcatgtgattcatgcttcaagaaaatatatgaaaaaagtgttactccattatgttataaactagcagattttccctattttgaaatgcatgtaaacgggctcggctgattctgaaattgtactgtatcatttggtatttacttatatggtcaaatacttgtttgtaaaagtgatggttctgatacctttgatcaaacatagatacaaacctcagaaaatggtaaatgcaaagcagtttacgttgtaaatcatgatggtgtcctccagcacaaccatcccacccacacacctagactacagattctgatctgtgaatattttcaccaaagtgacatttaaacaagtggatttttcacaaataacacgtgtttaatatctttctgcagaaacgtgttcttctaaagcagaaaaccacgtggcttaatcccaaatgttttacacttcttttccacatacttagccagttcagcaccgatttcctcttatatgtggaaggagactatgttacatacctgaagtattactcttttacaaagataccattagaattttctcactgtcttggtaaaaattcctagattctactttttattgcaagtgttagcaatatgatcttgtaacgccatgaaaagcattaagtagaagccaacattaacctagattttacaactgagcaatctgttccccaccagatttcctttagaatttattaccaaaggatcttattttgttacagaacacaggaaattgttaaaccttataatgttgcaaaccatgcattttccttttctcttttccataagatttttttattgtagtagtgccctggcttgtaaacagtggacatcactgaaaggatgaaatcaagtaggcttgtttcaaagagactcctgtgaatcaactatgaatatgaagtatctcccagaacaatgttgagtgtttcaggagactctgaaacagggcacccattttttttttccttcctcaaaatagtctccttgaaatgtgagcaaagaactatgatgatgcagtccaggtatctaatagctcaatcaccaacaccgctgagaattgttcttataccagcaaaaagttcaaatacaataacctgggcaatgccaacagaagacacttttaatcatttgcagacctttcttgttgcaggaaagtgagggcaaaaacaaactggtgaaaaatgttcaaaaatagatctttttgatgttcatagccagtattcagtatttctgtattgtttacaattgggggaaaatgtctgttaaggctaatcatctgagtgatttgagtagcaattaaaccaaagggaaacttttaataagttattttaagccctggtttatggctagttcccttttgctcaggaaaaatagtactactttatggtttatgaaaacctatgatttatgttgcatcttccggggaaggtttaacagtacaaggagctgaatcctacctgaaattattaatgcttaatatattgcttctgtttgattgataaaggtgcttaatcaattgaaaaaaaaacgcataatgcttcaaggtaaaattccgttgattctgaatttaaaaagatactacagaatgcgtcagttctcctgttgtatttttctcagttatgagagcaaggctattttgtcagtttagattttgtgtctttttctgtcagtatgtatggctccctaattgaaaacatcttaaatgaactaatcaaacactta

SEQ ID NO: 23286 - DNA, 167 bp, Homo sapiens
  misc_feature 1..167: note = ENST00000523132
  source 1..167: mol_type = unassigned DNA; mol_type = unassigned DNA
atttttgaggacatgtgcaacacactaaaccataatttaggtgtttgaacagtagggagagaaaaaaagaggtgatcgtctgaggtttttacatccagagagcgaagtggctccagtccgagttcgaggttcctgaattgtgtccatggaaaacactggcgaacaag

SEQ ID NO: 23287 - DNA, 487 bp, Homo sapiens
  misc_feature 1..487: note = ENST00000522184
  source 1..487: mol_type = unassigned DNA; mol_type = unassigned DNA
aaacgtctcactcctagacatgtgagttggcttcctggccaatggaaaaggataaacaatgaggcaggtaaaaagagcttttggggagcactgtccatggaaaacactggcgaacaagttgtgtgcctgatggcctatcatctactttttgcaatgtttgtctggtcatactggaaaactatctttacattaccaatgaatccttcaaaagaattccatctctcttatgcagagaaagatttgttggagagagagccaagaggagaagcccatcaggaagttcttaggcgagcagccaaggatcttcccatctataccaggaccatgtctggagccatccgatactgtgacagatgccaacttataaaaccagatcgctgccatcactgctccgtctgtgataaatgtattttgaagatggatcatcattgtccatgggtgaacaattgtgttggattttcaaattataagttctttctccttttct

SEQ ID NO: 23288 - DNA, 334 bp, Homo sapiens
  misc_feature 1..334: note = ENST00000517334
  source 1..334: mol_type = unassigned DNA; mol_type = unassigned DNA
tgcagctatgttttctgtcagcttgtcttctctgtttggctatcattgttggctagtcagcaaaaataaatctacattagaggcattcagaagtccagtatttcgacatggaacagataagaatggattcagcttgggtttcagtaaaaacatgcgacaagtttttggtgatgagaagaagtactggttgctacccattttttcaaggtacttctttgttaaaattttcaggctttaaactaatgaaaataatacagcaaaagatagtttcaggaaaagcctctagttccataggcttgtaattctgtgtaggaactcttatttttaaaaaata

SEQ ID NO: 23289 - DNA, 3778 bp, Homo sapiens
  misc_feature 1..3778: note = ENST00000330212
  source 1..3778: mol_type = unassigned DNA; mol_type = unassigned DNA
ggggcacccggaagcgcgcgtggacctggcgcaccgagccgggcgggcggaggggcggttgggacggcgcggggaggcgggcgcgccgcccgggccgcggcgggctgtggtcacaggtgggcggctgcggcgagggagcggccgagcggagcccgggtcccggagactcctgccgtcacgcccggggctccgcgtagcagagatcgggagacgcgtctgtgcctccggggaagccgacccatctcccctccgcctctttggctgcagttgcacctccggccagagggcaggtgcaaatcatgacacagaagggcagtatgaagcctgtgaagaaaaagaaaaccgaagaacctgaattggagcccctgtgctgctgcgagtacatagatcggaatggggaaaagaaccacgtggctacttgtttgtgtgattgtcaagatctggatgaagggtgtgatcgatggattacatgtaaatctttacagccagagacttgtgaaagaatcatggatacaatttctgatcgcctccgaattccttggcttaggggagccaaaaaagtgaacatcagcatcatccctccgcttgtcctgctgcctgtcttccttcatgtggcttcctggcatttcctcctgggggtggtggttttgacctcccttcctgtgctggcactgtggtactactacctcactcacagaaggaaagaacagaccctgtttttcctgagccttggactgttctctctgggctacatgtactatgtgttcctgcaggaagtggtccccaaagggcgtgtgggtcccgttcagctggcggttcttacctgcgggttatttctgatactcttagccttgcacagagccaagaagaatccaggctacctcagcaatccagcaagcggtgacagatctctaagcagcagccagctggagtgcctgagcagaaaagggcaggagaagaccaaagggttccctggggcagacatgtcgggcagtctcaacaatcgcacaacaaaggatgaccccaagggctcttccaagatgccagctggaagccccaccaaagcgaaggaggactggtgtgccaagtgccagctggtgcgaccagcccgggcatggcactgccggatatgtggcatctgtgtgaggagaatggatcatcattgtgtctggataaatagctgcgttggagaatcaaatcatcaagcatttatacttgcccttttgatcttcttgctcacctcggtgtatgggatcacactgaccttggacaccatttgtagagacagaagtgtcttcacagctcttttctattgtcctggagtttatgcaaattacagctcggctctgtccttcacctgcgtgtggtactctgtgatcatcacagcaggcatggcctacatcttcctgatccagctgatcaacatcagctacaatgtgactgagcgggaagtccagcaggccctccgacagaagactgggcgccggctcctctgcgggctcatcgtggacacagggttacttggatgagccaactccgcttccttcccatggataggaagggactctgtgtattattcaggtttattggcacgaagatacttgttttaagttccttgagaacccatgatggacagttgacagaatgcttaaacctgtcaaaagatgagtgatcttgtgtgggaaaagccttcccaggcgtctgtaccgaaaggagcagcaaacaaggggctaatccatgagcagtgttctgtaggctctgtgacatctttggtttataggattttggagccttttatgatctggaactatttgaggggtttcattataggccttggttctctccaggggccagatgagtttattgtggaatctttgaaaggacaaggcctctgtgaatgaatcagtcccagggaagcatttggtggtggcggcagtggaggattgcccggtgaacctataaatcagcagtctcttgggcagaggagcaagcccctcgaacatgatttcaaacaagcaggtcctcttctctcatctcacgtccttagtctctgttaatgaacatactggatgtggagtttaataaattacctactatcatctggccacttagattattatcacaccactgtggactgttcctggggggagaagaacagaccgatttgaaagattcaagggagaaagattaaggatcaggattgcatgaaagaagaaaatccttcaatatttaaaatgtttcttacaatacccacggagcacttttatggttccagccgagcgttcctgaaatgaactgaccattaacagcgcctctttgataggttaccctgatgctgctaaagtaaagccttaagtgtgtttttgggacaacgtgctgcttattccacctcagccacatatgtgtttgtgtttaggatattgtaaatctttgctaagtagtgttttccttggtgaatgaagtcattgttgtcttcaagtgtaccatctgcctagcaaaaaattgctacaaactttctcttatgcaatagtccttggtacttctaatatttttagcaagagacaattttctgtactagaatcttccactgccagaaaacacagtgccagtaaggttctacataccactgaccatctgcttaatagacatgtatttcctttgagtaggacattagcttttgattataaagctcaactagtataagcaaaaatataacatctagaagcacagttttagccaggatgtttaaaaattacagttttgtgagacttaagggtctttttaacctaggtaagtttatatgacctaacttaattgtagccatattctggtaccttccattttgaaaagtagaggttgcttaagcaagcaatggataataagagacttttcctgaggcacctgtttggaatctggttttctcagcggcagcttgacatgtgcacccttttgtattaaacactgcaagggtgatgcaggggagcaggaaagccatcctaaactcactactgagtacgattcagtatgttcctgtggatgtctgctgtgactaatataaatttcttgcagaatcagctacacttaattatgttgctgatagacaagcatccacgcttcagctggcactaagtgttttcattgtaggatcagcagcaggttaaagactgaacggttagtgaagacaaatgtcttaagaggctgcgatgtctaggttgggcttgtgacttcttagtggcctagccttcttgatggcaccttgaaagtgaacttctagaaatctacatttaaaaggcaaagctttaaaagcagagctagtctattctagttactgatgcaactaaaattctgtatttcttaagatggagccactgacgagatgtcacagtatagagcctgcagtctcaactcattgtgatcctaatggtctgggtgattggatggtttgagttgttagggattttgagtttttcattttattgcatatctgggttggatgttagactaaaggaaacccaggaatatttacctggtgttacatttaatatttaatgtaactggtctagcaacattaagggggatttctgaagccaactccggaggctgtgggctgcacattttgcactgtttttatatacttgtattcatatcctcttatcacctcagactcagacacaaggccttttacatggaaattttacaaattacttccatttatgtaaaataacgtcctgtgaccaagttgtttaaatggaaaataaagtgctttctttaaggaaaa

SEQ ID NO: 23290 - DNA, 2055 bp, Homo sapiens
  misc_feature 1..2055: note = ENST00000498275
  source 1..2055: mol_type = unassigned DNA; mol_type = unassigned DNA
aggcgggcgcgccgcccgggccgcggcgggctgtggtcacaggtgggcggctgcggcgagggagcggccgagcggagcccgggtcccggagactcctgccgtcacgcccggggctccgcgtagcagagatcgggagacgcgtctgtgcctccggggaagccgacccatctcccctccgcctctttggctgcagttgcacctccggccagagggcgttggaggttaagcagagagagagaggcgtggacctatttacgagattatgaagcctgtgaagaaaaagaaaaccgaagaacctgaattggagcccctgtgctgctgcgagtacatagatcggaatggggaaaagaaccacgtggctacttgtttgtgtgattgtcaagatctggatgaagggtgtgatcgatggattacatgtaaatctttacagccagagacttgtgaaagaatcatggatacaatttctgatcgcctccgaattccttggcttaggggagccaaaaaagtgaacatcagcatcatccctccgcttgtcctgctgcctgtcttccttcatgtggcttcctggcatttcctcctgggggtggtggttttgacctcccttcctgtgctggcactgtggtactactacctcactcacagaaggaaagaacagaccctgtttttcctgagccttggactgttctctctgggctacatgtactatgtgttcctgcaggaagtggtccccaaagggcgtgtgggtcccgttcagctggcggttcttacctgcgggttatttctgatactcttagccttgcacagagccaagaagaatccaggctacctcagcaatccagcaagcggtgacagatctctaagcagcagccagctggagtgcctgagcagaaaagggcaggagaagaccaaagggttccctggggcagacatgtcgggcagtctcaacaatcgcacaacaaaggatgaccccaagggctcttccaagatgccagctggaagccccaccaaagcgaaggaggactggtgtgccaagtgccagctggtgcgaccagcccgggcatggcactgccggatatgtggcatctgtgtgaggagaatggatcatcattgtgtctggataaatagctgcgttggagaatcaaatcatcaagcatttatacttgcccttttgatcttcttgctcacctcggtgtatgggatcacactgaccttggacaccatttgtagagacagaagtgtcttcacagctcttttctattgtcctggagtttatgcaaattacagctcggctctgtccttcacctgcgtgtggtactctgtgatcatcacagcaggcatggcctacatcttcctgatccagctgatcaacatcagctacaatgtgactgagcgggaagtccagcaggccctccgacagaagactgggcgccggctcctctgcgggctcatcgtggacacagggttacttggatgagccaactccgcttccttcccatggataggaagggactctgtgtattattcaggtttattggcacgaagatacttgttttaagttccttgagaacccatgatggacagttgacagaatgcttaaacctgtcaaaagatgagtgatcttgtgtgggaaaagccttcccaggcgtctgtaccgaaaggagcagcaaacaaggggctaatccatgagcagtgttctgtaggctctgtgacatctttggtttataggattttggagccttttatgatctggaactatttgaggggtttcattataggccttggttctctccaggggccagatgagtttattgtggaatctttgaaaggacaaggcctctgtgaatgaatcagtcccagggaagcatttggtggtggcggcagtggaggattgcccggtgaacctataaatcagcagtctcttgggcagaggagcaagcccctcgaacatgatttcaaacaagcaggtcctcttctctcatctcacgtccttagtctctgttaatgaacatactggatgtggagtttaataaattacctactatcatctggccactt

SEQ ID NO: 23291 - DNA, 3466 bp, Homo sapiens
  misc_feature 1..3466: note = ENST00000478793
  source 1..3466: mol_type = unassigned DNA; mol_type = unassigned DNA
gactcctgccgtcacgcccggggctccgcgtagcagagatcgggagacgcgtctgtgcctccggggaagccgacccatctcccctccgcctctttggctgcagttgcacctccggccagagggcaggcgttggaggttaagcagagagagagaggcgtggacctatttacgagatgtaagttgtgttctttccacctttaccttctgagggcttcttacgcctcatggtgacaggtgcaaatcatgacacagaagggcagtatgaagcctgtgaagaaaaagaaaaccgaagaacctgaattggagcccctgtgctgctgcgagtacatagatcggaatggggaaaagaaccacgtggctacttgtttgtgtgattgtcaagatctggatgaagggtgtgatcgatggattacatgtaaatctttacagccagagacttgtgaaagaatcatggatacaatttctgatcgcctccgaattccttggcttaggggagccaaaaaagtgaacatcagcatcatccctccgcttgtcctgctgcctgtcttccttcatgtggcttcctggcatttcctcctgggggtggtggttttgacctcccttcctgtgctggcactgtggtactactacctcactcacagaaggaaagaacagaccctgtttttcctgagccttggactgttctctctgggctacatgtactatgtgttcctgcaggaagtggtccccaaagggcgtgtgggtcccgttcagctggcggttcttacctgcgggttatttctgatactcttagccttgcacagagccaagaagaatccaggctacctcagcaatccagcaagcggtgacagatctctaagcagcagccagctggagtgcctgagcagaaaagggcaggagaagaccaaagggttccctggggcagacatgtcgggcagtctcaacaatcgcacaacaaaggatgaccccaagggctcttccaagatgccagctggaagccccaccaaagcgaaggaggactggtgtgccaagtgccagctggtgcgaccagcccgggcatggcactgccggatatgtggcatctgtgtgaggagaatggatcatcattgtgtctggataaatagctgcgttggagaatcaaatcatcaagcatttatacttgcccttttgatcttcttgctcacctcggtgtatgggatcacactgaccttggacaccatttgtagagacagaagtgtcttcacagctcttttctattgtcctggagtttatgcaaattacagctcggctctgtccttcacctgcgtgtggtactctgtgatcatcacagcaggcatggcctacatcttcctgatccagctgatcaacatcagctacaatgtgactgagcgggaagtccagcaggccctccgacagaagactgggcgccggctcctctgcgggctcatcgtggacacaggtaaggtgctagcacacttgtgactgtggctggaagaggagaacagacactcctgtggggatgctttactctcttttctggggccagatgagtttattgtggaatctttgaaaggacaaggcctctgtgaatgaatcagtcccagggaagcatttggtggtggcggcagtggaggattgcccggtgaacctataaatcagcagtctcttgggcagaggagcaagcccctcgaacatgatttcaaacaagcaggtcctcttctctcatctcacgtccttagtctctgttaatgaacatactggatgtggagtttaataaattacctactatcatctggccacttagattattatcacaccactgtggactgttcctggggggagaagaacagaccgatttgaaagattcaagggagaaagattaaggatcaggattgcatgaaagaagaaaatccttcaatatttaaaatgtttcttacaatacccacggagcacttttatggttccagccgagcgttcctgaaatgaactgaccattaacagcgcctctttgataggttaccctgatgctgctaaagtaaagccttaagtgtgtttttgggacaacgtgctgcttattccacctcagccacatatgtgtttgtgtttaggatattgtaaatctttgctaagtagtgttttccttggtgaatgaagtcattgttgtcttcaagtgtaccatctgcctagcaaaaaattgctacaaactttctcttatgcaatagtccttggtacttctaatatttttagcaagagacaattttctgtactagaatcttccactgccagaaaacacagtgccagtaaggttctacataccactgaccatctgcttaatagacatgtatttcctttgagtaggacattagcttttgattataaagctcaactagtataagcaaaaatataacatctagaagcacagttttagccaggatgtttaaaaattacagttttgtgagacttaagggtctttttaacctaggtaagtttatatgacctaacttaattgtagccatattctggtaccttccattttgaaaagtagaggttgcttaagcaagcaatggataataagagacttttcctgaggcacctgtttggaatctggttttctcagcggcagcttgacatgtgcacccttttgtattaaacactgcaagggtgatgcaggggagcaggaaagccatcctaaactcactactgagtacgattcagtatgttcctgtggatgtctgctgtgactaatataaatttcttgcagaatcagctacacttaattatgttgctgatagacaagcatccacgcttcagctggcactaagtgttttcattgtaggatcagcagcaggttaaagactgaacggttagtgaagacaaatgtcttaagaggctgcgatgtctaggttgggcttgtgacttcttagtggcctagccttcttgatggcaccttgaaagtgaacttctagaaatctacatttaaaaggcaaagctttaaaagcagagctagtctattctagttactgatgcaactaaaattctgtatttcttaagatggagccactgacgagatgtcacagtatagagcctgcagtctcaactcattgtgatcctaatggtctgggtgattggatggtttgagttgttagggattttgagtttttcattttattgcatatctgggttggatgttagactaaaggaaacccaggaatatttacctggtgttacatttaatatttaatgtaactggtctagcaacattaagggggatttctgaagccaactccggaggctgtgggctgcacattttgcactgtttttatatacttgtattcatatcctcttatcacctcagactcagacacaaggccttttacatggaaattttacaaattacttccatttatgtaaaataacgtcctgtgaccaagttgtttaaatggaaaataaagtgctttctttaagg

SEQ ID NO: 23292 - DNA, 740 bp, Homo sapiens
  misc_feature 1..740: note = ENST00000491556
  source 1..740: mol_type = unassigned DNA; mol_type = unassigned DNA
ggctgtcgccataggaacggctggtgcccagacggcgcctgcccaggctgggaaggggcggtgaaggcagctcagacctccaagaaccctggagccccctgtgtggccaggcggagccacagaagcctgatgaaaacgggaccccctccccctctctcttctcatttttgattgctcaggcgttggaggttaagcagagagagagaggcgtggacctatttacgagatgtaagttgtgttctttccacctttaccttctgagggcttcttacgcctcatggtgacaggtgcaaatcatgacacagaagggcagtatgaagcctgtgaagaaaaagaaaaccgaagaacctgaattggagcccctgtgctgctgcgagtacatagatcggaatggggaaaagaaccacgtggctacttgtttgtgtgattgtcaagatctggatgaagggtgtgatcgatggattacatgtaaatctttacagccagagacttgtgaaagaatcatggatacaatttctgatcgcctccgaattccttggcttaggggagccaaaaaagtgaacatcagcatcatccctccgcttgtcctgctgcctgtcttccttcatgtggcttcctggcatttcctcctgggggtggtggttttgacctcccttcctgtgctggcactgtggtactactacctcactcacagaaggaaagaacagaccctgtttttcctgagccttggactgttctct

SEQ ID NO: 23293 - DNA, 5059 bp, Homo sapiens
  misc_feature 1..5059: note = ENST00000638807
  source 1..5059: mol_type = unassigned DNA; mol_type = unassigned DNA
agcggtgacagatctctaagcagcagccagctggagtgcctgagcagaaaagggcaggagaagaccaaagggttccctggggcagacatgtcgggcagtctcaacaatcgcacaacaaaggatgaccccaagggctcttccaagatgccagctggaagccccaccaaagcgaaggaggactggtgtgccaagtgccagctggtgcgaccagcccgggcatggcactgccggatatgtggcatctgtgtgaggagaatggatcatcattgtgtctggataaatagctgcgttggagaatcaaatcatcaagcatttatacttgcccttttgatcttcttgctcacctcggtgtatgggatcacactgaccttggacaccatttgtagagacagaagtgtcttcacagctcttttctattgtcctggagtttatgcaaattacagctcggctctgtccttcacctgcgtgtggtactctgtgatcatcacagcaggcatggcctacatcttcctgatccagctgatcaacatcagctacaatgtgactgagcgggaagtccagcaggccctccgacagaagactgggcgccggctcctctgcgggctcatcgtggacacaggccagtacaataggggcttcctgcggaactggcaccagttctccaccctgggcacacgtgcattccaccaccctgccgaggacattgtctgaagtgccttctatgtggctctctgagggatgatggctcctccttccgtctcccttccattttacacttcagtgtccatttctatccccagtttcttaaaggcattatagggccatgctcaggtttagagactggagtgggaagaagttaatttttctgacgccacaacttaagagacttttatactgaggcagtaaaagtagagccattcctttccagtcacctttttaattgactcagttgcctgaacttgagaaggatgtggattgctaatgcacaaattgatagaagcaattcccatccattagtatggaggaaagagtgttggattaggatagtttctagtccctctttcgattcttaatagccatgtgacccctagctgagtcactttcccaagtctcagggtcatctgcaaagtggggtactgatgcctgccctggctacctcacagagccgtcatgagggtcacgtgagggaagatggatgtggaaagcactaaaaaacaactcaagagccatggaaatacaaagtattaggaaaatattatgatggaagaaaaacgtttatagtctagaatattgaagccaatattattagggtaatcagttttcagcatataccttgttgtacagttatgagaatttctccttcttattagacatgaactactcaaacagagaagatgaccagatggattgatgctaagttgtctcatcttgaaaagacagttgacaacagttataaagataattattgctagtgtaatgtagtgtggccatgagtttaggtgatgagttcttctatttatattttataaattctgcttgggtttcttataaataactccaacaggcattcatgtgtttttcctcttcccatgtttcaccaggtaaggtgctagcacacttgtgactgtggctggaagaggagaacagacactcctgtggggatgctttactctcttttctggtaggaaggctgagtaacatcacgggctcgattattttcttcatgtatttcaaatgctgtcagttatagcactaaattgtgaaaatcagccttctggcattcacattattctggtatgaactttgaggagttgagtgacatcttcccacttaacttgcacattaattctcaattacccctccctaaataacagtatctcactaagagagaagaaacagggtatatgtggtttccactattaatggattactgttcttccctggctcttccgacaataacaagttgtttctttaatcatatcttaaaaccgaaaatgtataaaagattaaatatttatgtacaatgggttgttctactatagaattaagatgagggaatttcagatgaggaaaatacccttttgaaatgttagttttgaacatgtactgttgtgcaatcccaaagataattcatgactccttaaatttgccttggcttatagcttaatatagggaaaatattgccagcgttttcagtcattctgtgcatgctgctttaagcaagagatttatatttgttgagaggaaatattgctacttcctgcacttccaccctctgcagccagcaccgtccctactgttgccattaattggagctgtccttaagatggtcaccatattcttattcaggctgttgtcattttccccagagatggtttgtttaacgaatgataggctctgtgcctggggatgttagcagactctggggtttgtacagtgatgccttctccctggcccagagctgaatattcatctagaattaaagttggatttgatataacaaatttctttctatacaggttttacataagagagacagtaataatgtcaaggatagcctgtgtgggcagaaattggtagtcgtgcttttgaatgtcagctgtagagccaactctgattatctagccattgatcatacaaattgatagaaacattagtcagtaattttagcttcttgccaaattgttcacaacatctaaatgtaatgtgatgtgatgaagataagtagtacaaagagaccaaaataatttgggagaattaggaatgatgacaattttttttaacaacttacctctaatagggttacttggatgagccaactccgcttccttcccatggataggaagggactctgtgtattattcaggtttattggcacgaagatacttgttttaagttccttgagaacccatgatggacagttgacagaatgcttaaacctgtcaaaagatgagtgatcttgtgtgggaaaagccttcccaggcgtctgtaccgaaaggagcagcaaacaaggggctaatccatgagcagtgttctgtaggctctgtgacatctttggtttataggattttggagccttttatgatctggaactatttgaggggtttcattataggccttggttctctccaggggccagatgagtttattgtggaatctttgaaaggacaaggcctctgtgaatgaatcagtcccagggaagcatttggtggtggcggcagtggaggattgcccggtgaacctataaatcagcagtctcttgggcagaggagcaagcccctcgaacatgatttcaaacaagcaggtcctcttctctcatctcacgtccttagtctctgttaatgaacatactggatgtggagtttaataaattacctactatcatctggccacttagattattatcacaccactgtggactgttcctggggggagaagaacagaccgatttgaaagattcaagggagaaagattaaggatcaggattgcatgaaagaagaaaatccttcaatatttaaaatgtttcttacaatacccacggagcacttttatggttccagccgagcgttcctgaaatgaactgaccattaacagcgcctctttgataggttaccctgatgctgctaaagtaaagccttaagtgtgtttttgggacaacgtgctgcttattccacctcagccacatatgtgtttgtgtttaggatattgtaaatctttgctaagtagtgttttccttggtgaatgaagtcattgttgtcttcaagtgtaccatctgcctagcaaaaaattgctacaaactttctcttatgcaatagtccttggtacttctaatatttttagcaagagacaattttctgtactagaatcttccactgccagaaaacacagtgccagtaaggttctacataccactgaccatctgcttaatagacatgtatttcctttgagtaggacattagcttttgattataaagctcaactagtataagcaaaaatataacatctagaagcacagttttagccaggatgtttaaaaattacagttttgtgagacttaagggtctttttaacctaggtaagtttatatgacctaacttaattgtagccatattctggtaccttccattttgaaaagtagaggttgcttaagcaagcaatggataataagagacttttcctgaggcacctgtttggaatctggttttctcagcggcagcttgacatgtgcacccttttgtattaaacactgcaagggtgatgcaggggagcaggaaagccatcctaaactcactactgagtacgattcagtatgttcctgtggatgtctgctgtgactaatataaatttcttgcagaatcagctacacttaattatgttgctgatagacaagcatccacgcttcagctggcactaagtgttttcattgtaggatcagcagcaggttaaagactgaacggttagtgaagacaaatgtcttaagaggctgcgatgtctaggttgggcttgtgacttcttagtggcctagccttcttgatggcaccttgaaagtgaacttctagaaatctacatttaaaaggcaaagctttaaaagcagagctagtctattctagttactgatgcaactaaaattctgtatttcttaagatggagccactgacgagatgtcacagtatagagcctgcagtctcaactcattgtgatcctaatggtctgggtgattggatggtttgagttgttagggattttgagtttttcattttattgcatatctgggttggatgttagactaaaggaaacccaggaatatttacctggtgttacatttaatatttaatgtaactggtctagcaacattaagggggatttctgaagccaactccggaggctgtgggctgcacattttgcactgtttttatatacttgtattcatatcctcttatcacctcagactcagacacaaggccttttacatggaaattttacaaattacttccatttatgtaaaataacgtcctgtgaccaagttgtttaaatggaaaataaagtgctttctttaagg

SEQ ID NO: 23294 - DNA, 5280 bp, Homo sapiens
  misc_feature 1..5280: note = ENST00000488129
  source 1..5280: mol_type = unassigned DNA; mol_type = unassigned DNA
accctgctctgtgcaggcgattcacagcacctcatctttttggttaggtccttggatttaatagtctttgaggtcccttcagcttttacaaatgaagattctgaatgaacttatttctaactaactcttaatttgcgaatgttggaaaatcatcaaatggcagaggctaactggcagcctgtctcattagtgagcctgagaggagcttccctaccttgtgtgattgtgttgggctttaggagggtgaatttggaatgtctcggtgttcctacatccagctcggctctgtccttcacctgcgtgtggtactctgtgatcatcacagcaggcatggcctacatcttcctgatccagctgatcaacatcagctacaatgtgactgagcgggaagtccagcaggccctccgacagaagactgggcgccggctcctctgcgggctcatcgtggacacaggccagtacaataggggcttcctgcggaactggcaccagttctccaccctgggcacacgtgcattccaccaccctgccgaggacattgtctgaagtgccttctatgtggctctctgagggatgatggctcctccttccgtctcccttccattttacacttcagtgtccatttctatccccagtttcttaaaggcattatagggccatgctcaggtttagagactggagtgggaagaagttaatttttctgacgccacaacttaagagacttttatactgaggcagtaaaagtagagccattcctttccagtcacctttttaattgactcagttgcctgaacttgagaaggatgtggattgctaatgcacaaattgatagaagcaattcccatccattagtatggaggaaagagtgttggattaggatagtttctagtccctctttcgattcttaatagccatgtgacccctagctgagtcactttcccaagtctcagggtcatctgcaaagtggggtactgatgcctgccctggctacctcacagagccgtcatgagggtcacgtgagggaagatggatgtggaaagcactaaaaaacaactcaagagccatggaaatacaaagtattaggaaaatattatgatggaagaaaaacgtttatagtctagaatattgaagccaatattattagggtaatcagttttcagcatataccttgttgtacagttatgagaatttctccttcttattagacatgaactactcaaacagagaagatgaccagatggattgatgctaagttgtctcatcttgaaaagacagttgacaacagttataaagataattattgctagtgtaatgtagtgtggccatgagtttaggtgatgagttcttctatttatattttataaattctgcttgggtttcttataaataactccaacaggcattcatgtgtttttcctcttcccatgtttcaccaggtaaggtgctagcacacttgtgactgtggctggaagaggagaacagacactcctgtggggatgctttactctcttttctggtaggaaggctgagtaacatcacgggctcgattattttcttcatgtatttcaaatgctgtcagttatagcactaaattgtgaaaatcagccttctggcattcacattattctggtatgaactttgaggagttgagtgacatcttcccacttaacttgcacattaattctcaattacccctccctaaataacagtatctcactaagagagaagaaacagggtatatgtggtttccactattaatggattactgttcttccctggctcttccgacaataacaagttgtttctttaatcatatcttaaaaccgaaaatgtataaaagattaaatatttatgtacaatgggttgttctactatagaattaagatgagggaatttcagatgaggaaaatacccttttgaaatgttagttttgaacatgtactgttgtgcaatcccaaagataattcatgactccttaaatttgccttggcttatagcttaatatagggaaaatattgccagcgttttcagtcattctgtgcatgctgctttaagcaagagatttatatttgttgagaggaaatattgctacttcctgcacttccaccctctgcagccagcaccgtccctactgttgccattaattggagctgtccttaagatggtcaccatattcttattcaggctgttgtcattttccccagagatggtttgtttaacgaatgataggctctgtgcctggggatgttagcagactctggggtttgtacagtgatgccttctccctggcccagagctgaatattcatctagaattaaagttggatttgatataacaaatttctttctatacaggttttacataagagagacagtaataatgtcaaggatagcctgtgtgggcagaaattggtagtcgtgcttttgaatgtcagctgtagagccaactctgattatctagccattgatcatacaaattgatagaaacattagtcagtaattttagcttcttgccaaattgttcacaacatctaaatgtaatgtgatgtgatgaagataagtagtacaaagagaccaaaataatttgggagaattaggaatgatgacaattttttttaacaacttacctctaatagggttacttggatgagccaactccgcttccttcccatggataggaagggactctgtgtattattcaggtttattggcacgaagatacttgttttaagttccttgagaacccatgatggacagttgacagaatgcttaaacctgtcaaaagatgagtgatcttgtgtgggaaaagccttcccaggcgtctgtaccgaaaggagcagcaaacaaggggctaatccatgagcagtgttctgtaggctctgtgacatctttggtttataggattttggagccttttatgatctggaactatttgaggggtttcattataggccttggttctctccaggggccagatgagtttattgtggaatctttgaaaggacaaggcctctgtgaatgaatcagtcccagggaagcatttggtggtggcggcagtggaggattgcccggtgaacctataaatcagcagtctcttgggcagaggagcaagcccctcgaacatgatttcaaacaagcaggtcctcttctctcatctcacgtccttagtctctgttaatgaacatactggatgtggagtttaataaattacctactatcatctggccacttagattattatcacaccactgtggactgttcctggggggagaagaacagaccgatttgaaagattcaagggagaaagattaaggatcaggattgcatgaaagaagaaaatccttcaatatttaaaatgtttcttacaatacccacggagcacttttatggttccagccgagcgttcctgaaatgaactgaccattaacagcgcctctttgataggttaccctgatgctgctaaagtaaagccttaagtgtgtttttgggacaacgtgctgcttattccacctcagccacatatgtgtttgtgtttaggatattgtaaatctttgctaagtagtgttttccttggtgaatgaagtcattgttgtcttcaagtgtaccatctgcctagcaaaaaattgctacaaactttctcttatgcaatagtccttggtacttctaatatttttagcaagagacaattttctgtactagaatcttccactgccagaaaacacagtgccagtaaggttctacataccactgaccatctgcttaatagacatgtatttcctttgagtaggacattagcttttgattataaagctcaactagtataagcaaaaatataacatctagaagcacagttttagccaggatgtttaaaaattacagttttgtgagacttaagggtctttttaacctaggtaagtttatatgacctaacttaattgtagccatattctggtaccttccattttgaaaagtagaggttgcttaagcaagcaatggataataagagacttttcctgaggcacctgtttggaatctggttttctcagcggcagcttgacatgtgcacccttttgtattaaacactgcaagggtgatgcaggggagcaggaaagccatcctaaactcactactgagtacgattcagtatgttcctgtggatgtctgctgtgactaatataaatttcttgcagaatcagctacacttaattatgttgctgatagacaagcatccacgcttcagctggcactaagtgttttcattgtaggatcagcagcaggttaaagactgaacggttagtgaagacaaatgtcttaagaggctgcgatgtctaggttgggcttgtgacttcttagtggcctagccttcttgatggcaccttgaaagtgaacttctagaaatctacatttaaaaggcaaagctttaaaagcagagctagtctattctagttactgatgcaactaaaattctgtatttcttaagatggagccactgacgagatgtcacagtatagagcctgcagtctcaactcattgtgatcctaatggtctgggtgattggatggtttgagttgttagggattttgagtttttcattttattgcatatctgggttggatgttagactaaaggaaacccaggaatatttacctggtgttacatttaatatttaatgtaactggtctagcaacattaagggggatttctgaagccaactccggaggctgtgggctgcacattttgcactgtttttatatacttgtattcatatcctcttatcacctcagactcagacacaaggccttttacatggaaattttacaaattacttccatttatgtaaaataacgtcctgtgaccaagttgtttaaatggaaaataaagtgctttctttaaggaaaatagctggtgtttcttggagtgtctcctgaagtcttctgatttctgaaaaccctgcattatacctgtgctgcctctgtggctccctcaatgtctctatcctgtggccctgtccctagccctaaactgttatgttcccggtggcaatttctccagttttgtgggtcagggatactgcttgttggggcattatgttaacagtaacattttgaaacatactttcatgatagtccagcaaaaaacagcatcaaaactatttccattgtatctctttagaaggctctgtattcggtaaaaagtctagctggcgccattggaatatgggctgctaaagactcaatttctagttgatgtttgaggtgaggcaaaaataaagctaaggtag

SEQ ID NO: 23295 - DNA, 317 bp, Homo sapiens
  misc_feature 1..317: note = ENST00000496083
  source 1..317: mol_type = unassigned DNA; mol_type = unassigned DNA
tacaatgtgactgagcgggaagtccagcaggccctccgacagaagactgggcgccggctcctctgcgggctcatcgtggacacagacttgtcttactcaaggaccaagtatctgattgctgatatagctcgtggtaccttccaggtacctggaagtctggaagaatttcaactaccttcctacgaagttgctgtcgcctttcttcttttactctttcctctttcataaattttacaaacttcttccatgtccgaagggtgatccagaggatcctcctttaagaataaagaaggaaaaaagtgaaatgttgagaaaaa

SEQ ID NO: 23296 - DNA, 1414 bp, Homo sapiens
  misc_feature 1..1414: note = ENST00000639389
  source 1..1414: mol_type = unassigned DNA; mol_type = unassigned DNA
atgtcaggcctagatgatatgacagactccgactcctgtctgtctcgcaaaaagatcaagaagacagagagtggcatgtatgcatgtgacttatgtgacaagacattccagaaaagcagttcccttctgcgacataaatacgaacacacagtttatgactcacatgcctccagagaagaagagctaagtgcttggttctggagcggaacatgatcatttttgcctttcggattcctgtggtattgtcccctgtggaggattcaacaggtcagctaattgtctgtaaggaatgggatgttattcagcagaatttcagggagaggaagagatgcagagtctcataagaaaaaagacagagtaaaaaaacagatgtctctttccagagtgtcaggaggggcaggcccacctgggaagtatgatgtatgaggatgcattgtgagaaagaggtggacctaagatagcaaaacagtgagggagctatatggtggagaaatgggagagacacgattccagcaggggaaattttagggagaaacagagaagcctaaatattgttcagaagctttctgtgtggtacatgttacaaaacccctgtttcacctctttactcatagtaaataggttcattattcttctggaccctgtggccagactggagtttccctgaacatgacactacacagtgaccagtctggggaggaggggttacacatcactgaagtagttagataaatagaaacaatatataaggaaagacaatattagtagataaggccccaatccccaaccccatcagtttctgcctgcagcctgtctgaaccctcactattgcctccaagagtgtcattgtgaaaaaatatagagctttcagagaaatgctgggctcagaagtagagaaaagaagacattttgaaaaccataataaaaggtttttaaaaagtaaatatagtacagaggattagcttgtgttcaaaagggcagaaggattagtgtgccatttggtattcctctccttaaaaattttctttcttagaaagaaggaaaggccaggaccggtggctcacacctgtaaccccagcacactgggaggctgaggcaggtagactgcctgaacccaggagttcaaggccagcctgggtaacacggcaaaaccctgcctctacaaaaaatgaaaaaattagctgggtgtggtggcgcacgtctgtagtcccagccactcaggatcctttggtgggaggatcacctgagcctgggaaggtcaaggctgtagtggagttgtagttatgttcaggccaccaccatgctccaacctgggcaacagagtgagaccccgtgtcaagaaagaaagagagaaagagagagggagggagagaggaaggaaaggaagaaggaaggaaggaaggaaggaaggaag

SEQ ID NO: 23297 - DNA, 9339 bp, Homo sapiens
  misc_feature 1..9339: note = ENST00000638087
  source 1..9339: mol_type = unassigned DNA; mol_type = unassigned DNA
ctttcttgtctggtggtaaagtggacaatttatgtactagcatgtaggccgagagcctgtgagggctgactaattcagaaacagccaccttcaattgagttcacagaccttatttacaggctgtctattttaagaaaagctactgagcattgctgggactgagggctgcaaaagcagcccgccggttcttgtgagttattttaacatttgtgttggtcttgcctgtgtcactttgaaatcttctgtaattatgacactatgaagacatctcaatagtagtattaatggcccagaagatatggcttttcctcattttctgcttaaaagattaggatataaatggccttagcacatgacggttgacatagaagaaagagtgaaaattcagatggagcagtggtgaactatgacaatgtagtggacacaggttctgaaacagatgaggaagacaagcttcatattgctgaggatgacggtattgccaaccctctggaccaggagacgagtccagctagtgtgcccaaccatgagtcctccccacacgtgagccaagctctgttgccaagagaggaagaggaagatgaaataagggagggtggagtggaacacccctggcacaacaacgagattctacaagcctctgtagatggtccagaagaaatgaaggaagactatgacactatggggccagaagccacgatccagaccgcaattaacaatggtacagtgaagaatgcaaattgcacatcagattttgaggaatactttgccaaaagaaaactggaggaacgcgatggtcatgcagtcagcatcgaggagtaccttcagcgcagtgacacagccattatttacccagaagcccctgaggagctgtctcgccttggcacgccagaggccaatgggcaagaagaaaatgacctgccacctggaactccagatgcttttgcccaactgctgacctgcccctactgcgaccggggctacaagcgcttgacatcactgaaggagcacatcaagtaccgccacgagaagaatgaagagaacttttcctgccctctctgtagctacacgtttgcctaccgcacccagctcgagcggcatatggtgacacacaagccagggacagatcagcaccaaatgctaacccaaggagcaggtaatcgcaagttcaaatgcacagagtgtggcaaggccttcaaatataaacaccatctgaaagaacacctgcgaattcacagtggtgaaaaaccttacgagtgcccaaactgcaagaaacgtttctcccattctggttcctacagttcgcacatcagcagcaagaaatgtattggtttaatctctgtaaatggccgaatgagaaacaatatcaagacgggttcttcccctaattctgtttcttcttctcctactaattcagccattacccagttaagaaacaagttggagaatggaaaaccacttagtatgtctgaacagacaggcttacttaaaattaaaacagaaccactagacttcaatgactataaagttcttatggctacacacgggtttagtggcactagtccctttatgaatggtgggcttggagccaccagccctttaggagttcatccatctgctcagagtccaatgcagcacttaggtgtagggatggaagcccctttacttgggtttcccaccatgaatagtaatttaagtgaggtacaaaaggttctacagattgtggacaatactgtttccaggcaaaaaatggactgcaaggctgaagaaatttcaaagttgaaaggttatcacatgaaggatccatgctctcaacctgaggaacaaggagttacttctcctaatattccgcctgtcggtcttccggtagtgagtcataatggtgccactaaaagtattattgactatacgttggaaaaagtcaatgaagccaaagcttgcctccagagcttgactactgactcaaggagacagatcagtaatataaagaaagagaagctacgtactttaatagatttggtcactgatgacaaaatgattgagaaccacaacatatccactccattttcatgccagttctgtaaagaaagttttcctggccccatccctttgcatcagcatgaacgttacctttgtaagatgaatgaagagatcaaggcggtcctgcagcctcatgaaaacatagtccccaacaaagccggagtttttgttgataataaagccctcctcttgtcatctgtactttctgagaaaggaatgacaagccccatcaacccatacaaggaccacatgtctgtactcaaagcatactatgctatgaacatggagcccaactccgatgaactgctgaaaatttccattgctgtgggccttcctcaggaatttgtgaaggaatggtttgaacaacgaaaagtctaccagtactcaaattccaggtccccatccctggaaagaagctccaagccgttagctcccaacagtaaccctcccacaaaagactctttattacccaggtctcctgtaaaacctatggactccataacatcaccatctatagcagaactccacaacagtgttacgaattgtgatcctcctctcaggctaacaaaaccttcccattttaccaatattaaaccagttgaaaaattggaccactccaggagtaatactccttctcccttaaatctttcctccacatcttctaaaaactcccacagtagttcatacactccaaacagcttctcttctgaggagctccaggctgagcctttagacttgtcattaccaaaacaaatgaaagaacccaaaagtattatagccacaaagaacaaaacaaaagctagtagcatcagtttagatcataacagtgtttcttcctcatctgaaaactcagatgagcctctgaacttgacttttatcaagaaggaattttcaaattcaaataatctggacaacaaaagcactaacccagtgttcagcatgaacccatttagtgccaaacctttatacacagctcttccacctcaaagcgcatttccccctgctactttcatgccaccagtccagaccagtattcctgggctacgaccatacccaggactggatcagatgagcttcctaccacatatggcctacacctacccaactggagcagctacttttgctgatatgcagcaaaggagaaagtaccagcggaaacaaggatttcagggagaattgcttgatggagcacaagactacatgtcaggcctagatgatatgacagactccgactcctgtctgtctcgcaaaaagatcaagaagacagagagtggcatgtatgcatgtgacttatgtgacaagacattccagaaaagcagttcccttctgcgacataaatacgaacacacaggaaaaagaccacatcagtgtcagatttgtaagaaagcgtttaaacacaagcaccaccttatcgagcactcaaggcttcactcgggcgagaagccctatcagtgtgataaatgtggcaagcgcttctcacactcgggctcgtactcgcagcacatgaatcacaggtattcctactgcaagcgggaggcggaggagcgggaagcggcggagcgcgaggcgcgcgagaaagggcacttggaacccaccgagctgctgatgaaccgggcttacttgcagagcattacccctcaggggtactctgactcggaggagagggagagtatgccgagggatggcgagagcgagaaggagcacgagaaagaaggcgaggatggctacgggaagctgggcagacaggatggcgacgaggagttcgaggaggaagaggaagaaagtgaaaataaaagtatggatacggatcccgaaacgatacgagatgaagaagagactggagatcactccatggacgatagttcggaggatgggaaaatggaaaccaaatcagaccacgaggaagacaatatggaagatggcatgtaataaactactgcattttaagcttcctatttttttttccagtagtattgttacctgcttgaaaacactgctgtgttaagctgttcatgcacgtgcctgacgcttccaggaagctgtagagagggacagaaggggcggttcagccaagacagatgtagacggagttggagctgggtattgttaaaaactgcattatgcaaaaattttgtacagtgttaaggcctaaaaactgtgtggttcagagactaattcctgtgtttaatagcatttatactttaagcacaactagaaaattgtaagaattgcactctacttatgtatcactacaaactttaaaaaactatgtctaatttatattaatacattttaaaaaggtgcccgcactaccatacatcagtatttttattattattattgttattcctttttaatttaatgtgctcgcactacaatgcatcagtattatgattcctctgtactttcctttcgctattcatcaatttcccattttttttttcagcttaagtaaccacacaattttaggcctcaatttttttttttttctgtgaaggaacttgaagtgatgcatgtgtgaatttaagataccgaagtcttaaagtgacctggacgtgaaggaaaaagtaagatgagaaataaagaaagcctttgtaaggtggttttaaaagccttatatgcaaaccttttaatctgtgtttctgcaagtgccatccttgtacagtgttaagagggtaacatgggttacctttgcaccagcttcagtgttaagctcaccctgttctttgaagcacccatgtcagtattagaagaataggcagcagttccttagtttacatatgtttgtgcaattattttctgtacttttttgttcattaattttgtcagtattacaccaaactgtttttgcaacaaaaaaattttttttgcattcatttaattttaggtcaaataacattttatttatgtggctcattttatatttcctaattttatttatttcatactgtagtgtacagtattatagttcttcaatatatagatatattttagtaaaaaaggaacatgacgttgatcatttgggcaaattttacgtaaagagaagagcatttattgtgttttggaacattaattgtgagatgggatttttcaattttattattttatttttgtttttttccaattactggaaattccaaatttgggaacttttgatacgatcttgtgaaaacactgtattttcgactgaaaattccactttcttcatcttgttttttagctaaaaagagggactgttaaatacaatgtatgataccatgacaaaaatctttcctgaattgtctttgtaaaagtattattgaattttcaatttgtaatttcttttgaaaatgaccatgctcgaataaaaatgtagccaaactaagaatgtagttaatgagttctgtacttttagagagttttccttcaatgaccattaacatgtaacatgctttatgcttataataatgctaattatgtttttttcatataattttagtttagcaataattttgactggtaccaataactgttttttaaaattccatacctatgtacagcaattttacagcttttctcaactgatcctgattccagattgtgtatttttatgtgaggttatattattcaaatttagtctatttactttacagacatttctacttttgcattacgagtatttagagattatgtgttaaaaattcacttctctgtccaaggggtctttgtgatttattcaaaaaaaagtctaatttcaaaaagacagctattattcagtgttatttataatatgtaaccttttttaaaggattgggatagtttatctcactttttgaaatgcagacagtagtttaccgtttatctgaaactagaaggcgtgggtgggagaggaaaagctaaaagcaaatgctaacaaaaataaccgtgattttctaagacagtttttcagtttttacaagatgaccctaatattcagaatatgaatgtattcgtaggttttacataatgacttttatcaagaaactagattctgcttcttaaatctaattgccaagtgaagaataacagaaaaaacagattaccttatcaaatttacagctcttgaatatacagaactataatatagtagctgtccatgtattttttctactttagaatcaaagaagaaaagcatcattttgctattaaatttgctaaaattttgagtatgatatttccagttggcaagaacaacatatttatatttattccttagccataataccactttcctaaatttcacaaaagtcattctttgcaacttgaaactcaatagaaagtgtgtatgtgtgtgtgtgtatatatatatatatatacacacacacacatacacagaaaggatgtaatgaagatacagtaatagttgagcagacctttttagaaaaacatgtttttagctctatcttcaaactttctggcagagggggtggggggggcagggggaggagtggcatcaaaatgctatgcctcctgttatccacagcctagagtttttatatttggaaagtttagaaaattctatcctcgtttctccttctttgaatggcacaaataaatacactacataaatttttctggtttgaaaggctctaggcgataactttattaattcaacctgaaaatatcaagccattaaattttgtccgggtagaataaatccctgtggcctcttttaaagcaatgtaggtctctgttgcccatggggcatatctgtgtcccaatccacaagagataggaccaacaaacaatgaatgtgcaacctaactctttctccttggaaagaagaaagtgtgcacgaagtagaggagggtgggcagaccctgccttgcccctcctgttacccccttctctgtcatttgttcctaactccatttcataggcaggctcagaatacctgagtctgaaaatatcaggataacacttgtgaattgtgacaatcactacaatgtcccatatctgaggagttttttttaatgctatttatccgctggacacgattgcacattagggctgcataatcctctaactctagggaaaaataaaaacttttgatttgtcttaagattcttctccaaggtcgcaaacaagaaattcccctccacaaccaagagatgtgcattttagtaacatcagatgtgttcttctgttttatcaactacttactcttcccacacgcttagttctaaatctaacctttcccccctcgaatagggggcaggggaggatgaggaaacactggaacaactgaacacccctgcccattttctccaagagccttttgtattctagcatatctgtgcaatcttttcttttttcttcacatgacactgtaagcttaggcctgaaataactgggaagagagatgcgtatcagaatttctccgcaagagctaaacaaaacatacatcttccttagcatgaattggactgggggcggagtgggagggcttggaggaaaggggaaagaagggactatatttgaataaatatgaataaatgtattagatacttttcacaatcagataacttttaaaaaggtcattttttatctttctaataatgtaagccttaataaaagcaaatcttagtcacaaatttgaggagactgcccaataataagtttacatgtatttgaactgaaaaattgttaaccatgcttttgctccaagatgtgtgaggccattcaggggctgtagggccctggatatacacacaaacaagtgtgtgtatatctggagccccacacattgtaataaacacagctgcatttatttgactatgtgatcccatgtacatgtaaaaacattcaaacaaacacactcagcggatttatttattgtgcaatggggcaattattcaaataaacatgctcaatgcaattatttgaatctcacattgcatgttcatcaatcatagcactaaaaaaagagggggaaaaaacaccaaagaattcacatggggaaaaaatatatatatgaaaaccaccttattatagattttatagggcagctgaggttatggctcccttcttaactgtaactcaactattctgtattcaatgacatttgtttctaatgattaattggttcactcacttgatcatataatagcaaactttataaacctgtattgtgtagagatgtgaaatctctatatttcaagagcagaagagttctttctagacaccttacatcaagggacactggtccaattattatcgcttatataagcactcctataaattctgaaaaattttatacatgcaacaaaacattcctacatttgaagacattaagaaaaatcacaggtgactcatctgatcattctatatattaataaatattatgacatatatgtgaacacatcacaaatcatattggtgtaccaagaggcaatttatgcctctcttaagtatgtactgacataacctaatatactaaaatgggaaggggcttttagtcactgaaatatgcatcgtgtaacaaagatgaagaaaatacatggcttgtgcccatcataaaaaaagattcagactgaaggcttagctttggttttttcaattaaattgttaaactgtgcacagtgatttttttttagaacttgagacatttgtgatgttggctgtttaaatctttgttaccttcgctgtgaattgaaattgtacatatttagtaaatcatgcagacaaaacaaactttttagacaatatttttattggagagttttcttttcctgtatccatgttaaaaaaaaaaaagacctcctttcccaaaataaaaatgtcaatactaaatttaaagaagtataaaggaatgattgcttcctttagagcaaaatatttaaataaacatggagataattggcaacatgttctttttgggctagtaggctgtgtccaattttttgggtctgatgtttcagagggcctctgtttcagggttgaagatgatatattaatctcggaattaaacaaatgctattaaataacagaaataaatccttcagtcttcatttgtatctgaaatgtggaattagtcagagaaatggcaccgagataatatgatgctgaatatgccacaagctaaaactttctctattaaacgagtcgcctactacctataatctagcatgacatgttaaaatgctccaaaatactgaaaatagaaaatgaacactactgttccgatttggtcttgagattaatatgacaaagattctaataattttagtcaaagaaaatgatgagtaaaaaatacatgaagattaaagtgatgacaaatga

SEQ ID NO: 23298 - DNA, 9140 bp, Homo sapiens
  misc_feature 1..9140: note = ENST00000638007
  source 1..9140: mol_type = unassigned DNA; mol_type = unassigned DNA
actctaatctttcttgtctggtggtaaagtggacaatttatgtactagcatgtaggccgagagcctgtgagggctgactaattcagaaacagccaccttcaattgagttcacagaccttatttacaggctgtctattttaagaaaagctactgagcattgctgggactgagggctgcaaaagcagcccgccggttctttggtgaactatgacaatgtagtggacacaggttctgaaacagatgaggaagacaagcttcatattgctgaggatgacggtattgccaaccctctggaccaggagacgagtccagctagtgtgcccaaccatgagtcctccccacacgtgagccaagctctgttgccaagagaggaagaggaagatgaaataagggagggtggagtggaacacccctggcacaacaacgagattctacaagcctctgtagatggtccagaagaaatgaaggaagactatgacactatggggccagaagccacgatccagaccgcaattaacaatggtacagtgaagaatgcaaattgcacatcagattttgaggaatactttgccaaaagaaaactggaggaacgcgatggtcatgcagtcagcatcgaggagtaccttcagcgcagtgacacagccattatttacccagaagcccctgaggagctgtctcgccttggcacgccagaggccaatgggcaagaagaaaatgacctgccacctggaactccagatgcttttgcccaactgctgacctgcccctactgcgaccggggctacaagcgcttgacatcactgaaggagcacatcaagtaccgccacgagaagaatgaagagaacttttcctgccctctctgtagctacacgtttgcctaccgcacccagctcgagcggcatatggtgacacacaagccagggacagatcagcaccaaatgctaacccaaggagcaggtaatcgcaagttcaaatgcacagagtgtggcaaggccttcaaatataaacaccatctgaaagaacacctgcgaattcacagtggtgaaaaaccttacgagtgcccaaactgcaagaaacgtttctcccattctggttcctacagttcgcacatcagcagcaagaaatgtattggtttaatctctgtaaatggccgaatgagaaacaatatcaagacgggttcttcccctaattctgtttcttcttctcctactaattcagccattacccagttaagaaacaagttggagaatggaaaaccacttagtatgtctgaacagacaggcttacttaaaattaaaacagaaccactagacttcaatgactataaagttcttatggctacacacgggtttagtggcactagtccctttatgaatggtgggcttggagccaccagccctttaggagttcatccatctgctcagagtccaatgcagcacttaggtgtagggatggaagcccctttacttgggtttcccaccatgaatagtaatttaagtgaggtacaaaaggttctacagattgtggacaatactgtttccaggcaaaaaatggactgcaaggctgaagaaatttcaaagttgaaaggttatcacatgaaggatccatgctctcaacctgaggaacaaggagttacttctcctaatattccgcctgtcggtcttccggtagtgagtcataatggtgccactaaaagtattattgactatacgttggaaaaagtcaatgaagccaaagcttgcctccagagcttgactactgactcaaggagacagatcagtaatataaagaaagagaagctacgtactttaatagatttggtcactgatgacaaaatgattgagaaccacaacatatccactccattttcatgccagttctgtaaagaaagttttcctggccccatccctttgcatcagcatgaacgttacctttgtaagatgaatgaagagatcaaggcggtcctgcagcctcatgaaaacatagtccccaacaaagccggagtttttgttgataataaagccctcctcttgtcatctgtactttctgagaaaggaatgacaagccccatcaacccatacaaggaccacatgtctgtactcaaagcatactatgctatgaacatggagcccaactccgatgaactgctgaaaatttccattgctgtgggccttcctcaggaatttgtgaaggaatggtttgaacaacgaaaagtctaccagtactcaaattccaggtccccatccctggaaagaagctccaagccgttagctcccaacagtaaccctcccacaaaagactctttattacccaggtctcctgtaaaacctatggactccataacatcaccatctatagcagaactccacaacagtgttacgaattgtgatcctcctctcaggctaacaaaaccttcccattttaccaatattaaaccagttgaaaaattggaccactccaggagtaatactccttctcccttaaatctttcctccacatcttctaaaaactcccacagtagttcatacactccaaacagcttctcttctgaggagctccaggctgagcctttagacttgtcattaccaaaacaaatgaaagaacccaaaagtattatagccacaaagaacaaaacaaaagctagtagcatcagtttagatcataacagtgtttcttcctcatctgaaaactcagatgagcctctgaacttgacttttatcaagaaggaattttcaaattcaaataatctggacaacaaaagcactaacccagtgttcagcatgaacccatttagtgccaaacctttatacacagctcttccacctcaaagcgcatttccccctgctactttcatgccaccagtccagaccagtattcctgggctacgaccatacccaggactggatcagatgagcttcctaccacatatggcctacacctacccaactggagcagctacttttgctgatatgcagcaaaggagaaagtaccagcggaaacaaggatttcagggagaattgcttgatggagcacaagactacatgtcaggcctagatgatatgacagactccgactcctgtctgtctcgcaaaaagatcaagaagacagagagtggcatgtatgcatgtgacttatgtgacaagacattccagaaaagcagttcccttctgcgacataaatacgaacacacaggaaaaagaccacatcagtgtcagatttgtaagaaagcgtttaaacacaagcaccaccttatcgagcactcaaggcttcactcgggcgagaagccctatcagtgtgataaatgtggcaagcgcttctcacactcgggctcgtactcgcagcacatgaatcacaggtattcctactgcaagcgggaggcggaggagcgggaagcggcggagcgcgaggcgcgcgagaaagggcacttggaacccaccgagctgctgatgaaccgggcttacttgcagagcattacccctcaggggtactctgactcggaggagagggagagtatgccgagggatggcgagagcgagaaggagcacgagaaagaaggcgaggatggctacgggaagctgggcagacaggatggcgacgaggagttcgaggaggaagaggaagaaagtgaaaataaaagtatggatacggatcccgaaacgatacgagatgaagaagagactggagatcactccatggacgatagttcggaggatgggaaaatggaaaccaaatcagaccacgaggaagacaatatggaagatggcatgtaataaactactgcattttaagcttcctatttttttttccagtagtattgttacctgcttgaaaacactgctgtgttaagctgttcatgcacgtgcctgacgcttccaggaagctgtagagagggacagaaggggcggttcagccaagacagatgtagacggagttggagctgggtattgttaaaaactgcattatgcaaaaattttgtacagtgttaaggcctaaaaactgtgtggttcagagactaattcctgtgtttaatagcatttatactttaagcacaactagaaaattgtaagaattgcactctacttatgtatcactacaaactttaaaaaactatgtctaatttatattaatacattttaaaaaggtgcccgcactaccatacatcagtatttttattattattattgttattcctttttaatttaatgtgctcgcactacaatgcatcagtattatgattcctctgtactttcctttcgctattcatcaatttcccattttttttttcagcttaagtaaccacacaattttaggcctcaatttttttttttttctgtgaaggaacttgaagtgatgcatgtgtgaatttaagataccgaagtcttaaagtgacctggacgtgaaggaaaaagtaagatgagaaataaagaaagcctttgtaaggtggttttaaaagccttatatgcaaaccttttaatctgtgtttctgcaagtgccatccttgtacagtgttaagagggtaacatgggttacctttgcaccagcttcagtgttaagctcaccctgttctttgaagcacccatgtcagtattagaagaataggcagcagttccttagtttacatatgtttgtgcaattattttctgtacttttttgttcattaattttgtcagtattacaccaaactgtttttgcaacaaaaaaattttttttgcattcatttaattttaggtcaaataacattttatttatgtggctcattttatatttcctaattttatttatttcatactgtagtgtacagtattatagttcttcaatatatagatatattttagtaaaaaaggaacatgacgttgatcatttgggcaaattttacgtaaagagaagagcatttattgtgttttggaacattaattgtgagatgggatttttcaattttattattttatttttgtttttttccaattactggaaattccaaatttgggaacttttgatacgatcttgtgaaaacactgtattttcgactgaaaattccactttcttcatcttgttttttagctaaaaagagggactgttaaatacaatgtatgataccatgacaaaaatctttcctgaattgtctttgtaaaagtattattgaattttcaatttgtaatttcttttgaaaatgaccatgctcgaataaaaatgtagccaaactaagaatgtagttaatgagttctgtacttttagagagttttccttcaatgaccattaacatgtaacatgctttatgcttataataatgctaattatgtttttttcatataattttagtttagcaataattttgactggtaccaataactgttttttaaaattccatacctatgtacagcaattttacagcttttctcaactgatcctgattccagattgtgtatttttatgtgaggttatattattcaaatttagtctatttactttacagacatttctacttttgcattacgagtatttagagattatgtgttaaaaattcacttctctgtccaaggggtctttgtgatttattcaaaaaaaagtctaatttcaaaaagacagctattattcagtgttatttataatatgtaaccttttttaaaggattgggatagtttatctcactttttgaaatgcagacagtagtttaccgtttatctgaaactagaaggcgtgggtgggagaggaaaagctaaaagcaaatgctaacaaaaataaccgtgattttctaagacagtttttcagtttttacaagatgaccctaatattcagaatatgaatgtattcgtaggttttacataatgacttttatcaagaaactagattctgcttcttaaatctaattgccaagtgaagaataacagaaaaaacagattaccttatcaaatttacagctcttgaatatacagaactataatatagtagctgtccatgtattttttctactttagaatcaaagaagaaaagcatcattttgctattaaatttgctaaaattttgagtatgatatttccagttggcaagaacaacatatttatatttattccttagccataataccactttcctaaatttcacaaaagtcattctttgcaacttgaaactcaatagaaagtgtgtatgtgtgtgtgtgtatatatatatatatatacacacacacacatacacagaaaggatgtaatgaagatacagtaatagttgagcagacctttttagaaaaacatgtttttagctctatcttcaaactttctggcagagggggtggggggggcagggggaggagtggcatcaaaatgctatgcctcctgttatccacagcctagagtttttatatttggaaagtttagaaaattctatcctcgtttctccttctttgaatggcacaaataaatacactacataaatttttctggtttgaaaggctctaggcgataactttattaattcaacctgaaaatatcaagccattaaattttgtccgggtagaataaatccctgtggcctcttttaaagcaatgtaggtctctgttgcccatggggcatatctgtgtcccaatccacaagagataggaccaacaaacaatgaatgtgcaacctaactctttctccttggaaagaagaaagtgtgcacgaagtagaggagggtgggcagaccctgccttgcccctcctgttacccccttctctgtcatttgttcctaactccatttcataggcaggctcagaatacctgagtctgaaaatatcaggataacacttgtgaattgtgacaatcactacaatgtcccatatctgaggagttttttttaatgctatttatccgctggacacgattgcacattagggctgcataatcctctaactctagggaaaaataaaaacttttgatttgtcttaagattcttctccaaggtcgcaaacaagaaattcccctccacaaccaagagatgtgcattttagtaacatcagatgtgttcttctgttttatcaactacttactcttcccacacgcttagttctaaatctaacctttcccccctcgaatagggggcaggggaggatgaggaaacactggaacaactgaacacccctgcccattttctccaagagccttttgtattctagcatatctgtgcaatcttttcttttttcttcacatgacactgtaagcttaggcctgaaataactgggaagagagatgcgtatcagaatttctccgcaagagctaaacaaaacatacatcttccttagcatgaattggactgggggcggagtgggagggcttggaggaaaggggaaagaagggactatatttgaataaatatgaataaatgtattagatacttttcacaatcagataacttttaaaaaggtcattttttatctttctaataatgtaagccttaataaaagcaaatcttagtcacaaatttgaggagactgcccaataataagtttacatgtatttgaactgaaaaattgttaaccatgcttttgctccaagatgtgtgaggccattcaggggctgtagggccctggatatacacacaaacaagtgtgtgtatatctggagccccacacattgtaataaacacagctgcatttatttgactatgtgatcccatgtacatgtaaaaacattcaaacaaacacactcagcggatttatttattgtgcaatggggcaattattcaaataaacatgctcaatgcaattatttgaatctcacattgcatgttcatcaatcatagcactaaaaaaagagggggaaaaaacaccaaagaattcacatggggaaaaaatatatatatgaaaaccaccttattatagattttatagggcagctgaggttatggctcccttcttaactgtaactcaactattctgtattcaatgacatttgtttctaatgattaattggttcactcacttgatcatataatagcaaactttataaacctgtattgtgtagagatgtgaaatctctatatttcaagagcagaagagttctttctagacaccttacatcaagggacactggtccaattattatcgcttatataagcactcctataaattctgaaaaattttatacatgcaacaaaacattcctacatttgaagacattaagaaaaatcacaggtgactcatctgatcattctatatattaataaatattatgacatatatgtgaacacatcacaaatcatattggtgtaccaagaggcaatttatgcctctcttaagtatgtactgacataacctaatatactaaaatgggaaggggcttttagtcactgaaatatgcatcgtgtaacaaagatgaagaaaatacatggcttgtgcccatcataaaaaaagattcagactgaaggcttagctttggttttttcaattaaattgttaaactgtgcacagtgatttttttttagaacttgagacatttgtgatgttggctgtttaaatctttgttaccttcgctgtgaattgaaattgtacatatttagtaaatcatgcagacaaaacaaactttttagacaatatttttattggagagttttcttttcctgtatccatgttaaaaaaaaaaaagacctcctttcccaaaataaaaatgtcaatactaaatttaaagaagtataaaggaatgattgcttcctttagagcaaaatatttaaataaacatggagataattggcaacatgttctttttgggctagtaggctgtgtccaattttttgggtctgatgtttcagagggcctctgtttcagggttgaagatgatatattaatctcggaattaaacaaatgctattaaataacagaaataaatccttcagtcttcatttgtatctgaaatgtggaattagtcagagaaatggcaccgagataatatgatgctgaatatgccacaagctaaaactttctctattaaacgagtcgcctactacctataatctagcatgacatgttaaaatgctccaaaatactgaaaatagaaaatgaacactactgttccgatttggtcttgagattaatatgacaaagattctaataattttagtcaaagaaaatgatgagtaaaaaatacatgaagattaaagtgatgacaaatga

SEQ ID NO: 23299 - DNA, 8984 bp, Homo sapiens
  misc_feature 1..8984: note = ENST00000636413
  source 1..8984: mol_type = unassigned DNA; mol_type = unassigned DNA
gggttaacagttcttggcaatcctgtgtgtgcgtaacggctgtggtgaactatgacaatgtagtggacacaggttctgaaacagatgaggaagacaagcttcatattgctgaggatgacggtattgccaaccctctggaccaggagacgagtccagctagtgtgcccaaccatgagtcctccccacacgtgagccaagctctgttgccaagagaggaagaggaagatgaaataagggagggtggagtggaacacccctggcacaacaacgagattctacaagcctctgtagatggtccagaagaaatgaaggaagactatgacactatggggccagaagccacgatccagaccgcaattaacaatggtacagtgaagaatgcaaattgcacatcagattttgaggaatactttgccaaaagaaaactggaggaacgcgatggtcatgcagtcagcatcgaggagtaccttcagcgcagtgacacagccattatttacccagaagcccctgaggagctgtctcgccttggcacgccagaggccaatgggcaagaagaaaatgacctgccacctggaactccagatgcttttgcccaactgctgacctgcccctactgcgaccggggctacaagcgcttgacatcactgaaggagcacatcaagtaccgccacgagaagaatgaagagaacttttcctgccctctctgtagctacacgtttgcctaccgcacccagctcgagcggcatatggtgacacacaagccagggacagatcagcaccaaatgctaacccaaggagcaggtaatcgcaagttcaaatgcacagagtgtggcaaggccttcaaatataaacaccatctgaaagaacacctgcgaattcacagtggtgaaaaaccttacgagtgcccaaactgcaagaaacgtttctcccattctggttcctacagttcgcacatcagcagcaagaaatgtattggtttaatctctgtaaatggccgaatgagaaacaatatcaagacgggttcttcccctaattctgtttcttcttctcctactaattcagccattacccagttaagaaacaagttggagaatggaaaaccacttagtatgtctgaacagacaggcttacttaaaattaaaacagaaccactagacttcaatgactataaagttcttatggctacacacgggtttagtggcactagtccctttatgaatggtgggcttggagccaccagccctttaggagttcatccatctgctcagagtccaatgcagcacttaggtgtagggatggaagcccctttacttgggtttcccaccatgaatagtaatttaagtgaggtacaaaaggttctacagattgtggacaatactgtttccaggcaaaaaatggactgcaaggctgaagaaatttcaaagttgaaaggttatcacatgaaggatccatgctctcaacctgaggaacaaggagttacttctcctaatattccgcctgtcggtcttccggtagtgagtcataatggtgccactaaaagtattattgactatacgttggaaaaagtcaatgaagccaaagcttgcctccagagcttgactactgactcaaggagacagatcagtaatataaagaaagagaagctacgtactttaatagatttggtcactgatgacaaaatgattgagaaccacaacatatccactccattttcatgccagttctgtaaagaaagttttcctggccccatccctttgcatcagcatgaacgttacctttgtaagatgaatgaagagatcaaggcggtcctgcagcctcatgaaaacatagtccccaacaaagccggagtttttgttgataataaagccctcctcttgtcatctgtactttctgagaaaggaatgacaagccccatcaacccatacaaggaccacatgtctgtactcaaagcatactatgctatgaacatggagcccaactccgatgaactgctgaaaatttccattgctgtgggccttcctcaggaatttgtgaaggaatggtttgaacaacgaaaagtctaccagtactcaaattccaggtccccatccctggaaagaagctccaagccgttagctcccaacagtaaccctcccacaaaagactctttattacccaggtctcctgtaaaacctatggactccataacatcaccatctatagcagaactccacaacagtgttacgaattgtgatcctcctctcaggctaacaaaaccttcccattttaccaatattaaaccagttgaaaaattggaccactccaggagtaatactccttctcccttaaatctttcctccacatcttctaaaaactcccacagtagttcatacactccaaacagcttctcttctgaggagctccaggctgagcctttagacttgtcattaccaaaacaaatgaaagaacccaaaagtattatagccacaaagaacaaaacaaaagctagtagcatcagtttagatcataacagtgtttcttcctcatctgaaaactcagatgagcctctgaacttgacttttatcaagaaggaattttcaaattcaaataatctggacaacaaaagcactaacccagtgttcagcatgaacccatttagtgccaaacctttatacacagctcttccacctcaaagcgcatttccccctgctactttcatgccaccagtccagaccagtattcctgggctacgaccatacccaggactggatcagatgagcttcctaccacatatggcctacacctacccaactggagcagctacttttgctgatatgcagcaaaggagaaagtaccagcggaaacaaggatttcagggagaattgcttgatggagcacaagactacatgtcaggcctagatgatatgacagactccgactcctgtctgtctcgcaaaaagatcaagaagacagagagtggcatgtatgcatgtgacttatgtgacaagacattccagaaaagcagttcccttctgcgacataaatacgaacacacaggaaaaagaccacatcagtgtcagatttgtaagaaagcgtttaaacacaagcaccaccttatcgagcactcaaggcttcactcgggcgagaagccctatcagtgtgataaatgtggcaagcgcttctcacactcgggctcgtactcgcagcacatgaatcacaggtattcctactgcaagcgggaggcggaggagcgggaagcggcggagcgcgaggcgcgcgagaaagggcacttggaacccaccgagctgctgatgaaccgggcttacttgcagagcattacccctcaggggtactctgactcggaggagagggagagtatgccgagggatggcgagagcgagaaggagcacgagaaagaaggcgaggatggctacgggaagctgggcagacaggatggcgacgaggagttcgaggaggaagaggaagaaagtgaaaataaaagtatggatacggatcccgaaacgatacgagatgaagaagagactggagatcactccatggacgatagttcggaggatgggaaaatggaaaccaaatcagaccacgaggaagacaatatggaagatggcatgtaataaactactgcattttaagcttcctatttttttttccagtagtattgttacctgcttgaaaacactgctgtgttaagctgttcatgcacgtgcctgacgcttccaggaagctgtagagagggacagaaggggcggttcagccaagacagatgtagacggagttggagctgggtattgttaaaaactgcattatgcaaaaattttgtacagtgttaaggcctaaaaactgtgtggttcagagactaattcctgtgtttaatagcatttatactttaagcacaactagaaaattgtaagaattgcactctacttatgtatcactacaaactttaaaaaactatgtctaatttatattaatacattttaaaaaggtgcccgcactaccatacatcagtatttttattattattattgttattcctttttaatttaatgtgctcgcactacaatgcatcagtattatgattcctctgtactttcctttcgctattcatcaatttcccattttttttttcagcttaagtaaccacacaattttaggcctcaatttttttttttttctgtgaaggaacttgaagtgatgcatgtgtgaatttaagataccgaagtcttaaagtgacctggacgtgaaggaaaaagtaagatgagaaataaagaaagcctttgtaaggtggttttaaaagccttatatgcaaaccttttaatctgtgtttctgcaagtgccatccttgtacagtgttaagagggtaacatgggttacctttgcaccagcttcagtgttaagctcaccctgttctttgaagcacccatgtcagtattagaagaataggcagcagttccttagtttacatatgtttgtgcaattattttctgtacttttttgttcattaattttgtcagtattacaccaaactgtttttgcaacaaaaaaattttttttgcattcatttaattttaggtcaaataacattttatttatgtggctcattttatatttcctaattttatttatttcatactgtagtgtacagtattatagttcttcaatatatagatatattttagtaaaaaaggaacatgacgttgatcatttgggcaaattttacgtaaagagaagagcatttattgtgttttggaacattaattgtgagatgggatttttcaattttattattttatttttgtttttttccaattactggaaattccaaatttgggaacttttgatacgatcttgtgaaaacactgtattttcgactgaaaattccactttcttcatcttgttttttagctaaaaagagggactgttaaatacaatgtatgataccatgacaaaaatctttcctgaattgtctttgtaaaagtattattgaattttcaatttgtaatttcttttgaaaatgaccatgctcgaataaaaatgtagccaaactaagaatgtagttaatgagttctgtacttttagagagttttccttcaatgaccattaacatgtaacatgctttatgcttataataatgctaattatgtttttttcatataattttagtttagcaataattttgactggtaccaataactgttttttaaaattccatacctatgtacagcaattttacagcttttctcaactgatcctgattccagattgtgtatttttatgtgaggttatattattcaaatttagtctatttactttacagacatttctacttttgcattacgagtatttagagattatgtgttaaaaattcacttctctgtccaaggggtctttgtgatttattcaaaaaaaagtctaatttcaaaaagacagctattattcagtgttatttataatatgtaaccttttttaaaggattgggatagtttatctcactttttgaaatgcagacagtagtttaccgtttatctgaaactagaaggcgtgggtgggagaggaaaagctaaaagcaaatgctaacaaaaataaccgtgattttctaagacagtttttcagtttttacaagatgaccctaatattcagaatatgaatgtattcgtaggttttacataatgacttttatcaagaaactagattctgcttcttaaatctaattgccaagtgaagaataacagaaaaaacagattaccttatcaaatttacagctcttgaatatacagaactataatatagtagctgtccatgtattttttctactttagaatcaaagaagaaaagcatcattttgctattaaatttgctaaaattttgagtatgatatttccagttggcaagaacaacatatttatatttattccttagccataataccactttcctaaatttcacaaaagtcattctttgcaacttgaaactcaatagaaagtgtgtatgtgtgtgtgtgtatatatatatatatatacacacacacacatacacagaaaggatgtaatgaagatacagtaatagttgagcagacctttttagaaaaacatgtttttagctctatcttcaaactttctggcagagggggtggggggggcagggggaggagtggcatcaaaatgctatgcctcctgttatccacagcctagagtttttatatttggaaagtttagaaaattctatcctcgtttctccttctttgaatggcacaaataaatacactacataaatttttctggtttgaaaggctctaggcgataactttattaattcaacctgaaaatatcaagccattaaattttgtccgggtagaataaatccctgtggcctcttttaaagcaatgtaggtctctgttgcccatggggcatatctgtgtcccaatccacaagagataggaccaacaaacaatgaatgtgcaacctaactctttctccttggaaagaagaaagtgtgcacgaagtagaggagggtgggcagaccctgccttgcccctcctgttacccccttctctgtcatttgttcctaactccatttcataggcaggctcagaatacctgagtctgaaaatatcaggataacacttgtgaattgtgacaatcactacaatgtcccatatctgaggagttttttttaatgctatttatccgctggacacgattgcacattagggctgcataatcctctaactctagggaaaaataaaaacttttgatttgtcttaagattcttctccaaggtcgcaaacaagaaattcccctccacaaccaagagatgtgcattttagtaacatcagatgtgttcttctgttttatcaactacttactcttcccacacgcttagttctaaatctaacctttcccccctcgaatagggggcaggggaggatgaggaaacactggaacaactgaacacccctgcccattttctccaagagccttttgtattctagcatatctgtgcaatcttttcttttttcttcacatgacactgtaagcttaggcctgaaataactgggaagagagatgcgtatcagaatttctccgcaagagctaaacaaaacatacatcttccttagcatgaattggactgggggcggagtgggagggcttggaggaaaggggaaagaagggactatatttgaataaatatgaataaatgtattagatacttttcacaatcagataacttttaaaaaggtcattttttatctttctaataatgtaagccttaataaaagcaaatcttagtcacaaatttgaggagactgcccaataataagtttacatgtatttgaactgaaaaattgttaaccatgcttttgctccaagatgtgtgaggccattcaggggctgtagggccctggatatacacacaaacaagtgtgtgtatatctggagccccacacattgtaataaacacagctgcatttatttgactatgtgatcccatgtacatgtaaaaacattcaaacaaacacactcagcggatttatttattgtgcaatggggcaattattcaaataaacatgctcaatgcaattatttgaatctcacattgcatgttcatcaatcatagcactaaaaaaagagggggaaaaaacaccaaagaattcacatggggaaaaaatatatatatgaaaaccaccttattatagattttatagggcagctgaggttatggctcccttcttaactgtaactcaactattctgtattcaatgacatttgtttctaatgattaattggttcactcacttgatcatataatagcaaactttataaacctgtattgtgtagagatgtgaaatctctatatttcaagagcagaagagttctttctagacaccttacatcaagggacactggtccaattattatcgcttatataagcactcctataaattctgaaaaattttatacatgcaacaaaacattcctacatttgaagacattaagaaaaatcacaggtgactcatctgatcattctatatattaataaatattatgacatatatgtgaacacatcacaaatcatattggtgtaccaagaggcaatttatgcctctcttaagtatgtactgacataacctaatatactaaaatgggaaggggcttttagtcactgaaatatgcatcgtgtaacaaagatgaagaaaatacatggcttgtgcccatcataaaaaaagattcagactgaaggcttagctttggttttttcaattaaattgttaaactgtgcacagtgatttttttttagaacttgagacatttgtgatgttggctgtttaaatctttgttaccttcgctgtgaattgaaattgtacatatttagtaaatcatgcagacaaaacaaactttttagacaatatttttattggagagttttcttttcctgtatccatgttaaaaaaaaaaaagacctcctttcccaaaataaaaatgtcaatactaaatttaaagaagtataaaggaatgattgcttcctttagagcaaaatatttaaataaacatggagataattggcaacatgttctttttgggctagtaggctgtgtccaattttttgggtctgatgtttcagagggcctctgtttcagggttgaagatgatatattaatctcggaattaaacaaatgctattaaataacagaaataaatccttcagtcttcatttgtatctgaaatgtggaattagtcagagaaatggcaccgagataatatgatgctgaatatgccacaagctaaaactttctctattaaacgagtcgcctactacctataatctagcatgacatgttaaaatgctccaaaatactgaaaatagaaaatgaacactactgttccgatttggtcttgagattaatatgacaaagattctaataattttagtcaaagaaaatgatgagtaaaaaatacatgaagattaaagtgatgacaaatga

SEQ ID NO: 23300 - DNA, 9091 bp, Homo sapiens
  misc_feature 1..9091: note = ENST00000637045
  source 1..9091: mol_type = unassigned DNA; mol_type = unassigned DNA
agagcagaatgtaatttctagcaatctgacagacctgcggattgaagcggcaggttttcccttccgatttcagggaattgcttcttactgtgacaaatgattagctgttatctctgactgaatttgatttctacaagcagctgagtcagtggtgaactatgacaatgtagtggacacaggttctgaaacagatgaggaagacaagcttcatattgctgaggatgacggtattgccaaccctctggaccaggagacgagtccagctagtgtgcccaaccatgagtcctccccacacgtgagccaagctctgttgccaagagaggaagaggaagatgaaataagggagggtggagtggaacacccctggcacaacaacgagattctacaagcctctgtagatggtccagaagaaatgaaggaagactatgacactatggggccagaagccacgatccagaccgcaattaacaatggtacagtgaagaatgcaaattgcacatcagattttgaggaatactttgccaaaagaaaactggaggaacgcgatggtcatgcagtcagcatcgaggagtaccttcagcgcagtgacacagccattatttacccagaagcccctgaggagctgtctcgccttggcacgccagaggccaatgggcaagaagaaaatgacctgccacctggaactccagatgcttttgcccaactgctgacctgcccctactgcgaccggggctacaagcgcttgacatcactgaaggagcacatcaagtaccgccacgagaagaatgaagagaacttttcctgccctctctgtagctacacgtttgcctaccgcacccagctcgagcggcatatggtgacacacaagccagggacagatcagcaccaaatgctaacccaaggagcaggtaatcgcaagttcaaatgcacagagtgtggcaaggccttcaaatataaacaccatctgaaagaacacctgcgaattcacagtggtgaaaaaccttacgagtgcccaaactgcaagaaacgtttctcccattctggttcctacagttcgcacatcagcagcaagaaatgtattggtttaatctctgtaaatggccgaatgagaaacaatatcaagacgggttcttcccctaattctgtttcttcttctcctactaattcagccattacccagttaagaaacaagttggagaatggaaaaccacttagtatgtctgaacagacaggcttacttaaaattaaaacagaaccactagacttcaatgactataaagttcttatggctacacacgggtttagtggcactagtccctttatgaatggtgggcttggagccaccagccctttaggagttcatccatctgctcagagtccaatgcagcacttaggtgtagggatggaagcccctttacttgggtttcccaccatgaatagtaatttaagtgaggtacaaaaggttctacagattgtggacaatactgtttccaggcaaaaaatggactgcaaggctgaagaaatttcaaagttgaaaggttatcacatgaaggatccatgctctcaacctgaggaacaaggagttacttctcctaatattccgcctgtcggtcttccggtagtgagtcataatggtgccactaaaagtattattgactatacgttggaaaaagtcaatgaagccaaagcttgcctccagagcttgactactgactcaaggagacagatcagtaatataaagaaagagaagctacgtactttaatagatttggtcactgatgacaaaatgattgagaaccacaacatatccactccattttcatgccagttctgtaaagaaagttttcctggccccatccctttgcatcagcatgaacgttacctttgtaagatgaatgaagagatcaaggcggtcctgcagcctcatgaaaacatagtccccaacaaagccggagtttttgttgataataaagccctcctcttgtcatctgtactttctgagaaaggaatgacaagccccatcaacccatacaaggaccacatgtctgtactcaaagcatactatgctatgaacatggagcccaactccgatgaactgctgaaaatttccattgctgtgggccttcctcaggaatttgtgaaggaatggtttgaacaacgaaaagtctaccagtactcaaattccaggtccccatccctggaaagaagctccaagccgttagctcccaacagtaaccctcccacaaaagactctttattacccaggtctcctgtaaaacctatggactccataacatcaccatctatagcagaactccacaacagtgttacgaattgtgatcctcctctcaggctaacaaaaccttcccattttaccaatattaaaccagttgaaaaattggaccactccaggagtaatactccttctcccttaaatctttcctccacatcttctaaaaactcccacagtagttcatacactccaaacagcttctcttctgaggagctccaggctgagcctttagacttgtcattaccaaaacaaatgaaagaacccaaaagtattatagccacaaagaacaaaacaaaagctagtagcatcagtttagatcataacagtgtttcttcctcatctgaaaactcagatgagcctctgaacttgacttttatcaagaaggaattttcaaattcaaataatctggacaacaaaagcactaacccagtgttcagcatgaacccatttagtgccaaacctttatacacagctcttccacctcaaagcgcatttccccctgctactttcatgccaccagtccagaccagtattcctgggctacgaccatacccaggactggatcagatgagcttcctaccacatatggcctacacctacccaactggagcagctacttttgctgatatgcagcaaaggagaaagtaccagcggaaacaaggatttcagggagaattgcttgatggagcacaagactacatgtcaggcctagatgatatgacagactccgactcctgtctgtctcgcaaaaagatcaagaagacagagagtggcatgtatgcatgtgacttatgtgacaagacattccagaaaagcagttcccttctgcgacataaatacgaacacacaggaaaaagaccacatcagtgtcagatttgtaagaaagcgtttaaacacaagcaccaccttatcgagcactcaaggcttcactcgggcgagaagccctatcagtgtgataaatgtggcaagcgcttctcacactcgggctcgtactcgcagcacatgaatcacaggtattcctactgcaagcgggaggcggaggagcgggaagcggcggagcgcgaggcgcgcgagaaagggcacttggaacccaccgagctgctgatgaaccgggcttacttgcagagcattacccctcaggggtactctgactcggaggagagggagagtatgccgagggatggcgagagcgagaaggagcacgagaaagaaggcgaggatggctacgggaagctgggcagacaggatggcgacgaggagttcgaggaggaagaggaagaaagtgaaaataaaagtatggatacggatcccgaaacgatacgagatgaagaagagactggagatcactccatggacgatagttcggaggatgggaaaatggaaaccaaatcagaccacgaggaagacaatatggaagatggcatgtaataaactactgcattttaagcttcctatttttttttccagtagtattgttacctgcttgaaaacactgctgtgttaagctgttcatgcacgtgcctgacgcttccaggaagctgtagagagggacagaaggggcggttcagccaagacagatgtagacggagttggagctgggtattgttaaaaactgcattatgcaaaaattttgtacagtgttaaggcctaaaaactgtgtggttcagagactaattcctgtgtttaatagcatttatactttaagcacaactagaaaattgtaagaattgcactctacttatgtatcactacaaactttaaaaaactatgtctaatttatattaatacattttaaaaaggtgcccgcactaccatacatcagtatttttattattattattgttattcctttttaatttaatgtgctcgcactacaatgcatcagtattatgattcctctgtactttcctttcgctattcatcaatttcccattttttttttcagcttaagtaaccacacaattttaggcctcaatttttttttttttctgtgaaggaacttgaagtgatgcatgtgtgaatttaagataccgaagtcttaaagtgacctggacgtgaaggaaaaagtaagatgagaaataaagaaagcctttgtaaggtggttttaaaagccttatatgcaaaccttttaatctgtgtttctgcaagtgccatccttgtacagtgttaagagggtaacatgggttacctttgcaccagcttcagtgttaagctcaccctgttctttgaagcacccatgtcagtattagaagaataggcagcagttccttagtttacatatgtttgtgcaattattttctgtacttttttgttcattaattttgtcagtattacaccaaactgtttttgcaacaaaaaaattttttttgcattcatttaattttaggtcaaataacattttatttatgtggctcattttatatttcctaattttatttatttcatactgtagtgtacagtattatagttcttcaatatatagatatattttagtaaaaaaggaacatgacgttgatcatttgggcaaattttacgtaaagagaagagcatttattgtgttttggaacattaattgtgagatgggatttttcaattttattattttatttttgtttttttccaattactggaaattccaaatttgggaacttttgatacgatcttgtgaaaacactgtattttcgactgaaaattccactttcttcatcttgttttttagctaaaaagagggactgttaaatacaatgtatgataccatgacaaaaatctttcctgaattgtctttgtaaaagtattattgaattttcaatttgtaatttcttttgaaaatgaccatgctcgaataaaaatgtagccaaactaagaatgtagttaatgagttctgtacttttagagagttttccttcaatgaccattaacatgtaacatgctttatgcttataataatgctaattatgtttttttcatataattttagtttagcaataattttgactggtaccaataactgttttttaaaattccatacctatgtacagcaattttacagcttttctcaactgatcctgattccagattgtgtatttttatgtgaggttatattattcaaatttagtctatttactttacagacatttctacttttgcattacgagtatttagagattatgtgttaaaaattcacttctctgtccaaggggtctttgtgatttattcaaaaaaaagtctaatttcaaaaagacagctattattcagtgttatttataatatgtaaccttttttaaaggattgggatagtttatctcactttttgaaatgcagacagtagtttaccgtttatctgaaactagaaggcgtgggtgggagaggaaaagctaaaagcaaatgctaacaaaaataaccgtgattttctaagacagtttttcagtttttacaagatgaccctaatattcagaatatgaatgtattcgtaggttttacataatgacttttatcaagaaactagattctgcttcttaaatctaattgccaagtgaagaataacagaaaaaacagattaccttatcaaatttacagctcttgaatatacagaactataatatagtagctgtccatgtattttttctactttagaatcaaagaagaaaagcatcattttgctattaaatttgctaaaattttgagtatgatatttccagttggcaagaacaacatatttatatttattccttagccataataccactttcctaaatttcacaaaagtcattctttgcaacttgaaactcaatagaaagtgtgtatgtgtgtgtgtgtatatatatatatatatacacacacacacatacacagaaaggatgtaatgaagatacagtaatagttgagcagacctttttagaaaaacatgtttttagctctatcttcaaactttctggcagagggggtggggggggcagggggaggagtggcatcaaaatgctatgcctcctgttatccacagcctagagtttttatatttggaaagtttagaaaattctatcctcgtttctccttctttgaatggcacaaataaatacactacataaatttttctggtttgaaaggctctaggcgataactttattaattcaacctgaaaatatcaagccattaaattttgtccgggtagaataaatccctgtggcctcttttaaagcaatgtaggtctctgttgcccatggggcatatctgtgtcccaatccacaagagataggaccaacaaacaatgaatgtgcaacctaactctttctccttggaaagaagaaagtgtgcacgaagtagaggagggtgggcagaccctgccttgcccctcctgttacccccttctctgtcatttgttcctaactccatttcataggcaggctcagaatacctgagtctgaaaatatcaggataacacttgtgaattgtgacaatcactacaatgtcccatatctgaggagttttttttaatgctatttatccgctggacacgattgcacattagggctgcataatcctctaactctagggaaaaataaaaacttttgatttgtcttaagattcttctccaaggtcgcaaacaagaaattcccctccacaaccaagagatgtgcattttagtaacatcagatgtgttcttctgttttatcaactacttactcttcccacacgcttagttctaaatctaacctttcccccctcgaatagggggcaggggaggatgaggaaacactggaacaactgaacacccctgcccattttctccaagagccttttgtattctagcatatctgtgcaatcttttcttttttcttcacatgacactgtaagcttaggcctgaaataactgggaagagagatgcgtatcagaatttctccgcaagagctaaacaaaacatacatcttccttagcatgaattggactgggggcggagtgggagggcttggaggaaaggggaaagaagggactatatttgaataaatatgaataaatgtattagatacttttcacaatcagataacttttaaaaaggtcattttttatctttctaataatgtaagccttaataaaagcaaatcttagtcacaaatttgaggagactgcccaataataagtttacatgtatttgaactgaaaaattgttaaccatgcttttgctccaagatgtgtgaggccattcaggggctgtagggccctggatatacacacaaacaagtgtgtgtatatctggagccccacacattgtaataaacacagctgcatttatttgactatgtgatcccatgtacatgtaaaaacattcaaacaaacacactcagcggatttatttattgtgcaatggggcaattattcaaataaacatgctcaatgcaattatttgaatctcacattgcatgttcatcaatcatagcactaaaaaaagagggggaaaaaacaccaaagaattcacatggggaaaaaatatatatatgaaaaccaccttattatagattttatagggcagctgaggttatggctcccttcttaactgtaactcaactattctgtattcaatgacatttgtttctaatgattaattggttcactcacttgatcatataatagcaaactttataaacctgtattgtgtagagatgtgaaatctctatatttcaagagcagaagagttctttctagacaccttacatcaagggacactggtccaattattatcgcttatataagcactcctataaattctgaaaaattttatacatgcaacaaaacattcctacatttgaagacattaagaaaaatcacaggtgactcatctgatcattctatatattaataaatattatgacatatatgtgaacacatcacaaatcatattggtgtaccaagaggcaatttatgcctctcttaagtatgtactgacataacctaatatactaaaatgggaaggggcttttagtcactgaaatatgcatcgtgtaacaaagatgaagaaaatacatggcttgtgcccatcataaaaaaagattcagactgaaggcttagctttggttttttcaattaaattgttaaactgtgcacagtgatttttttttagaacttgagacatttgtgatgttggctgtttaaatctttgttaccttcgctgtgaattgaaattgtacatatttagtaaatcatgcagacaaaacaaactttttagacaatatttttattggagagttttcttttcctgtatccatgttaaaaaaaaaaaagacctcctttcccaaaataaaaatgtcaatactaaatttaaagaagtataaaggaatgattgcttcctttagagcaaaatatttaaataaacatggagataattggcaacatgttctttttgggctagtaggctgtgtccaattttttgggtctgatgtttcagagggcctctgtttcagggttgaagatgatatattaatctcggaattaaacaaatgctattaaataacagaaataaatccttcagtcttcatttgtatctgaaatgtggaattagtcagagaaatggcaccgagataatatgatgctgaatatgccacaagctaaaactttctctattaaacgagtcgcctactacctataatctagcatgacatgttaaaatgctccaaaatactgaaaatagaaaatgaacactactgttccgatttggtcttgagattaatatgacaaagattctaataattttagtcaaagaaaatgatgagtaaaaaatacatgaagattaaagtgatgacaaatga

SEQ ID NO: 23301 - DNA, 9115 bp, Homo sapiens
  misc_feature 1..9115: note = ENST00000636820
  source 1..9115: mol_type = unassigned DNA
agaatgagatgagaacctatggtaggtggaggtgaaaaatgaaatgcgtcagggaagatcatgactgggaccgccgcacactgcagtgatgaagacggagaagctattcttcagggaacctgcaaataaaaagaaaccttaagatgtatttggagggaacccaccccagcaagtggtgaactatgacaatgtagtggacacaggttctgaaacagatgaggaagacaagcttcatattgctgaggatgacggtattgccaaccctctggaccaggagacgagtccagctagtgtgcccaaccatgagtcctccccacacgtgagccaagctctgttgccaagagaggaagaggaagatgaaataagggagggtggagtggaacacccctggcacaacaacgagattctacaagcctctgtagatggtccagaagaaatgaaggaagactatgacactatggggccagaagccacgatccagaccgcaattaacaatggtacagtgaagaatgcaaattgcacatcagattttgaggaatactttgccaaaagaaaactggaggaacgcgatggtcatgcagtcagcatcgaggagtaccttcagcgcagtgacacagccattatttacccagaagcccctgaggagctgtctcgccttggcacgccagaggccaatgggcaagaagaaaatgacctgccacctggaactccagatgcttttgcccaactgctgacctgcccctactgcgaccggggctacaagcgcttgacatcactgaaggagcacatcaagtaccgccacgagaagaatgaagagaacttttcctgccctctctgtagctacacgtttgcctaccgcacccagctcgagcggcatatggtgacacacaagccagggacagatcagcaccaaatgctaacccaaggagcaggtaatcgcaagttcaaatgcacagagtgtggcaaggccttcaaatataaacaccatctgaaagaacacctgcgaattcacagtggtgaaaaaccttacgagtgcccaaactgcaagaaacgtttctcccattctggttcctacagttcgcacatcagcagcaagaaatgtattggtttaatctctgtaaatggccgaatgagaaacaatatcaagacgggttcttcccctaattctgtttcttcttctcctactaattcagccattacccagttaagaaacaagttggagaatggaaaaccacttagtatgtctgaacagacaggcttacttaaaattaaaacagaaccactagacttcaatgactataaagttcttatggctacacacgggtttagtggcactagtccctttatgaatggtgggcttggagccaccagccctttaggagttcatccatctgctcagagtccaatgcagcacttaggtgtagggatggaagcccctttacttgggtttcccaccatgaatagtaatttaagtgaggtacaaaaggttctacagattgtggacaatactgtttccaggcaaaaaatggactgcaaggctgaagaaatttcaaagttgaaaggttatcacatgaaggatccatgctctcaacctgaggaacaaggagttacttctcctaatattccgcctgtcggtcttccggtagtgagtcataatggtgccactaaaagtattattgactatacgttggaaaaagtcaatgaagccaaagcttgcctccagagcttgactactgactcaaggagacagatcagtaatataaagaaagagaagctacgtactttaatagatttggtcactgatgacaaaatgattgagaaccacaacatatccactccattttcatgccagttctgtaaagaaagttttcctggccccatccctttgcatcagcatgaacgttacctttgtaagatgaatgaagagatcaaggcggtcctgcagcctcatgaaaacatagtccccaacaaagccggagtttttgttgataataaagccctcctcttgtcatctgtactttctgagaaaggaatgacaagccccatcaacccatacaaggaccacatgtctgtactcaaagcatactatgctatgaacatggagcccaactccgatgaactgctgaaaatttccattgctgtgggccttcctcaggaatttgtgaaggaatggtttgaacaacgaaaagtctaccagtactcaaattccaggtccccatccctggaaagaagctccaagccgttagctcccaacagtaaccctcccacaaaagactctttattacccaggtctcctgtaaaacctatggactccataacatcaccatctatagcagaactccacaacagtgttacgaattgtgatcctcctctcaggctaacaaaaccttcccattttaccaatattaaaccagttgaaaaattggaccactccaggagtaatactccttctcccttaaatctttcctccacatcttctaaaaactcccacagtagttcatacactccaaacagcttctcttctgaggagctccaggctgagcctttagacttgtcattaccaaaacaaatgaaagaacccaaaagtattatagccacaaagaacaaaacaaaagctagtagcatcagtttagatcataacagtgtttcttcctcatctgaaaactcagatgagcctctgaacttgacttttatcaagaaggaattttcaaattcaaataatctggacaacaaaagcactaacccagtgttcagcatgaacccatttagtgccaaacctttatacacagctcttccacctcaaagcgcatttccccctgctactttcatgccaccagtccagaccagtattcctgggctacgaccatacccaggactggatcagatgagcttcctaccacatatggcctacacctacccaactggagcagctacttttgctgatatgcagcaaaggagaaagtaccagcggaaacaaggatttcagggagaattgcttgatggagcacaagactacatgtcaggcctagatgatatgacagactccgactcctgtctgtctcgcaaaaagatcaagaagacagagagtggcatgtatgcatgtgacttatgtgacaagacattccagaaaagcagttcccttctgcgacataaatacgaacacacaggaaaaagaccacatcagtgtcagatttgtaagaaagcgtttaaacacaagcaccaccttatcgagcactcaaggcttcactcgggcgagaagccctatcagtgtgataaatgtggcaagcgcttctcacactcgggctcgtactcgcagcacatgaatcacaggtattcctactgcaagcgggaggcggaggagcgggaagcggcggagcgcgaggcgcgcgagaaagggcacttggaacccaccgagctgctgatgaaccgggcttacttgcagagcattacccctcaggggtactctgactcggaggagagggagagtatgccgagggatggcgagagcgagaaggagcacgagaaagaaggcgaggatggctacgggaagctgggcagacaggatggcgacgaggagttcgaggaggaagaggaagaaagtgaaaataaaagtatggatacggatcccgaaacgatacgagatgaagaagagactggagatcactccatggacgatagttcggaggatgggaaaatggaaaccaaatcagaccacgaggaagacaatatggaagatggcatgtaataaactactgcattttaagcttcctatttttttttccagtagtattgttacctgcttgaaaacactgctgtgttaagctgttcatgcacgtgcctgacgcttccaggaagctgtagagagggacagaaggggcggttcagccaagacagatgtagacggagttggagctgggtattgttaaaaactgcattatgcaaaaattttgtacagtgttaaggcctaaaaactgtgtggttcagagactaattcctgtgtttaatagcatttatactttaagcacaactagaaaattgtaagaattgcactctacttatgtatcactacaaactttaaaaaactatgtctaatttatattaatacattttaaaaaggtgcccgcactaccatacatcagtatttttattattattattgttattcctttttaatttaatgtgctcgcactacaatgcatcagtattatgattcctctgtactttcctttcgctattcatcaatttcccattttttttttcagcttaagtaaccacacaattttaggcctcaatttttttttttttctgtgaaggaacttgaagtgatgcatgtgtgaatttaagataccgaagtcttaaagtgacctggacgtgaaggaaaaagtaagatgagaaataaagaaagcctttgtaaggtggttttaaaagccttatatgcaaaccttttaatctgtgtttctgcaagtgccatccttgtacagtgttaagagggtaacatgggttacctttgcaccagcttcagtgttaagctcaccctgttctttgaagcacccatgtcagtattagaagaataggcagcagttccttagtttacatatgtttgtgcaattattttctgtacttttttgttcattaattttgtcagtattacaccaaactgtttttgcaacaaaaaaattttttttgcattcatttaattttaggtcaaataacattttatttatgtggctcattttatatttcctaattttatttatttcatactgtagtgtacagtattatagttcttcaatatatagatatattttagtaaaaaaggaacatgacgttgatcatttgggcaaattttacgtaaagagaagagcatttattgtgttttggaacattaattgtgagatgggatttttcaattttattattttatttttgtttttttccaattactggaaattccaaatttgggaacttttgatacgatcttgtgaaaacactgtattttcgactgaaaattccactttcttcatcttgttttttagctaaaaagagggactgttaaatacaatgtatgataccatgacaaaaatctttcctgaattgtctttgtaaaagtattattgaattttcaatttgtaatttcttttgaaaatgaccatgctcgaataaaaatgtagccaaactaagaatgtagttaatgagttctgtacttttagagagttttccttcaatgaccattaacatgtaacatgctttatgcttataataatgctaattatgtttttttcatataattttagtttagcaataattttgactggtaccaataactgttttttaaaattccatacctatgtacagcaattttacagcttttctcaactgatcctgattccagattgtgtatttttatgtgaggttatattattcaaatttagtctatttactttacagacatttctacttttgcattacgagtatttagagattatgtgttaaaaattcacttctctgtccaaggggtctttgtgatttattcaaaaaaaagtctaatttcaaaaagacagctattattcagtgttatttataatatgtaaccttttttaaaggattgggatagtttatctcactttttgaaatgcagacagtagtttaccgtttatctgaaactagaaggcgtgggtgggagaggaaaagctaaaagcaaatgctaacaaaaataaccgtgattttctaagacagtttttcagtttttacaagatgaccctaatattcagaatatgaatgtattcgtaggttttacataatgacttttatcaagaaactagattctgcttcttaaatctaattgccaagtgaagaataacagaaaaaacagattaccttatcaaatttacagctcttgaatatacagaactataatatagtagctgtccatgtattttttctactttagaatcaaagaagaaaagcatcattttgctattaaatttgctaaaattttgagtatgatatttccagttggcaagaacaacatatttatatttattccttagccataataccactttcctaaatttcacaaaagtcattctttgcaacttgaaactcaatagaaagtgtgtatgtgtgtgtgtgtatatatatatatatatacacacacacacatacacagaaaggatgtaatgaagatacagtaatagttgagcagacctttttagaaaaacatgtttttagctctatcttcaaactttctggcagagggggtggggggggcagggggaggagtggcatcaaaatgctatgcctcctgttatccacagcctagagtttttatatttggaaagtttagaaaattctatcctcgtttctccttctttgaatggcacaaataaatacactacataaatttttctggtttgaaaggctctaggcgataactttattaattcaacctgaaaatatcaagccattaaattttgtccgggtagaataaatccctgtggcctcttttaaagcaatgtaggtctctgttgcccatggggcatatctgtgtcccaatccacaagagataggaccaacaaacaatgaatgtgcaacctaactctttctccttggaaagaagaaagtgtgcacgaagtagaggagggtgggcagaccctgccttgcccctcctgttacccccttctctgtcatttgttcctaactccatttcataggcaggctcagaatacctgagtctgaaaatatcaggataacacttgtgaattgtgacaatcactacaatgtcccatatctgaggagttttttttaatgctatttatccgctggacacgattgcacattagggctgcataatcctctaactctagggaaaaataaaaacttttgatttgtcttaagattcttctccaaggtcgcaaacaagaaattcccctccacaaccaagagatgtgcattttagtaacatcagatgtgttcttctgttttatcaactacttactcttcccacacgcttagttctaaatctaacctttcccccctcgaatagggggcaggggaggatgaggaaacactggaacaactgaacacccctgcccattttctccaagagccttttgtattctagcatatctgtgcaatcttttcttttttcttcacatgacactgtaagcttaggcctgaaataactgggaagagagatgcgtatcagaatttctccgcaagagctaaacaaaacatacatcttccttagcatgaattggactgggggcggagtgggagggcttggaggaaaggggaaagaagggactatatttgaataaatatgaataaatgtattagatacttttcacaatcagataacttttaaaaaggtcattttttatctttctaataatgtaagccttaataaaagcaaatcttagtcacaaatttgaggagactgcccaataataagtttacatgtatttgaactgaaaaattgttaaccatgcttttgctccaagatgtgtgaggccattcaggggctgtagggccctggatatacacacaaacaagtgtgtgtatatctggagccccacacattgtaataaacacagctgcatttatttgactatgtgatcccatgtacatgtaaaaacattcaaacaaacacactcagcggatttatttattgtgcaatggggcaattattcaaataaacatgctcaatgcaattatttgaatctcacattgcatgttcatcaatcatagcactaaaaaaagagggggaaaaaacaccaaagaattcacatggggaaaaaatatatatatgaaaaccaccttattatagattttatagggcagctgaggttatggctcccttcttaactgtaactcaactattctgtattcaatgacatttgtttctaatgattaattggttcactcacttgatcatataatagcaaactttataaacctgtattgtgtagagatgtgaaatctctatatttcaagagcagaagagttctttctagacaccttacatcaagggacactggtccaattattatcgcttatataagcactcctataaattctgaaaaattttatacatgcaacaaaacattcctacatttgaagacattaagaaaaatcacaggtgactcatctgatcattctatatattaataaatattatgacatatatgtgaacacatcacaaatcatattggtgtaccaagaggcaatttatgcctctcttaagtatgtactgacataacctaatatactaaaatgggaaggggcttttagtcactgaaatatgcatcgtgtaacaaagatgaagaaaatacatggcttgtgcccatcataaaaaaagattcagactgaaggcttagctttggttttttcaattaaattgttaaactgtgcacagtgatttttttttagaacttgagacatttgtgatgttggctgtttaaatctttgttaccttcgctgtgaattgaaattgtacatatttagtaaatcatgcagacaaaacaaactttttagacaatatttttattggagagttttcttttcctgtatccatgttaaaaaaaaaaaagacctcctttcccaaaataaaaatgtcaatactaaatttaaagaagtataaaggaatgattgcttcctttagagcaaaatatttaaataaacatggagataattggcaacatgttctttttgggctagtaggctgtgtccaattttttgggtctgatgtttcagagggcctctgtttcagggttgaagatgatatattaatctcggaattaaacaaatgctattaaataacagaaataaatccttcagtcttcatttgtatctgaaatgtggaattagtcagagaaatggcaccgagataatatgatgctgaatatgccacaagctaaaactttctctattaaacgagtcgcctactacctataatctagcatgacatgttaaaatgctccaaaatactgaaaatagaaaatgaacactactgttccgatttggtcttgagattaatatgacaaagattctaataattttagtcaaagaaaatgatgagtaaaaaatacatgaagattaaagtgatgacaaatga

SEQ ID NO: 23302 - DNA, 8984 bp, Homo sapiens
  misc_feature 1..8984: note = ENST00000636179
  source 1..8984: mol_type = unassigned DNA; mol_type = unassigned DNA
agaactagaagacgatacggagctgttagtgtgcatattcagtggtgaactatgacaatgtagtggacacaggttctgaaacagatgaggaagacaagcttcatattgctgaggatgacggtattgccaaccctctggaccaggagacgagtccagctagtgtgcccaaccatgagtcctccccacacgtgagccaagctctgttgccaagagaggaagaggaagatgaaataagggagggtggagtggaacacccctggcacaacaacgagattctacaagcctctgtagatggtccagaagaaatgaaggaagactatgacactatggggccagaagccacgatccagaccgcaattaacaatggtacagtgaagaatgcaaattgcacatcagattttgaggaatactttgccaaaagaaaactggaggaacgcgatggtcatgcagtcagcatcgaggagtaccttcagcgcagtgacacagccattatttacccagaagcccctgaggagctgtctcgccttggcacgccagaggccaatgggcaagaagaaaatgacctgccacctggaactccagatgcttttgcccaactgctgacctgcccctactgcgaccggggctacaagcgcttgacatcactgaaggagcacatcaagtaccgccacgagaagaatgaagagaacttttcctgccctctctgtagctacacgtttgcctaccgcacccagctcgagcggcatatggtgacacacaagccagggacagatcagcaccaaatgctaacccaaggagcaggtaatcgcaagttcaaatgcacagagtgtggcaaggccttcaaatataaacaccatctgaaagaacacctgcgaattcacagtggtgaaaaaccttacgagtgcccaaactgcaagaaacgtttctcccattctggttcctacagttcgcacatcagcagcaagaaatgtattggtttaatctctgtaaatggccgaatgagaaacaatatcaagacgggttcttcccctaattctgtttcttcttctcctactaattcagccattacccagttaagaaacaagttggagaatggaaaaccacttagtatgtctgaacagacaggcttacttaaaattaaaacagaaccactagacttcaatgactataaagttcttatggctacacacgggtttagtggcactagtccctttatgaatggtgggcttggagccaccagccctttaggagttcatccatctgctcagagtccaatgcagcacttaggtgtagggatggaagcccctttacttgggtttcccaccatgaatagtaatttaagtgaggtacaaaaggttctacagattgtggacaatactgtttccaggcaaaaaatggactgcaaggctgaagaaatttcaaagttgaaaggttatcacatgaaggatccatgctctcaacctgaggaacaaggagttacttctcctaatattccgcctgtcggtcttccggtagtgagtcataatggtgccactaaaagtattattgactatacgttggaaaaagtcaatgaagccaaagcttgcctccagagcttgactactgactcaaggagacagatcagtaatataaagaaagagaagctacgtactttaatagatttggtcactgatgacaaaatgattgagaaccacaacatatccactccattttcatgccagttctgtaaagaaagttttcctggccccatccctttgcatcagcatgaacgttacctttgtaagatgaatgaagagatcaaggcggtcctgcagcctcatgaaaacatagtccccaacaaagccggagtttttgttgataataaagccctcctcttgtcatctgtactttctgagaaaggaatgacaagccccatcaacccatacaaggaccacatgtctgtactcaaagcatactatgctatgaacatggagcccaactccgatgaactgctgaaaatttccattgctgtgggccttcctcaggaatttgtgaaggaatggtttgaacaacgaaaagtctaccagtactcaaattccaggtccccatccctggaaagaagctccaagccgttagctcccaacagtaaccctcccacaaaagactctttattacccaggtctcctgtaaaacctatggactccataacatcaccatctatagcagaactccacaacagtgttacgaattgtgatcctcctctcaggctaacaaaaccttcccattttaccaatattaaaccagttgaaaaattggaccactccaggagtaatactccttctcccttaaatctttcctccacatcttctaaaaactcccacagtagttcatacactccaaacagcttctcttctgaggagctccaggctgagcctttagacttgtcattaccaaaacaaatgaaagaacccaaaagtattatagccacaaagaacaaaacaaaagctagtagcatcagtttagatcataacagtgtttcttcctcatctgaaaactcagatgagcctctgaacttgacttttatcaagaaggaattttcaaattcaaataatctggacaacaaaagcactaacccagtgttcagcatgaacccatttagtgccaaacctttatacacagctcttccacctcaaagcgcatttccccctgctactttcatgccaccagtccagaccagtattcctgggctacgaccatacccaggactggatcagatgagcttcctaccacatatggcctacacctacccaactggagcagctacttttgctgatatgcagcaaaggagaaagtaccagcggaaacaaggatttcagggagaattgcttgatggagcacaagactacatgtcaggcctagatgatatgacagactccgactcctgtctgtctcgcaaaaagatcaagaagacagagagtggcatgtatgcatgtgacttatgtgacaagacattccagaaaagcagttcccttctgcgacataaatacgaacacacaggaaaaagaccacatcagtgtcagatttgtaagaaagcgtttaaacacaagcaccaccttatcgagcactcaaggcttcactcgggcgagaagccctatcagtgtgataaatgtggcaagcgcttctcacactcgggctcgtactcgcagcacatgaatcacaggtattcctactgcaagcgggaggcggaggagcgggaagcggcggagcgcgaggcgcgcgagaaagggcacttggaacccaccgagctgctgatgaaccgggcttacttgcagagcattacccctcaggggtactctgactcggaggagagggagagtatgccgagggatggcgagagcgagaaggagcacgagaaagaaggcgaggatggctacgggaagctgggcagacaggatggcgacgaggagttcgaggaggaagaggaagaaagtgaaaataaaagtatggatacggatcccgaaacgatacgagatgaagaagagactggagatcactccatggacgatagttcggaggatgggaaaatggaaaccaaatcagaccacgaggaagacaatatggaagatggcatgtaataaactactgcattttaagcttcctatttttttttccagtagtattgttacctgcttgaaaacactgctgtgttaagctgttcatgcacgtgcctgacgcttccaggaagctgtagagagggacagaaggggcggttcagccaagacagatgtagacggagttggagctgggtattgttaaaaactgcattatgcaaaaattttgtacagtgttaaggcctaaaaactgtgtggttcagagactaattcctgtgtttaatagcatttatactttaagcacaactagaaaattgtaagaattgcactctacttatgtatcactacaaactttaaaaaactatgtctaatttatattaatacattttaaaaaggtgcccgcactaccatacatcagtatttttattattattattgttattcctttttaatttaatgtgctcgcactacaatgcatcagtattatgattcctctgtactttcctttcgctattcatcaatttcccattttttttttcagcttaagtaaccacacaattttaggcctcaatttttttttttttctgtgaaggaacttgaagtgatgcatgtgtgaatttaagataccgaagtcttaaagtgacctggacgtgaaggaaaaagtaagatgagaaataaagaaagcctttgtaaggtggttttaaaagccttatatgcaaaccttttaatctgtgtttctgcaagtgccatccttgtacagtgttaagagggtaacatgggttacctttgcaccagcttcagtgttaagctcaccctgttctttgaagcacccatgtcagtattagaagaataggcagcagttccttagtttacatatgtttgtgcaattattttctgtacttttttgttcattaattttgtcagtattacaccaaactgtttttgcaacaaaaaaattttttttgcattcatttaattttaggtcaaataacattttatttatgtggctcattttatatttcctaattttatttatttcatactgtagtgtacagtattatagttcttcaatatatagatatattttagtaaaaaaggaacatgacgttgatcatttgggcaaattttacgtaaagagaagagcatttattgtgttttggaacattaattgtgagatgggatttttcaattttattattttatttttgtttttttccaattactggaaattccaaatttgggaacttttgatacgatcttgtgaaaacactgtattttcgactgaaaattccactttcttcatcttgttttttagctaaaaagagggactgttaaatacaatgtatgataccatgacaaaaatctttcctgaattgtctttgtaaaagtattattgaattttcaatttgtaatttcttttgaaaatgaccatgctcgaataaaaatgtagccaaactaagaatgtagttaatgagttctgtacttttagagagttttccttcaatgaccattaacatgtaacatgctttatgcttataataatgctaattatgtttttttcatataattttagtttagcaataattttgactggtaccaataactgttttttaaaattccatacctatgtacagcaattttacagcttttctcaactgatcctgattccagattgtgtatttttatgtgaggttatattattcaaatttagtctatttactttacagacatttctacttttgcattacgagtatttagagattatgtgttaaaaattcacttctctgtccaaggggtctttgtgatttattcaaaaaaaagtctaatttcaaaaagacagctattattcagtgttatttataatatgtaaccttttttaaaggattgggatagtttatctcactttttgaaatgcagacagtagtttaccgtttatctgaaactagaaggcgtgggtgggagaggaaaagctaaaagcaaatgctaacaaaaataaccgtgattttctaagacagtttttcagtttttacaagatgaccctaatattcagaatatgaatgtattcgtaggttttacataatgacttttatcaagaaactagattctgcttcttaaatctaattgccaagtgaagaataacagaaaaaacagattaccttatcaaatttacagctcttgaatatacagaactataatatagtagctgtccatgtattttttctactttagaatcaaagaagaaaagcatcattttgctattaaatttgctaaaattttgagtatgatatttccagttggcaagaacaacatatttatatttattccttagccataataccactttcctaaatttcacaaaagtcattctttgcaacttgaaactcaatagaaagtgtgtatgtgtgtgtgtgtatatatatatatatatacacacacacacatacacagaaaggatgtaatgaagatacagtaatagttgagcagacctttttagaaaaacatgtttttagctctatcttcaaactttctggcagagggggtggggggggcagggggaggagtggcatcaaaatgctatgcctcctgttatccacagcctagagtttttatatttggaaagtttagaaaattctatcctcgtttctccttctttgaatggcacaaataaatacactacataaatttttctggtttgaaaggctctaggcgataactttattaattcaacctgaaaatatcaagccattaaattttgtccgggtagaataaatccctgtggcctcttttaaagcaatgtaggtctctgttgcccatggggcatatctgtgtcccaatccacaagagataggaccaacaaacaatgaatgtgcaacctaactctttctccttggaaagaagaaagtgtgcacgaagtagaggagggtgggcagaccctgccttgcccctcctgttacccccttctctgtcatttgttcctaactccatttcataggcaggctcagaatacctgagtctgaaaatatcaggataacacttgtgaattgtgacaatcactacaatgtcccatatctgaggagttttttttaatgctatttatccgctggacacgattgcacattagggctgcataatcctctaactctagggaaaaataaaaacttttgatttgtcttaagattcttctccaaggtcgcaaacaagaaattcccctccacaaccaagagatgtgcattttagtaacatcagatgtgttcttctgttttatcaactacttactcttcccacacgcttagttctaaatctaacctttcccccctcgaatagggggcaggggaggatgaggaaacactggaacaactgaacacccctgcccattttctccaagagccttttgtattctagcatatctgtgcaatcttttcttttttcttcacatgacactgtaagcttaggcctgaaataactgggaagagagatgcgtatcagaatttctccgcaagagctaaacaaaacatacatcttccttagcatgaattggactgggggcggagtgggagggcttggaggaaaggggaaagaagggactatatttgaataaatatgaataaatgtattagatacttttcacaatcagataacttttaaaaaggtcattttttatctttctaataatgtaagccttaataaaagcaaatcttagtcacaaatttgaggagactgcccaataataagtttacatgtatttgaactgaaaaattgttaaccatgcttttgctccaagatgtgtgaggccattcaggggctgtagggccctggatatacacacaaacaagtgtgtgtatatctggagccccacacattgtaataaacacagctgcatttatttgactatgtgatcccatgtacatgtaaaaacattcaaacaaacacactcagcggatttatttattgtgcaatggggcaattattcaaataaacatgctcaatgcaattatttgaatctcacattgcatgttcatcaatcatagcactaaaaaaagagggggaaaaaacaccaaagaattcacatggggaaaaaatatatatatgaaaaccaccttattatagattttatagggcagctgaggttatggctcccttcttaactgtaactcaactattctgtattcaatgacatttgtttctaatgattaattggttcactcacttgatcatataatagcaaactttataaacctgtattgtgtagagatgtgaaatctctatatttcaagagcagaagagttctttctagacaccttacatcaagggacactggtccaattattatcgcttatataagcactcctataaattctgaaaaattttatacatgcaacaaaacattcctacatttgaagacattaagaaaaatcacaggtgactcatctgatcattctatatattaataaatattatgacatatatgtgaacacatcacaaatcatattggtgtaccaagaggcaatttatgcctctcttaagtatgtactgacataacctaatatactaaaatgggaaggggcttttagtcactgaaatatgcatcgtgtaacaaagatgaagaaaatacatggcttgtgcccatcataaaaaaagattcagactgaaggcttagctttggttttttcaattaaattgttaaactgtgcacagtgatttttttttagaacttgagacatttgtgatgttggctgtttaaatctttgttaccttcgctgtgaattgaaattgtacatatttagtaaatcatgcagacaaaacaaactttttagacaatatttttattggagagttttcttttcctgtatccatgttaaaaaaaaaaaagacctcctttcccaaaataaaaatgtcaatactaaatttaaagaagtataaaggaatgattgcttcctttagagcaaaatatttaaataaacatggagataattggcaacatgttctttttgggctagtaggctgtgtccaattttttgggtctgatgtttcagagggcctctgtttcagggttgaagatgatatattaatctcggaattaaacaaatgctattaaataacagaaataaatccttcagtcttcatttgtatctgaaatgtggaattagtcagagaaatggcaccgagataatatgatgctgaatatgccacaagctaaaactttctctattaaacgagtcgcctactacctataatctagcatgacatgttaaaatgctccaaaatactgaaaatagaaaatgaacactactgttccgatttggtcttgagattaatatgacaaagattctaataattttagtcaaagaaaatgatgagtaaaaaatacatgaagattaaagtgatgacaaatga

SEQ ID NO: 23303 - DNA, 9158 bp, Homo sapiens
  misc_feature 1..9158: note = ENST00000637304
  source 1..9158: mol_type = unassigned DNA; mol_type = unassigned DNA
aaacaagcgaacgagcgccagcccagactcggaaaggaaacttctcgctcccctcgctctcagcccgatcacccggcgcggggccgcgtagacgctcccgaggcaggcgctgggacgcagcgcccacccggcctcccggcctccgcagccccagcccgcgcctcgcggggaccgcccgggcccacttggagcaactttcctctagagaagacaatttggtgaactatgacaatgtagtggacacaggttctgaaacagatgaggaagacaagcttcatattgctgaggatgacggtattgccaaccctctggaccaggagacgagtccagctagtgtgcccaaccatgagtcctccccacacgtgagccaagctctgttgccaagagaggaagaggaagatgaaataagggagggtggagtggaacacccctggcacaacaacgagattctacaagcctctgtagatggtccagaagaaatgaaggaagactatgacactatggggccagaagccacgatccagaccgcaattaacaatggtacagtgaagaatgcaaattgcacatcagattttgaggaatactttgccaaaagaaaactggaggaacgcgatggtcatgcagtcagcatcgaggagtaccttcagcgcagtgacacagccattatttacccagaagcccctgaggagctgtctcgccttggcacgccagaggccaatgggcaagaagaaaatgacctgccacctggaactccagatgcttttgcccaactgctgacctgcccctactgcgaccggggctacaagcgcttgacatcactgaaggagcacatcaagtaccgccacgagaagaatgaagagaacttttcctgccctctctgtagctacacgtttgcctaccgcacccagctcgagcggcatatggtgacacacaagccagggacagatcagcaccaaatgctaacccaaggagcaggtaatcgcaagttcaaatgcacagagtgtggcaaggccttcaaatataaacaccatctgaaagaacacctgcgaattcacagtggtgaaaaaccttacgagtgcccaaactgcaagaaacgtttctcccattctggttcctacagttcgcacatcagcagcaagaaatgtattggtttaatctctgtaaatggccgaatgagaaacaatatcaagacgggttcttcccctaattctgtttcttcttctcctactaattcagccattacccagttaagaaacaagttggagaatggaaaaccacttagtatgtctgaacagacaggcttacttaaaattaaaacagaaccactagacttcaatgactataaagttcttatggctacacacgggtttagtggcactagtccctttatgaatggtgggcttggagccaccagccctttaggagttcatccatctgctcagagtccaatgcagcacttaggtgtagggatggaagcccctttacttgggtttcccaccatgaatagtaatttaagtgaggtacaaaaggttctacagattgtggacaatactgtttccaggcaaaaaatggactgcaaggctgaagaaatttcaaagttgaaaggttatcacatgaaggatccatgctctcaacctgaggaacaaggagttacttctcctaatattccgcctgtcggtcttccggtagtgagtcataatggtgccactaaaagtattattgactatacgttggaaaaagtcaatgaagccaaagcttgcctccagagcttgactactgactcaaggagacagatcagtaatataaagaaagagaagctacgtactttaatagatttggtcactgatgacaaaatgattgagaaccacaacatatccactccattttcatgccagttctgtaaagaaagttttcctggccccatccctttgcatcagcatgaacgttacctttgtaagatgaatgaagagatcaaggcggtcctgcagcctcatgaaaacatagtccccaacaaagccggagtttttgttgataataaagccctcctcttgtcatctgtactttctgagaaaggaatgacaagccccatcaacccatacaaggaccacatgtctgtactcaaagcatactatgctatgaacatggagcccaactccgatgaactgctgaaaatttccattgctgtgggccttcctcaggaatttgtgaaggaatggtttgaacaacgaaaagtctaccagtactcaaattccaggtccccatccctggaaagaagctccaagccgttagctcccaacagtaaccctcccacaaaagactctttattacccaggtctcctgtaaaacctatggactccataacatcaccatctatagcagaactccacaacagtgttacgaattgtgatcctcctctcaggctaacaaaaccttcccattttaccaatattaaaccagttgaaaaattggaccactccaggagtaatactccttctcccttaaatctttcctccacatcttctaaaaactcccacagtagttcatacactccaaacagcttctcttctgaggagctccaggctgagcctttagacttgtcattaccaaaacaaatgaaagaacccaaaagtattatagccacaaagaacaaaacaaaagctagtagcatcagtttagatcataacagtgtttcttcctcatctgaaaactcagatgagcctctgaacttgacttttatcaagaaggaattttcaaattcaaataatctggacaacaaaagcactaacccagtgttcagcatgaacccatttagtgccaaacctttatacacagctcttccacctcaaagcgcatttccccctgctactttcatgccaccagtccagaccagtattcctgggctacgaccatacccaggactggatcagatgagcttcctaccacatatggcctacacctacccaactggagcagctacttttgctgatatgcagcaaaggagaaagtaccagcggaaacaaggatttcagggagaattgcttgatggagcacaagactacatgtcaggcctagatgatatgacagactccgactcctgtctgtctcgcaaaaagatcaagaagacagagagtggcatgtatgcatgtgacttatgtgacaagacattccagaaaagcagttcccttctgcgacataaatacgaacacacaggaaaaagaccacatcagtgtcagatttgtaagaaagcgtttaaacacaagcaccaccttatcgagcactcaaggcttcactcgggcgagaagccctatcagtgtgataaatgtggcaagcgcttctcacactcgggctcgtactcgcagcacatgaatcacaggtattcctactgcaagcgggaggcggaggagcgggaagcggcggagcgcgaggcgcgcgagaaagggcacttggaacccaccgagctgctgatgaaccgggcttacttgcagagcattacccctcaggggtactctgactcggaggagagggagagtatgccgagggatggcgagagcgagaaggagcacgagaaagaaggcgaggatggctacgggaagctgggcagacaggatggcgacgaggagttcgaggaggaagaggaagaaagtgaaaataaaagtatggatacggatcccgaaacgatacgagatgaagaagagactggagatcactccatggacgatagttcggaggatgggaaaatggaaaccaaatcagaccacgaggaagacaatatggaagatggcatgtaataaactactgcattttaagcttcctatttttttttccagtagtattgttacctgcttgaaaacactgctgtgttaagctgttcatgcacgtgcctgacgcttccaggaagctgtagagagggacagaaggggcggttcagccaagacagatgtagacggagttggagctgggtattgttaaaaactgcattatgcaaaaattttgtacagtgttaaggcctaaaaactgtgtggttcagagactaattcctgtgtttaatagcatttatactttaagcacaactagaaaattgtaagaattgcactctacttatgtatcactacaaactttaaaaaactatgtctaatttatattaatacattttaaaaaggtgcccgcactaccatacatcagtatttttattattattattgttattcctttttaatttaatgtgctcgcactacaatgcatcagtattatgattcctctgtactttcctttcgctattcatcaatttcccattttttttttcagcttaagtaaccacacaattttaggcctcaatttttttttttttctgtgaaggaacttgaagtgatgcatgtgtgaatttaagataccgaagtcttaaagtgacctggacgtgaaggaaaaagtaagatgagaaataaagaaagcctttgtaaggtggttttaaaagccttatatgcaaaccttttaatctgtgtttctgcaagtgccatccttgtacagtgttaagagggtaacatgggttacctttgcaccagcttcagtgttaagctcaccctgttctttgaagcacccatgtcagtattagaagaataggcagcagttccttagtttacatatgtttgtgcaattattttctgtacttttttgttcattaattttgtcagtattacaccaaactgtttttgcaacaaaaaaattttttttgcattcatttaattttaggtcaaataacattttatttatgtggctcattttatatttcctaattttatttatttcatactgtagtgtacagtattatagttcttcaatatatagatatattttagtaaaaaaggaacatgacgttgatcatttgggcaaattttacgtaaagagaagagcatttattgtgttttggaacattaattgtgagatgggatttttcaattttattattttatttttgtttttttccaattactggaaattccaaatttgggaacttttgatacgatcttgtgaaaacactgtattttcgactgaaaattccactttcttcatcttgttttttagctaaaaagagggactgttaaatacaatgtatgataccatgacaaaaatctttcctgaattgtctttgtaaaagtattattgaattttcaatttgtaatttcttttgaaaatgaccatgctcgaataaaaatgtagccaaactaagaatgtagttaatgagttctgtacttttagagagttttccttcaatgaccattaacatgtaacatgctttatgcttataataatgctaattatgtttttttcatataattttagtttagcaataattttgactggtaccaataactgttttttaaaattccatacctatgtacagcaattttacagcttttctcaactgatcctgattccagattgtgtatttttatgtgaggttatattattcaaatttagtctatttactttacagacatttctacttttgcattacgagtatttagagattatgtgttaaaaattcacttctctgtccaaggggtctttgtgatttattcaaaaaaaagtctaatttcaaaaagacagctattattcagtgttatttataatatgtaaccttttttaaaggattgggatagtttatctcactttttgaaatgcagacagtagtttaccgtttatctgaaactagaaggcgtgggtgggagaggaaaagctaaaagcaaatgctaacaaaaataaccgtgattttctaagacagtttttcagtttttacaagatgaccctaatattcagaatatgaatgtattcgtaggttttacataatgacttttatcaagaaactagattctgcttcttaaatctaattgccaagtgaagaataacagaaaaaacagattaccttatcaaatttacagctcttgaatatacagaactataatatagtagctgtccatgtattttttctactttagaatcaaagaagaaaagcatcattttgctattaaatttgctaaaattttgagtatgatatttccagttggcaagaacaacatatttatatttattccttagccataataccactttcctaaatttcacaaaagtcattctttgcaacttgaaactcaatagaaagtgtgtatgtgtgtgtgtgtatatatatatatatatacacacacacacatacacagaaaggatgtaatgaagatacagtaatagttgagcagacctttttagaaaaacatgtttttagctctatcttcaaactttctggcagagggggtggggggggcagggggaggagtggcatcaaaatgctatgcctcctgttatccacagcctagagtttttatatttggaaagtttagaaaattctatcctcgtttctccttctttgaatggcacaaataaatacactacataaatttttctggtttgaaaggctctaggcgataactttattaattcaacctgaaaatatcaagccattaaattttgtccgggtagaataaatccctgtggcctcttttaaagcaatgtaggtctctgttgcccatggggcatatctgtgtcccaatccacaagagataggaccaacaaacaatgaatgtgcaacctaactctttctccttggaaagaagaaagtgtgcacgaagtagaggagggtgggcagaccctgccttgcccctcctgttacccccttctctgtcatttgttcctaactccatttcataggcaggctcagaatacctgagtctgaaaatatcaggataacacttgtgaattgtgacaatcactacaatgtcccatatctgaggagttttttttaatgctatttatccgctggacacgattgcacattagggctgcataatcctctaactctagggaaaaataaaaacttttgatttgtcttaagattcttctccaaggtcgcaaacaagaaattcccctccacaaccaagagatgtgcattttagtaacatcagatgtgttcttctgttttatcaactacttactcttcccacacgcttagttctaaatctaacctttcccccctcgaatagggggcaggggaggatgaggaaacactggaacaactgaacacccctgcccattttctccaagagccttttgtattctagcatatctgtgcaatcttttcttttttcttcacatgacactgtaagcttaggcctgaaataactgggaagagagatgcgtatcagaatttctccgcaagagctaaacaaaacatacatcttccttagcatgaattggactgggggcggagtgggagggcttggaggaaaggggaaagaagggactatatttgaataaatatgaataaatgtattagatacttttcacaatcagataacttttaaaaaggtcattttttatctttctaataatgtaagccttaataaaagcaaatcttagtcacaaatttgaggagactgcccaataataagtttacatgtatttgaactgaaaaattgttaaccatgcttttgctccaagatgtgtgaggccattcaggggctgtagggccctggatatacacacaaacaagtgtgtgtatatctggagccccacacattgtaataaacacagctgcatttatttgactatgtgatcccatgtacatgtaaaaacattcaaacaaacacactcagcggatttatttattgtgcaatggggcaattattcaaataaacatgctcaatgcaattatttgaatctcacattgcatgttcatcaatcatagcactaaaaaaagagggggaaaaaacaccaaagaattcacatggggaaaaaatatatatatgaaaaccaccttattatagattttatagggcagctgaggttatggctcccttcttaactgtaactcaactattctgtattcaatgacatttgtttctaatgattaattggttcactcacttgatcatataatagcaaactttataaacctgtattgtgtagagatgtgaaatctctatatttcaagagcagaagagttctttctagacaccttacatcaagggacactggtccaattattatcgcttatataagcactcctataaattctgaaaaattttatacatgcaacaaaacattcctacatttgaagacattaagaaaaatcacaggtgactcatctgatcattctatatattaataaatattatgacatatatgtgaacacatcacaaatcatattggtgtaccaagaggcaatttatgcctctcttaagtatgtactgacataacctaatatactaaaatgggaaggggcttttagtcactgaaatatgcatcgtgtaacaaagatgaagaaaatacatggcttgtgcccatcataaaaaaagattcagactgaaggcttagctttggttttttcaattaaattgttaaactgtgcacagtgatttttttttagaacttgagacatttgtgatgttggctgtttaaatctttgttaccttcgctgtgaattgaaattgtacatatttagtaaatcatgcagacaaaacaaactttttagacaatatttttattggagagttttcttttcctgtatccatgttaaaaaaaaaaaagacctcctttcccaaaataaaaatgtcaatactaaatttaaagaagtataaaggaatgattgcttcctttagagcaaaatatttaaataaacatggagataattggcaacatgttctttttgggctagtaggctgtgtccaattttttgggtctgatgtttcagagggcctctgtttcagggttgaagatgatatattaatctcggaattaaacaaatgctattaaataacagaaataaatccttcagtcttcatttgtatctgaaatgtggaattagtcagagaaatggcaccgagataatatgatgctgaatatgccacaagctaaaactttctctattaaacgagtcgcctactacctataatctagcatgacatgttaaaatgctccaaaatactgaaaatagaaaatgaacactactgttccgatttggtcttgagattaatatgacaaagattctaataattttagtcaaagaaaatgatgagtaaaaaatacatgaagattaaagtgatgacaaatga

SEQ ID NO: 23304 - DNA, 8932 bp, Homo sapiens
  misc_feature 1..8932: note = ENST00000638128
  source 1..8932: mol_type = unassigned DNA; mol_type = unassigned DNA
gggacgcggggggacagagagaaacagagagagaggaagagagtgagagagagaccccctagtggtgaactatgacaatgtagtggacacaggttctgaaacagatgaggaagacaagcttcatattgctgaggatgacggtattgccaaccctctggaccaggagacgagtccagctagtgtgcccaaccatgagtcctccccacacgtgagccaagctctgttgccaagagaggaagaggaagatgaaataagggagggtggagtggaacacccctggcacaacaacgagattctacaagcctctgtagatggtccagtgaagaatgcaaattgcacatcagattttgaggaatactttgccaaaagaaaactggaggaacgcgatggtcatgcagtcagcatcgaggagtaccttcagcgcagtgacacagccattatttacccagaagcccctgaggagctgtctcgccttggcacgccagaggccaatgggcaagaagaaaatgacctgccacctggaactccagatgcttttgcccaactgctgacctgcccctactgcgaccggggctacaagcgcttgacatcactgaaggagcacatcaagtaccgccacgagaagaatgaagagaacttttcctgccctctctgtagctacacgtttgcctaccgcacccagctcgagcggcatatggtgacacacaagccagggacagatcagcaccaaatgctaacccaaggagcaggtaatcgcaagttcaaatgcacagagtgtggcaaggccttcaaatataaacaccatctgaaagaacacctgcgaattcacagtggtgaaaaaccttacgagtgcccaaactgcaagaaacgtttctcccattctggttcctacagttcgcacatcagcagcaagaaatgtattggtttaatctctgtaaatggccgaatgagaaacaatatcaagacgggttcttcccctaattctgtttcttcttctcctactaattcagccattacccagttaagaaacaagttggagaatggaaaaccacttagtatgtctgaacagacaggcttacttaaaattaaaacagaaccactagacttcaatgactataaagttcttatggctacacacgggtttagtggcactagtccctttatgaatggtgggcttggagccaccagccctttaggagttcatccatctgctcagagtccaatgcagcacttaggtgtagggatggaagcccctttacttgggtttcccaccatgaatagtaatttaagtgaggtacaaaaggttctacagattgtggacaatactgtttccaggcaaaaaatggactgcaaggctgaagaaatttcaaagttgaaaggttatcacatgaaggatccatgctctcaacctgaggaacaaggagttacttctcctaatattccgcctgtcggtcttccggtagtgagtcataatggtgccactaaaagtattattgactatacgttggaaaaagtcaatgaagccaaagcttgcctccagagcttgactactgactcaaggagacagatcagtaatataaagaaagagaagctacgtactttaatagatttggtcactgatgacaaaatgattgagaaccacaacatatccactccattttcatgccagttctgtaaagaaagttttcctggccccatccctttgcatcagcatgaacgttacctttgtaagatgaatgaagagatcaaggcggtcctgcagcctcatgaaaacatagtccccaacaaagccggagtttttgttgataataaagccctcctcttgtcatctgtactttctgagaaaggaatgacaagccccatcaacccatacaaggaccacatgtctgtactcaaagcatactatgctatgaacatggagcccaactccgatgaactgctgaaaatttccattgctgtgggccttcctcaggaatttgtgaaggaatggtttgaacaacgaaaagtctaccagtactcaaattccaggtccccatccctggaaagaagctccaagccgttagctcccaacagtaaccctcccacaaaagactctttattacccaggtctcctgtaaaacctatggactccataacatcaccatctatagcagaactccacaacagtgttacgaattgtgatcctcctctcaggctaacaaaaccttcccattttaccaatattaaaccagttgaaaaattggaccactccaggagtaatactccttctcccttaaatctttcctccacatcttctaaaaactcccacagtagttcatacactccaaacagcttctcttctgaggagctccaggctgagcctttagacttgtcattaccaaaacaaatgaaagaacccaaaagtattatagccacaaagaacaaaacaaaagctagtagcatcagtttagatcataacagtgtttcttcctcatctgaaaactcagatgagcctctgaacttgacttttatcaagaaggaattttcaaattcaaataatctggacaacaaaagcactaacccagtgttcagcatgaacccatttagtgccaaacctttatacacagctcttccacctcaaagcgcatttccccctgctactttcatgccaccagtccagaccagtattcctgggctacgaccatacccaggactggatcagatgagcttcctaccacatatggcctacacctacccaactggagcagctacttttgctgatatgcagcaaaggagaaagtaccagcggaaacaaggatttcagggagaattgcttgatggagcacaagactacatgtcaggcctagatgatatgacagactccgactcctgtctgtctcgcaaaaagatcaagaagacagagagtggcatgtatgcatgtgacttatgtgacaagacattccagaaaagcagttcccttctgcgacataaatacgaacacacaggaaaaagaccacatcagtgtcagatttgtaagaaagcgtttaaacacaagcaccaccttatcgagcactcaaggcttcactcgggcgagaagccctatcagtgtgataaatgtggcaagcgcttctcacactcgggctcgtactcgcagcacatgaatcacaggtattcctactgcaagcgggaggcggaggagcgggaagcggcggagcgcgaggcgcgcgagaaagggcacttggaacccaccgagctgctgatgaaccgggcttacttgcagagcattacccctcaggggtactctgactcggaggagagggagagtatgccgagggatggcgagagcgagaaggagcacgagaaagaaggcgaggatggctacgggaagctgggcagacaggatggcgacgaggagttcgaggaggaagaggaagaaagtgaaaataaaagtatggatacggatcccgaaacgatacgagatgaagaagagactggagatcactccatggacgatagttcggaggatgggaaaatggaaaccaaatcagaccacgaggaagacaatatggaagatggcatgtaataaactactgcattttaagcttcctatttttttttccagtagtattgttacctgcttgaaaacactgctgtgttaagctgttcatgcacgtgcctgacgcttccaggaagctgtagagagggacagaaggggcggttcagccaagacagatgtagacggagttggagctgggtattgttaaaaactgcattatgcaaaaattttgtacagtgttaaggcctaaaaactgtgtggttcagagactaattcctgtgtttaatagcatttatactttaagcacaactagaaaattgtaagaattgcactctacttatgtatcactacaaactttaaaaaactatgtctaatttatattaatacattttaaaaaggtgcccgcactaccatacatcagtatttttattattattattgttattcctttttaatttaatgtgctcgcactacaatgcatcagtattatgattcctctgtactttcctttcgctattcatcaatttcccattttttttttcagcttaagtaaccacacaattttaggcctcaatttttttttttttctgtgaaggaacttgaagtgatgcatgtgtgaatttaagataccgaagtcttaaagtgacctggacgtgaaggaaaaagtaagatgagaaataaagaaagcctttgtaaggtggttttaaaagccttatatgcaaaccttttaatctgtgtttctgcaagtgccatccttgtacagtgttaagagggtaacatgggttacctttgcaccagcttcagtgttaagctcaccctgttctttgaagcacccatgtcagtattagaagaataggcagcagttccttagtttacatatgtttgtgcaattattttctgtacttttttgttcattaattttgtcagtattacaccaaactgtttttgcaacaaaaaaattttttttgcattcatttaattttaggtcaaataacattttatttatgtggctcattttatatttcctaattttatttatttcatactgtagtgtacagtattatagttcttcaatatatagatatattttagtaaaaaaggaacatgacgttgatcatttgggcaaattttacgtaaagagaagagcatttattgtgttttggaacattaattgtgagatgggatttttcaattttattattttatttttgtttttttccaattactggaaattccaaatttgggaacttttgatacgatcttgtgaaaacactgtattttcgactgaaaattccactttcttcatcttgttttttagctaaaaagagggactgttaaatacaatgtatgataccatgacaaaaatctttcctgaattgtctttgtaaaagtattattgaattttcaatttgtaatttcttttgaaaatgaccatgctcgaataaaaatgtagccaaactaagaatgtagttaatgagttctgtacttttagagagttttccttcaatgaccattaacatgtaacatgctttatgcttataataatgctaattatgtttttttcatataattttagtttagcaataattttgactggtaccaataactgttttttaaaattccatacctatgtacagcaattttacagcttttctcaactgatcctgattccagattgtgtatttttatgtgaggttatattattcaaatttagtctatttactttacagacatttctacttttgcattacgagtatttagagattatgtgttaaaaattcacttctctgtccaaggggtctttgtgatttattcaaaaaaaagtctaatttcaaaaagacagctattattcagtgttatttataatatgtaaccttttttaaaggattgggatagtttatctcactttttgaaatgcagacagtagtttaccgtttatctgaaactagaaggcgtgggtgggagaggaaaagctaaaagcaaatgctaacaaaaataaccgtgattttctaagacagtttttcagtttttacaagatgaccctaatattcagaatatgaatgtattcgtaggttttacataatgacttttatcaagaaactagattctgcttcttaaatctaattgccaagtgaagaataacagaaaaaacagattaccttatcaaatttacagctcttgaatatacagaactataatatagtagctgtccatgtattttttctactttagaatcaaagaagaaaagcatcattttgctattaaatttgctaaaattttgagtatgatatttccagttggcaagaacaacatatttatatttattccttagccataataccactttcctaaatttcacaaaagtcattctttgcaacttgaaactcaatagaaagtgtgtatgtgtgtgtgtgtatatatatatatatatacacacacacacatacacagaaaggatgtaatgaagatacagtaatagttgagcagacctttttagaaaaacatgtttttagctctatcttcaaactttctggcagagggggtggggggggcagggggaggagtggcatcaaaatgctatgcctcctgttatccacagcctagagtttttatatttggaaagtttagaaaattctatcctcgtttctccttctttgaatggcacaaataaatacactacataaatttttctggtttgaaaggctctaggcgataactttattaattcaacctgaaaatatcaagccattaaattttgtccgggtagaataaatccctgtggcctcttttaaagcaatgtaggtctctgttgcccatggggcatatctgtgtcccaatccacaagagataggaccaacaaacaatgaatgtgcaacctaactctttctccttggaaagaagaaagtgtgcacgaagtagaggagggtgggcagaccctgccttgcccctcctgttacccccttctctgtcatttgttcctaactccatttcataggcaggctcagaatacctgagtctgaaaatatcaggataacacttgtgaattgtgacaatcactacaatgtcccatatctgaggagttttttttaatgctatttatccgctggacacgattgcacattagggctgcataatcctctaactctagggaaaaataaaaacttttgatttgtcttaagattcttctccaaggtcgcaaacaagaaattcccctccacaaccaagagatgtgcattttagtaacatcagatgtgttcttctgttttatcaactacttactcttcccacacgcttagttctaaatctaacctttcccccctcgaatagggggcaggggaggatgaggaaacactggaacaactgaacacccctgcccattttctccaagagccttttgtattctagcatatctgtgcaatcttttcttttttcttcacatgacactgtaagcttaggcctgaaataactgggaagagagatgcgtatcagaatttctccgcaagagctaaacaaaacatacatcttccttagcatgaattggactgggggcggagtgggagggcttggaggaaaggggaaagaagggactatatttgaataaatatgaataaatgtattagatacttttcacaatcagataacttttaaaaaggtcattttttatctttctaataatgtaagccttaataaaagcaaatcttagtcacaaatttgaggagactgcccaataataagtttacatgtatttgaactgaaaaattgttaaccatgcttttgctccaagatgtgtgaggccattcaggggctgtagggccctggatatacacacaaacaagtgtgtgtatatctggagccccacacattgtaataaacacagctgcatttatttgactatgtgatcccatgtacatgtaaaaacattcaaacaaacacactcagcggatttatttattgtgcaatggggcaattattcaaataaacatgctcaatgcaattatttgaatctcacattgcatgttcatcaatcatagcactaaaaaaagagggggaaaaaacaccaaagaattcacatggggaaaaaatatatatatgaaaaccaccttattatagattttatagggcagctgaggttatggctcccttcttaactgtaactcaactattctgtattcaatgacatttgtttctaatgattaattggttcactcacttgatcatataatagcaaactttataaacctgtattgtgtagagatgtgaaatctctatatttcaagagcagaagagttctttctagacaccttacatcaagggacactggtccaattattatcgcttatataagcactcctataaattctgaaaaattttatacatgcaacaaaacattcctacatttgaagacattaagaaaaatcacaggtgactcatctgatcattctatatattaataaatattatgacatatatgtgaacacatcacaaatcatattggtgtaccaagaggcaatttatgcctctcttaagtatgtactgacataacctaatatactaaaatgggaaggggcttttagtcactgaaatatgcatcgtgtaacaaagatgaagaaaatacatggcttgtgcccatcataaaaaaagattcagactgaaggcttagctttggttttttcaattaaattgttaaactgtgcacagtgatttttttttagaacttgagacatttgtgatgttggctgtttaaatctttgttaccttcgctgtgaattgaaattgtacatatttagtaaatcatgcagacaaaacaaactttttagacaatatttttattggagagttttcttttcctgtatccatgttaaaaaaaaaaaagacctcctttcccaaaataaaaatgtcaatactaaatttaaagaagtataaaggaatgattgcttcctttagagcaaaatatttaaataaacatggagataattggcaacatgttctttttgggctagtaggctgtgtccaattttttgggtctgatgtttcagagggcctctgtttcagggttgaagatgatatattaatctcggaattaaacaaatgctattaaataacagaaataaatccttcagtcttcatttgtatctgaaatgtggaattagtcagagaaatggcaccgagataatatgatgctgaatatgccacaagctaaaactttctctattaaacgagtcgcctactacctataatctagcatgacatgttaaaatgctccaaaatactgaaaatagaaaatgaacactactgttccgatttggtcttgagattaatatgacaaagattctaataattttagtcaaagaaaatgatgagtaaaaaatacatgaagattaaagtgatgacaaatga

SEQ ID NO: 23305 - DNA, 9583 bp, Homo sapiens
  misc_feature 1..9583: note = ENST00000636471
  source 1..9583: mol_type = unassigned DNA; mol_type = unassigned DNA
gagacttcaaggtataatctatcccagatcctttcccagagagaaacttggcgatcacgttttcacatgatgctcacgctcagggcgcttcaattatccctccccacaaagataggtggcgcgtgtttcagggtctctcgtctctctcctacagaaaagaaaaagaaaaaaatgtcattagaagaggcgtaacacgtcagtccgtccccaggtttgtgtttcctggagtggccgaaagagatcagttctaacctgctctgcaggaataacggtcctgcctcccgacactcttggcgaggtttttgtacagtttgctccgggagctgtttcttcgcttccacctttttctcccccacacttcgcggcttcttcatgctttttcttctcaccatttctggccaaaactacaaacaagacttcgcagatcgagcctgcgtgctgccgaagcagggcgccgagtccatgcgaactgccatctgatccgctcttatcaatgaagcagccgatcatggcggatggcccccggtgcaagaggcgcaaacaagccaatcccaggaggaaaaacgtggtgaactatgacaatgtagtggacacaggttctgaaacagatgaggaagacaagcttcatattgctgaggatgacggtattgccaaccctctggaccaggagacgagtccagctagtgtgcccaaccatgagtcctccccacacgtgagccaagctctgttgccaagagaggaagaggaagatgaaataagggagggtggagtggaacacccctggcacaacaacgagattctacaagcctctgtagatggtccagaagaaatgaaggaagactatgacactatggggccagaagccacgatccagaccgcaattaacaatggtacagtgaagaatgcaaattgcacatcagattttgaggaatactttgccaaaagaaaactggaggaacgcgatggtcatgcagtcagcatcgaggagtaccttcagcgcagtgacacagccattatttacccagaagcccctgaggagctgtctcgccttggcacgccagaggccaatgggcaagaagaaaatgacctgccacctggaactccagatgcttttgcccaactgctgacctgcccctactgcgaccggggctacaagcgcttgacatcactgaaggagcacatcaagtaccgccacgagaagaatgaagagaacttttcctgccctctctgtagctacacgtttgcctaccgcacccagctcgagcggcatatggtgacacacaagccagggacagatcagcaccaaatgctaacccaaggagcaggtaatcgcaagttcaaatgcacagagtgtggcaaggccttcaaatataaacaccatctgaaagaacacctgcgaattcacagtgattcttctcttggtagacaattgcaattgttatctaatcaaggaaatgtaacggtaattttaattatcattttaggtgaaaaaccttacgagtgcccaaactgcaagaaacgtttctcccattctggttcctacagttcgcacatcagcagcaagaaatgtattggtttaatctctgtaaatggccgaatgagaaacaatatcaagacgggttcttcccctaattctgtttcttcttctcctactaattcagccattacccagttaagaaacaagttggagaatggaaaaccacttagtatgtctgaacagacaggcttacttaaaattaaaacagaaccactagacttcaatgactataaagttcttatggctacacacgggtttagtggcactagtccctttatgaatggtgggcttggagccaccagccctttaggagttcatccatctgctcagagtccaatgcagcacttaggtgtagggatggaagcccctttacttgggtttcccaccatgaatagtaatttaagtgaggtacaaaaggttctacagattgtggacaatactgtttccaggcaaaaaatggactgcaaggctgaagaaatttcaaagttgaaaggttatcacatgaaggatccatgctctcaacctgaggaacaaggagttacttctcctaatattccgcctgtcggtcttccggtagtgagtcataatggtgccactaaaagtattattgactatacgttggaaaaagtcaatgaagccaaagcttgcctccagagcttgactactgactcaaggagacagatcagtaatataaagaaagagaagctacgtactttaatagatttggtcactgatgacaaaatgattgagaaccacaacatatccactccattttcatgccagttctgtaaagaaagttttcctggccccatccctttgcatcagcatgaacgttacctttgtaagatgaatgaagagatcaaggcggtcctgcagcctcatgaaaacatagtccccaacaaagccggagtttttgttgataataaagccctcctcttgtcatctgtactttctgagaaaggaatgacaagccccatcaacccatacaaggaccacatgtctgtactcaaagcatactatgctatgaacatggagcccaactccgatgaactgctgaaaatttccattgctgtgggccttcctcaggaatttgtgaaggaatggtttgaacaacgaaaagtctaccagtactcaaattccaggtccccatccctggaaagaagctccaagccgttagctcccaacagtaaccctcccacaaaagactctttattacccaggtctcctgtaaaacctatggactccataacatcaccatctatagcagaactccacaacagtgttacgaattgtgatcctcctctcaggctaacaaaaccttcccattttaccaatattaaaccagttgaaaaattggaccactccaggagtaatactccttctcccttaaatctttcctccacatcttctaaaaactcccacagtagttcatacactccaaacagcttctcttctgaggagctccaggctgagcctttagacttgtcattaccaaaacaaatgaaagaacccaaaagtattatagccacaaagaacaaaacaaaagctagtagcatcagtttagatcataacagtgtttcttcctcatctgaaaactcagatgagcctctgaacttgacttttatcaagaaggaattttcaaattcaaataatctggacaacaaaagcactaacccagtgttcagcatgaacccatttagtgccaaacctttatacacagctcttccacctcaaagcgcatttccccctgctactttcatgccaccagtccagaccagtattcctgggctacgaccatacccaggactggatcagatgagcttcctaccacatatggcctacacctacccaactggagcagctacttttgctgatatgcagcaaaggagaaagtaccagcggaaacaaggatttcagggagaattgcttgatggagcacaagactacatgtcaggcctagatgatatgacagactccgactcctgtctgtctcgcaaaaagatcaagaagacagagagtggcatgtatgcatgtgacttatgtgacaagacattccagaaaagcagttcccttctgcgacataaatacgaacacacaggaaaaagaccacatcagtgtcagatttgtaagaaagcgtttaaacacaagcaccaccttatcgagcactcaaggcttcactcgggcgagaagccctatcagtgtgataaatgtggcaagcgcttctcacactcgggctcgtactcgcagcacatgaatcacaggtattcctactgcaagcgggaggcggaggagcgggaagcggcggagcgcgaggcgcgcgagaaagggcacttggaacccaccgagctgctgatgaaccgggcttacttgcagagcattacccctcaggggtactctgactcggaggagagggagagtatgccgagggatggcgagagcgagaaggagcacgagaaagaaggcgaggatggctacgggaagctgggcagacaggatggcgacgaggagttcgaggaggaagaggaagaaagtgaaaataaaagtatggatacggatcccgaaacgatacgagatgaagaagagactggagatcactccatggacgatagttcggaggatgggaaaatggaaaccaaatcagaccacgaggaagacaatatggaagatggcatgtaataaactactgcattttaagcttcctatttttttttccagtagtattgttacctgcttgaaaacactgctgtgttaagctgttcatgcacgtgcctgacgcttccaggaagctgtagagagggacagaaggggcggttcagccaagacagatgtagacggagttggagctgggtattgttaaaaactgcattatgcaaaaattttgtacagtgttaaggcctaaaaactgtgtggttcagagactaattcctgtgtttaatagcatttatactttaagcacaactagaaaattgtaagaattgcactctacttatgtatcactacaaactttaaaaaactatgtctaatttatattaatacattttaaaaaggtgcccgcactaccatacatcagtatttttattattattattgttattcctttttaatttaatgtgctcgcactacaatgcatcagtattatgattcctctgtactttcctttcgctattcatcaatttcccattttttttttcagcttaagtaaccacacaattttaggcctcaatttttttttttttctgtgaaggaacttgaagtgatgcatgtgtgaatttaagataccgaagtcttaaagtgacctggacgtgaaggaaaaagtaagatgagaaataaagaaagcctttgtaaggtggttttaaaagccttatatgcaaaccttttaatctgtgtttctgcaagtgccatccttgtacagtgttaagagggtaacatgggttacctttgcaccagcttcagtgttaagctcaccctgttctttgaagcacccatgtcagtattagaagaataggcagcagttccttagtttacatatgtttgtgcaattattttctgtacttttttgttcattaattttgtcagtattacaccaaactgtttttgcaacaaaaaaattttttttgcattcatttaattttaggtcaaataacattttatttatgtggctcattttatatttcctaattttatttatttcatactgtagtgtacagtattatagttcttcaatatatagatatattttagtaaaaaaggaacatgacgttgatcatttgggcaaattttacgtaaagagaagagcatttattgtgttttggaacattaattgtgagatgggatttttcaattttattattttatttttgtttttttccaattactggaaattccaaatttgggaacttttgatacgatcttgtgaaaacactgtattttcgactgaaaattccactttcttcatcttgttttttagctaaaaagagggactgttaaatacaatgtatgataccatgacaaaaatctttcctgaattgtctttgtaaaagtattattgaattttcaatttgtaatttcttttgaaaatgaccatgctcgaataaaaatgtagccaaactaagaatgtagttaatgagttctgtacttttagagagttttccttcaatgaccattaacatgtaacatgctttatgcttataataatgctaattatgtttttttcatataattttagtttagcaataattttgactggtaccaataactgttttttaaaattccatacctatgtacagcaattttacagcttttctcaactgatcctgattccagattgtgtatttttatgtgaggttatattattcaaatttagtctatttactttacagacatttctacttttgcattacgagtatttagagattatgtgttaaaaattcacttctctgtccaaggggtctttgtgatttattcaaaaaaaagtctaatttcaaaaagacagctattattcagtgttatttataatatgtaaccttttttaaaggattgggatagtttatctcactttttgaaatgcagacagtagtttaccgtttatctgaaactagaaggcgtgggtgggagaggaaaagctaaaagcaaatgctaacaaaaataaccgtgattttctaagacagtttttcagtttttacaagatgaccctaatattcagaatatgaatgtattcgtaggttttacataatgacttttatcaagaaactagattctgcttcttaaatctaattgccaagtgaagaataacagaaaaaacagattaccttatcaaatttacagctcttgaatatacagaactataatatagtagctgtccatgtattttttctactttagaatcaaagaagaaaagcatcattttgctattaaatttgctaaaattttgagtatgatatttccagttggcaagaacaacatatttatatttattccttagccataataccactttcctaaatttcacaaaagtcattctttgcaacttgaaactcaatagaaagtgtgtatgtgtgtgtgtgtatatatatatatatatacacacacacacatacacagaaaggatgtaatgaagatacagtaatagttgagcagacctttttagaaaaacatgtttttagctctatcttcaaactttctggcagagggggtggggggggcagggggaggagtggcatcaaaatgctatgcctcctgttatccacagcctagagtttttatatttggaaagtttagaaaattctatcctcgtttctccttctttgaatggcacaaataaatacactacataaatttttctggtttgaaaggctctaggcgataactttattaattcaacctgaaaatatcaagccattaaattttgtccgggtagaataaatccctgtggcctcttttaaagcaatgtaggtctctgttgcccatggggcatatctgtgtcccaatccacaagagataggaccaacaaacaatgaatgtgcaacctaactctttctccttggaaagaagaaagtgtgcacgaagtagaggagggtgggcagaccctgccttgcccctcctgttacccccttctctgtcatttgttcctaactccatttcataggcaggctcagaatacctgagtctgaaaatatcaggataacacttgtgaattgtgacaatcactacaatgtcccatatctgaggagttttttttaatgctatttatccgctggacacgattgcacattagggctgcataatcctctaactctagggaaaaataaaaacttttgatttgtcttaagattcttctccaaggtcgcaaacaagaaattcccctccacaaccaagagatgtgcattttagtaacatcagatgtgttcttctgttttatcaactacttactcttcccacacgcttagttctaaatctaacctttcccccctcgaatagggggcaggggaggatgaggaaacactggaacaactgaacacccctgcccattttctccaagagccttttgtattctagcatatctgtgcaatcttttcttttttcttcacatgacactgtaagcttaggcctgaaataactgggaagagagatgcgtatcagaatttctccgcaagagctaaacaaaacatacatcttccttagcatgaattggactgggggcggagtgggagggcttggaggaaaggggaaagaagggactatatttgaataaatatgaataaatgtattagatacttttcacaatcagataacttttaaaaaggtcattttttatctttctaataatgtaagccttaataaaagcaaatcttagtcacaaatttgaggagactgcccaataataagtttacatgtatttgaactgaaaaattgttaaccatgcttttgctccaagatgtgtgaggccattcaggggctgtagggccctggatatacacacaaacaagtgtgtgtatatctggagccccacacattgtaataaacacagctgcatttatttgactatgtgatcccatgtacatgtaaaaacattcaaacaaacacactcagcggatttatttattgtgcaatggggcaattattcaaataaacatgctcaatgcaattatttgaatctcacattgcatgttcatcaatcatagcactaaaaaaagagggggaaaaaacaccaaagaattcacatggggaaaaaatatatatatgaaaaccaccttattatagattttatagggcagctgaggttatggctcccttcttaactgtaactcaactattctgtattcaatgacatttgtttctaatgattaattggttcactcacttgatcatataatagcaaactttataaacctgtattgtgtagagatgtgaaatctctatatttcaagagcagaagagttctttctagacaccttacatcaagggacactggtccaattattatcgcttatataagcactcctataaattctgaaaaattttatacatgcaacaaaacattcctacatttgaagacattaagaaaaatcacaggtgactcatctgatcattctatatattaataaatattatgacatatatgtgaacacatcacaaatcatattggtgtaccaagaggcaatttatgcctctcttaagtatgtactgacataacctaatatactaaaatgggaaggggcttttagtcactgaaatatgcatcgtgtaacaaagatgaagaaaatacatggcttgtgcccatcataaaaaaagattcagactgaaggcttagctttggttttttcaattaaattgttaaactgtgcacagtgatttttttttagaacttgagacatttgtgatgttggctgtttaaatctttgttaccttcgctgtgaattgaaattgtacatatttagtaaatcatgcagacaaaacaaactttttagacaatatttttattggagagttttcttttcctgtatccatgttaaaaaaaaaaaagacctcctttcccaaaataaaaatgtcaatactaaatttaaagaagtataaaggaatgattgcttcctttagagcaaaatatttaaataaacatggagataattggcaacatgttctttttgggctagtaggctgtgtccaattttttgggtctgatgtttcagagggcctctgtttcagggttgaagatgatatattaatctcggaattaaacaaatgctattaaataacagaaataaatccttcagtcttcatttgtatctgaaatgtggaattagtcagagaaatggcaccgagataatatgatgctgaatatgccacaagctaaaactttctctattaaacgagtcgcctactacctataatctagcatgacatgttaaaatgctccaaaatactgaaaatagaaaatgaacactactgttccgatttggtcttgagattaatatgacaaagattctaataattttagtcaaagaaaatgatgagtaaaaaatacatgaagattaaagtgatgacaaatga

SEQ ID NO: 23306 - DNA, 9541 bp, Homo sapiens
  misc_feature 1..9541: note = ENST00000627532
  source 1..9541: mol_type = unassigned DNA; mol_type = unassigned DNA
tggaatttcatttcttccactaaagcgtttgcggagacttcaaggtataatctatcccagatcctttcccagagagaaacttggcgatcacgttttcacatgatgctcacgctcagggcgcttcaattatccctccccacaaagataggtggcgcgtgtttcagggtctctcgtctctctcctacagaaaagaaaaagaaaaaaatgtcattagaagaggcgtaacacgtcagtccgtccccaggtttgtgtttcctggagtggccgaaagagatcagttctaacctgctctgcaggaataacggtcctgcctcccgacactcttggcgaggtttttgtacagtttgctccgggagctgtttcttcgcttccacctttttctcccccacacttcgcggcttcttcatgctttttcttctcaccatttctggccaaaactacaaacaagacttcgcagatcgagcctgcgtgctgccgaagcagggcgccgagtccatgcgaactgccatctgatccgctcttatcaatgaagcagccgatcatggcggatggcccccggtgcaagaggcgcaaacaagccaatcccaggaggaaaaacgtggtgaactatgacaatgtagtggacacaggttctgaaacagatgaggaagacaagcttcatattgctgaggatgacggtattgccaaccctctggaccaggagacgagtccagctagtgtgcccaaccatgagtcctccccacacgtgagccaagctctgttgccaagagaggaagaggaagatgaaataagggagggtggagtggaacacccctggcacaacaacgagattctacaagcctctgtagatggtccagaagaaatgaaggaagactatgacactatggggccagaagccacgatccagaccgcaattaacaatggtacagtgaagaatgcaaattgcacatcagattttgaggaatactttgccaaaagaaaactggaggaacgcgatggtcatgcagtcagcatcgaggagtaccttcagcgcagtgacacagccattatttacccagaagcccctgaggagctgtctcgccttggcacgccagaggccaatgggcaagaagaaaatgacctgccacctggaactccagatgcttttgcccaactgctgacctgcccctactgcgaccggggctacaagcgcttgacatcactgaaggagcacatcaagtaccgccacgagaagaatgaagagaacttttcctgccctctctgtagctacacgtttgcctaccgcacccagctcgagcggcatatggtgacacacaagccagggacagatcagcaccaaatgctaacccaaggagcaggtaatcgcaagttcaaatgcacagagtgtggcaaggccttcaaatataaacaccatctgaaagaacacctgcgaattcacagtggtgaaaaaccttacgagtgcccaaactgcaagaaacgtttctcccattctggttcctacagttcgcacatcagcagcaagaaatgtattggtttaatctctgtaaatggccgaatgagaaacaatatcaagacgggttcttcccctaattctgtttcttcttctcctactaattcagccattacccagttaagaaacaagttggagaatggaaaaccacttagtatgtctgaacagacaggcttacttaaaattaaaacagaaccactagacttcaatgactataaagttcttatggctacacacgggtttagtggcactagtccctttatgaatggtgggcttggagccaccagccctttaggagttcatccatctgctcagagtccaatgcagcacttaggtgtagggatggaagcccctttacttgggtttcccaccatgaatagtaatttaagtgaggtacaaaaggttctacagattgtggacaatactgtttccaggcaaaaaatggactgcaaggctgaagaaatttcaaagttgaaaggttatcacatgaaggatccatgctctcaacctgaggaacaaggagttacttctcctaatattccgcctgtcggtcttccggtagtgagtcataatggtgccactaaaagtattattgactatacgttggaaaaagtcaatgaagccaaagcttgcctccagagcttgactactgactcaaggagacagatcagtaatataaagaaagagaagctacgtactttaatagatttggtcactgatgacaaaatgattgagaaccacaacatatccactccattttcatgccagttctgtaaagaaagttttcctggccccatccctttgcatcagcatgaacgttacctttgtaagatgaatgaagagatcaaggcggtcctgcagcctcatgaaaacatagtccccaacaaagccggagtttttgttgataataaagccctcctcttgtcatctgtactttctgagaaaggaatgacaagccccatcaacccatacaaggaccacatgtctgtactcaaagcatactatgctatgaacatggagcccaactccgatgaactgctgaaaatttccattgctgtgggccttcctcaggaatttgtgaaggaatggtttgaacaacgaaaagtctaccagtactcaaattccaggtccccatccctggaaagaagctccaagccgttagctcccaacagtaaccctcccacaaaagactctttattacccaggtctcctgtaaaacctatggactccataacatcaccatctatagcagaactccacaacagtgttacgaattgtgatcctcctctcaggctaacaaaaccttcccattttaccaatattaaaccagttgaaaaattggaccactccaggagtaatactccttctcccttaaatctttcctccacatcttctaaaaactcccacagtagttcatacactccaaacagcttctcttctgaggagctccaggctgagcctttagacttgtcattaccaaaacaaatgaaagaacccaaaagtattatagccacaaagaacaaaacaaaagctagtagcatcagtttagatcataacagtgtttcttcctcatctgaaaactcagatgagcctctgaacttgacttttatcaagaaggaattttcaaattcaaataatctggacaacaaaagcactaacccagtgttcagcatgaacccatttagtgccaaacctttatacacagctcttccacctcaaagcgcatttccccctgctactttcatgccaccagtccagaccagtattcctgggctacgaccatacccaggactggatcagatgagcttcctaccacatatggcctacacctacccaactggagcagctacttttgctgatatgcagcaaaggagaaagtaccagcggaaacaaggatttcagggagaattgcttgatggagcacaagactacatgtcaggcctagatgatatgacagactccgactcctgtctgtctcgcaaaaagatcaagaagacagagagtggcatgtatgcatgtgacttatgtgacaagacattccagaaaagcagttcccttctgcgacataaatacgaacacacaggaaaaagaccacatcagtgtcagatttgtaagaaagcgtttaaacacaagcaccaccttatcgagcactcaaggcttcactcgggcgagaagccctatcagtgtgataaatgtggcaagcgcttctcacactcgggctcgtactcgcagcacatgaatcacaggtattcctactgcaagcgggaggcggaggagcgggaagcggcggagcgcgaggcgcgcgagaaagggcacttggaacccaccgagctgctgatgaaccgggcttacttgcagagcattacccctcaggggtactctgactcggaggagagggagagtatgccgagggatggcgagagcgagaaggagcacgagaaagaaggcgaggatggctacgggaagctgggcagacaggatggcgacgaggagttcgaggaggaagaggaagaaagtgaaaataaaagtatggatacggatcccgaaacgatacgagatgaagaagagactggagatcactccatggacgatagttcggaggatgggaaaatggaaaccaaatcagaccacgaggaagacaatatggaagatggcatgtaataaactactgcattttaagcttcctatttttttttccagtagtattgttacctgcttgaaaacactgctgtgttaagctgttcatgcacgtgcctgacgcttccaggaagctgtagagagggacagaaggggcggttcagccaagacagatgtagacggagttggagctgggtattgttaaaaactgcattatgcaaaaattttgtacagtgttaaggcctaaaaactgtgtggttcagagactaattcctgtgtttaatagcatttatactttaagcacaactagaaaattgtaagaattgcactctacttatgtatcactacaaactttaaaaaactatgtctaatttatattaatacattttaaaaaggtgcccgcactaccatacatcagtatttttattattattattgttattcctttttaatttaatgtgctcgcactacaatgcatcagtattatgattcctctgtactttcctttcgctattcatcaatttcccattttttttttcagcttaagtaaccacacaattttaggcctcaatttttttttttttctgtgaaggaacttgaagtgatgcatgtgtgaatttaagataccgaagtcttaaagtgacctggacgtgaaggaaaaagtaagatgagaaataaagaaagcctttgtaaggtggttttaaaagccttatatgcaaaccttttaatctgtgtttctgcaagtgccatccttgtacagtgttaagagggtaacatgggttacctttgcaccagcttcagtgttaagctcaccctgttctttgaagcacccatgtcagtattagaagaataggcagcagttccttagtttacatatgtttgtgcaattattttctgtacttttttgttcattaattttgtcagtattacaccaaactgtttttgcaacaaaaaaattttttttgcattcatttaattttaggtcaaataacattttatttatgtggctcattttatatttcctaattttatttatttcatactgtagtgtacagtattatagttcttcaatatatagatatattttagtaaaaaaggaacatgacgttgatcatttgggcaaattttacgtaaagagaagagcatttattgtgttttggaacattaattgtgagatgggatttttcaattttattattttatttttgtttttttccaattactggaaattccaaatttgggaacttttgatacgatcttgtgaaaacactgtattttcgactgaaaattccactttcttcatcttgttttttagctaaaaagagggactgttaaatacaatgtatgataccatgacaaaaatctttcctgaattgtctttgtaaaagtattattgaattttcaatttgtaatttcttttgaaaatgaccatgctcgaataaaaatgtagccaaactaagaatgtagttaatgagttctgtacttttagagagttttccttcaatgaccattaacatgtaacatgctttatgcttataataatgctaattatgtttttttcatataattttagtttagcaataattttgactggtaccaataactgttttttaaaattccatacctatgtacagcaattttacagcttttctcaactgatcctgattccagattgtgtatttttatgtgaggttatattattcaaatttagtctatttactttacagacatttctacttttgcattacgagtatttagagattatgtgttaaaaattcacttctctgtccaaggggtctttgtgatttattcaaaaaaaagtctaatttcaaaaagacagctattattcagtgttatttataatatgtaaccttttttaaaggattgggatagtttatctcactttttgaaatgcagacagtagtttaccgtttatctgaaactagaaggcgtgggtgggagaggaaaagctaaaagcaaatgctaacaaaaataaccgtgattttctaagacagtttttcagtttttacaagatgaccctaatattcagaatatgaatgtattcgtaggttttacataatgacttttatcaagaaactagattctgcttcttaaatctaattgccaagtgaagaataacagaaaaaacagattaccttatcaaatttacagctcttgaatatacagaactataatatagtagctgtccatgtattttttctactttagaatcaaagaagaaaagcatcattttgctattaaatttgctaaaattttgagtatgatatttccagttggcaagaacaacatatttatatttattccttagccataataccactttcctaaatttcacaaaagtcattctttgcaacttgaaactcaatagaaagtgtgtatgtgtgtgtgtgtatatatatatatatatacacacacacacatacacagaaaggatgtaatgaagatacagtaatagttgagcagacctttttagaaaaacatgtttttagctctatcttcaaactttctggcagagggggtggggggggcagggggaggagtggcatcaaaatgctatgcctcctgttatccacagcctagagtttttatatttggaaagtttagaaaattctatcctcgtttctccttctttgaatggcacaaataaatacactacataaatttttctggtttgaaaggctctaggcgataactttattaattcaacctgaaaatatcaagccattaaattttgtccgggtagaataaatccctgtggcctcttttaaagcaatgtaggtctctgttgcccatggggcatatctgtgtcccaatccacaagagataggaccaacaaacaatgaatgtgcaacctaactctttctccttggaaagaagaaagtgtgcacgaagtagaggagggtgggcagaccctgccttgcccctcctgttacccccttctctgtcatttgttcctaactccatttcataggcaggctcagaatacctgagtctgaaaatatcaggataacacttgtgaattgtgacaatcactacaatgtcccatatctgaggagttttttttaatgctatttatccgctggacacgattgcacattagggctgcataatcctctaactctagggaaaaataaaaacttttgatttgtcttaagattcttctccaaggtcgcaaacaagaaattcccctccacaaccaagagatgtgcattttagtaacatcagatgtgttcttctgttttatcaactacttactcttcccacacgcttagttctaaatctaacctttcccccctcgaatagggggcaggggaggatgaggaaacactggaacaactgaacacccctgcccattttctccaagagccttttgtattctagcatatctgtgcaatcttttcttttttcttcacatgacactgtaagcttaggcctgaaataactgggaagagagatgcgtatcagaatttctccgcaagagctaaacaaaacatacatcttccttagcatgaattggactgggggcggagtgggagggcttggaggaaaggggaaagaagggactatatttgaataaatatgaataaatgtattagatacttttcacaatcagataacttttaaaaaggtcattttttatctttctaataatgtaagccttaataaaagcaaatcttagtcacaaatttgaggagactgcccaataataagtttacatgtatttgaactgaaaaattgttaaccatgcttttgctccaagatgtgtgaggccattcaggggctgtagggccctggatatacacacaaacaagtgtgtgtatatctggagccccacacattgtaataaacacagctgcatttatttgactatgtgatcccatgtacatgtaaaaacattcaaacaaacacactcagcggatttatttattgtgcaatggggcaattattcaaataaacatgctcaatgcaattatttgaatctcacattgcatgttcatcaatcatagcactaaaaaaagagggggaaaaaacaccaaagaattcacatggggaaaaaatatatatatgaaaaccaccttattatagattttatagggcagctgaggttatggctcccttcttaactgtaactcaactattctgtattcaatgacatttgtttctaatgattaattggttcactcacttgatcatataatagcaaactttataaacctgtattgtgtagagatgtgaaatctctatatttcaagagcagaagagttctttctagacaccttacatcaagggacactggtccaattattatcgcttatataagcactcctataaattctgaaaaattttatacatgcaacaaaacattcctacatttgaagacattaagaaaaatcacaggtgactcatctgatcattctatatattaataaatattatgacatatatgtgaacacatcacaaatcatattggtgtaccaagaggcaatttatgcctctcttaagtatgtactgacataacctaatatactaaaatgggaaggggcttttagtcactgaaatatgcatcgtgtaacaaagatgaagaaaatacatggcttgtgcccatcataaaaaaagattcagactgaaggcttagctttggttttttcaattaaattgttaaactgtgcacagtgatttttttttagaacttgagacatttgtgatgttggctgtttaaatctttgttaccttcgctgtgaattgaaattgtacatatttagtaaatcatgcagacaaaacaaactttttagacaatatttttattggagagttttcttttcctgtatccatgttaaaaaaaaaaaagacctcctttcccaaaataaaaatgtcaatactaaatttaaagaagtataaaggaatgattgcttcctttagagcaaaatatttaaataaacatggagataattggcaacatgttctttttgggctagtaggctgtgtccaattttttgggtctgatgtttcagagggcctctgtttcagggttgaagatgatatattaatctcggaattaaacaaatgctattaaataacagaaataaatccttcagtcttcatttgtatctgaaatgtggaattagtcagagaaatggcaccgagataatatgatgctgaatatgccacaagctaaaactttctctattaaacgagtcgcctactacctataatctagcatgacatgttaaaatgctccaaaatactgaaaatagaaaatgaacactactgttccgatttggtcttgagattaatatgacaaagattctaataattttagtcaaagaaaatgatgagtaaaaaatacatgaagattaaagtgatgacaaatga

SEQ ID NO: 23307 - DNA, 1755 bp, Homo sapiens
  misc_feature 1..1755: note = ENST00000419938
  source 1..1755: mol_type = unassigned DNA; mol_type = unassigned DNA
caggaataacggtcctgcctcccgacactcttggcgaggtttttgtacagtttgctccgggagctgtttcttcgcttccacctttttctcccccacacttcgcggcttcttcatgctttttcttctcaccatttctggccaaaactacaaacaagacttcgcagatcgagcctgcgtgctgccgaagcagggcgccgagtccatgcgaactgccatctgatccgctcttatcaatgaagcagccgatcatggcggatggcccccggtgcaagaggcgcaaacaagccaatcccaggaggaaaaacgtggtgaactatgacaatgtagtggacacaggttctgaaacagatgaggaagacaagcttcatattgctgaggatgacggtattgccaaccctctggaccaggagacgagtccagctagtgtgcccaaccatgagtcctccccacacgtgagccaagctctgttgccaagagaggaagaggaagatgaaataagggagggtggagtggaacacccctggcacaacaacgagattctacaagcctctgtagatggtccagacctgccacctggaactccagatgcttttgcccaactgctgacctgcccctactgcgaccggggctacaagcgcttgacatcactgaaggagcacatcaagtaccgccacgagaagaatgaagagaacttttcctgccctctctgtagctacacgtttgcctaccgcacccagctcgagcggcatatggtgacacacaagccagggacagatcagcaccaaatgctaacccaaggagcaggtaatcgcaagttcaaatgcacagagtgtggcaaggccttcaaatataaacaccatctgaaagaacacctgcgaattcacagtggaacttgaagtgatgcatgtgtgaatttaagataccgaagtcttaaagtgacctggacgtgaaggaaaaagtaagatgagaaataaagaaagcctttgtaaggtggttttaaaagccttatatgcaaaccttttaatctgtgtttctgcaagtgccatccttgtacagtgttaagagggtaacatgggttacctttgcaccagcttcagtgttaagctcaccctgttctttgaagcacccatgtcagtattagaagaataggcagcagttccttagtttacatatgtttgtgcaattattttctgtacttttttgttcattaattttgtcagtattacaccaaactgtttttgcaacaaaaaaattttttttgcattcatttaattttaggtcaaataacattttatttatgtggctcattttatatttcctaattttatttatttcatactgtagtgtacagtattatagttcttcaatatatagatatattttagtaaaaaaggaacatgacgttgatcatttgggcaaattttacgtaaagagaagagcatttattgtgttttggaacattaattgtgagatgggatttttcaattttattattttatttttgtttttttccaattactggaaattccaaatttgggaacttttgatacgatcttgtgaaaacactgtattttcgactgaaaattccactttcttcatcttgttttttagctaaaaagagggactgttaaatacaatgtatgataccatgacaaaaatctttcctgaattgtctttgtaaaagtattattgaattttcaatttgtaatttcttttgaaaatgaccatgctcgaataaaaatgtagccaaactaa

SEQ ID NO: 23308 - DNA, 5361 bp, Homo sapiens
  misc_feature 1..5361: note = ENST00000409487
  source 1..5361: mol_type = unassigned DNA; mol_type = unassigned DNA
agaaaagatgagaacgaaaagaaaacctcgcctcaccccaagttcccgagccgggggctgaggacttttcgaaggaaagggtccgcctagccctgagtcaagcggtcttactgtaccgccgtgtgcattccctcatacggtcaggagttatgactcattttgaagatgtaattcttgtctctctgatcccctcgcgggtgcaacacaccaaacaatcgagcctgcgtgctgccgaagcagggcgccgagtccatgcgaactgccatctgatccgctcttatcaatgaagcagccgatcatggcggatggcccccggtgcaagaggcgcaaacaagccaatcccaggaggaaaaacgtggtgaactatgacaatgtagtggacacaggttctgaaacagatgaggaagacaagcttcatattgctgaggatgacggtattgccaaccctctggaccaggagacgagtccagctagtgtgcccaaccatgagtcctccccacacgtgagccaagctctgttgccaagagaggaagaggaagatgaaataagggagggtggagtggaacacccctggcacaacaacgagattctacaagcctctgtagatggtccagaagaaatgaaggaagactatgacactatggggccagaagccacgatccagaccgcaattaacaatggtacagtgaagaatgcaaattgcacatcagattttgaggaatactttgccaaaagaaaactggaggaacgcgatggtcatgcagtcagcatcgaggagtaccttcagcgcagtgacacagccattatttacccagaagcccctgaggagctgtctcgccttggcacgccagaggccaatgggcaagaagaaaatgacctgccacctggaactccagatgcttttgcccaactgctgacctgcccctactgcgaccggggctacaagcgcttgacatcactgaaggagcacatcaagtaccgccacgagaagaatgaagagaacttttcctgccctctctgtagctacacgtttgcctaccgcacccagctcgagcggcatatggtgacacacaagccagggacagatcagcaccaaatgctaacccaaggagcaggtaatcgcaagttcaaatgcacagagtgtggcaaggccttcaaatataaacaccatctgaaagaacacctgcgaattcacagtggtgaaaaaccttacgagtgcccaaactgcaagaaacgtttctcccattctggttcctacagttcgcacatcagcagcaagaaatgtattggtttaatctctgtaaatggccgaatgagaaacaatatcaagacgggttcttcccctaattctgtttcttcttctcctactaattcagccattacccagttaagaaacaagttggagaatggaaaaccacttagtatgtctgaacagacaggcttacttaaaattaaaacagaaccactagacttcaatgactataaagttcttatggctacacacgggtttagtggcactagtccctttatgaatggtgggcttggagccaccagccctttaggagttcatccatctgctcagagtccaatgcagcacttaggtgtagggatggaagcccctttacttgggtttcccaccatgaatagtaatttaagtgaggtacaaaaggttctacagattgtggacaatactgtttccaggcaaaaaatggactgcaaggctgaagaaatttcaaagttgaaaggttatcacatgaaggatccatgctctcaacctgaggaacaaggagttacttctcctaatattccgcctgtcggtcttccggtagtgagtcataatggtgccactaaaagtattattgactatacgttggaaaaagtcaatgaagccaaagcttgcctccagagcttgactactgactcaaggagacagatcagtaatataaagaaagagaagctacgtactttaatagatttggtcactgatgacaaaatgattgagaaccacaacatatccactccattttcatgccagttctgtaaagaaagttttcctggccccatccctttgcatcagcatgaacgttacctttgtaagatgaatgaagagatcaaggcggtcctgcagcctcatgaaaacatagtccccaacaaagccggagtttttgttgataataaagccctcctcttgtcatctgtactttctgagaaaggaatgacaagccccatcaacccatacaaggaccacatgtctgtactcaaagcatactatgctatgaacatggagcccaactccgatgaactgctgaaaatttccattgctgtgggccttcctcaggaatttgtgaaggaatggtttgaacaacgaaaagtctaccagtactcaaattccaggtccccatccctggaaagaagctccaagccgttagctcccaacagtaaccctcccacaaaagactctttattacccaggtctcctgtaaaacctatggactccataacatcaccatctatagcagaactccacaacagtgttacgaattgtgatcctcctctcaggctaacaaaaccttcccattttaccaatattaaaccagttgaaaaattggaccactccaggagtaatactccttctcccttaaatctttcctccacatcttctaaaaactcccacagtagttcatacactccaaacagcttctcttctgaggagctccaggctgagcctttagacttgtcattaccaaaacaaatgaaagaacccaaaagtattatagccacaaagaacaaaacaaaagctagtagcatcagtttagatcataacagtgtttcttcctcatctgaaaactcagatgagcctctgaacttgacttttatcaagaaggaattttcaaattcaaataatctggacaacaaaagcactaacccagtgttcagcatgaacccatttagtgccaaacctttatacacagctcttccacctcaaagcgcatttccccctgctactttcatgccaccagtccagaccagtattcctgggctacgaccatacccaggactggatcagatgagcttcctaccacatatggcctacacctacccaactggagcagctacttttgctgatatgcagcaaaggagaaagtaccagcggaaacaaggatttcagggagaattgcttgatggagcacaagactacatgtcaggcctagatgatatgacagactccgactcctgtctgtctcgcaaaaagatcaagaagacagagagtggcatgtatgcatgtgacttatgtgacaagacattccagaaaagcagttcccttctgcgacataaatacgaacacacaggaaaaagaccacatcagtgtcagatttgtaagaaagcgtttaaacacaagcaccaccttatcgagcactcaaggcttcactcgggcgagaagccctatcagtgtgataaatgtggcaagcgcttctcacactcgggctcgtactcgcagcacatgaatcacaggtattcctactgcaagcgggaggcggaggagcgggaagcggcggagcgcgaggcgcgcgagaaagggcacttggaacccaccgagctgctgatgaaccgggcttacttgcagagcattacccctcaggggtactctgactcggaggagagggagagtatgccgagggatggcgagagcgagaaggagcacgagaaagaaggcgaggatggctacgggaagctgggcagacaggatggcgacgaggagttcgaggaggaagaggaagaaagtgaaaataaaagtatggatacggatcccgaaacgatacgagatgaagaagagactggagatcactccatggacgatagttcggaggatgggaaaatggaaaccaaatcagaccacgaggaagacaatatggaagatggcatgtaataaactactgcattttaagcttcctatttttttttccagtagtattgttacctgcttgaaaacactgctgtgttaagctgttcatgcacgtgcctgacgcttccaggaagctgtagagagggacagaaggggcggttcagccaagacagatgtagacggagttggagctgggtattgttaaaaactgcattatgcaaaaattttgtacagtgttaaggcctaaaaactgtgtggttcagagactaattcctgtgtttaatagcatttatactttaagcacaactagaaaattgtaagaattgcactctacttatgtatcactacaaactttaaaaaactatgtctaatttatattaatacattttaaaaaggtgcccgcactaccatacatcagtatttttattattattattgttattcctttttaatttaatgtgctcgcactacaatgcatcagtattatgattcctctgtactttcctttcgctattcatcaatttcccattttttttttcagcttaagtaaccacacaattttaggcctcaatttttttttttttctgtgaaggaacttgaagtgatgcatgtgtgaatttaagataccgaagtcttaaagtgacctggacgtgaaggaaaaagtaagatgagaaataaagaaagcctttgtaaggtggttttaaaagccttatatgcaaaccttttaatctgtgtttctgcaagtgccatccttgtacagtgttaagagggtaacatgggttacctttgcaccagcttcagtgttaagctcaccctgttctttgaagcacccatgtcagtattagaagaataggcagcagttccttagtttacatatgtttgtgcaattattttctgtacttttttgttcattaattttgtcagtattacaccaaactgtttttgcaacaaaaaaattttttttgcattcatttaattttaggtcaaataacattttatttatgtggctcattttatatttcctaattttatttatttcatactgtagtgtacagtattatagttcttcaatatatagatatattttagtaaaaaaggaacatgacgttgatcatttgggcaaattttacgtaaagagaagagcatttattgtgttttggaacattaattgtgagatgggatttttcaattttattattttatttttgtttttttccaattactggaaattccaaatttgggaacttttgatacgatcttgtgaaaacactgtattttcgactgaaaattccactttcttcatcttgttttttagctaaaaagagggactgttaaatacaatgtatgataccatgacaaaaatctttcctgaattgtctttgtaaaagtattattgaattttcaatttgtaatttcttttgaaaatgaccatgctcgaataaaaatgtagccaaact

SEQ ID NO: 23309 - DNA, 5073 bp, Homo sapiens
  misc_feature 1..5073: note = ENST00000636732
  source 1..5073: mol_type = unassigned DNA; mol_type = unassigned DNA
gaggcacagcatcttcccaacctccaccgagttttcaggattctcctcctctcctgcctgcctccgaggtcccccttctccaagttttgacagtttcaactgaaaaaatgcagcgcctctctcgatttttagatcgagcctgcgtgctgccgaagcagggcgccgagtccatgcgaactgccatctgatccgctcttatcaatgaagcagccgatcatggcggatggcccccggtgcaagaggcgcaaacaagccaatcccaggaggaaaaacgtggtgaactatgacaatgtagtggacacaggttctgaaacagatgaggaagacaagcttcatattgctgaggatgacggtattgccaaccctctggaccaggagacgagtccagctagtgtgcccaaccatgagtcctccccacacgtgagccaagctctgttgccaagagaggaagaggaagatgaaataagggagggtggagtggaacacccctggcacaacaacgagattctacaagcctctgtagatggtccagaatcttccttgttcctgtgcttggcatgcttagtatagtaagcctttctacaattctcaaatgctaaagataattttcccccacagaagaaatgaaggaagactatgacactatggggccagaagccacgatccagaccgcaattaacaatggtacagtgaagaatgcaaattgcacatcagattttgaggaatactttgccaaaagaaaactggaggaacgcgatggtcatgcagtcagcatcgaggagtaccttcagcgcagtgacacagccattatttacccagaagcccctgaggagctgtctcgccttggcacgccagaggccaatgggcaagaagaaaatgacctgccacctggaactccagatgcttttgcccaactgctgacctgcccctactgcgaccggggctacaagcgcttgacatcactgaaggagcacatcaagtaccgccacgagaagaatgaagagaacttttcctgccctctctgtagctacacgtttgcctaccgcacccagctcgagcggcatatggtgacacacaagccagggacagatcagcaccaaatgctaacccaaggagcaggtaatcgcaagttcaaatgcacagagtgtggcaaggccttcaaatataaacaccatctgaaagaacacctgcgaattcacagtggtgaaaaaccttacgagtgcccaaactgcaagaaacgtttctcccattctggttcctacagttcgcacatcagcagcaagaaatgtattggtttaatctctgtaaatggccgaatgagaaacaatatcaagacgggttcttcccctaattctgtttcttcttctcctactaattcagccattacccagttaagaaacaagttggagaatggaaaaccacttagtatgtctgaacagacaggcttacttaaaattaaaacagaaccactagacttcaatgactataaagttcttatggctacacacgggtttagtggcactagtccctttatgaatggtgggcttggagccaccagccctttaggagttcatccatctgctcagagtccaatgcagcacttaggtgtagggatggaagcccctttacttgggtttcccaccatgaatagtaatttaagtgaggtacaaaaggttctacagattgtggacaatactgtttccaggcaaaaaatggactgcaaggctgaagaaatttcaaagttgaaaggttatcacatgaaggatccatgctctcaacctgaggaacaaggagttacttctcctaatattccgcctgtcggtcttccggtagtgagtcataatggtgccactaaaagtattattgactatacgttggaaaaagtcaatgaagccaaagcttgcctccagagcttgactactgactcaaggagacagatcagtaatataaagaaagagaagctacgtactttaatagatttggtcactgatgacaaaatgattgagaaccacaacatatccactccattttcatgccagttctgtaaagaaagttttcctggccccatccctttgcatcagcatgaacgttacctttgtaagatgaatgaagagatcaaggcggtcctgcagcctcatgaaaacatagtccccaacaaagccggagtttttgttgataataaagccctcctcttgtcatctgtactttctgagaaaggaatgacaagccccatcaacccatacaaggaccacatgtctgtactcaaagcatactatgctatgaacatggagcccaactccgatgaactgctgaaaatttccattgctgtgggccttcctcaggaatttgtgaaggaatggtttgaacaacgaaaagtctaccagtactcaaattccaggtccccatccctggaaagaagctccaagccgttagctcccaacagtaaccctcccacaaaagactctttattacccaggtctcctgtaaaacctatggactccataacatcaccatctatagcagaactccacaacagtgttacgaattgtgatcctcctctcaggctaacaaaaccttcccattttaccaatattaaaccagttgaaaaattggaccactccaggagtaatactccttctcccttaaatctttcctccacatcttctaaaaactcccacagtagttcatacactccaaacagcttctcttctgaggagctccaggctgagcctttagacttgtcattaccaaaacaaatgaaagaacccaaaagtattatagccacaaagaacaaaacaaaagctagtagcatcagtttagatcataacagtgtttcttcctcatctgaaaactcagatgagcctctgaacttgacttttatcaagaaggaattttcaaattcaaataatctggacaacaaaagcactaacccagtgttcagcatgaacccatttagtgccaaacctttatacacagctcttccacctcaaagcgcatttccccctgctactttcatgccaccagtccagaccagtattcctgggctacgaccatacccaggactggatcagatgagcttcctaccacatatggcctacacctacccaactggagcagctacttttgctgatatgcagcaaaggagaaagtaccagcggaaacaaggatttcagggagaattgcttgatggagcacaagactacatgtcaggcctagatgatatgacagactccgactcctgtctgtctcgcaaaaagatcaagaagacagagagtggcatgtatgcatgtgacttatgtgacaagacattccagaaaagcagttcccttctgcgacataaatacgaacacacaggaaaaagaccacatcagtgtcagatttgtaagaaagcgtttaaacacaagcaccaccttatcgagcactcaaggcttcactcgggcgagaagccctatcagtgtgataaatgtggcaagcgcttctcacactcgggctcgtactcgcagcacatgaatcacaggtattcctactgcaagcgggaggcggaggagcgggaagcggcggagcgcgaggcgcgcgagaaagggcacttggaacccaccgagctgctgatgaaccgggcttacttgcagagcattacccctcaggggtactctgactcggaggagagggagagtatgccgagggatggcgagagcgagaaggagcacgagaaagaaggcgaggatggctacgggaagctgggcagacaggatggcgacgaggagttcgaggaggaagaggaagaaagtgaaaataaaagtatggatacggatcccgaaacgatacgagatgaagaagagactggagatcactccatggacgatagttcggaggatgggaaaatggaaaccaaatcagaccacgaggaagacaatatggaagatggcatgtaataaactactgcattttaagcttcctatttttttttccagtagtattgttacctgcttgaaaacactgctgtgttaagctgttcatgcacgtgcctgacgcttccaggaagctgtagagagggacagaaggggcggttcagccaagacagatgtagacggagttggagctgggtattgttaaaaactgcattatgcaaaaattttgtacagtgttaaggcctaaaaactgtgtggttcagagactaattcctgtgtttaatagcatttatactttaagcacaactagaaaattgtaagaattgcactctacttatgtatcactacaaactttaaaaaactatgtctaatttatattaatacattttaaaaaggtgcccgcactaccatacatcagtatttttattattattattgttattcctttttaatttaatgtgctcgcactacaatgcatcagtattatgattcctctgtactttcctttcgctattcatcaatttcccattttttttttcagcttaagtaaccacacaattttaggcctcaatttttttttttttctgtgaaggaacttgaagtgatgcatgtgtgaatttaagataccgaagtcttaaagtgacctggacgtgaaggaaaaagtaagatgagaaataaagaaagcctttgtaaggtggttttaaaagccttatatgcaaaccttttaatctgtgtttctgcaagtgccatccttgtacagtgttaagagggtaacatgggttacctttgcaccagcttcagtgttaagctcaccctgttctttgaagcacccatgtcagtattagaagaataggcagcagttccttagtttacatatgtttgtgcaattattttctgtacttttttgttcattaattttgtcagtattacaccaaactgtttttgcaacaaaaaaattttttttgcattcatttaattttaggtcaaataacattttatttatgtggctcattttatatttcctaattttatttatttcatactgtagtgtacagtattatagttcttcaatatatagatatattttagtaaaaaaggaacatgacgttgatcatttgggcaaattttacgtaaagagaagagcatttattgtgttttggaacat

SEQ ID NO: 23310 - DNA, 5172 bp, Homo sapiens
  misc_feature 1..5172: note = ENST00000636026
  source 1..5172: mol_type = unassigned DNA; mol_type = unassigned DNA
aggtggaatttcatttcttccactaaagcgtttgcggagacttcaaggtataatctatcccagatcctttcccagagagaaacttggcgatcacgttttcacatgatgctcacgctcagggcgcttcaattatccctccccacaaagataggtggcgcgtgtttcagggtctctcgtctctctcctacagaaaagaaaaagaaaaaaatgtcattagaagaggcgtaacacgtcagtccgtccccaggtttgtgtttcctggagtggccgaaagagatcagttctaacctgctctgcaggaataacggtcctgcctcccgacactcttggcgaggtttttgtacagtttgctccgggagctgtttcttcgcttccacctttttctcccccacacttcgcggcttcttcatgctttttcttctcaccatttctggccaaaactacaaacaagacttcgcagatcgagcctgcgtgctgccgaagcagggcgccgagtccatgcgaactgccatctgatccgctcttatcaatgaagcagccgatcatggcggatggcccccggtgcaagaggcgcaaacaagccaatcccaggaggaaaaacgtggtgaactatgacaatgtagtggacacaggttctgaaacagatgaggaagacaagcttcatattgctgaggatgacggtattgccaaccctctggaccaggagacgagtccagctagtgtgcccaaccatgagtcctccccacacgtgagccaagctctgttgccaagagaggaagaggaagatgaaataagggagggtggagtggaacacccctggcacaacaacgagattctacaagcctctgtagatggtccagaagaaatgaaggaagactatgacactatggggccagaagccacgatccagaccgcaattaacaatggtacagtgaagaatgcaaattgcacatcagattttgaggaatactttgccaaaagaaaactggaggaacgcgatggtcatgcagtcagcatcgaggagtaccttcagcgcagtgacacagccattatttacccagaagcccctgaggagctgtctcgccttggcacgccagaggccaatgggcaagaagaaaatgacctgccacctggaactccagatgcttttgcccaactgctgacctgcccctactgcgaccggggctacaagcgcttgacatcactgaaggagcacatcaagtaccgccacgagaagaatgaagagaacttttcctgccctctctgtagctacacgtttgcctaccgcacccagctcgagcggcatatggtgacacacaagccagggacagatcagcaccaaatgctaacccaaggagcaggtaatcgcaagttcaaatgcacagagtgtggcaaggccttcaaatataaacaccatctgaaagaacacctgcgaattcacagtggtgaaaaaccttacgagtgcccaaactgcaagaaacgtttctcccattctggttcctacagttcgcacatcagcagcaagaaatgtattggtttaatctctgtaaatggccgaatgagaaacaatatcaagacgggttcttcccctaattctgtttcttcttctcctactaattcagccattacccagttaagaaacaagttggagaatggaaaaccacttagtatgtctgaacagacaggcttacttaaaattaaaacagaaccactagacttcaatgactataaagttcttatggctacacacgggtttagtggcactagtccctttatgaatggtgggcttggagccaccagccctttaggagttcatccatctgctcagagtccaatgcagcacttaggtgtagggatggaagcccctttacttgggtttcccaccatgaatagtaatttaagtgaggtacaaaaggttctacagattgtggacaatactgtttccaggcaaaaaatggactgcaaggctgaagaaatttcaaagttgaaaggttatcacatgaaggatccatgctctcaacctgaggaacaaggagttacttctcctaatattccgcctgtcggtcttccggtagtgagtcataatggtgccactaaaagtattattgactatacgttggaaaaagtcaatgaagccaaagcttgcctccagagcttgactactgactcaaggagacagatcagtaatataaagaaagagaagctacgtactttaatagatttggtcactgatgacaaaatgattgagaaccacaacatatccactccattttcatgccagttctgtaaagaaagttttcctggccccatccctttgcatcagcatgaacgttacctttgtaagatgaatgaagagatcaaggcggtcctgcagcctcatgaaaacatagtccccaacaaagccggagtttttgttgataataaagccctcctcttgtcatctgtactttctgagaaaggaatgacaagccccatcaacccatacaaggaccacatgtctgtactcaaagcatactatgctatgaacatggagcccaactccgatgaactgctgaaaatttccattgctgtgggccttcctcaggaatttgtgaaggaatggtttgaacaacgaaaagtctaccagtactcaaattccaggtccccatccctggaaagaagctccaagccgttagctcccaacagtaaccctcccacaaaagactctttattacccaggtctcctgtaaaacctatggactccataacatcaccatctatagcagaactccacaacagtgttacgaattgtgatcctcctctcaggctaacaaaaccttcccattttaccaatattaaaccagttgaaaaattggaccactccaggagtaatactccttctcccttaaatctttcctccacatcttctaaaaactcccacagtagttcatacactccaaacagcttctcttctgaggagctccaggctgagcctttagacttgtcattaccaaaacaaatgaaagaacccaaaagtattatagccacaaagaacaaaacaaaagctagtagcatcagtttagatcataacagtgtttcttcctcatctgaaaactcagatgagcctctgaacttgacttttatcaagaaggaattttcaaattcaaataatctggacaacaaaagcactaacccagtgttcagcatgaacccatttagtgccaaacctttatacacagctcttccacctcaaagcgcatttccccctgctactttcatgccaccagtccagaccagtattcctgggctacgaccatacccaggactggatcagatgagcttcctaccacatatggcctacacctacccaactggagcagctacttttgctgatatgcagcaaaggagaaagtaccagcggaaacaaggatttcagggagaattgcttgatggagcacaagactacatgtcaggcctagatgatatgacagactccgactcctgtctgtctcgcaaaaagatcaagaagacagagagtggcatgtatgcatgtgacttatgtgacaagacattccagaaaagcagttcccttctgcgacataaatacgaacacacaggaaaaagaccacatcagtgtcagatttgtaagaaagcgtttaaacacaagcaccaccttatcgagcactcaaggcttcactcgggcgagaagccctatcagtgtgataaatgtggcaagcgcttctcacactcgggctcgtactcgcagcacatgaatcacagagcattacccctcaggggtactctgactcggaggagagggagagtatgccgagggatggcgagagcgagaaggagcacgagaaagaaggcgaggatggctacgggaagctgggcagacaggatggcgacgaggagttcgaggaggaagaggaagaaagtgaaaataaaagtatggatacggatcccgaaacgatacgagatgaagaagagactggagatcactccatggacgatagttcggaggatgggaaaatggaaaccaaatcagaccacgaggaagacaatatggaagatggcatgtaataaactactgcattttaagcttcctatttttttttccagtagtattgttacctgcttgaaaacactgctgtgttaagctgttcatgcacgtgcctgacgcttccaggaagctgtagagagggacagaaggggcggttcagccaagacagatgtagacggagttggagctgggtattgttaaaaactgcattatgcaaaaattttgtacagtgttaaggcctaaaaactgtgtggttcagagactaattcctgtgtttaatagcatttatactttaagcacaactagaaaattgtaagaattgcactctacttatgtatcactacaaactttaaaaaactatgtctaatttatattaatacattttaaaaaggtgcccgcactaccatacatcagtatttttattattattattgttattcctttttaatttaatgtgctcgcactacaatgcatcagtattatgattcctctgtactttcctttcgctattcatcaatttcccattttttttttcagcttaagtaaccacacaattttaggcctcaatttttttttttttctgtgaaggaacttgaagtgatgcatgtgtgaatttaagataccgaagtcttaaagtgacctggacgtgaaggaaaaagtaagatgagaaataaagaaagcctttgtaaggtggttttaaaagccttatatgcaaaccttttaatctgtgtttctgcaagtgccatccttgtacagtgttaagagggtaacatgggttacctttgcaccagcttcagtgttaagctcaccctgttctttgaagcacccatgtcagtattagaagaataggcagcagttccttagtttacatatgtttgtgcaattattttctgtacttttttgttcattaattttgtcagtattacaccaaactgtttttgcaacaaaaaaattttttttgcattcatttaattttaggtcaaataacattttatttatgtggctcattttatatttcctaattttatttatttcatactgtagtgtacagtattatagttcttcaatatatagatatattttagtaaaaaaggaacatgacgttgatcatttgggcaaattttacgtaa

SEQ ID NO: 23311 - DNA, 4061 bp, Homo sapiens
  misc_feature 1..4061: note = ENST00000539609
  source 1..4061: mol_type = unassigned DNA; mol_type = unassigned DNA
agttctaacctgctctgcaggaataacggtcctgcctcccgacactcttggcgaggtttttgtacagtttgctccgggagctgtttcttcgcttccacctttttctcccccacacttcgcggcttcttcatgctttttcttctcaccatttctggccaaaactacaaacaagacttcgcagatcgagcctgcgtgctgccgaagcagggcgccgagtccatgcgaactgccatctgatccgctcttatcaatgaagcagccgatcatggcggatggcccccggtgcaagaggcgcaaacaagccaatcccaggaggaaaaacgtggtgaactatgacaatgtagtggacacaggttctgaaacagatgaggaagacaagcttcatattgctgaggatgacggtattgccaaccctctggaccaggagacgagtccagctagtgtgcccaaccatgagtcctccccacacgtgagccaagctctgttgccaagagaggaagaggaagatgaaataagggagggtggagtggaacacccctggcacaacaacgagattctacaagcctctgtagatggtccagtgaagaatgcaaattgcacatcagattttgaggaatactttgccaaaagaaaactggaggaacgcgatggtcatgcagtcagcatcgaggagtaccttcagcgcagtgacacagccattatttacccagaagcccctgaggagctgtctcgccttggcacgccagaggccaatgggcaagaagaaaatgacctgccacctggaactccagatgcttttgcccaactgctgacctgcccctactgcgaccggggctacaagcgcttgacatcactgaaggagcacatcaagtaccgccacgagaagaatgaagagaacttttcctgccctctctgtagctacacgtttgcctaccgcacccagctcgagcggcatatggtgacacacaagccagggacagatcagcaccaaatgctaacccaaggagcaggtaatcgcaagttcaaatgcacagagtgtggcaaggccttcaaatataaacaccatctgaaagaacacctgcgaattcacagtggtgaaaaaccttacgagtgcccaaactgcaagaaacgtttctcccattctggttcctacagttcgcacatcagcagcaagaaatgtattggtttaatctctgtaaatggccgaatgagaaacaatatcaagacgggttcttcccctaattctgtttcttcttctcctactaattcagccattacccagttaagaaacaagttggagaatggaaaaccacttagtatgtctgaacagacaggcttacttaaaattaaaacagaaccactagacttcaatgactataaagttcttatggctacacacgggtttagtggcactagtccctttatgaatggtgggcttggagccaccagccctttaggagttcatccatctgctcagagtccaatgcagcacttaggtgtagggatggaagcccctttacttgggtttcccaccatgaatagtaatttaagtgaggtacaaaaggttctacagattgtggacaatactgtttccaggcaaaaaatggactgcaaggctgaagaaatttcaaagttgaaaggttatcacatgaaggatccatgctctcaacctgaggaacaaggagttacttctcctaatattccgcctgtcggtcttccggtagtgagtcataatggtgccactaaaagtattattgactatacgttggaaaaagtcaatgaagccaaagcttgcctccagagcttgactactgactcaaggagacagatcagtaatataaagaaagagaagctacgtactttaatagatttggtcactgatgacaaaatgattgagaaccacaacatatccactccattttcatgccagttctgtaaagaaagttttcctggccccatccctttgcatcagcatgaacgttacctttgtaagatgaatgaagagatcaaggcggtcctgcagcctcatgaaaacatagtccccaacaaagccggagtttttgttgataataaagccctcctcttgtcatctgtactttctgagaaaggaatgacaagccccatcaacccatacaaggaccacatgtctgtactcaaagcatactatgctatgaacatggagcccaactccgatgaactgctgaaaatttccattgctgtgggccttcctcaggaatttgtgaaggaatggtttgaacaacgaaaagtctaccagtactcaaattccaggtccccatccctggaaagaagctccaagccgttagctcccaacagtaaccctcccacaaaagactctttattacccaggtctcctgtaaaacctatggactccataacatcaccatctatagcagaactccacaacagtgttacgaattgtgatcctcctctcaggctaacaaaaccttcccattttaccaatattaaaccagttgaaaaattggaccactccaggagtaatactccttctcccttaaatctttcctccacatcttctaaaaactcccacagtagttcatacactccaaacagcttctcttctgaggagctccaggctgagcctttagacttgtcattaccaaaacaaatgaaagaacccaaaagtattatagccacaaagaacaaaacaaaagctagtagcatcagtttagatcataacagtgtttcttcctcatctgaaaactcagatgagcctctgaacttgacttttatcaagaaggaattttcaaattcaaataatctggacaacaaaagcactaacccagtgttcagcatgaacccatttagtgccaaacctttatacacagctcttccacctcaaagcgcatttccccctgctactttcatgccaccagtccagaccagtattcctgggctacgaccatacccaggactggatcagatgagcttcctaccacatatggcctacacctacccaactggagcagctacttttgctgatatgcagcaaaggagaaagtaccagcggaaacaaggatttcagggagaattgcttgatggagcacaagactacatgtcaggcctagatgatatgacagactccgactcctgtctgtctcgcaaaaagatcaagaagacagagagtggcatgtatgcatgtgacttatgtgacaagacattccagaaaagcagttcccttctgcgacataaatacgaacacacaggaaaaagaccacatcagtgtcagatttgtaagaaagcgtttaaacacaagcaccaccttatcgagcactcaaggcttcactcgggcgagaagccctatcagtgtgataaatgtggcaagcgcttctcacactcgggctcgtactcgcagcacatgaatcacaggtattcctactgcaagcgggaggcggaggagcgggaagcggcggagcgcgaggcgcgcgagaaagggcacttggaacccaccgagctgctgatgaaccgggcttacttgcagagcattacccctcaggggtactctgactcggaggagagggagagtatgccgagggatggcgagagcgagaaggagcacgagaaagaaggcgaggatggctacgggaagctgggcagacaggatggcgacgaggagttcgaggaggaagaggaagaaagtgaaaataaaagtatggatacggatcccgaaacgatacgagatgaagaagagactggagatcactccatggacgatagttcggaggatgggaaaatggaaaccaaatcagaccacgaggaagacaatatggaagatggcatgtaataaactactgcattttaagcttcctatttttttttccagtagtattgttacctgcttgaaaacactgctgtgttaagctgttcatgcacgtgcctgacgcttccaggaagctgtagagagggacagaaggggcggttcagccaagacagatgtagacggagttggagctgggtattgttaaaaactgcattatgcaaaaattttgtacagtgttaaggcctaaaaactgtgtggttca

SEQ ID NO: 23312 - DNA, 4012 bp, Homo sapiens
  misc_feature 1..4012: note = ENST00000558170
  source 1..4012: mol_type = unassigned DNA; mol_type = unassigned DNA
cgaagtttcgctttggcgttggggggcgcggatgggtgctcgccggggccctggcccggctcccctgggcggcccgcgcgcgtttcaatgggcgcgggcgatgcccacattgtcgctgtgtttggttgctagatcgagcctgcgtgctgccgaagcagggcgccgagtccatgcgaactgccatctgatccgctcttatcaatgaagcagccgatcatggcggatggcccccggtgcaagaggcgcaaacaagccaatcccaggaggaaaaacgtggtgaactatgacaatgtagtggacacaggttctgaaacagatgaggaagacaagcttcatattgctgaggatgacggtattgccaaccctctggaccaggagacgagtccagctagtgtgcccaaccatgagtcctccccacacgtgagccaagctctgttgccaagagaggaagaggaagatgaaataagggagggtggagtggaacacccctggcacaacaacgagattctacaagcctctgtagatggtccagaagaaatgaaggaagactatgacactatggggccagaagccacgatccagaccgcaattaacaatggtacagtgaagaatgcaaattgcacatcagattttgaggaatactttgccaaaagaaaactggaggaacgcgatggtcatgcagtcagcatcgaggagtaccttcagcgcagtgacacagccattatttacccagaagcccctgaggagctgtctcgccttggcacgccagaggccaatgggcaagaagaaaatgacctgccacctggaactccagatgcttttgcccaactgctgacctgcccctactgcgaccggggctacaagcgcttgacatcactgaaggagcacatcaagtaccgccacgagaagaatgaagagaacttttcctgccctctctgtagctacacgtttgcctaccgcacccagctcgagcggcatatggtgacacacaagccagggacagatcagcaccaaatgctaacccaaggagcaggtaatcgcaagttcaaatgcacagagtgtggcaaggccttcaaatataaacaccatctgaaagaacacctgcgaattcacagtggtgaaaaaccttacgagtgcccaaactgcaagaaacgtttctcccattctggttcctacagttcgcacatcagcagcaagaaatgtattggtttaatctctgtaaatggccgaatgagaaacaatatcaagacgggttcttcccctaattctgtttcttcttctcctactaattcagccattacccagttaagaaacaagttggagaatggaaaaccacttagtatgtctgaacagacaggcttacttaaaattaaaacagaaccactagacttcaatgactataaagttcttatggctacacacgggtttagtggcactagtccctttatgaatggtgggcttggagccaccagccctttaggagttcatccatctgctcagagtccaatgcagcacttaggtgtagggatggaagcccctttacttgggtttcccaccatgaatagtaatttaagtgaggtacaaaaggttctacagattgtggacaatactgtttccaggcaaaaaatggactgcaaggctgaagaaatttcaaagttgaaaggttatcacatgaaggatccatgctctcaacctgaggaacaaggagttacttctcctaatattccgcctgtcggtcttccggtagtgagtcataatggtgccactaaaagtattattgactatacgttggaaaaagtcaatgaagccaaagcttgcctccagagcttgactactgactcaaggagacagatcagtaatataaagaaagagaagctacgtactttaatagatttggtcactgatgacaaaatgattgagaaccacaacatatccactccattttcatgccagttctgtaaagaaagttttcctggccccatccctttgcatcagcatgaacgttacctttgtaagatgaatgaagagatcaaggcggtcctgcagcctcatgaaaacatagtccccaacaaagccggagtttttgttgataataaagccctcctcttgtcatctgtactttctgagaaaggaatgacaagccccatcaacccatacaaggaccacatgtctgtactcaaagcatactatgctatgaacatggagcccaactccgatgaactgctgaaaatttccattgctgtgggccttcctcaggaatttgtgaaggaatggtttgaacaacgaaaagtctaccagtactcaaattccaggtccccatccctggaaagaagctccaagccgttagctcccaacagtaaccctcccacaaaagactctttattacccaggtctcctgtaaaacctatggactccataacatcaccatctatagcagaactccacaacagtgttacgaattgtgatcctcctctcaggctaacaaaaccttcccattttaccaatattaaaccagttgaaaaattggaccactccaggagtaatactccttctcccttaaatctttcctccacatcttctaaaaactcccacagtagttcatacactccaaacagcttctcttctgaggagctccaggctgagcctttagacttgtcattaccaaaacaaatgaaagaacccaaaagtattatagccacaaagaacaaaacaaaagctagtagcatcagtttagatcataacagtgtttcttcctcatctgaaaactcagatgagcctctgaacttgacttttatcaagaaggaattttcaaattcaaataatctggacaacaaaagcactaacccagtgttcagcatgaacccatttagtgccaaacctttatacacagctcttccacctcaaagcgcatttccccctgctactttcatgccaccagtccagaccagtattcctgggctacgaccatacccaggactggatcagatgagcttcctaccacatatggcctacacctacccaactggagcagctacttttgctgatatgcagcaaaggagaaagtaccagcggaaacaaggatttcagggagaattgcttgatggagcacaagactacatgtcaggcctagatgatatgacagactccgactcctgtctgtctcgcaaaaagatcaagaagacagagagtggcatgtatgcatgtgacttatgtgacaagacattccagaaaagcagttcccttctgcgacataaatacgaacacacaggaaaaagaccacatcagtgtcagatttgtaagaaagcgtttaaacacaagcaccaccttatcgagcactcaaggcttcactcgggcgagaagccctatcagtgtgataaatgtggcaagcgcttctcacactcgggctcgtactcgcagcacatgaatcacaggtattcctactgcaagcgggaggcggaggagcgggaagcggcggagcgcgaggcgcgcgagaaagggcacttggaacccaccgagctgctgatgaaccgggcttacttgcagagcattacccctcaggggtactctgactcggaggagagggagagtatgccgagggatggcgagagcgagaaggagcacgagaaagaaggcgaggatggctacgggaagctgggcagacaggatggcgacgaggagttcgaggaggaagaggaagaaagtgaaaataaaagtatggatacggatcccgaaacgatacgagatgaagaagagactggagatcactccatggacgatagttcggaggatgggaaaatggaaaccaaatcagaccacgaggaagacaatatggaagatggcatgtaataaactactgcattttaagcttcctatttttttttccagtagtattgttacctgcttgaaaacactgctgtgttaagctgttcatgcacgtgcctgacgcttccaggaagctgtagagagggacagaaggggcggttcagccaagacagatgtagacggagttgga

SEQ ID NO: 23313 - DNA, 3913 bp, Homo sapiens
  misc_feature 1..3913: note = ENST00000303660
  source 1..3913: mol_type = unassigned DNA; mol_type = unassigned DNA
acttcgcggcttcttcatgctttttcttctcaccatttctggccaaaactacaaacaagacttcgcagatcgagcctgcgtgctgccgaagcagggcgccgagtccatgcgaactgccatctgatccgctcttatcaatgaagcagccgatcatggcggatggcccccggtgcaagaggcgcaaacaagccaatcccaggaggaaaaacgtggtgaactatgacaatgtagtggacacaggttctgaaacagatgaggaagacaagcttcatattgctgaggatgacggtattgccaaccctctggaccaggagacgagtccagctagtgtgcccaaccatgagtcctccccacacgtgagccaagctctgttgccaagagaggaagaggaagatgaaataagggagggtggagtggaacacccctggcacaacaacgagattctacaagcctctgtagatggtccagaaatgaaggaagactatgacactatggggccagaagccacgatccagaccgcaattaacaatggtacagtgaagaatgcaaattgcacatcagattttgaggaatactttgccaaaagaaaactggaggaacgcgatggtcatgcagtcagcatcgaggagtaccttcagcgcagtgacacagccattatttacccagaagcccctgaggagctgtctcgccttggcacgccagaggccaatgggcaagaagaaaatgacctgccacctggaactccagatgcttttgcccaactgctgacctgcccctactgcgaccggggctacaagcgcttgacatcactgaaggagcacatcaagtaccgccacgagaagaatgaagagaacttttcctgccctctctgtagctacacgtttgcctaccgcacccagctcgagcggcatatggtgacacacaagccagggacagatcagcaccaaatgctaacccaaggagcaggtaatcgcaagttcaaatgcacagagtgtggcaaggccttcaaatataaacaccatctgaaagaacacctgcgaattcacagtggtgaaaaaccttacgagtgcccaaactgcaagaaacgtttctcccattctggttcctacagttcgcacatcagcagcaagaaatgtattggtttaatctctgtaaatggccgaatgagaaacaatatcaagacgggttcttcccctaattctgtttcttcttctcctactaattcagccattacccagttaagaaacaagttggagaatggaaaaccacttagtatgtctgaacagacaggcttacttaaaattaaaacagaaccactagacttcaatgactataaagttcttatggctacacacgggtttagtggcactagtccctttatgaatggtgggcttggagccaccagccctttaggagttcatccatctgctcagagtccaatgcagcacttaggtgtagggatggaagcccctttacttgggtttcccaccatgaatagtaatttaagtgaggtacaaaaggttctacagattgtggacaatactgtttccaggcaaaaaatggactgcaaggctgaagaaatttcaaagttgaaaggttatcacatgaaggatccatgctctcaacctgaggaacaaggagttacttctcctaatattccgcctgtcggtcttccggtagtgagtcataatggtgccactaaaagtattattgactatacgttggaaaaagtcaatgaagccaaagcttgcctccagagcttgactactgactcaaggagacagatcagtaatataaagaaagagaagctacgtactttaatagatttggtcactgatgacaaaatgattgagaaccacaacatatccactccattttcatgccagttctgtaaagaaagttttcctggccccatccctttgcatcagcatgaacgttacctttgtaagatgaatgaagagatcaaggcggtcctgcagcctcatgaaaacatagtccccaacaaagccggagtttttgttgataataaagccctcctcttgtcatctgtactttctgagaaaggaatgacaagccccatcaacccatacaaggaccacatgtctgtactcaaagcatactatgctatgaacatggagcccaactccgatgaactgctgaaaatttccattgctgtgggccttcctcaggaatttgtgaaggaatggtttgaacaacgaaaagtctaccagtactcaaattccaggtccccatccctggaaagaagctccaagccgttagctcccaacagtaaccctcccacaaaagactctttattacccaggtctcctgtaaaacctatggactccataacatcaccatctatagcagaactccacaacagtgttacgaattgtgatcctcctctcaggctaacaaaaccttcccattttaccaatattaaaccagttgaaaaattggaccactccaggagtaatactccttctcccttaaatctttcctccacatcttctaaaaactcccacagtagttcatacactccaaacagcttctcttctgaggagctccaggctgagcctttagacttgtcattaccaaaacaaatgaaagaacccaaaagtattatagccacaaagaacaaaacaaaagctagtagcatcagtttagatcataacagtgtttcttcctcatctgaaaactcagatgagcctctgaacttgacttttatcaagaaggaattttcaaattcaaataatctggacaacaaaagcactaacccagtgttcagcatgaacccatttagtgccaaacctttatacacagctcttccacctcaaagcgcatttccccctgctactttcatgccaccagtccagaccagtattcctgggctacgaccatacccaggactggatcagatgagcttcctaccacatatggcctacacctacccaactggagcagctacttttgctgatatgcagcaaaggagaaagtaccagcggaaacaaggatttcagggagaattgcttgatggagcacaagactacatgtcaggcctagatgatatgacagactccgactcctgtctgtctcgcaaaaagatcaagaagacagagagtggcatgtatgcatgtgacttatgtgacaagacattccagaaaagcagttcccttctgcgacataaatacgaacacacaggaaaaagaccacatcagtgtcagatttgtaagaaagcgtttaaacacaagcaccaccttatcgagcactcaaggcttcactcgggcgagaagccctatcagtgtgataaatgtggcaagcgcttctcacactcgggctcgtactcgcagcacatgaatcacaggtattcctactgcaagcgggaggcggaggagcgggaagcggcggagcgcgaggcgcgcgagaaagggcacttggaacccaccgagctgctgatgaaccgggcttacttgcagagcattacccctcaggggtactctgactcggaggagagggagagtatgccgagggatggcgagagcgagaaggagcacgagaaagaaggcgaggatggctacgggaagctgggcagacaggatggcgacgaggagttcgaggaggaagaggaagaaagtgaaaataaaagtatggatacggatcccgaaacgatacgagatgaagaagagactggagatcactccatggacgatagttcggaggatgggaaaatggaaaccaaatcagaccacgaggaagacaatatggaagatggcatgtaataaactactgcattttaagcttcctatttttttttccagtagtattgttacctgcttgaaaacactgctgtgttaagctgttcatgcacgtgcctgacgcttccaggaagctgtagagagggacagaaggggcg

SEQ ID NO: 23314 - DNA, 100 bp, Homo sapiens
  misc_feature 1..100: note = ENST00000637873
  source 1..100: mol_type = unassigned DNA; mol_type = unassigned DNA
gacattccagaaaagcagttcccttctgcgacataaatacgaacacacagactcctatgactgataagacagtcttgacatcctctttcctctgtttctt

SEQ ID NO: 23315 - DNA, 2236 bp, Homo sapiens
  misc_feature 1..2236: note = ENST00000427902
  source 1..2236: mol_type = unassigned DNA
ttactgtaccgccgtgtgcattccctcatacggtcaggagttatgactcattttgaagatatcgagcctgcgtgctgccgaagcagggcgccgagtccatgcgaactgccatctgatccgctcttatcaatgaagcagccgatcatggcggatggcccccggtgcaagaggcgcaaacaagccaatcccaggaggaaaaacgtggtgaactatgacaatgtagtggacacaggttctgaaacagatgaggaagacaagcttcatattgctgaggatgacggtattgccaaccctctggaccaggagacgagtccagctagtgtgcccaaccatgagtcctccccacacgtgagccaagctctgttgccaagagaggaagaggaagatgaaataagggagggtggagtggaacacccctggcacaacaacgagattctacaagcctctgtagatggtccagaagaaatgaaggaagactatgacactatggggccagaagccacgatccagaccgcaattaacaatggtacagtgaagaatgcaaattgcacatcagattttgaggaatactttgccaaaagaaaactggaggaacgcgatggtcatgcagtcagcatcgaggagtaccttcagcgcagtgacacagccattatttacccagaagcccctgaggagctgtctcgccttggcacgccagaggccaatgggcaagaagaaaatgacctgccacctggaactccagatgcttttgcccaactgctgacctgcccctactgcgaccggggctacaagcgcttgacatcactgaaggagcacatcaagtaccgccacgagaagaatgaagagaacttttcctgccctctctgtagctacacgtttgcctaccgcacccagctcgagcggcatatggtgacacacaagccagggacagatcagcaccaaatgctaacccaaggagcaggtaatcgcaagttcaaatgcacagagtgtggcaaggccttcaaatataaacaccatctgaaagaacacctgcgaattcacagtggtgaaaaaccttacgagtgcccaaactgcaagaaacgtttctcccattctggttcctacagttcgcacatcagcagcaagaaatgtattggtttaatctctgtaaatggccgaatgagaaacaatatcaagacgggttcttcccctaattctgtttcttcttctcctactaattcagccattacccagttaagaaacaagttggagaatggaaaaccacttagtatgtctgaacagacaggcttacttaaaattaaaacagaaccactagacttcaatgactataaagttcttatggctacacacgggtttagtggcactagtccctttatgaatggtgggcttggagccaccagccctttaggagttcatccatctgctcagagtccaatgcagcacttaggtgtagggatggaagcccctttacttgggtttcccaccatgaatagtaatttaagtgaggtacaaaaggttctacagattgtggacaatactgtttccaggcaaaaaatggactgcaaggctgaagaaatttcaaagttgaaaggttatcacatgaaggatccatgctctcaacctgaggaacaaggagttacttctcctaatattccgcctgtcggtcttccggtagtgagtcataatggtgccactaaaagtattattgactatacgttggaaaaagtcaatgaagccaaagcttgcctccagagcttgactactgactcaaggagacagatcagtaatataaagaaagagaagctacgtactttaatagatttggtcactgatgacaaaatgattgagaaccacaacatatccactccattttcatgccagttctgtaaagaaagttttcctggccccatccctttgcatcagcatgaacgttacctttgtaagatgaatgaagagatcaaggcggtcctgcagcctcatgaaaacatagtccccaacaaagccggagtttttgttgataataaagccctcctcttgtcatctgtactttctgagaaaggaatgacaagccccatcaacccatacaaggaccacatgtctgtactcaaagcatactatgctatgaacatggagcccaactccgatgaactgctgaaaatttccattgctgtgggccttcctcaggaatttgtgaaggaatggtttgaacaacgaaaagtctaccagtactcaaatt

SEQ ID NO: 23316 - DNA, 2677 bp, Homo sapiens
  misc_feature 1..2677: note = ENST00000637267
  source 1..2677: mol_type = unassigned DNA
ccccatgccgtttaatatcatgctctcccttccctgctaagtttctctatggcctttctcgtttctcctcctgcctccctacacactctcccttactttgtagtgaggtctccccgaggtgtagagagattcagagatcggccaaccgagtgttctattttaatttacttagagaccctttattaaaatgccaaactactttttaatattgggatccagtccagaaattcatcatgcacacaccctaatacacatgccctaagatgcagctcccatgcagcatttttttttctggctctggtacctaaaaagaaaaaaataacaataagagaaagggcagagaactttgttccagaagctgtactgagatacctacacaatttgatgtgcatctcaaatctggtcattagagatatctgtataagaagagactatctggattgaggacccgggatctttccctttaactttcgccccttggagttctccagttctgtgaatgaaaagaaaaagaaaaaaatgtcattagaagaggcgtaacacgtcagtccgtccccaggtttgtgtttcctggagtggccgaaagagatcagttctaacctgctctgcaggaataacggtcctgcctcccgacactcttggcgaggtttttgtacagtttgctccgggagctgtttcttcgcttccacctttttctcccccacacttcgcggcttcttcatgctttttcttctcaccatttctggccaaaactacaaacaagacttcgcagatcgagcctgcgtgctgccgaagcagggcgccgagtccatgcgaactgccatctgatccgctcttatcaatgaagcagccgatcatggcggatggcccccggtgcaagaggcgcaaacaagccaatcccaggaggaaaaacgtggtgaactatgacaatgtagtggacacaggttctgaaacagatgaggaagacaagcttcatattgctgaggatgacggtattgccaaccctctggaccaggagacgagtccagctagtgtgcccaaccatgagtcctccccacacgtgagccaagctctgttgccaagagaggaagaggaagatgaaataagggagggtggagtggaacacccctggcacaacaacgagattctacaagcctctgtagatggtccagaagaaatgaaggaagactatgacactatggggccagaagccacgatccagaccgcaattaacaatggtacagtgaagaatgcaaattgcacatcagattttgaggaatactttgccaaaagaaaactggaggaacgcgatggtcatgcagtcagcatcgaggagtaccttcagcgcagtgacacagccattatttacccagaagcccctgaggagctgtctcgccttggcacgccagaggccaatgggcaagaagaaaatgacctgccacctggaactccagatgcttttgcccaactgctgacctgcccctactgcgaccggggctacaagcgcttgacatcactgaaggagcacatcaagtaccgccacgagaagaatgaagagaacttttcctgccctctctgtagctacacgtttgcctaccgcacccagctcgagcggcatatggtgacacacaagccagggacagatcagcaccaaatgctaacccaaggagcaggtaatcgcaagttcaaatgcacagagtgtggcaaggccttcaaatataaacaccatctgaaagaacacctgcgaattcacagtggtgaaaaaccttacgagtgcccaaactgcaagaaacgtttctcccattctggttcctacagttcgcacatcagcagcaagaaatgtattggtttaatctctgtaaatggccgaatgagaaacaatatcaagacgggttcttcccctaattctgtttcttcttctcctactaattcagccattacccagttaagaaacaagttggagaatggaaaaccacttagtatgtctgaacagacaggcttacttaaaattaaaacagaaccactagacttcaatgactataaagttcttatggctacacacgggtttagtggcactagtccctttatgaatggtgggcttggagccaccagccctttaggagttcatccatctgctcagagtccaatgcagcacttaggtgtagggatggaagcccctttacttgggtttcccaccatgaatagtaatttaagtgaggtacaaaaggttctacagattgtggacaatactgtttccaggcaaaaaatggactgcaaggctgaagaaatttcaaagttgaaaggttatcacatgaaggatccatgctctcaacctgaggaacaaggagttacttctcctaatattccgcctgtcggtcttccggtagtgagtcataatggtgccactaaaagtattattgactatacgttggaaaaagtcaatgaagccaaagcttgcctccagagcttgactactgactcaaggagacagatcagtaatataaagaaagagaagctacgtactttaatagatttggtcactgatgacaaaatgattgagaaccacaacatatccactccattttcatgccagttctgtaaagaaagttttcctggccccatccctttgcatcagcatgaacgttacctttgtaagatgaatgaagagatcaaggcg

SEQ ID NO: 23317 - DNA, 1514 bp, Homo sapiens
  misc_feature 1..1514: note = ENST00000392861
  source 1..1514: mol_type = unassigned DNA; mol_type = unassigned DNA
atcatttagtagagcttaaaagtattgccgtagtggttggactttctctttcctttcttaagggaaaaaaaaaattctactggaactatttaagggaaccagtgtgggggagcatgtgtgtgagtgagatcgagcctgcgtgctgccgaagcagggcgccgagtccatgcgaactgccatctgatccgctcttatcaatgaagcagccgatcatggcggatggcccccggtgcaagaggcgcaaacaagccaatcccaggaggaaaaacgtggtgaactatgacaatgtagtggacacaggttctgaaacagatgaggaagacaagcttcatattgctgaggatgacggtattgccaaccctctggaccaggagacgagtccagctagtgtgcccaaccatgagtcctccccacacgtgagccaagctctgttgccaagagaggaagaggaagatgaaataagggagggtggagtggaacacccctggcacaacaacgagattctacaagcctctgtagatggtccagaagaaatgaaggaagactatgacactatggggccagaagccacgatccagaccgcaattaacaatggtacagtgaagaatgcaaattgcacatcagattttgaggaatactttgccaaaagaaaactggaggaacgcgatggtcatgcagtcagcatcgaggagtaccttcagcgcagtgacacagccattatttacccagaagcccctgaggagctgtctcgccttggcacgccagaggccaatgggcaagaagaaaatgacctgccacctggaactccagatgcttttgcccaactgctgacctgcccctactgcgaccggggctacaagcgcttgacatcactgaaggagcacatcaagtaccgccacgagaagaatgaagagaacttttcctgccctctctgtagctacacgtttgcctaccgcacccagctcgagcggcatatggtgacacacaagccagggacagatcagcaccaaatgctaacccaaggagcaggtaatcgcaagttcaaatgcacagagtgtggcaaggccttcaaatataaacaccatctgaaagaacacctgcgaattcacagtggtgaaaaaccttacgagtgcccaaactgcaagaaacgtttctcccattctggttcctacagttcgcacatcagcagcaagaaatgtattggtttaatctctgtaaatggccgaatgagaaacaatatcaagacgggttcttcccctaattctgtttcttcttctcctactaattcagccattacccagttaagaaacaagttggagaatggaaaaccacttagtatgtctgaacagacaggcttacttaaaattaaaacagaaccactagacttcaatgactataaagttcttatggctacacacgggtttagtggcactagtccctttatgaatggtgggcttggagccaccagccctttaggagttcatccatctgctcagagtccaatgcagcactta

SEQ ID NO: 23318 - DNA, 674 bp, Homo sapiens
  misc_feature 1..674: note = ENST00000497268
  source 1..674: mol_type = unassigned DNA; mol_type = unassigned DNA
tatctttaatgtttatggatcttagaatgcagttgttggctttttaaaaaaaatttatgaaaaacattttaaatttctttcattctttgtatatacagactaatattccaggaagaaaaaataaaataaaatgtgcttatttaacttgaaggaaagtgcccgccttcttgcatatattgcaagaataagcattcagtcaataatcggtcatcttcaacacttcttacaaataaactaggttttgtagtctattgcaagtcagcatttctcactggctatgatggagatggacttgggatcctaggaagaaggcccggaaacaacatttcttctccttttatgatttcagtgaagaatgcaaattgcacatcagattttgaggaatactttgccaaaagaaaactggaggaacgcgatggtcatgcagtcagcatcgaggagtaccttcagcgcagtgacacagccattatttacccagaagcccctgaggagctgtctcgccttggcacgccagaggccaatgggcaagaagaaaatgacctgccacctggaactccagatgcttttgcccaactgctgacctgcccctactgcgaccggggctacaagcgcttgacatcactgaaggagcacatcaagtaccgccacgagaagaatgaagagaacttttcctg

SEQ ID NO: 23319 - DNA, 709 bp, Homo sapiens
  misc_feature 1..709: note = ENST00000431672
  source 1..709: mol_type = unassigned DNA; mol_type = unassigned DNA
gggccctggcccggctcccctgggcggcccgcgcgcgtttcaatgggcgcgggcgatgcccacattgtcgctgtgtttggttgctagatcgagcctgcgtgctgccgaagcagggcgccgagtccatgcgaactgccatctgatccgctcttatcaatgaagcagccgatcatggcggatggcccccggtgcaagaggcgcaaacaagccaatcccaggaggaaaaacgtggtgaactatgacaatgtagtggacacaggttctgaaacagatgaggaagacaagcttcatattgctgaggatgacggtattgccaaccctctggaccaggagacgagtccagctagtgtgcccaaccatgagtcctccccacacgtgagccaagctctgttgccaagagaggaagaggaagatgaaataagggagggtggagtggaacacccctggcacaacaacgagattctacaagcctctgtagatggtccagtgaagaatgcaaattgcacatcagattttgaggaatactttgccaaaagaaaactggaggaacgcgatggtcatgcagtcagcatcgaggagtaccttcagcgcagtgacacagccattatttacccagaagcccctgaggagctgtctcgccttggcacgccagaggccaatgggcaagaagaaaatgacctgccacctggaactccagatgcttttgccc

SEQ ID NO: 23320 - DNA, 587 bp, Homo sapiens
  misc_feature 1..587: note = ENST00000409211
  source 1..587: mol_type = unassigned DNA; mol_type = unassigned DNA
atagccccctgtttaaactaatcctcgaggcacagcatcttcccaacctccaccgagttttcaggattctcctcctctcctgcctgcctccgaggtcccccttctccaagttttgacagtttcaactgaaaaaatgcagcgcctctctcgatttttagatcgagcctgcgtgctgccgaagcagggcgccgagtccatgcgaactgccatctgatccgctcttatcaatgaagcagccgatcatggcggatggcccccggtgcaagaggcgcaaacaagccaatcccaggaggaaaaacgtggtgaactatgacaatgtagtggacacaggttctgaaacagatgaggaagacaagcttcatattgctgaggatgacggtattgccaaccctctggaccaggagacgagtccagctagtgtgcccaaccatgagtcctccccacacgtgagccaagctctgttgccaagagaggaagaggaagatgaaataagggagggtggagtggaacacccctggcacaacaacgagattctacaagcctctgtagatggtccagtgaagaatgcaaattgcacatcagatttt

SEQ ID NO: 23321 - DNA, 1071 bp, Homo sapiens
  misc_feature 1..1071: note = ENST00000465308
  source 1..1071: mol_type = unassigned DNA; mol_type = unassigned DNA
agacttcaaggtataatctatcccagatcctttcccagagagaaacttggcgatcacgttttcacatgatgctcacgctcagggcgcttcaattatccctccccacaaagataggtggcgcgtgtttcagggtctctcgtctctctcctacagaaaagaaaaagaaaaaaatgtcattagaagaggcgtaacacgtcagtccgtccccaggtttgtgtttcctggagtggccgaaagagatcagttctaacctgctctgcaggaataacggtcctgcctcccgacactcttggcgaggtttttgtacagtttgctccgggagctgtttcttcgcttccacctttttctcccccacacttcgcggcttcttcatgctttttcttctcaccatttctggccaaaactacaaacaagacttcgcagccccctgtttaaactaatcctcgaggcacagcatcttcccaacctccaccgagttttcaggattctcctcctctcctgcctgcctccgaggtcccccttctccaagttttgacagtttcaactgaaaaaatgcagcgcctctctcgatttttagatcgagcctgcgtgctgccgaagcagggcgccgagtccatgcgaactgccatctgatccgctcttatcaatgaagcagccgatcatggcggatggcccccggtgcaagaggcgcaaacaagccaatcccaggaggaaaaacgtggtgaactatgacaatgtagtggacacaggttctgaaacagatgaggaagacaagcttcatattgctgaggatgacggtattgccaaccctctggaccaggagacgagtccagctagtgtgcccaaccatgagtcctccccacacgtgagccaagctctgttgccaagagaggaagaggaagatgaaataagggagggtggagtggaacacccctggcacaacaacgagattctacaagcctctgtagatggtccagaagaaatgaaggaagactatgacactatggggccagaagccacgatccagaccgcaattaacaatggtacagtgaagaatgcaaattgcacatc

SEQ ID NO: 23322 - DNA, 583 bp, Homo sapiens
  misc_feature 1..583: note = ENST00000434448
  source 1..583: mol_type = unassigned DNA; mol_type = unassigned DNA
aacctccaccgagttttcaggattctcctcctctcctgcctgcctccgaggtcccccttctccaagttttgacagtttcaactgaaaaaatgcagcgcctctctcgatttttagatcgagcctgcgtgctgccgaagcagggcgccgagtccatgcgaactgccatctgatccgctcttatcaatgaagcagccgatcatggcggatggcccccggtgcaagaggcgcaaacaagccaatcccaggaggaaaaacgggtcatcaagattgtcagaaaaggcctggactacatgcctgtcccagcactagattgtggtgaactatgacaatgtagtggacacaggttctgaaacagatgaggaagacaagcttcatattgctgaggatgacggtattgccaaccctctggaccaggagacgagtccagctagtgtgcccaaccatgagtcctccccacacgtgagccaagctctgttgccaagagaggaagaggaagatgaaataagggagggtggagtggaacacccctggcacaacaacgagattctacaagcctctgtagatggtccagaagaaatgaagg

SEQ ID NO: 23323 - DNA, 3837 bp, Homo sapiens
  misc_feature 1..3837: note = ENST00000472146
  source 1..3837: mol_type = unassigned DNA; mol_type = unassigned DNA
agttctaacctgctctgcaggaataacggtcctgcctcccgacactcttggcgaggtttttgtacagtttgctccgggagctgtttcttcgcttccacctttttctcccccacacttcgcggcttcttcatgctttttcttctcaccatttctggccaaaactacaaacaagacttcgcagatcgagcctgcgtgctgccgaagcagggcgccgagtccatgcgaactgccatctgatccgctcttatcaatgaagcagccgatcatggcggatggcccccggtgcaagaggcgcaaacaagccaatcccaggaggaaaaacgtggtgaactatgacaatgtagtggacacaggttctgaaacagatgaggaagacaagcttcatattgctgaggatgacggtattgccaaccctctggaccaggagacgagtccagctagtgtgcccaaccatgagtcctccccacacgtgagccaagctctgttgccaagagaggaagaggaagatgaaataagggagggtggagtggaacacccctggcacaacaacgagattctacaagcctctgtagatggtccaggtaagtgtctaaaatcacttggcctcttcctgtaccatcttcacatcttcaactaatctgttccacctagcagatcgcccacaaccaaataattaaaatatttctttccattgagcccttgcagaatagagataccaaagctggtgacagattatgaagtgatagtaatgttatcacattgcggcagttacatcttaggaagggattatatttcagttttgatgcaagtcaaacatgaaccacactttcaacacataacatgaggtatttgcaccacatttacaatgtgcaaattatgtaacatgatcaagatctatactttcatgataggaaatggaagcaaatgtaaaaactcacaacatatatatgtatataaaaatattttgtgtggaaattatgtagcatttcaaaccaaataactgtcagtttaatgtagcttcagtgtctgtctgacacctcctattggaattcaatcgtttaatgattcccttttgttaagtgtgaatgtgatttcacacttttacctggtcaggtagctttcttattatttatcagctaagtacttgataatgattcctgctgtttggtgggactctcaagggaagtaaaaatggtcccaggccaactataataaaactaaggtaaattatattcaaactaaaacttccgacaacactgtgcaaacgggaaatgtcttggtctaaaattcacttatgacggagaatcgctaaggtatgaaatgtttaacaaaatacaagaaatcttattcctgtgaactttctctgctcatctttacatggtaaagtggcctggaaaatttgtttaaatgacctctctaattcagacctcatgtcaccttcatctctattcccaggacccactgagagttatcattgtttaccccaccttgttttttctttgacaacataagcaacaaaagcatttttataaataggtgaagtggctgggaaggagtctacctatatgctgttgtgatgtcgcagactataaaccatcaaacataggcagaataattgtttggtatactggaaggaggataataaaagcacttccactacgaaagaaaattaaatgtgagatgaaagaaaaagaaaaaagactgatggcaatttgagtacagtgtatttgtttttcgttttcctaacatactgtgccaagttttctactctttccgtttccaattttgctttcggtgaaggtttctcgaatctcagcaatcccacacataaacatttatcgttatatccattaagccttaaggttttagattttcaactatgagggagaactcagccaaagatgcttgaaagataaatacgtttaattaggggcagaggatgatcattaaaggaagtctgactgctgcagaagtcattaacaatcttaaatgaaatttttatttttatgatagccatttacatgtataataagagccaatgattcttgggagcagtgtgacagaaacagagtgtggcgagaactcatgtaagacatactatttaaatgagctggtgttagctattcatatttgttaatgaactagatatgcagggctataagaatgaatgttctgatgctttaaattttaatatctagaaatcaagggtaaggaccaattactagaatttccacccttagaagaataattaataacaatgtaacaaatgtacagccccaaacctcttttaaaaaagtttaatttaaaaaatttaatatcaatagttgaaaaacagccaaacagcaatgtcaagctgtagtagtttgtgattgtggcagctttttgtgttggtcatggatcataattctaaacgttttaatatacagtaatccatatgaatgcattgcagaccctgttatcacctgtagttaatggtgcctgtgatacaagtgaacaggctgttctttgctcttacctttatggtaaataaaccagcattctggagtcacaataattaaataaaatgtaaatccctaatctcatttggctatttggaccaagaaacttacccggctattacctgtctagttctaatgattactaatgatttattgttctttttttttattgttctaaaagtgctctgatgtggtgccttgatgtctaatgaaaagaaattggtcttaaaaagctactcattgtttatcctgactctgagataacacatttttcttctgataaaatatttttcttatttattgttcaaaacacacaatatagacaataactctaattctggtgcagttttatttagtagtgttttatccccggtgcctggctgtctacagtcatacctcagcacatagctttactctgagataagccctctctcctttgctctttctcccatgctttctggagtttgtctgcaggatgcaggttttgaactgaagagcgcagtggagttcttactgtgcctttccggttccagcacaatcaaagttttgtgtttggaattgtccttgacattctttcgtcccacaatggggtggacacagtgtgctggaaaccatgacatcattatcattgacacagacttaaataaatcacctgcatcttggcctctttctgcttattcaaggattcttcatcttaaggaagaaagtgctctttatttttacaaatcttcatcccaggggtgactggaagacgcaaacttttacaagtgttttaaaaataaatatactatgtggttttagacacagtatgctgagtcagaggtgtcttagagaatgtttaaggttagacataaggcagaaagacagccagattgcctttaattcggaggcaatattcctaaactgtgtatcattatgtccttctgaatatggattcacttgaaacttaattaaataggcatatacataacatttcaaatacatacctgaaaaggcttagtagtgtttcattttcacacattgagcttgatattcaaaaaagaaaaagattgatgctcagtgaatcaaagcaaagtactttctaggtaaaagtgacaccatctcatccaatgtctctgaaagatctcagttgcacagtctttggataaaaagggttataactaaataatactacaaaatgcaatttacacaatgtgctgactacacatttgtatacccagcatttattaatttgggaagcaaccaactactgtaacttctctttactttttcataagaaaatgacaatgaggaaggaagtgcagcagaaatcttgaacattaccactattatgcaaaaa

SEQ ID NO: 23324 - DNA, 751 bp, Homo sapiens
  misc_feature 1..751: note = ENST00000461784
  source 1..751: mol_type = unassigned DNA; mol_type = unassigned DNA
ggccgccgaagtttcgctttggcgttggggggcgcggatgggtgctcgccggggccctggcccggctcccctgggcggcccgcgcgcgtttcaatgggcgcgggcgatgcccacattgtcgctgtgtttggttgctagatcgagcctgcgtgctgccgaagcagggcgccgagtccatgcgaactgccatctgatccgctcttatcaatgaagcagccgatcatggcggatggcccccggtgcaagaggcgcaaacaagccaatcccaggaggaaaaacgtggtgaactatgacaatgtagtggacacaggttctgaaacagatgaggaagacaagcttcatattgctgaggatgacggtattgccaaccctctggaccaggagacgagtccagctagtgtgcccaaccatgagtcctccccacacgtgagccaagctctgttgccaagagaggaagaggaagatgaaataagggagggtggagtggaacacccctggcacaacaacgagattctacaagcctctgtagatggtccaggtaagtgtctaaaatcacttggcctcttcctgtaccatcttcacatcttcaactaatctgttccacctagcagatcgcccacaaccaaataattaaaatatttctttccattgagcccttgcagaatagagataccaaagctggtgacagattatgaagtgatagtaatgttatcacattgcggcagttacatcttaggaagggattatattt

SEQ ID NO: 23325 - DNA, 601 bp, Homo sapiens
  misc_feature 1..601: note = ENST00000476394
  source 1..601: mol_type = unassigned DNA; mol_type = unassigned DNA
atttcttccactaaagcgtttgcggagacttcaagatcgagcctgcgtgctgccgaagcagggcgccgagtccatgcgaactgccatctgatccgctcttatcaatgaagcagccgatcatggcggatggcccccggtgcaagaggcgcaaacaagccaatcccaggaggaaaaacgtggtgaactatgacaatgtagtggacacaggttctgaaacagatgaggaagacaagcttcatattgctgaggatgacggtattgccaaccctctggaccaggagacgagtccagctagtgtgcccaaccatgagtcctccccacacgtgagccaagctctgttgccaagagaggaagaggaagatgaaataagggagggtggagtggaacacccctggcacaacaacgagattctacaagcctctgtagatggtccaggtaagtgtctaaaatcacttggcctcttcctgtaccatcttcacatcttcaactaatctgttccacctagcagatcgcccacaaccaaataattaaaatatttctttccattgagcccttgcagaatagagataccaaagctggtgacagattatgaagtgatagt

SEQ ID NO: 23326 - DNA, 543 bp, Homo sapiens
  misc_feature 1..543: note = ENST00000479735
  source 1..543: mol_type = unassigned DNA; mol_type = unassigned DNA
gcttctcggtgcgccaagtaacggtccgcgggcagcggggcccggcccatcgcgcccagaccccggggtgggagggagtcggccggccccgcgcggggtccggtggggtcgatgatggctcggggacggatgactcctctccagcaggctctgcccccaggccggggactgaaggagtcgcagggcgcagcgagacttttcccggcagtttctacatggtctggaggagcccgttatccaggctgagtcaggaaggaggaaggagaaaggagatgggggttcgaggggcacacgcagatcagagtggtgaactatgacaatgtagtggacacaggttctgaaacagatgaggaagacaagcttcatattgctgaggatgacggtattgccaaccctctggaccaggagacgagtccagctagtgtgcccaaccatgagtcctccccacacgtgagccaagctctgttgccaagagaggaagaggaagatgaaataagggagggtggagtggaacacccctggcacaacaacgagattctacaa

SEQ ID NO: 23327 - DNA, 554 bp, Homo sapiens
  misc_feature 1..554: note = ENST00000435831
  source 1..554: mol_type = unassigned DNA; mol_type = unassigned DNA
gtgcttcatccaggggctgtttcgcgttgtttgtttgtttgtttcctctgggaattggggggtggggggatgagaaaagatgagaacgaaaagaaaacctcgcctcaccccaagttcccgagccgggggctgaggacttttcgaaggaaagggtccgcctagccctgagtcaagcggtcttactgtaccgccgtgtgcattccctcatacgatcgagcctgcgtgctgccgaagcagggcgccgagtccatgcgaactgccatctgatccgctcttatcaatgaagcagccgatcatggcggatggcccccggtgcaagaggcgcaaacaagccaatcccaggaggaaaaacgtggtgaactatgacaatgtagtggacacaggttctgaaacagatgaggaagacaagcttcatattgctgaggatgacggtattgccaaccctctggaccaggagacgagtccagctagtgtgcccaaccatgagtcctccccacacgtgagccaagctctgttgccaagagaggaagaggaagatgaaataagggagggtg

SEQ ID NO: 23328 - DNA, 581 bp, Homo sapiens
  misc_feature 1..581: note = ENST00000453352
  source 1..581: mol_type = unassigned DNA; mol_type = unassigned DNA
agttctaacctgctctgcaggaataacggtcctgcctcccgacactcttggcgaggtttttgtacagtttgctccgggagctgtttcttcgcttccacctttttctcccccacacttcgcggcttcttcatgctttttcttctcaccatttctggccaaaactacaaacaagacttcgcagatcgagcctgcgtgctgccgaagcagggcgccgagtccatgcgaactgccatctgatccgctcttatcaatgaagcagccgatcatggcggatggcccccggtgcaagaggcgcaaacaagccaatcccaggaggaaaaacgggtcatcaagattgtcagaaaaggcctggactacatgcctgtcccagcactagattgtggtgaactatgacaatgtagtggacacaggttctgaaacagatgaggaagacaagcttcatattgctgaggatgacggtattgccaaccctctggaccaggagacgagtccagctagtgtgcccaaccatgagtcctccccacacgtgagccaagctctgttgccaagagaggaagaggaagatgaaataagggagggtg

SEQ ID NO: 23329 - DNA, 577 bp, Homo sapiens
  misc_feature 1..577: note = ENST00000444559
  source 1..577: mol_type = unassigned DNA; mol_type = unassigned DNA
ggaggtggaatttcatttcttccactaaagcgtttgcggagacttcaagaaaagaaaaagaaaaaaatgtcattagaagaggcgtaacacgtcagtccgtccccaggtttgtgtttcctggagtggccgaaagagatcagttctaacctgctctgcaggaataacggtcctgcctcccgacactcttggcgaggtttttgtacagtttgctccgggagctgtttcttcgcttccacctttttctcccccacacttcgcggcttcttcatgctttttcttctcaccatttctggccaaaactacaaacaagacttcgcagatcgagcctgcgtgctgccgaagcagggcgccgagtccatgcgaactgccatctgatccgctcttatcaatgaagcagccgatcatggcggatggcccccggtgcaagaggcgcaaacaagccaatcccaggaggaaaaacgtggtgaactatgacaatgtagtggacacaggttctgaaacagatgaggaagacaagcttcatattgctgaggatgacggtattgccaaccctctggaccaggagacgagtccagct

SEQ ID NO: 23330 - DNA, 468 bp, Homo sapiens
  misc_feature 1..468: note = ENST00000630572
  source 1..468: mol_type = unassigned DNA; mol_type = unassigned DNA
gggaaatcttaatttgggggcgagggtggggggaggaagagacagtgcctcgataaactccaaaaggggaggggagggggcgctgggcgagtgggcttcctataattactattatcaatttgcccgagtgtgcttcatccaggggctgtttcgcgttgtttgtttgtttgtttcctctgggaattggggggtggggggatgagaaaagatgagaacgaaaagaaaacctcgcctcaccccaagttcccgagccgggggctgaggacttttcgaaggaaaggatcgagcctgcgtgctgccgaagcagggcgccgagtccatgcgaactgccatctgatccgctcttatcaatgaagcagccgatcatggcggatggcccccggtgcaagaggcgcaaacaagccaatcccaggaggaaaaacgtggtgaactatgacaatgtagtggacacaggttctgaaacagatg

SEQ ID NO: 23331 - DNA, 2967 bp, Homo sapiens
  misc_feature 1..2967: note = ENST00000628473
  source 1..2967: mol_type = unassigned DNA; mol_type = unassigned DNA
atcgagctacaaggttctagactaagtaagtgttttgtatacatattagctccatattacctccatgacctctttccccatgaagccttccctgagcctcagtatccactctttcctgtaccatgaatccatttttcttttactttttcttttctttctttcttttctctctctctcgcttgctctttctttctttctctctctgtctttctttttttgttttttgttttttgttttttgttttttgagacagggtctcactctggcacccaggctggagtgcagtggcacaatcatggttcactgcagccttgacctcacaggctcaaaccatcctcctgcattagcctcccaagtagcttggaccacaggcatgcaccaccatgcccagataatttttttttttattttttgtagagacggggtctcactatgtcacccaaactggtcttgaattcctgggctcaagtgattctcccacctcagcctcccaaagtgctgggattacaagtgtgagccactgcacccagcccatgttttcaataaagatggtgctatttgaaactatggcatgtcacgtgtatattattttatttcaccatgtgtttaaatgagataaccaggtgccaagaaagcttcaatatttgcttaaatagccaatgtgacggagaataggtaacctcttttctttttttttcttatgatttgctttggctattagttttgaaacatacatgttatattcccaattagatctcgttacatccttcacaggctgtccaaaaatttccatacttctaacaagaacttcggttgactgagtttatattatatagtttttctgtcctttgccctatttctttcaaggcctttgagtcagaagcattcagcaccacggcgtacgatagccaccatttgctttgcccttttaactttgggggttacttctgaccatagtccaactgctcagaagggctttttcacaaattgtttaccgtggcagttgctaccctattggggtttgcattcagaacccataagcagagagcaatggtgtcagtataacaaataatgtgtacaattttttaaaatgctgaatttaccaaatccccatattatgttttcacactgctctttcagaaactgtgctaatacaatactcctataaactgatcttggtcctggcaggccctgttggaactaatggggcctgacagttcttcagttaaaaattatacatgagggccactttcccttaaattatctattgtatgccagctgttcacaactgcactgcttcactttctttgcagtgctagaaatgtctaattttctcataatatccatagcaactattctcatggagggcattgaagttagtaagacttcaaacacaccttcacagaaatcatgctagagttgcagtttccattttctttaattttttggttctgaaaaatgtttagatggctcattttgccggtttcatgccatagcacttgagttatatcataatttctcatttgctgcacaactttattctatttttatgctcctaaatgacgcagctctaagtacccgtgagtggcacttccgtgctgtgagtgctatcaaaggcaacctcagatggataaaactcctggttttttgttttcttttgttttttgttttgtttttgttttgtttttgctggggaggggagaagcggagtcatcaccaagggccttcttttgtttttcaggcatgttaaaactgtataaccaacagaaccatttaaaaggaagaaaaacatcacccaagttccgtgtctgaatgaaggctgtcttctcaaatgctcctcattactccagagcagttatatttggattataattaaaacgaggcttcttttttttcttttattcttcttttttcccagaatgcctcaagtgaagtattcctcccaaagttattgcacctctttactaacaagtgctgggattttaataagcctgtcccccctccttaccctgtacagaggaaaggatggcaaagagtggctgtggtacaaaggttacatattcagtgatattttctgcttttattggtaaaaatggggaggtgggtggaggatttcctttaattatgaaataagtgtgatgttagtagttatttctgtaacctggtgaaaatgctgcatatttcaggcctaatttttagcatatgttaccacgtgtgtaataaaacggtgatctgcgctctccgaatcttttggctgttaaggagcactctgattataactagttgctgtagaaacctggtcatccagatgcttatcaagaatgcattattattttttaaaccttggtggagaagccacagactgcagcagttggacaaggtcacatatcgatggaagtgacatgtctttcctctttccattgtgtgatcgtccagggcctgggggcattaatatgcaacggttctgtttttctttcagaaggacttgtaaactctttaaacagaggcacacagttgcaattgttgcggtactgagtgggtgtatagaagctagggctgcagccttgtccagttgcagatagaataaaactgacaatgatgcaatgggcctggcatgtagacaactctgtgggatggatgaatggtgcggctctcgctgtccctccggtggtggtaggccctgtaatagctagcgtaggaagggtggtgaaaattgatatgcactattactacacgtataaaacttaacactggggccattgcacaggtggggggttcctgtttattgatttttatgagtttgttagaacatgcgcttaatgcttttatactccgggagctctgggagggctcaccttaggtaataaacctttccgtactttgcaatcgctcacaatttacatggggactcacattatccagtacaaagcccagcattccccttctacttggttttaggagtgtgat

SEQ ID NO: 23332 - DNA, 845 bp, Homo sapiens
  misc_feature 1..845: note = ENST00000484313
  source 1..845: mol_type = unassigned DNA; mol_type = unassigned DNA
gcgggtgcaacacaccaaacaatcgagcctgcgtgctgccgaagcagggcgccgagtccatgcgaactgccatctgatccgctcttatcaatgaagcagccgatcatggcggatggcccccggtgcaagaggcgcaaacaagccaatcccaggaggaaaaacgcaaagacaaaccacctaaatagagagattaattccacatcagtgcaacattaaaagggagagaggatgccaagaatcccattaatttgggatataagtgtctgaaatttcctcaaaacatttacgccaaggaataccaacaagacaatatcaagcagctctccctaaggatagagaggcatgttaaaactgtataaccaacagaaccatttaaaaggaagaaaaacatcacccaagttccgtgtctgaatgaaggctgtcttctcaaatgctcctcattactccagagcagttatatttggattataattaaaacgaggcttcttttttttcttttattcttcttttttcccagaatgcctcaagtgaagtattcctcccaaagttattgcacctctttactaacaagtgctgggattttaataagcctgtcccccctccttaccctgtacagaggaaaggatggcaaagagtggctgtggtacaaaggttacatattcagtgatattttctgcttttattggtaaaaatggggaggtgggtggaggatttcctttaattatgaaataagtgtgatgttagtagttatttctgtaacctggtgaaaatgctgcatatttcaggcctaatttttagcatatgttaccacgtgtgtaataaaacggtgatctgcgctctccgaa

SEQ ID NO: 23333 - DNA, 101 bp, Homo sapiens
  misc_feature 1..101: note = ENST00000637591
  source 1..101: mol_type = unassigned DNA; mol_type = unassigned DNA
gcgcaaacaagccaatcccaggaggaaaaacgactgactttaaaacaaaggcagaacatttattacaaatatcactgtgtgaaaggaaatctactgaaata

SEQ ID NO: 23334 - DNA, 1435 bp, Homo sapiens
  misc_feature 1..1435: note = ENST00000629955
  source 1..1435: mol_type = unassigned DNA; mol_type = unassigned DNA
gcgagggtggggggaggaagagacagtgcctcgataaactccaaaaggggaggggagggggcgctgggcgagtgggcttcctataattactattatcaatttgcccgagtgtgcttcatccaggggctgtttcgcgttgtttgtttgtttgtttcctctgggaattggggggtggggggatgagaaaagatgagaacgaaaagaaaacctcgcctcaccccaagttcccgagccgggggctgaggacttttcgaaggaaagggtccgcctagccctgagtcaagcggtcttactgtaccgccgtgtgcattccctcatacgatcgagcctgcgtgctgccgaagcagggcgccgagtccatgcgaactgccatctgatccgctcttatcaatgaagcagccgatcatggcggatggcccccggtgcaagaggcgcaaacaagccaatcccaggaggaaaaacgaggttaccttttcccgatggtgcaaaatcgacttgacataactgttcatcagtttcagggttttccctggaggtatttgcatcaaatcagcccagtcaagcttcaagttgaaattggcaggccagaaactcacagggtagagactggaaaagagacagccaaagtacaggcagcaaactgacagcagcagagtgaaagacagaggggtggggggaggttgagagcgagagcttttcaactttagtgtgcgggaaatctcagctcctcctgtactgatctcagcagcaccatatcctgaaggagcttgaaaggttgagattcagaacaccttcagctaattcttaccactagggctcaccagccttgctccgggggtttgctctcacttaatctgattggatgcctaaagaggagtgggcacacttaattaaacggaaggaaagttctgaggcacctccccagcacttattaaagcttgaaagccaaatctcatgatcagtgttataggaggaaattaaggtggtttgttttttttgttgtttttttttttttttctaattgttaacttgtaggaaagtgaacaatccctctctttaccaggtttgttttcttgggggttctcttctgagtagattaaatgttcacagagactagagctcaggggactgtccattcaaaagctaatgcattttggctaacaaaaagccagtacaagtagcaaaaattatatttgaagagatactcctttgaatgacatgggtttgcaagttctctgtcaaataatgccctactatcctggtaatatgagaacacgtattaagttgtttaaaaggtcaaaaaacatggcaaaaccttaagatgtctaagatactcaacttttactctcaacaaggtcactttaagaaaaattctatgattgcaaaacttgtataattgcttttacaaagaaaacaaatatgaaaagtgtttcct

SEQ ID NO: 23335 - DNA, 2949 bp, Homo sapiens
  misc_feature 1..2949: note = ENST00000465070
  source 1..2949: mol_type = unassigned DNA; mol_type = unassigned DNA
ctttcccagagagaaacttggcgatcacgttttcacatgatgctcacgctcagggcgcttcaattatccctccccacaaagataggtggcgcgtgtttcagggtctctcgtctctctcctacagaaaagaaaaagaaaaaaatgtcattagaagaggcgtaacacgtcagtccgtccccaggtttgtgtttcctggagtggccgaaagagatcagttctaacctgctctgcaggaataacggtcctgcctcccgacactcttggcgaggtttttgtacagtttgctccgggagctgtttcttcgcttccacctttttctcccccacacttcgcggcttcttcatgctttttcttctcaccatttctggccaaaactacaaacaagacttcgcagatcgagcctgcgtgctgccgaagcagggcgccgagtccatgcgaactgccatctgatccgctcttatcaatgaagcagccgatcatggcggatggcccccggtgcaagaggcgcaaacaagccaatcccaggaggaaaaacgccttggagtcagaaatgagcactcggagcgggagatgccctgctgctgcttgccaccggtgcggcccgtttgtaacttgcaaagtttgttgcttttgcccctgattcgggcagcgggtcctgggatgctcctgcttccctcctgcctcccacggagcccgggaagagggtctgcctccccatcccgccaccttccagcatcagcctctgaaaaatctcacagagacatgcacgttgtagcaaaaatcaaatccggaaactgcttgtttcagagaaagaaatgaagttgtcttttaaagaaaaactgaattaggaggagagaaaagggaaataggagaagaaaggaaaagttaaatttgatttttctccagagtttccactaaagggttggggacagtgtgaaggagaaggggagctttttacaaatgcctttggtctctgaacttcagtggcaaagaacagggatcaagttgaatgttctcagggctttggatcctagaggagaaacaatcagaagagcagaaatggttatccctgtttaaaataagccctcactctttaccacttccttaaaggagtggaggtgctggtagtgatggttagaggcaatgagggacggagaagttgctcccgtttcagagatgcttaaatgaaaaggaaagaaaatgcagtcaaccccttctccaggaggtgcctcctagctctcctccctgagaggtgaagttgggatggggcaacgagagtcatacacacttagacaaggaagtttccttcggatcactgtcagtccagacttggttatctttgcaaagtgtggaaatctttggcaagtagctttcttcgtaaagttgatgagcttctagggagcctgttttgctgactttcaaagcactggggcaggttgtgtggcaggtaccagttctgagggcgctccaaagatatccatctccatccttttttctctgtggagatcttctgcaagttttgtcacgctgcacacacacaaggctgggggctatgtatctaggctgatctatttgttttattttggtctggaaaaactaagccaattggggtagaaacatgctttccttcgtagcagagccagtaggctgctggtgtccatagagtgacagtccaccaggactaagggtgggctgaggattttaaactttacattgtttctctgttaccagatacaaataaattcacgtcttccaccatttgttttcaaatagggtaaaaccaagattaaagttccctgctcaactgctatgtcataggtttcagtgtttcccttccttcttaatttgcttaaagaaaattccaagaggttattaaagaccttgatgccatattaagaatatttcctgggaaaaatgtatgtctaccctgaaggtaggaaaggagggcgttgctagcctctagcagtgccgcgtttattctaagatgtgggagattcttttccttgcaacagtttttgtcatctgcattcttccaaggcttttaaggtgcattttcttctgtgtgaaaggaaattctttgtccttttcctctcagcaccgtggcttcccaaggtagacactattttgtgcctgtcacagagagagggagtgcaggtttgcaatgctcacagacaattgattgtctgccctaatgtgtttcatttacatgtttataacgtcaatggtgctggggtgtccactgtaccattcattcccgcattcccacaagggggcaattgtctgaatggccaagtcagacacctttttgattgctctttggttgtcttttcagagcaaagagataaaggaggaaaatctgtgatgcagaaacactagttgaaaatatacagaattaaatgtcaccacaaaagcagatgttaacataagcccaaatatgctttttagccaagatgtgaaggttgaaaaaaataattcagagcagagggaaggatgatttaaaccaataaatatagccctattccccctctttacttcttttctgtctttagcaatcagaagatgaaatgtaattttccttttcatttttaagccttgaaacatccaggcacctcctcattatttgtatgtttgctgtgatttgtgaattttgtatatatttacatagctctgtttatgccaacagcatcagcttaccacttggaaaatctattgaatgactatttgggctgtggggagggtaaacttttaaaaagtaagatccaagtatttcttcatcaagcagtttttaaaaggaaaacgataataatcagtaggctccatggaagcctttgccttaatagctatgtgccaaatacttttatcttgtgtgacagtcatgtcagagtgaaatctctcaggaaaagtgtaactagtagttacaaagtaaataaaggatttcattttaaggtg

SEQ ID NO: 23336 - DNA, 2648 bp, Homo sapiens
  misc_feature 1..2648: note = ENST00000470879
  source 1..2648: mol_type = unassigned DNA; mol_type = unassigned DNA
gaaggaaagggtccgcctagccctgagtcaagcggtcttactgtaccgccgtgtgcattccctcatacggtcaggagttatgactcattttgaagatatcgagcctgcgtgctgccgaagcagggcgccgagtccatgcgaactgccatctgatccgctcttatcaatgaagcagccgatcatggcggatggcccccggtgcaagaggcgcaaacaagccaatcccaggaggaaaaacgccttggagtcagaaatgagcactcggagcgggagatgccctgctgctgcttgccaccggtgcggcccgtttgtaacttgcaaagtttgttgcttttgcccctgattcgggcagcgggtcctgggatgctcctgcttccctcctgcctcccacggagcccgggaagagggtctgcctccccatcccgccaccttccagcatcagcctctgaaaaatctcacagagacatgcacgttgtagcaaaaatcaaatccggaaactgcttgtttcagagaaagaaatgaagttgtcttttaaagaaaaactgaattaggaggagagaaaagggaaataggagaagaaaggaaaagttaaatttgatttttctccagagtttccactaaagggttggggacagtgtgaaggagaaggggagctttttacaaatgcctttggtctctgaacttcagtggcaaagaacagggatcaagttgaatgttctcagggctttggatcctagaggagaaacaatcagaagagcagaaatggttatccctgtttaaaataagccctcactctttaccacttccttaaaggagtggaggtgctggtagtgatggttagaggcaatgagggacggagaagttgctcccgtttcagagatgcttaaatgaaaaggaaagaaaatgcagtcaaccccttctccaggaggtgcctcctagctctcctccctgagaggtgaagttgggatggggcaacgagagtcatacacacttagacaaggaagtttccttcggatcactgtcagtccagacttggttatctttgcaaagtgtggaaatctttggcaagtagctttcttcgtaaagttgatgagcttctagggagcctgttttgctgactttcaaagcactggggcaggttgtgtggcaggtaccagttctgagggcgctccaaagatatccatctccatccttttttctctgtggagatcttctgcaagttttgtcacgctgcacacacacaaggctgggggctatgtatctaggctgatctatttgttttattttggtctggaaaaactaagccaattggggtagaaacatgctttccttcgtagcagagccagtaggctgctggtgtccatagagtgacagtccaccaggactaagggtgggctgaggattttaaactttacattgtttctctgttaccagatacaaataaattcacgtcttccaccatttgttttcaaatagggtaaaaccaagattaaagttccctgctcaactgctatgtcataggtttcagtgtttcccttccttcttaatttgcttaaagaaaattccaagaggttattaaagaccttgatgccatattaagaatatttcctgggaaaaatgtatgtctaccctgaaggtaggaaaggagggcgttgctagcctctagcagtgccgcgtttattctaagatgtgggagattcttttccttgcaacagtttttgtcatctgcattcttccaaggcttttaaggtgcattttcttctgtgtgaaaggaaattctttgtccttttcctctcagcaccgtggcttcccaaggtagacactattttgtgcctgtcacagagagagggagtgcaggtttgcaatgctcacagacaattgattgtctgccctaatgtgtttcatttacatgtttataacgtcaatggtgctggggtgtccactgtaccattcattcccgcattcccacaagggggcaattgtctgaatggccaagtcagacacctttttgattgctctttggttgtcttttcagagcaaagagataaaggaggaaaatctgtgatgcagaaacactagttgaaaatatacagaattaaatgtcaccacaaaagcagatgttaacataagcccaaatatgctttttagccaagatgtgaaggttgaaaaaaataattcagagcagagggaaggatgatttaaaccaataaatatagccctattccccctctttacttcttttctgtctttagcaatcagaagatgaaatgtaattttccttttcatttttaagccttgaaacatccaggcacctcctcattatttgtatgtttgctgtgatttgtgaattttgtatatatttacatagctctgtttatgccaacagcatcagcttaccacttggaaaatctattgaatgactatttgggctgtggggagggtaaacttttaaaaagtaagatccaagtatttcttcatcaagcagtttttaaaaggaaaacgataataatcagtaggctccatggaagcctttgccttaatagctatgtgccaaatacttttatcttgtgtgacagtcatgtcagagtgaaatctctcaggaaaagtgtaactagtagttacaaagtaaataaaggatttcattttaa

SEQ ID NO: 23337 - DNA, 2564 bp, Homo sapiens
  misc_feature 1..2564: note = ENST00000629520
  source 1..2564: mol_type = unassigned DNA; mol_type = unassigned DNA
cggagacttcaagatcgagcctgcgtgctgccgaagcagggcgccgagtccatgcgaactgccatctgatccgctcttatcaatgaagcagccgatcatggcggatggcccccggtgcaagaggcgcaaacaagccaatcccaggaggaaaaacgccttggagtcagaaatgagcactcggagcgggagatgccctgctgctgcttgccaccggtgcggcccgtttgtaacttgcaaagtttgttgcttttgcccctgattcgggcagcgggtcctgggatgctcctgcttccctcctgcctcccacggagcccgggaagagggtctgcctccccatcccgccaccttccagcatcagcctctgaaaaatctcacagagacatgcacgttgtagcaaaaatcaaatccggaaactgcttgtttcagagaaagaaatgaagttgtcttttaaagaaaaactgaattaggaggagagaaaagggaaataggagaagaaaggaaaagttaaatttgatttttctccagagtttccactaaagggttggggacagtgtgaaggagaaggggagctttttacaaatgcctttggtctctgaacttcagtggcaaagaacagggatcaagttgaatgttctcagggctttggatcctagaggagaaacaatcagaagagcagaaatggttatccctgtttaaaataagccctcactctttaccacttccttaaaggagtggaggtgctggtagtgatggttagaggcaatgagggacggagaagttgctcccgtttcagagatgcttaaatgaaaaggaaagaaaatgcagtcaaccccttctccaggaggtgcctcctagctctcctccctgagaggtgaagttgggatggggcaacgagagtcatacacacttagacaaggaagtttccttcggatcactgtcagtccagacttggttatctttgcaaagtgtggaaatctttggcaagtagctttcttcgtaaagttgatgagcttctagggagcctgttttgctgactttcaaagcactggggcaggttgtgtggcaggtaccagttctgagggcgctccaaagatatccatctccatccttttttctctgtggagatcttctgcaagttttgtcacgctgcacacacacaaggctgggggctatgtatctaggctgatctatttgttttattttggtctggaaaaactaagccaattggggtagaaacatgctttccttcgtagcagagccagtaggctgctggtgtccatagagtgacagtccaccaggactaagggtgggctgaggattttaaactttacattgtttctctgttaccagatacaaataaattcacgtcttccaccatttgttttcaaatagggtaaaaccaagattaaagttccctgctcaactgctatgtcataggtttcagtgtttcccttccttcttaatttgcttaaagaaaattccaagaggttattaaagaccttgatgccatattaagaatatttcctgggaaaaatgtatgtctaccctgaaggtaggaaaggagggcgttgctagcctctagcagtgccgcgtttattctaagatgtgggagattcttttccttgcaacagtttttgtcatctgcattcttccaaggcttttaaggtgcattttcttctgtgtgaaaggaaattctttgtccttttcctctcagcaccgtggcttcccaaggtagacactattttgtgcctgtcacagagagagggagtgcaggtttgcaatgctcacagacaattgattgtctgccctaatgtgtttcatttacatgtttataacgtcaatggtgctggggtgtccactgtaccattcattcccgcattcccacaagggggcaattgtctgaatggccaagtcagacacctttttgattgctctttggttgtcttttcagagcaaagagataaaggaggaaaatctgtgatgcagaaacactagttgaaaatatacagaattaaatgtcaccacaaaagcagatgttaacataagcccaaatatgctttttagccaagatgtgaaggttgaaaaaaataattcagagcagagggaaggatgatttaaaccaataaatatagccctattccccctctttacttcttttctgtctttagcaatcagaagatgaaatgtaattttccttttcatttttaagccttgaaacatccaggcacctcctcattatttgtatgtttgctgtgatttgtgaattttgtatatatttacatagctctgtttatgccaacagcatcagcttaccacttggaaaatctattgaatgactatttgggctgtggggagggtaaacttttaaaaagtaagatccaagtatttcttcatcaagcagtttttaaaaggaaaacgataataatcagtaggctccatggaagcctttgccttaatagctatgtgccaaatacttttatcttgtgtgacagtcatgtcagagtgaaatctctcaggaaaagtgtaactagtagttacaaagtaaataaaggatttcattttaa

SEQ ID NO: 23338 - DNA, 2947 bp, Homo sapiens
  misc_feature 1..2947: note = ENST00000636445
  source 1..2947: mol_type = unassigned DNA; mol_type = unassigned DNA
ttccactaaagcgtttgcggagacttcaagaaaagaaaaagaaaaaaatgtcattagaagaggcgtaacacgtcagtccgtccccaggtttgtgtttcctggagtggccgaaagagatcagttctaacctgctctgcaggaataacggtcctgcctcccgacactcttggcgaggtttttgtacagtttgctccgggagctgtttcttcgcttccacctttttctcccccacacttcgcggcttcttcatgctttttcttctcaccatttctggccaaaactacaaacaagacttcgcagatcgagcctgcgtgctgccgaagcagggcgccgagtccatgcgaactgccatctgatccgctcttatcaatgaagcagccgatcatggcggatggcccccggtgcaagaggcgcaaacaagccaatcccaggaggaaaaacgtttctacatggtctggaggagcccgttatccaggctgagtcaggaaggaggaaggagaaaggagatgggggttcgaggggcacacgcagatcagagccttggagtcagaaatgagcactcggagcgggagatgccctgctgctgcttgccaccggtgcggcccgtttgtaacttgcaaagtttgttgcttttgcccctgattcgggcagcgggtcctgggatgctcctgcttccctcctgcctcccacggagcccgggaagagggtctgcctccccatcccgccaccttccagcatcagcctctgaaaaatctcacagagacatgcacgttgtagcaaaaatcaaatccggaaactgcttgtttcagagaaagaaatgaagttgtcttttaaagaaaaactgaattaggaggagagaaaagggaaataggagaagaaaggaaaagttaaatttgatttttctccagagtttccactaaagggttggggacagtgtgaaggagaaggggagctttttacaaatgcctttggtctctgaacttcagtggcaaagaacagggatcaagttgaatgttctcagggctttggatcctagaggagaaacaatcagaagagcagaaatggttatccctgtttaaaataagccctcactctttaccacttccttaaaggagtggaggtgctggtagtgatggttagaggcaatgagggacggagaagttgctcccgtttcagagatgcttaaatgaaaaggaaagaaaatgcagtcaaccccttctccaggaggtgcctcctagctctcctccctgagaggtgaagttgggatggggcaacgagagtcatacacacttagacaaggaagtttccttcggatcactgtcagtccagacttggttatctttgcaaagtgtggaaatctttggcaagtagctttcttcgtaaagttgatgagcttctagggagcctgttttgctgactttcaaagcactggggcaggttgtgtggcaggtaccagttctgagggcgctccaaagatatccatctccatccttttttctctgtggagatcttctgcaagttttgtcacgctgcacacacacaaggctgggggctatgtatctaggctgatctatttgttttattttggtctggaaaaactaagccaattggggtagaaacatgctttccttcgtagcagagccagtaggctgctggtgtccatagagtgacagtccaccaggactaagggtgggctgaggattttaaactttacattgtttctctgttaccagatacaaataaattcacgtcttccaccatttgttttcaaatagggtaaaaccaagattaaagttccctgctcaactgctatgtcataggtttcagtgtttcccttccttcttaatttgcttaaagaaaattccaagaggttattaaagaccttgatgccatattaagaatatttcctgggaaaaatgtatgtctaccctgaaggtaggaaaggagggcgttgctagcctctagcagtgccgcgtttattctaagatgtgggagattcttttccttgcaacagtttttgtcatctgcattcttccaaggcttttaaggtgcattttcttctgtgtgaaaggaaattctttgtccttttcctctcagcaccgtggcttcccaaggtagacactattttgtgcctgtcacagagagagggagtgcaggtttgcaatgctcacagacaattgattgtctgccctaatgtgtttcatttacatgtttataacgtcaatggtgctggggtgtccactgtaccattcattcccgcattcccacaagggggcaattgtctgaatggccaagtcagacacctttttgattgctctttggttgtcttttcagagcaaagagataaaggaggaaaatctgtgatgcagaaacactagttgaaaatatacagaattaaatgtcaccacaaaagcagatgttaacataagcccaaatatgctttttagccaagatgtgaaggttgaaaaaaataattcagagcagagggaaggatgatttaaaccaataaatatagccctattccccctctttacttcttttctgtctttagcaatcagaagatgaaatgtaattttccttttcatttttaagccttgaaacatccaggcacctcctcattatttgtatgtttgctgtgatttgtgaattttgtatatatttacatagctctgtttatgccaacagcatcagcttaccacttggaaaatctattgaatgactatttgggctgtggggagggtaaacttttaaaaagtaagatccaagtatttcttcatcaagcagtttttaaaaggaaaacgataataatcagtaggctccatggaagcctttgccttaatagctatgtgccaaatacttttatcttgtgtgacagtcatgtcagagtgaaatctctcaggaaaagtgtaactagtagttacaaagtaaataaaggatttcattttaa

SEQ ID NO: 23339 - DNA, 3061 bp, Homo sapiens
  misc_feature 1..3061: note = ENST00000625161
  source 1..3061: mol_type = unassigned DNA; mol_type = unassigned DNA
caaaatcatatagaaattcctggaaagaaataatggcaataataatcgtataagtagaagctggaagggaaaaaaagatggtcatccaggaacctagaatggcactttatataattttaatgaagtcaacagtgtatatatagactaaggcgacaaggagataaaacgtgtaaagcagtgtgtgtgttttaaaggctggtcaagaacgtgagttagaagacaatgctatgtacatttaataaaaagcaaaggagaaggaggcagttgaagaaaaataaatgtacaaagagagaaacaagtatctgaaatacaaccttccagattctcaggctagcaagatgcctggcagaggcagtgccagggccaagttaacccatagcgggcagtcagtctcctttcccccacatggaaaggatgaaatctcttcccagaaaataagatgtgcaggaggaaagagggagtggggtgagggggaaggaggcaaaaagcgagttgcccgcagacaagaatgtgtgtcggtttcaagaaagttcagtcagatgatcctcagtcgcctgactcactttgtaacactttcactgacgctggagaggagggggaaaacccagcccccctttttctttcccctgattataccccactatctccacacagccttggagtcagaaatgagcactcggagcgggagatgccctgctgctgcttgccaccggtgcggcccgtttgtaacttgcaaagtttgttgcttttgcccctgattcgggcagcgggtcctgggatgctcctgcttccctcctgcctcccacggagcccgggaagagggtctgcctccccatcccgccaccttccagcatcagcctctgaaaaatctcacagagacatgcacgttgtagcaaaaatcaaatccggaaactgcttgtttcagagaaagaaatgaagttgtcttttaaagaaaaactgaattaggaggagagaaaagggaaataggagaagaaaggaaaagttaaatttgatttttctccagagtttccactaaagggttggggacagtgtgaaggagaaggggagctttttacaaatgcctttggtctctgaacttcagtggcaaagaacagggatcaagttgaatgttctcagggctttggatcctagaggagaaacaatcagaagagcagaaatggttatccctgtttaaaataagccctcactctttaccacttccttaaaggagtggaggtgctggtagtgatggttagaggcaatgagggacggagaagttgctcccgtttcagagatgcttaaatgaaaaggaaagaaaatgcagtcaaccccttctccaggaggtgcctcctagctctcctccctgagaggtgaagttgggatggggcaacgagagtcatacacacttagacaaggaagtttccttcggatcactgtcagtccagacttggttatctttgcaaagtgtggaaatctttggcaagtagctttcttcgtaaagttgatgagcttctagggagcctgttttgctgactttcaaagcactggggcaggttgtgtggcaggtaccagttctgagggcgctccaaagatatccatctccatccttttttctctgtggagatcttctgcaagttttgtcacgctgcacacacacaaggctgggggctatgtatctaggctgatctatttgttttattttggtctggaaaaactaagccaattggggtagaaacatgctttccttcgtagcagagccagtaggctgctggtgtccatagagtgacagtccaccaggactaagggtgggctgaggattttaaactttacattgtttctctgttaccagatacaaataaattcacgtcttccaccatttgttttcaaatagggtaaaaccaagattaaagttccctgctcaactgctatgtcataggtttcagtgtttcccttccttcttaatttgcttaaagaaaattccaagaggttattaaagaccttgatgccatattaagaatatttcctgggaaaaatgtatgtctaccctgaaggtaggaaaggagggcgttgctagcctctagcagtgccgcgtttattctaagatgtgggagattcttttccttgcaacagtttttgtcatctgcattcttccaaggcttttaaggtgcattttcttctgtgtgaaaggaaattctttgtccttttcctctcagcaccgtggcttcccaaggtagacactattttgtgcctgtcacagagagagggagtgcaggtttgcaatgctcacagacaattgattgtctgccctaatgtgtttcatttacatgtttataacgtcaatggtgctggggtgtccactgtaccattcattcccgcattcccacaagggggcaattgtctgaatggccaagtcagacacctttttgattgctctttggttgtcttttcagagcaaagagataaaggaggaaaatctgtgatgcagaaacactagttgaaaatatacagaattaaatgtcaccacaaaagcagatgttaacataagcccaaatatgctttttagccaagatgtgaaggttgaaaaaaataattcagagcagagggaaggatgatttaaaccaataaatatagccctattccccctctttacttcttttctgtctttagcaatcagaagatgaaatgtaattttccttttcatttttaagccttgaaacatccaggcacctcctcattatttgtatgtttgctgtgatttgtgaattttgtatatatttacatagctctgtttatgccaacagcatcagcttaccacttggaaaatctattgaatgactatttgggctgtggggagggtaaacttttaaaaagtaagatccaagtatttcttcatcaagcagtttttaaaaggaaaacgataataatcagtaggctccatggaagcctttgccttaatagctatgtgccaaatacttttatcttgtgtgacagtcatgtcagagtgaaatctctcaggaaaagtgtaactagtagttacaaagtaaataaaggatttcatttt

SEQ ID NO: 23340 - DNA, 656 bp, Homo sapiens
  misc_feature 1..656: note = ENST00000462355
  source 1..656: mol_type = unassigned DNA; mol_type = unassigned DNA
aaagggtccgcctagccctgagtcaagcggtcttactgtaccgccgtgtgcattccctcatacggtcaggagttatgactcattttgaagatgtaattcttgtctctctgatcccctcgcgggtgcaacacaccaaacaatcgagcctgcgtgctgccgaagcagggcgccgagtccatgcgaactgccatctgatccgctcttatcaatgaagcagccgatcatggcggatggcccccggtgcaagaggcgcaaacaagccaatcccaggaggaaaaacgccttggagtcagaaatgagcactcggagcgggagatgccctgctgctgcttgccaccggtgcggcccgtttgtaacttgcaaagtttgttgcttttgcccctgattcgggcagcgggtcctgggatgctcctgcttccctcctgcctcccacggagcccgggaagagggtctgcctccccatcccgccaccttccagcatcagcctctgaaaaatctcacagagacatgcacgttgtagcaaaaatcaaatccggaaactgcttgtttcagagaaagaaatgaagttgtcttttaaagaaaaactgaattaggaggagagaaaagggaaataggagaagaaaggaaaagttaaatttgatttttctccagagttt

SEQ ID NO: 23341 - DNA, 536 bp, Homo sapiens
  misc_feature 1..536: note = ENST00000475115
  source 1..536: mol_type = unassigned DNA; mol_type = unassigned DNA
ccccccccgctccccgccccccaagccttagtgagattgacagtcgcgtggaggaggcttttccaggcacagcctttctcatggtaatcagcccccggcatcacctcccggccgcggctgcgcccgctcggagcgcggctcgcggaccccggggaccggaaacagggcggcgggcggggagcaggcgagcgagccagaaaagaaaaagaaaaaaatgtcattagaagaggcgtaacacgtcagtccgtccccaggtttgtgtttcctggagtggccgaaagagatcagttctaacctgctctgcaggaataacggtcctgcctcccgacactcttggcgaggtttttgtacagtttgctccgggagctgtttcttcgcttccacctttttctcccccacacttcgcggcttcttcatgctttttcttctcaccatttctggccaaaactacaaacaagacttcgcagatcgagcctgcgtgctgccgaagcagggcgccgagtccatgcgaactgccatctgatccgctcttatca

SEQ ID NO: 23342 - DNA, 1809 bp, Homo sapiens
  misc_feature 1..1809: note = ENST00000440875
  source 1..1809: mol_type = unassigned DNA; mol_type = unassigned DNA
atttcatttcttccactaaagcgtttgcggagacttcaaggtataatctatcccagatcctttcccagagagaaacttggcgatcacgttttcacatgatgctcacgctcagggcgcttcaattatccctccccacaaagataggtggcgcgtgtttcagggtctctcgtctctctcctacagaaaagaaaaagaaaaaaatgtcattagaagaggcgtaacacgtcagtccgtccccaggtttgtgtttcctggagtggccgaaagagatcagttctaacctgctctgcaggaataacggtcctgcctcccgacactcttggcgaggtttttgtacagtttgctccgggagctgtttcttcgcttccacctttttctcccccacacttcgcggcttcttcatgctttttcttctcaccatttctggccaaaactacaaacaagacttcgcagatcgagcctgcgtgctgccgaagcagggcgccgagtccatgcgaactgccatctgatccgctcttatcaatgaagcagccgatcatggcggatggcccccggtgcaagaggcgcaaacaagccaatcccaggaggaaaaacgtggtgaactatgacaatgtagtggacacaggttctgaaacagatgaggaagacaagcttcatattgctgaggatgacggtattgccaaccctctggaccaggagacgagtccagctagtgtgcccaaccatgagtcctccccacacgtgagccaagctctgttgccaagagaggaagaggaagatgaaataagggagggtggagtggaacacccctggcacaacaacgagattctacaagcctctgtagatggtccagaagaaatgaaggaagactatgacactatggggccagaagccacgatccagaccgcaattaacaatggtacagtgaagaatgcaaattgcacatcagattttgaggaatactttgccaaaagaaaactggaggaacgcgatggtcatgcagtcagcatcgaggagtaccttcagcgcagtgacacagccattatttacccagaagcccctgaggagctgtctcgccttggcacgccagaggccaatgggcaagaagaaaatgacctgccacctggaactccagatgcttttgcccaactgctgacctgcccctactgcgaccggggctacaagcgcttgacatcactgaaggagcacatcaagtaccgccacgagaagaatgaagagaacttttcctgccctctctgtagctacacgtttgcctaccgcacccagctcgagcggcatatggtgacacacaagccagggacagatcagcaccaaatgctaacccaaggagcaggtaatcgcaagttcaaatgcacagagtgtggcaaggccttcaaatataaacaccatctgaaagaacacctgcgaattcacagtggtgaaaaaccttacgagtgcccaaactgcaagaaacgtttctcccattctggttcctacagttcgcacatcagcagcaagaaatgtattggtttaatctctgtaaatggccgaatgagaaacaatatcaagacgggttcttcccctaattctgtttcttcttctcctactaattcagccattacccagttaagaaacaagttggagaatggaaaaccacttagtatgtctgaacagacaggcttacttaaaaactcaaggagacagtggctcatgcctgtaatcccagcactttgggaggccaacgagggtggatcaggtcaggagtttgagaccagcctggccaacatggtaaaacaccatctgtcctaa

SEQ ID NO: 23343 - DNA, 968 bp, Homo sapiens
  misc_feature 1..968: note = ENST00000401903
  source 1..968: mol_type = unassigned DNA; mol_type = unassigned DNA
agatccgggggctgcggataaatccccgtaggccgcgggcagcgagatgttgcgttccggtgtgggtgtgggtgtgcctccgacggcgtctcggtgccagtgtcgaggttctttctgcttagctacccggagccgactacggaggaggacacctgagtttacgtctcttccatctgctgctcacctcagctgcctgggtccccgacgagagccaggtgacacttaactccgccatctgcgttttgagcactgttctcataatggagtttcctgatttggggaagcattgttcagaaaagacttgcaagcagctagattttcttccagtaaaatgtgatgcatgtaaacaagatttctgtaaagatcattttccatacgctgcacataagtgtccgtttgcattccagaaggatgttcacgtcccagtatgcccactctgtaatacccccatcccagtaaaaaagggccagataccagacgtggtggttggtgatcacattgacagagactgtgactctcaccctgggaagaagaaagagaagatttttacataccgttgctcaaaagagggctgcaagaagaaagagatgctgcagatggtatgtgcccaatgtcacggcaacttctgtatccagcacagacaccctttggaccacagctgcagacacgggagtcgccccaccatcaaagctgggtgctcacccatgacagtctctgaatccaggccgttgggagatttcctcaccctggctcctggcgggctggcccagcgactcgggtactggttcacccggctcatgtgaacgcaatttcgtctgtgtggggtgctgcagctcttggttggtgaacacggaaaggttgctgtgtgtaactgcacagtgtgacgcgatgctccagtggtgcgacttcgtcaggatggatgaaggacacaggactgggaccccaagttacagaagcagctcgctcca

SEQ ID NO: 23344 - DNA, 852 bp, Homo sapiens
  misc_feature 1..852: note = ENST00000397083
  source 1..852: mol_type = unassigned DNA; mol_type = unassigned DNA
ccgtaggccgcgggcagcgagatgttgcgttccggtgtgggtgtgggtgtgcctccgacggcgtctcggtgccagtgtcgaggttctttctgcttagctacccggagccgactacggaggaggacacctgagtttacgtctcttccatctgctgctcacctcagctgcctgggtccccgacgagagccaggtgacacttaactccgccatctgcgttttgagcactgttctcataatggagtttcctgatttggggaagcattgttcagaaaagacttgcaagcagctagattttcttccagtaaaatgtgatgcatgtaaacaagatttctgtaaagatcattttccatacgctgcacataagtgtccgtttgcattccagaaggatgttcacgtcccagtatgcccactctgtaatacccccatcccagtaaaaaagggccagataccagacgtggtggttggtgatcacattgacagagactgtgactctcaccctgggaagaagaaagagaagtcactttgctctcttagatttttacataccgttgctcaaaagagggctgcaagaagaaagagatgctgcagatggtatgtgcccaatgtcacggcaacttctgtatccagcacagacaccctttggaccacagctgcagacacgggagtcgccccaccatcaaagctgggtgagaagagactccgctgcgatggctcggagcacgcagtagcatgcgtggaagcagcttacactctagtgggaagtggagccccattgagcaccatcccacactggctgctgatcttgtttgttgagggagatgggactataataaaattgaatgctgaagttga

SEQ ID NO: 23345 - DNA, 860 bp, Homo sapiens
  misc_feature 1..860: note = ENST00000316495
  source 1..860: mol_type = unassigned DNA; mol_type = unassigned DNA
agatccgggggctgcggataaatccccgtaggccgcgggcagcgagatgttgcgttccggtgtgggtgtgggtgtgcctccgacggcgtctcggtgccagtgtcgaggttctttctgcttagctacccggagccgactacggaggaggacacctgagtttacgtctcttccatctgctgctcacctcagctgcctgggtccccgacgagagccaggtgacacttaactccgccatctgcgttttgagcactgttctcataatggagtttcctgatttggggaagcattgttcagaaaagacttgcaagcagctagattttcttccagtaaaatgtgatgcatgtaaacaagatttctgtaaagatcattttccatacgctgcacataagtgtccgtttgcattccagaaggatgttcacgtcccagtatgcccactctgtaatacccccatcccagtaaaaaagggccagataccagacgtggtggttggtgatcacattgacagagactgtgactctcaccctgggaagaagaaagagaagatttttacataccgttgctcaaaagagggctgcaagaagaaagagatgctgcagatggtatgtgcccaatgtcacggcaacttctgtatccagcacagacaccctttggaccacagctgcagacacgggagtcgccccaccatcaaagctgggtgagaagagactccgctgcgatggctcggagcacgcagtagcatgcgtggaagcagcttacactctagtgggaagtggagccccattgagcaccatcccacactggctgctgatcttgtttgttgagggagatgggactataataaaattgaatgctgaagttga

SEQ ID NO: 23346 - DNA, 542 bp, Homo sapiens
  misc_feature 1..542: note = ENST00000471448
  source 1..542: mol_type = unassigned DNA; mol_type = unassigned DNA
gtttaagtgtgccgcacaggagtactcgtttaaaacttctgtgagtttaagttgcatgagtctcagatgccatcttacctttgttatttttaggatgttcacgtcccagtatgcccactctgtaatacccccatcccagtaaaaaagggccagataccagacgtggtggttggtgatcacattgacagagactgtgactctcaccctgggaagaagaaagagaagatttttacataccgttgctcaaaagagggctgcaagaagaaagagatgctgcagatggtatgtgcccaatgtcacggcaacttctgtatccagcacagacaccctttggaccacagctgcagacacgggagtcgccccaccatcaaagctgggtgagaagagactccgctgcgatggctcggagcacgcagtagcatgcgtggaagcagcttacactctagtgggaagtggagccccattgagcaccatcccacactggctgctgatcttgtttgttgagggagatgggactataataaaattgaatgctgaagttg

SEQ ID NO: 23347 - DNA, 433 bp, Homo sapiens
  misc_feature 1..433: note = ENST00000574135
  source 1..433: mol_type = unassigned DNA; mol_type = unassigned DNA
gtgatgcatgtaaacaagatttctgtaaagatcattttccatacgctgcacataagtgtccgtttgcattccagaaggatgttcacgtcccagtatgcccactctgtaatacccccatcccagtaaaaaagggccagataccagacgtggtggttggtgatcacattgacagagactgtgactctcaccctgggaagaagaaagagaagcacagacaccctttggaccacagctgcagacacgggagtcgccccaccatcaaagctgggtgagaagagactccgctgcgatggctcggagcacgcagtagcatgcgtggaagcagcttacactctagtgggaagtggagccccattgagcaccatcccacactggctgctgatcttgtttgttgagggagatgggactataataaaattgaatgctgaagttg

SEQ ID NO: 23348 - DNA, 1084 bp, Homo sapiens
  misc_feature 1..1084: note = ENST00000484977
  source 1..1084: mol_type = unassigned DNA; mol_type = unassigned DNA
gtcggggcgcgcccggaaaccccaaggcccagacggctctcagatccgggggctgcggataaatccccgtaggccgcgggcagcgagatgttgcgttccggtgtgggtgtgggtgtgcctccgacggcgtctcggtgccagtgtcgaggttctttctgcttagctacccggagccgactacggaggaggacacctgagtttacgtctcttccatctgctgctcacctcagctgcctgggtccccgacgagagccaggtgacacttaactccgccatctgcgttttgagcactgttctcataatggagtttcctgatttggggaagcattgttcagaaaagacttgcaagcagctagattttcttccagtaaaatgtgatgcatgtaaacaagatttctgtaaagatcattttccatacgctgcacataagtgtccgtttgcattccagaaggtaattgatcctttgttcaaaagattctcatcttcaccgtctgaagctgcactgtcttgctggtatggtagggactagcgacgtatggctaactcattgaaaattaaattttaaaatccagtttttcagtcccactagcctcgtttcaggtgcctgctgttaggcagtacagaggagcgtgtctgccctcacaggacattctgttggatgactctcagacaactgagatcttattttcagggactcatggagtcacttagttgtaaccttatgttccaagcttactttagatgttcaaatacttggttcctttgatctgttacaccatagctgttacaccatagctgtgtcttcaccagatgcaagaaagattttaatatttgacttggaagccaatcaggaaggcagtaaatacgcttattgatttgaataactgcagccttgacatagtatttaggtgactcccagagtacacagcagaaactgaaagaggacctaaggaaatgagcttgccccgagtccagaggtttgagacttgttgttgacttttcagatggttcccagcccgtgtttactttgtctctggatgggtcacaggtcattttagtgaactctgccacttgaccgtggtgg

SEQ ID NO: 23349 - DNA, 557 bp, Homo sapiens
  misc_feature 1..557: note = ENST00000478137
  source 1..557: mol_type = unassigned DNA; mol_type = unassigned DNA
acgcggccacataaccgtccagggggcggggggcagcgcggtgaaatggaaaaggatttaactgggggatctaggtgctggggacactgacattttcggaccccggccgcagccctgagtcagcttccccgctcctcgcccgcccggctgcgcctgcgcggagccgcctcactgtgacccagcaagcgcgccgcctgcgagaagcgaccggacacttcgagaagggaagtggagaagcgaggagtgggcgggcctgcggggcgcggcggggcgggattggccggatggctggtgtcgtcttcggtgtgcgccggcgccactgggccgcggcctggcgggattggccggtctgcgggtgacgttgtcggggcgcgcccggaaaccccaaggcccagacggctctcagatccgggggctgcggataaatccccgtaggccgcgggcagcgagatgttgcgttccggtgtgggtgtgggtgtgcctccgacggcgtctcggtgccagtgtcgaggttctttctgcttagctacccggagccgactacggaggaggacacc

SEQ ID NO: 23350 - DNA, 3020 bp, Homo sapiens
  misc_feature 1..3020: note = ENST00000488164
  source 1..3020: mol_type = unassigned DNA; mol_type = unassigned DNA
gcggccgcgccccctgcccgttgcagccccccctagctctcccctaagaggagccgttcggggtcgggggtcgggggtcggggatccgcgtggggcctgcaggcgaagggctggccgggcctgctgagctgctgttctgcatgactcagtggttttcggagagggccctgttgggctttattgagtgaggcctttgcttagagggggatggggtatcagtgggacccgaacttgttccaaaatccattggaacatggggccgggggttctcggcgtcgtcttttgggcttctcgacgtcgctgcgtttttatcctgagatccgttttcatggaggaaatggaacacctcctttgtttggtgcatttaggctgatgaatgtgaaattttttgctcgctttccacgcactccgtggaggtgtgttttcggggaagggtcggattatctttattgattgagtgtctcctaagggatagcatctaaggagataccaagataaaggaacatataggtcacacatccccgttcttaaacctgggatttagatacagacttctaaaaacataaacgaatgtattttattccttatttttaggattttttttaaagagtaggctttcagaactcagttggtgaaaatactgcaattttatctttgaagttttttgttaaaatgtttccccacacccccctaaaaaattaaggattctttgtagttgtctcctgttttctatctcccaggccctgaaaaggagcctttaaaagtcaattctactccatttggcaaagagggaactgaaatctggaaagtaaggacttgcccaaggtcactgacttagtggcagactagagacttgaactcaggtctccattcccagaaaaatatggctcaggagactaaccagaccccggggcccatgctgtgtagcacaggatgtggcttttatggaaatcctaggacaaatggaatgtgttcagtttgctacaaagaacatcttcagaggcagcaaaatagtggcagaatgagcccaatgggaacagctagtggttccaacagtcctacctcagattctgcatctgtacagagagcagacactagcttaaacaactgtgaaggtgctgctggcagcacatctgaaaaatcaagaaatgtgcctgtggctgccttgcctgtaactcagcaaatgacagaaatgagcatttcaagagaggacaaaataactaccccgaaaacagaggtgtcagagccagttgtcactcagcccagtccatcagtttctcagcccagtacttctcagagtgaagaaaaagctcctgaattgcccaaaccaaagaaaaacagatgtttcatgtgcagaaagaaagttggtcttacagggtttgactgccgatgtggaaatttgttttgtggacttcaccgttactctgacaagcacaactgtccgtatgattacaaagcagaagctgcagcaaaaatcagaaaagagaatccagttgttgtggctgaaaaaattcagagaatataaattacttcttgtgaagagactgaaactttgtttttattttaatatatcgtaggaaaacattaaagagcagatgcatggccatttttctttgatgttctccagagttttacattacacttgtctgtcttataattgatattttaggatgtttgggtgtttgttacaggcagaattggatagatacagccctacaaatgtatatgccctcccctgaaaaaaattggatgaaaatctgcacagcaaagtgaaacacacagataataggaacaaaatgtagttcccatgtgccaaacaaaataaatgaaatctctgcatgtttgcagcatatctgccttttgggaatgtaatcaaggtataatctttggctagtgttatgtgcctgtatttttttaaaatggtacaccagaaaaggactggcagtctacttctaccatagttaaacttcaccctctttaatttcacaacatattctttggaagcaggaagaaatgctcataaagaggatcagaccttctttcccgtgaaaccagtatttggcgccatatataagcctggttaaattggtcatctaaagctgtcaaataagacattctgtgaaaggtaaacatcgaaactggttataagtaaaaccatcaagccaacaacagggtcttgagataacctttgaagcttattgtactggcctgcaccagaagatgtctgcattactcattgctaaaaatgtgtagcacagaactgcactaggattaatttgtttacaagaagaaatttaaactctacgtttggttttcacatacagcagctctattgaataacatgcatctgaattttaagttgcaaaggtatctgaataatttttcatgtgcatcttttgtcgaatgttttggttcaagaaagaatgtttaaagctttttaaaagacttcagttcttaatgtaactgtacccttctgcatggaaaatcataaccaacatggctgcagtagacttcttagtggtatccagcaccacttgcagagggctgctttatcatattgtacttgggtgtaggactctagtgttcttgggtgtattgcatgggctgcattatctacagcattgtacaataacaactagaaaaggcagtatacttcactgatgcttgtctggtaataatcacttctgtgttataatggaaggttttttgtgatgtatgaaacttgtgttttttatatataaatgagtatagttagtgttgtggtaatgcctgttttcatctgtaaatagttaagtatgtacacgaggcactacttctgatttattgcaatgttcagtcctagtttttacttttattcttaaagcattcagttttgctttcaattttatgtaccttagttctgagttagacctgcagatgtgtacagatagttcatatttatgtattgcacataatcatgctattcagcattgatgctatattgtattatgtaaataataaaagccatgtacagagggaaa

SEQ ID NO: 23351 - DNA, 2785 bp, Homo sapiens
  misc_feature 1..2785: note = ENST00000376962
  source 1..2785: mol_type = unassigned DNA; mol_type = unassigned DNA
gggacgcggagctgtgtgcatctcctacgcgggctcgctcgctcccgggagccgcgcagcttccccggcggtggcaggagcggcgaagagcgccatcagcgggcccttacggccccaggcctcgcggcgcgcggtccgctcgccctcctcgtccgcccaacctgcggcctgtggaggcgtgaggcgacgacaggcgagcgcctcgagcagcgttagccgctgcggccgccggtcctccctccacctcctcctcggccccccctcgcttccctcctcccacttcccgagctccggcgtgtcccggccacgctcgacgctgctgcaggaacaaaggaagaccccgcggcggcggcggcgccacctccgcctgctgctccgacccgctcccggcccgcggcggcggcaccagggcgcccggctcagccttcccggaggcctcggcccggcctcatcgtgccggcttcgcgcgcgaacccggctttcgcatttgggaccctgcagggccctgaaaaggagcctttaaaagtcaattctactccatttggcaaagagggaactgaaatctggaaagtaaggacttgcccaaggtcactgacttagtggcagactagagacttgaactcaggtctccattcccagcagaaaaatatggctcaggagactaaccagaccccggggcccatgctgtgtagcacaggatgtggcttttatggaaatcctaggacaaatggaatgtgttcagtttgctacaaagaacatcttcagaggcagcaaaatagtggcagaatgagcccaatgggaacagctagtggttccaacagtcctacctcagattctgcatctgtacagagagcagacactagcttaaacaactgtgaaggtgctgctggcagcacatctgaaaaatcaagaaatgtgcctgtggctgccttgcctgtaactcagcaaatgacagaaatgagcatttcaagagaggacaaaataactaccccgaaaacagaggtgtcagagccagttgtcactcagcccagtccatcagtttctcagcccagtacttctcagagtgaagaaaaagctcctgaattgcccaaaccaaagaaaaacagatgtttcatgtgcagaaagaaagttggtcttacagggtttgactgccgatgtggaaatttgttttgtggacttcaccgttactctgacaagcacaactgtccgtatgattacaaagcagaagctgcagcaaaaatcagaaaagagaatccagttgttgtggctgaaaaaattcagagaatataaattacttcttgtgaagagactgaaactttgtttttattttaatatatcgtaggaaaacattaaagagcagatgcatggccatttttctttgatgttctccagagttttacattacacttgtctgtcttataattgatattttaggatgtttgggtgtttgttacaggcagaattggatagatacagccctacaaatgtatatgccctcccctgaaaaaaattggatgaaaatctgcacagcaaagtgaaacacacagataataggaacaaaatgtagttcccatgtgccaaacaaaataaatgaaatctctgcatgtttgcagcatatctgccttttgggaatgtaatcaaggtataatctttggctagtgttatgtgcctgtatttttttaaaatggtacaccagaaaaggactggcagtctacttctaccatagttaaacttcaccctctttaatttcacaacatattctttggaagcaggaagaaatgctcataaagaggatcagaccttctttcccgtgaaaccagtatttggcgccatatataagcctggttaaattggtcatctaaagctgtcaaataagacattctgtgaaaggtaaacatcgaaactggttataagtaaaaccatcaagccaacaacagggtcttgagataacctttgaagcttattgtactggcctgcaccagaagatgtctgcattactcattgctaaaaatgtgtagcacagaactgcactaggattaatttgtttacaagaagaaatttaaactctacgtttggttttcacatacagcagctctattgaataacatgcatctgaattttaagttgcaaaggtatctgaataatttttcatgtgcatcttttgtcgaatgttttggttcaagaaagaatgtttaaagctttttaaaagacttcagttcttaatgtaactgtacccttctgcatggaaaatcataaccaacatggctgcagtagacttcttagtggtatccagcaccacttgcagagggctgctttatcatattgtacttgggtgtaggactctagtgttcttgggtgtattgcatgggctgcattatctacagcattgtacaataacaactagaaaaggcagtatacttcactgatgcttgtctggtaataatcacttctgtgttataatggaaggttttttgtgatgtatgaaacttgtgttttttatatataaatgagtatagttagtgttgtggtaatgcctgttttcatctgtaaatagttaagtatgtacacgaggcactacttctgatttattgcaatgttcagtcctagtttttacttttattcttaaagcattcagttttgctttcaattttatgtaccttagttctgagttagacctgcagatgtgtacagatagttcatatttatgtattgcacataatcatgctattcagcattgatgctatattgtattatgtaaataataaaagccatgtacagagggaaa

SEQ ID NO: 23352 - DNA, 2686 bp, Homo sapiens
  misc_feature 1..2686: note = ENST00000376960
  source 1..2686: mol_type = unassigned DNA; mol_type = unassigned DNA
acagcccgggcgccgggcggcgagtgcgttagtcggccgggacgcggagctgtgtgcatctcctacgcgggctcgctcgctcccgggagccgcgcagcttccccggcggtggcaggagcggcgaagagcgccatcagcgggcccttacggccccaggcctcgcggcgcgcggtccgctcgccctcctcgtccgcccaacctgcggcctgtggaggcgtgaggcgacgacaggcgagcgcctcgagcagcgttagccgctgcggccgccggtcctccctccacctcctcctcggccccccctcgcttccctcctcccacttcccgagctccggcgtgtcccggccacgctcgacgctgctgcaggaacaaaggaagaccccgcggcggcggcggcgccacctccgcctgctgctccgacccgctcccggcccgcggcggcggcaccagggcgcccggctcagccttcccggaggcctcggcccggcctcatcgtgccggcttcgcgcgcgaacccggctttcgcatttgggaccctgcaggcagaaaaatatggctcaggagactaaccagaccccggggcccatgctgtgtagcacaggatgtggcttttatggaaatcctaggacaaatggaatgtgttcagtttgctacaaagaacatcttcagaggcagcaaaatagtggcagaatgagcccaatgggaacagctagtggttccaacagtcctacctcagattctgcatctgtacagagagcagacactagcttaaacaactgtgaaggtgctgctggcagcacatctgaaaaatcaagaaatgtgcctgtggctgccttgcctgtaactcagcaaatgacagaaatgagcatttcaagagaggacaaaataactaccccgaaaacagaggtgtcagagccagttgtcactcagcccagtccatcagtttctcagcccagtacttctcagagtgaagaaaaagctcctgaattgcccaaaccaaagaaaaacagatgtttcatgtgcagaaagaaagttggtcttacagggtttgactgccgatgtggaaatttgttttgtggacttcaccgttactctgacaagcacaactgtccgtatgattacaaagcagaagctgcagcaaaaatcagaaaagagaatccagttgttgtggctgaaaaaattcagagaatataaattacttcttgtgaagagactgaaactttgtttttattttaatatatcgtaggaaaacattaaagagcagatgcatggccatttttctttgatgttctccagagttttacattacacttgtctgtcttataattgatattttaggatgtttgggtgtttgttacaggcagaattggatagatacagccctacaaatgtatatgccctcccctgaaaaaaattggatgaaaatctgcacagcaaagtgaaacacacagataataggaacaaaatgtagttcccatgtgccaaacaaaataaatgaaatctctgcatgtttgcagcatatctgccttttgggaatgtaatcaaggtataatctttggctagtgttatgtgcctgtatttttttaaaatggtacaccagaaaaggactggcagtctacttctaccatagttaaacttcaccctctttaatttcacaacatattctttggaagcaggaagaaatgctcataaagaggatcagaccttctttcccgtgaaaccagtatttggcgccatatataagcctggttaaattggtcatctaaagctgtcaaataagacattctgtgaaaggtaaacatcgaaactggttataagtaaaaccatcaagccaacaacagggtcttgagataacctttgaagcttattgtactggcctgcaccagaagatgtctgcattactcattgctaaaaatgtgtagcacagaactgcactaggattaatttgtttacaagaagaaatttaaactctacgtttggttttcacatacagcagctctattgaataacatgcatctgaattttaagttgcaaaggtatctgaataatttttcatgtgcatcttttgtcgaatgttttggttcaagaaagaatgtttaaagctttttaaaagacttcagttcttaatgtaactgtacccttctgcatggaaaatcataaccaacatggctgcagtagacttcttagtggtatccagcaccacttgcagagggctgctttatcatattgtacttgggtgtaggactctagtgttcttgggtgtattgcatgggctgcattatctacagcattgtacaataacaactagaaaaggcagtatacttcactgatgcttgtctggtaataatcacttctgtgttataatggaaggttttttgtgatgtatgaaacttgtgttttttatatataaatgagtatagttagtgttgtggtaatgcctgttttcatctgtaaatagttaagtatgtacacgaggcactacttctgatttattgcaatgttcagtcctagtttttacttttattcttaaagcattcagttttgctttcaattttatgtaccttagttctgagttagacctgcagatgtgtacagatagttcatatttatgtattgcacataatcatgctattcagcattgatgctatattgtattatgtaaataataaaagccatgtacagagggaaa

SEQ ID NO: 23353 - DNA, 1073 bp, Homo sapiens
  misc_feature 1..1073: note = ENST00000343431
  source 1..1073: mol_type = unassigned DNA; mol_type = unassigned DNA
ccggggcgccgcgggccaatggcgaagccggagcaggccgcggatggcggcgtccgggggaggggagcccgcccgccagcccaggaagcacaaagacggaggcgtcatcctgtcgtcgtggcccgagacctggctcccggcgtccctggctcgctccacagcacggccctgaaaaggagcctttaaaagtcaattctactccatttggcaaagagggaactgaaatctggaaagtaaggacttgcccaaggtcactgacttagtggcagactagagacttgaactcaggtctccattcccagcagaaaaatatggctcaggagactaaccagaccccggggcccatgctgtgtagcacaggatgtggcttttatggaaatcctaggacaaatggaatgtgttcagtttgctacaaagaacatcttcagaggcagcaaaatagtggcagaatgagcccaatgggaacagctagtggttccaacagtcctacctcagattctgcatctgtacagagagcagacactagcttaaacaactgtgaaggtgctgctggcagcacatctgaaaaatcaagaaatgtgcctgtggctgccttgcctgtaactcagcaaatgacagaaatgagcatttcaagagaggacaaaataactaccccgaaaacagaggtgtcagagccagttgtcactcagcccagtccatcagtttctcagcccagtacttctcagagtgaagaaaaagctcctgaattgcccaaaccaaagaaaaacagatgtttcatgtgcagaaagaaagttggtcttacagggtttgactgccgatgtggaaatttgttttgtggacttcaccgttactctgacaagcacaactgtccgtatgattacaaagcagaagctgcagcaaaaatcagaaaagagaatccagttgttgtggctgaaaaaattcagagaatataaattacttcttgtgaagagactgaaactttgtttttattttaatatatcgtaggaaaacattaaagagcagatgcatggccatttttctttgatgttctccagagttttacattacacttg

SEQ ID NO: 23354 - DNA, 553 bp, Homo sapiens
  misc_feature 1..553: note = ENST00000471197
  source 1..553: mol_type = unassigned DNA; mol_type = unassigned DNA
gtcttgatactaagtgagtttttgtagtgttcattggttccttacaaatcctttttttaaataggaacagctagtggttccaacagtcctacctcagattctgcatctgtacagagagcagacactagcttaaacaactgtgaaggtgctgctggcagcacatctgaaaaatcaagaaatgtgcctgtggctgccttgcctgtaactcagcaaatgacagaaatgagcatttcaagagaggacaaaataactaccccgaaaacagaggtgtcagagccagttgtcactcagcccagtccatcagtttctcagcccagtacttctcagagtgaagaaaaagctcctgaattgcccaaaccaaagaaaaacagatgtttcatgtgcagaaagaaagttggtcttacagggtttgactgccgatgtggaaatttgttttgtggacttcaccgttactctgacaagcacaactgtccgtatgattacaaagcagaagctgcagcaaaaatcagaaaagagaatccagttgttgtggctgaaaaaattcagagaatat

SEQ ID NO: 23355 - DNA, 690 bp, Homo sapiens
  misc_feature 1..690: note = ENST00000376956
  source 1..690: mol_type = unassigned DNA; mol_type = unassigned DNA
ggctccttgttgccgggccgggggcgggagtgaagggaccggggcgccgcgggccaatggcgaagccggagcaggccgcggatggcggcgtccgggggaggggagcccgcccgccagcccaggaagcacaaagacggaggcgtcatcctgtcgtcgtggcccgagacctggctcccggcgtccctggctcgctccacagcacgcagaaaaatatggctcaggagactaaccagaccccggggcccatgctgtgtagcacaggatgtggcttttatggaaatcctaggacaaatggaatgtgttcagtttgctacaaagaacatcttcagaggcagcaaaatagtggcagaatgagcccaatgggaacagctagtggttccaacagtcctacctcagattctgcatctgtacagagagcagacactagcttaaacaactgtgaaggtgctgctggcagcacatctgaaaaatcaagaaatgtgcctgtggctgccttgcctgtaactcagcaaatgacagaaatgagcatttcaagagaggacaaaataactaccccgaaaacagaggtgtcagagccagttgtcactcagcccagtccatcagtttctcagcccagtacttctcagagtgaagaaaaagctcctgaattgcccaaaccaaagaaaaacagatgtttcatgtgcagaaaga

SEQ ID NO: 23356 - DNA, 631 bp, Homo sapiens
  misc_feature 1..631: note = ENST00000487330
  source 1..631: mol_type = unassigned DNA; mol_type = unassigned DNA
gcggccgccggtcctccctccacctcctcctcggccccccctcgcttccctcctcccacttcccgagctccggcgtgtcccggccacgctcgacgctgctgcaggaacaaaggaagaccccgcggcggcggcggcgccacctccgcctgctgctccgacccgctcccggcccgcggcggcggcaccagggcgcccggctcagccttcccggaggcctcggcccggcctcatcgtgccggcttcgcgcgcgaacccggctttcgcatttgggaccctgcaggcagaaaaatatggctcaggagactaaccagaccccggggcccatgctgtgtagcacaggatgtggcttttatggaaatcctaggacaaatggaatgtgttcagtttgctacaaagaacatcttcagaggcagcaaaatagtggcagaatgagcccaatgggtaagttatttccaaggaaaaacacatttgaaagaactggtggacagaaatacagaaccaagaattggggctgagaatgctgaaagcacatggagagaacacctgataagagcttgaaattcaagcaacagcccaagtgcttgacatgactgatcaggaatgaatgactatctacaagcatcttatagct

SEQ ID NO: 23357 - DNA, 5310 bp, Homo sapiens
  misc_feature 1..5310: note = ENST00000237937
  source 1..5310: mol_type = unassigned DNA; mol_type = unassigned DNA
aggccgcggatggcggcgtccgggggaggggagcccgcccgccagcccaggaagcacaaagacggaggcgtcatcctgtcgtcgtggcccgagacctggctcccggcgtccctggctcgctccacagcacgcagaaaaatatggctcaggagactaaccagaccccggggcccatgctgtgtagcacaggatgtggcttttatggaaatcctaggacaaatggaatgtgttcagtttgctacaaagaacatcttcagaggcagcaaaatagtggcagaatgagcccaatgggaacagctagtggttccaacagtcctacctcagattctgcatctgtacagagagcagacactagcttaaacaactgtgaaggtgctgctggcagcacatctgaaaaatcaagaaatgtgcctgtggctgccttgcctgtaactcagcaaatgacagaaatgagcatttcaagagaggacaaaataactaccccgaaaacagaggtgtcagagccagttgtcactcagcccagtccatcagtttctcagcccagtacttctcagagtgaagaaaaagctcctgaattgcccaaaccaaagaaaaacagatgtttcatgtgcagaaagaaagttggtcttacagggtttgactgccgatgtggaaatttgttttgtggacttcaccgttactctgacaagcacaactgtccgtatgattacaaagcagaagctgcagcaaaaatcagaaaagagaatccagttgttgtggctgaaaaaattcagagaatataaattacttcttgtgaagagactgaaactttgtttttattttaatatatcgtaggaaaacattaaagagcagatgcatggccatttttctttgatgttctccagagttttacattacacttgtctgtcttataattgatattttaggatgtttgggtgtttgttacaggcagaattggatagatacagccctacaaatgtatatgccctcccctgaaaaaaattggatgaaaatctgcacagcaaagtgaaacacacagataataggaacaaaatgtagttcccatgtgccaaacaaaataaatgaaatctctgcatgtttgcagcatatctgccttttgggaatgtaatcaaggtataatctttggctagtgttatgtgcctgtatttttttaaaatggtacaccagaaaaggactggcagtctacttctaccatagttaaacttcaccctctttaatttcacaacatattctttggaagcaggaagaaatgctcataaagaggatcagaccttctttcccgtgaaaccagtatttggcgccatatataagcctggttaaattggtcatctaaagctgtcaaataagacattctgtgaaaggtaaacatcgaaactggttataagtaaaaccatcaagccaacaacagggtcttgagataacctttgaagcttattgtactggcctgcaccagaagatgtctgcattactcattgctaaaaatgtgtagcacagaactgcactaggattaatttgtttacaagaagaaatttaaactctacgtttggttttcacatacagcagctctattgaataacatgcatctgaattttaagttgcaaaggtatctgaataatttttcatgtgcatcttttgtcgaatgttttggttcaagaaagaatgtttaaagctttttaaaagacttcagttcttaatgtaactgtacccttctgcatggaaaatcataaccaacatggctgcagtagacttcttagtggtatccagcaccacttgcagagggctgctttatcatattgtacttgggtgtaggactctagtgttcttgggtgtattgcatgggctgcattatctacagcattgtacaataacaactagaaaaggcagtatacttcactgatgcttgtctggtaataatcacttctgtgttataatggaaggttttttgtgatgtatgaaacttgtgttttttatatataaatgagtatagttagtgttgtggtaatgcctgttttcatctgtaaatagttaagtatgtacacgaggcactacttctgatttattgcaatgttcagtcctagtttttacttttattcttaaagcattcagttttgctttcaattttatgtaccttagttctgagttagacctgcagatgtgtacagatagttcatatttatgtattgcacataatcatgctattcagcattgatgctatattgtattatgtaaataataaaagccatgtacagagggaaacttcacttgttcattgggtttttaagccatagttggagtcctaaagggggaaaattagaaaatgttactttacatggctatataattttttttcctttgccatcgctgaacttgttcaagtgataatcaagagatattagaagcatttgcaggtatgatacctgataggcagtttatttttgaagaattcaataggcacctttgggattaaaacaattttaaaatttgagaaagatgaaatttgaacaattatggcctacctcgcttctccatgttgtaaaagatgatgttttatgacaattctgaagaagaaagtaggtatgacttagtttacaaaaagagttctgttttatttctgttttgggtttggctctaatacagagattcacccatggacttggtctctgtagcgtttatgccagatcataaagaacaaggggtgacaggtacatgttgactttacctggggtaaatgattaccagagtgcaactgttgcttctctgtgatggagtttggggtggaaataccctagttttatctgtcagttctttgcatgctgctacttttgcttcaagttagggaggtacatatgtatgtcaaagttcctatactgacatagggtagtatttctctgaatatgaaaagtcacaattgagttgaaaatttagaagttgaagatttagaagggcaacttaatttttcaagttaaaaatggaagtaagagtggtatagagaaggtaagatgagccctcggactccatcactctgaaggtctgagtagtagcaagagatagatttttgtttggccaggctgcagtgcaatggcgtaatcttggctcactgcaacctctgcctcctgggttcaagtgattctcctgcctctgcctcctaagtagctgggatcacaggcaccagccaccacgcccagctaatttttgtatttttaatagagacagtttctccatgttggtcaggctggtcttgaactcctgacctcaggtgagctgcccgcctcggcctcccaaagtgctgggattacaggcgtgaggcaccgcacccggccaatcagttttttttgttttttttttgtttgtttgttttacaagaaacattaaaccagatcagaacaaagatttgtcagggttgtccattgactggggagaaagggaatcagtgtgtaaggcacctgagaggactcagttctacccaaattcttgcattcaaacctgaatgcaaggccatgaagtcctttgaaatgtacagatattaagcaatttaataatataccatgtttcccttacataagcagacaaatatttacacccccatgacctgaagttttgttaggctgtgaccacatgaattcgcagtataaatgggtgagtcctttttgaaaacctcatcttcagtgtgcctgatctgtaaaactagagcctcaggtttgatcctaggtaggcttcccacaacgtggggaaaattagtttgtgagggaaagctgtttctgagcattatggcatagtgattaagatgagggaccctggaaccagcccgtgattttgggcaagttattttaggtccactttggactgcttcatctcttaaatgaagacagcaaccaccttcaggagtgtgaaggtgacaacacttaaaactgtgcctggcacattgtatttgctattgtcttaatgttctggaataatggtttccataacttgggaagaaaactttgagaacaggattggttacatcaagttgtatagtgaaaagataaagatttgttatttaaacttgcagtttaaagtcattagaatcattcttttccgtaaggctttctttgcaagagatctgcattaaataaagttgctaggaaataactaaaattggggaaataatctaataatagcaagatgttaagcatactattattgtattttgggggttggtaataacattcacatggatttatcaatacacactgagaagcaaagcctctcaagctgtcccatatcctccatttcaaaggcacacatacattttaggtaactcataatttagaaaggttatttaatcttttccacatgtaaatatttgaatatgtacaaagacttgatttgactcttgtctgtttttgttttgttttgtttgtttgagacagaggctccgtcgcccaggctggagtaaaatggcatggtctcagctcactgcaagttccgcctcccgggttcacgccattctcctggctcagcctccggagtagttgggactacaggcacccgtcaccacacctggctaatgttttttgttttttgggtttttttgtatttttagtagagagagggtttcaccgtgttagccagggtggtctcgatctcctgacctcatgatccgcccaccccggcctcccaaaatgctgggattacaggtgtgagccactgcgcctggccgactcttgtctgtttgaatgcaaagttctcaatagtggtttttgtccataagtattaacttataattttggagagtgataggtatggttgctggttgattagcaataagattatgtagccttaaactagctagaagagtttgcatgggtgaggcaacaggctgttaacaaaaagaaactggaaatacagtttcccctgtttgtttctcctgtttgtacaatctgctttaaaaacaagtgaacatgcaccatgtcagtcatggtgaatcggccaacagccagcccttgccagttgacatcacagtctaagatgggaaactggtacagatagacatgaagagagcttagcagtggttgaggtggtgactaaatatacagtcattgaataaataccgtgtagcaaatgtaaaaaaaaaaaaaaaagtacaacagaatacaaaagtgccatttaatattttatagctatttctatgcacaagtgctggttttaaatttatataaaagcaaagactgtttctgtgttttcttccagagtatttctgttacagccatagaagtaaagttaataaatgtaagactttttttgttt

SEQ ID NO: 23358 - DNA, 1814 bp, Homo sapiens
  misc_feature 1..1814: note = ENST00000261749
  source 1..1814: mol_type = unassigned DNA; mol_type = unassigned DNA
aataattagcgggcgggcggggcccgcgcgtcagccgcgggagccggccaatccagtggctctcctccgcggtcgcgtcataggccgaacaaccaaacagaaaagtttaataaacagcggacggaggggccggcggtggcggagccggagcaagcaggggttcggcggcattacctgtacccattcaccggcggctaccggcggcggcgcgcagcgtgtcaggcggagagacccgccgccaggaatgaatctgaagtctgctgcagtaaaacacagaaggctttaaaatgttttcttgcataaaattcaaaacttttaagtagctgcttatgagaatagggaaggcagaaagctaatgtctgtctcaagatacaggacagctgtttgctcatcaacctcaactgtgtgtgcaactgaggaacatggctcaagaaactaatcacagccaagtgcctatgctttgttccactggctgtggattttatggaaaccctcgtacaaatggcatgtgttcagtatgctataaagaacatcttcaaagacagaatagtagtaatggtagaataagcccacctgcaacctctgtcagtagtctgtctgaatctttaccagttcaatgcacagatggcagtgtgccagaagcccagtcagcattagactctacatcttcatctatgcagcccagccctgtatcaaatcagtcacttttatcagaatctgtagcatcttctcaattggacagtacatctgtggacaaagcagtacctgaaacagaagatgtgcaggcttcagtatcagacacagcacagcagccatctgaagagcaaagcaagtctcttgaaaaaccgaaacaaaaaaagaatcgctgtttcatgtgcaggaagaaagtgggacttactgggtttgaatgccggtgtggaaatgtttactgtggtgtacaccgttactcagatgtacacaattgctcttacaattacaaagccgatgctgctgagaaaatcagaaaagaaaatccagtagttgttggtgaaaagatccaaaagatttgaactcctgctggaatacaaaattcttgagcatctgcaaactaaaaattgacttgaggttttttttttcctagtcattgggaatgtagagcagtgtatcttgcatgtcatcggaagaatagatttttgttttggttttgttttgaaaatgactctgaacatttatttccattgcaatttctgtggctgaggagacttaaactttacaagtattatccttttaagatcattttaattttagttgagtgcagagggcttttataacaaacgtgcagaaattttggagggctgtgatttttccagtattaaacatgcatgcattaatcttgcagtttattttctcattgtgtatgtatatatcgcttttctctgcagcacgatttctcttttgataatgccctttagggcacaactagttatcagtaactgaatgtatcttaatcattatggctgcttctgttttttcattaacaaaggttattcatatgttagcatatagtttctttgcacccactatttatgtctgaatcatttgtcacaagagagtgtgtgctgatgagattgtaagtttgtgtgtttaaacttttttttgagcgagggaagaaaaagctgtatgcatttcattgctgtctacaggtttctttcagattatgttcatgggtttgtgtgtatacaatatgaagaatgatctgaagtaattgtgctgtatttatgtttattcaccagtctttgattaaataaaaaggaaaaccagaatgctcccttgta

SEQ ID NO: 23359 - DNA, 891 bp, Homo sapiens
  misc_feature 1..891: note = ENST00000561060
  source 1..891: mol_type = unassigned DNA; mol_type = unassigned DNA
ggccaatccagtggctctcctccgcggtcgcgtcataggccgaacaaccaaacagaaaagtttaataaacagcggacggaggggccggcggtggcggagccggagcaagcaggggttcggcggcattacctgtacccattcaccggcggctaccggcggcggcgcgcagcgtgtcaggcggagagacccgccgccaggtgtgcaactgaggaacatggctcaagaaactaatcacagccaagtgcctatgctttgttccactggctgtggattttatggaaaccctcgtacaaatggcatgtgttcagtatgctataaagaacatcttcaaagacagaatagtagtaatggtagaataagcccacctgcaacctctgtcagtagtctgtctgaatctttaccagttcaatgcacagatggcagtgtgccagaagcccagtcagcattagactctacatcttcatctatgcagcccagccctgtatcaaatcagtcacttttatcagaatctgtagcatcttctcaattggacagtacatctgtggacaaagcagtacctgaaacagaagatgtgcaggcttcagtatcagacacagcacagcagccatctgaagagcaaagcaagtctcttgaaaaaccgaaacaaaaaaagaatcgctgtttcatgtgcaggaagaaagtgggacttactgggtttgaatgccggtgtggaaatgtttactgtggtgtacaccgttactcagatgtacacaattgctcttacaattacaaagccgatgctgctgagaaaatcagaaaagaaaatccagtagttgttggtgaaaagatccaaaagatttgaactcctgctggaatacaaaattcttgagcatctgcaaactaaaaattgac

SEQ ID NO: 23360 - DNA, 1559 bp, Homo sapiens
  misc_feature 1..1559: note = ENST00000559157
  source 1..1559: mol_type = unassigned DNA; mol_type = unassigned DNA
cgcggtcgcgtcataggccgaacaaccaaacagaaaagtttaataaacagcggacggaggggccggcggtggcggagccggagcaagcaggggttcggcggcattacctgtacccattcaccggcggctaccggcggcggcgcgcagcgtgtcaggcggagagacccgccgccagatcaaaagacactgacttagctgcttaccagaaggggaacttgggtgtgcaactgaggaacatggctcaagaaactaatcacagccaagtgcctatgctttgttccactggctgtggattttatggaaaccctcgtacaaatggcatgtgttcagtatgctataaagaacatcttcaaagacagaatagtagtaatggtagaataagcccacctgttcaatgcacagatggcagtgtgccagaagcccagtcagcattagactctacatcttcatctatgcagcccagccctgtatcaaatcagtcacttttatcagaatctgtagcatcttctcaattggacagtacatctgtggacaaagcagtacctgaaacagaagatgtgcaggcttcagtatcagacacagcacagcagccatctgaagagcaaagcaagtctcttgaaaaaccgaaacaaaaaaagaatcgctgtttcatgtgcaggaagaaagtgggacttactgggtttgaatgccggtgtggaaatgtttactgtggtgtacaccgttactcagatgtacacaattgctcttacaattacaaagccgatgctgctgagaaaatcagaaaagaaaatccagtagttgttggtgaaaagatccaaaagatttgaactcctgctggaatacaaaattcttgagcatctgcaaactaaaaattgacttgaggttttttttttcctagtcattgggaatgtagagcagtgtatcttgcatgtcatcggaagaatagatttttgttttggttttgttttgaaaatgactctgaacatttatttccattgcaatttctgtggctgaggagacttaaactttacaagtattatccttttaagatcattttaattttagttgagtgcagagggcttttataacaaacgtgcagaaattttggagggctgtgatttttccagtattaaacatgcatgcattaatcttgcagtttattttctcattgtgtatgtatatatcgcttttctctgcagcacgatttctcttttgataatgccctttagggcacaactagttatcagtaactgaatgtatcttaatcattatggctgcttctgttttttcattaacaaaggttattcatatgttagcatatagtttctttgcacccactatttatgtctgaatcatttgtcacaagagagtgtgtgctgatgagattgtaagtttgtgtgtttaaacttttttttgagcgagggaagaaaaagctgtatgcatttcattgctgtctacaggtttctttcagattatgttcatgggtttgtgtgtatacaatatgaagaatgatctgaagtaattgtgctgtatttatgtttattcaccagtctttgatt

SEQ ID NO: 23361 - DNA, 585 bp, Homo sapiens
  misc_feature 1..585: note = ENST00000561012
  source 1..585: mol_type = unassigned DNA; mol_type = unassigned DNA
aataaacagcggacggaggggccggcggtggcggagccggagcaagcaggggttcggcggcattacctgtacccattcaccggcggctaccggcggcggcgcgcagcgtgtcaggcggagagacccgccgccaggaatgaatctgaagtctgctgcagtaaaacacagaaggctttaaaatgttttcttgcataaaattcaaaacttttaagtagctgcttatgagaatagggaaggcagaaagctaatgtctgtctcaagatacaggacagctgtttgctcatcaacctcaactgtgtttcacatcctgggaatactgtattttcaatctgaggttggtggagtcgccggtagccacctaagataggaatgtcaatcagaagttttctagaatctatcttcagatgcaaacaatacagtggcctcttgttggagatccaaaggctcagaactcggaattactgtatgcaacaggaaacactaatctcaagcacctatgccaagttaggtgtgcaactgaggaacatggctcaagaaactaatcacagccaagtgcctatgctttgttccactggctgtggattt

SEQ ID NO: 23362 - DNA, 582 bp, Homo sapiens
  misc_feature 1..582: note = ENST00000564367
  source 1..582: mol_type = unassigned DNA; mol_type = unassigned DNA
ggaggggccggcggtggcggagccggagcaagcaggggttcggcggcattacctgtacccattcaccggcggctaccggcggcggcgcgcagcgtgtcaggcggagagacccgccgccaggtgtgcaactgaggaacatggctcaagaaactaatcacagccaagtgcctatgctttgttccactggctgtggattttatggaaaccctcgtacaaatggcatgtgttcagtatgctataaagaacatcttcaaagacagaatagtagtaatggtagaataagcccacctgcaacctctgtcagtagtctgtctgaatctttaccagttcaatgcacagatggcagtgtgccagaagcccagtcagcattagactctacatcttcatctatgcagcccagccctgtatcaaatcagtcacttttatcagaatctgtagcatcttctcaattggacagtacatctgtggacaaagcagtacctgaaacagaagatgtgcaggggtttgaatgccggtgtggaaatgtttactgtggtgtacaccgttactcagatgtacacaattgctcttacaattacaaag

SEQ ID NO: 23363 - DNA, 1472 bp, Homo sapiens
  misc_feature 1..1472: note = ENST00000558494
  source 1..1472: mol_type = unassigned DNA; mol_type = unassigned DNA
ggagcaagcaggggttcggcggcattacctgtacccattcaccggcggctaccggcggcggcgcgcagcgtgtcaggcggagagacccgccgccaggtgtgcaactgaggaacatggctcaagaaactaatcacagccaagtgcctatgctttgttccactggctgtggattttatggaaaccctcgtacaaatggcatgtgttcagtatgctataaagaacatcttcaaagacagaatagtagtaatggtagaataagcccacctgcaacctctgtcagtagtctgtctgaatctttaccagttcaatgcacagatggcagtgtgccagaagcccagtcagcattagactctacatcttcatctatgcagcccagccctgtatcaaatcagtcacttttatcagaatctgtagcatcttctcaattggacagtacatctgtggacaaagcagtacctgaaacagaagatgtgcaggcttcagtatcagacacagcacagcagccatctgaagagcaaagcaagtctcttgaaaaaccgaaacaaaaaaagaatcgctgtttcatgtgcaggaagaaagtgggacttactgggtttgaatgccggtgtggaaatgtttactgtggtgtacaccgttactcagatgtacacaattgctcttacaattacaaagccgatgctgctgagaaaatcagaaaagaaaatccagtagttgttggtgaaaagatccaaaagatttgaactcctgctggaatacaaaattcttgagcatctgcaaactaaaaattgacttgaggttttttttttcctagtcattgggaatgtagagcagtgtatcttgcatgtcatcggaagaatagatttttgttttggttttgttttgaaaatgactctgaacatttatttccattgcaatttctgtggctgaggagacttaaactttacaagtattatccttttaagatcattttaattttagttgagtgcagagggcttttataacaaacgtgcagaaattttggagggctgtgatttttccagtattaaacatgcatgcattaatcttgcagtttattttctcattgtgtatgtatatatcgcttttctctgcagcacgatttctcttttgataatgccctttagggcacaactagttatcagtaactgaatgtatcttaatcattatggctgcttctgttttttcattaacaaaggttattcatatgttagcatatagtttctttgcacccactatttatgtctgaatcatttgtcacaagagagtgtgtgctgatgagattgtaagtttgtgtgtttaaacttttttttgagcgagggaagaaaaagctgtatgcatttcattgctgtctacaggtttctttcagattatgttcatgggtttgtgtgtatacaatatgaagaatgatctgaagtaattgtgctgtatttatgtttattcaccagtctttgatt

SEQ ID NO: 23364 - DNA, 558 bp, Homo sapiens
  misc_feature 1..558: note = ENST00000560470
  source 1..558: mol_type = unassigned DNA; mol_type = unassigned DNA
taagttttagctacctaaaaaagtatgaaagaatattgtgtttgaaatctttttaacttggtttttaagtcacgtgctaactatcctacacagttgggacgctatgatttaccttcacatctcggaagttgtaaccagttgtgaggaagttaggaccttggggttacctaaagataatttatattaagttgttgggccataaaaactgggcagaattggccacgcgcggtgactcaacgcctgtaatcccagcactttgggaggccgacgcggactaatcacgaggtcaggagatcgagaccatcctggccaacatggaatgaatctgaagtctgctgcagtaaaacacagaaggctttaaaatgttttcttgcataaaattcaaaacttttaagtagctgcttatgagaatagggaaggcagaaagctaatgtctgtctcaagatacaggacagctgtttgctcatcaacctcaactgtgtgtgcaactgaggaacatggctcaagaaactaatcacagccaagtgcctatgctttgttccactggctgtggatttt

SEQ ID NO: 23365 - DNA, 492 bp, Homo sapiens
  misc_feature 1..492: note = ENST00000560228
  source 1..492: mol_type = unassigned DNA; mol_type = unassigned DNA
attcaggtttggttgctttggagtacagcttcaagtgaagttaatctgaggtgaagcaaacagaaaattgtggaggttttgttggaatgaatctgaagtctgctgcagtaaaacacagaaggctttaaaatgttttcttgcataaaattcaaaacttttaagtagctgcttatgagaatagggaaggcagaaagctaatgtctgtctcaagatacaggacagctgtttgctcatcaacctcaactgtgtttcacatcctgggaatactgtattttcaatctgaggttggtggagtcgccggtagccacctaagataggaatgtcaatcagaagttttctagaatctatcttcagatgcaaacaatacagtggcctcttggtgtgcaactgaggaacatggctcaagaaactaatcacagccaagtgcctatgctttgttccactggctgtggattttatggaaaccctcgtacaaatggcatgtgttcagta

SEQ ID NO: 23366 - DNA, 1446 bp, Homo sapiens
  misc_feature 1..1446: note = ENST00000559835
  source 1..1446: mol_type = unassigned DNA; mol_type = unassigned DNA
gctttggagtacagcttcaagtgaagttaatctgaggtgaagcaaacagaaaattgtggaggttttgttggtgtgcaactgaggaacatggctcaagaaactaatcacagccaagtgcctatgctttgttccactggctgtggattttatggaaaccctcgtacaaatggcatgtgttcagtatgctataaagaacatcttcaaagacagaatagtagtaatggtagaataagcccacctgcaacctctgtcagtagtctgtctgaatctttaccagttcaatgcacagatggcagtgtgccagaagcccagtcagcattagactctacatcttcatctatgcagcccagccctgtatcaaatcagtcacttttatcagaatctgtagcatcttctcaattggacagtacatctgtggacaaagcagtacctgaaacagaagatgtgcaggcttcagtatcagacacagcacagcagccatctgaagagcaaagcaagtctcttgaaaaaccgaaacaaaaaaagaatcgctgtttcatgtgcaggaagaaagtgggacttactgggtttgaatgccggtgtggaaatgtttactgtggtgtacaccgttactcagatgtacacaattgctcttacaattacaaagccgatgctgctgagaaaatcagaaaagaaaatccagtagttgttggtgaaaagatccaaaagatttgaactcctgctggaatacaaaattcttgagcatctgcaaactaaaaattgacttgaggttttttttttcctagtcattgggaatgtagagcagtgtatcttgcatgtcatcggaagaatagatttttgttttggttttgttttgaaaatgactctgaacatttatttccattgcaatttctgtggctgaggagacttaaactttacaagtattatccttttaagatcattttaattttagttgagtgcagagggcttttataacaaacgtgcagaaattttggagggctgtgatttttccagtattaaacatgcatgcattaatcttgcagtttattttctcattgtgtatgtatatatcgcttttctctgcagcacgatttctcttttgataatgccctttagggcacaactagttatcagtaactgaatgtatcttaatcattatggctgcttctgttttttcattaacaaaggttattcatatgttagcatatagtttctttgcacccactatttatgtctgaatcatttgtcacaagagagtgtgtgctgatgagattgtaagtttgtgtgtttaaacttttttttgagcgagggaagaaaaagctgtatgcatttcattgctgtctacaggtttctttcagattatgttcatgggtttgtgtgtatacaatatgaagaatgatctgaagtaattgtgctgtatttatgtttattcaccagtctttgatt

SEQ ID NO: 23367 - DNA, 1602 bp, Homo sapiens
  misc_feature 1..1602: note = ENST00000559775
  source 1..1602: mol_type = unassigned DNA; mol_type = unassigned DNA
ggagtacagcttcaagtgaagttaatctgaggtgaagcaaacagaaaattgtggaggttttgttggaatgaatctgaagtctgctgcagtaaaacacagaaggctttaaaatgttttcttgcataaaattcaaaacttttaagtagctgcttatgagaatagggaaggcagaaagctaatgtctgtctcaagatacaggacagctgtttgctcatcaacctcaactgtgtgtgcaactgaggaacatggctcaagaaactaatcacagccaagtgcctatgctttgttccactggctgtggattttatggaaaccctcgtacaaatggcatgtgttcagtatgctataaagaacatcttcaaagacagaatagtagtaatggtagaataagcccacctgcaacctctgtcagtagtctgtctgaatctttaccagttcaatgcacagatggcagtgtgccagaagcccagtcagcattagactctacatcttcatctatgcagcccagccctgtatcaaatcagtcacttttatcagaatctgtagcatcttctcaattggacagtacatctgtggacaaagcagtacctgaaacagaagatgtgcaggcttcagtatcagacacagcacagcagccatctgaagagcaaagcaagtctcttgaaaaaccgaaacaaaaaaagaatcgctgtttcatgtgcaggaagaaagtgggacttactgggtttgaatgccggtgtggaaatgtttactgtggtgtacaccgttactcagatgtacacaattgctcttacaattacaaagccgatgctgctgagaaaatcagaaaagaaaatccagtagttgttggtgaaaagatccaaaagatttgaactcctgctggaatacaaaattcttgagcatctgcaaactaaaaattgacttgaggttttttttttcctagtcattgggaatgtagagcagtgtatcttgcatgtcatcggaagaatagatttttgttttggttttgttttgaaaatgactctgaacatttatttccattgcaatttctgtggctgaggagacttaaactttacaagtattatccttttaagatcattttaattttagttgagtgcagagggcttttataacaaacgtgcagaaattttggagggctgtgatttttccagtattaaacatgcatgcattaatcttgcagtttattttctcattgtgtatgtatatatcgcttttctctgcagcacgatttctcttttgataatgccctttagggcacaactagttatcagtaactgaatgtatcttaatcattatggctgcttctgttttttcattaacaaaggttattcatatgttagcatatagtttctttgcacccactatttatgtctgaatcatttgtcacaagagagtgtgtgctgatgagattgtaagtttgtgtgtttaaacttttttttgagcgagggaagaaaaagctgtatgcatttcattgctgtctacaggtttctttcagattatgttcatgggtttgtgtgtatacaatatgaagaatgatctgaagtaattgtgctgtatttatgtttattcaccagtctttga

SEQ ID NO: 23368 - DNA, 780 bp, Homo sapiens
  misc_feature 1..780: note = ENST00000558688
  source 1..780: mol_type = unassigned DNA; mol_type = unassigned DNA
tacagcttcaagtgaagttaatctgaggtgaagcaaacagaaaattgtggaggttttgttggtgtgcaactgaggaacatggctcaagaaactaatcacagccaagtgcctatgctttgttccactggctgtggattttatggaaaccctcgtacaaatggcatgtgttcagtatgctataaagaacatcttcaaagacagaatagtagtaatggtagaataagcccacctgcaacctctgtcagtagtctgtctgaatctttaccagttcaatgcacagatggcagtgtgccagaagcccagtcagcattagactctacatcttcatctatgcagcccagccctgtatcaaatcagtcacttttatcagaatctgtagcatcttctcaattggacagtacatctgtggacaaagcagtacctgaaacagaagatgtgcaggcttcagtatcagacacagcacagcagccatctgaagagcaaagcaagtctcttgaaaaaccgaaacaaaaaaagaatcgctgtttcatgtgcaggaagaaagtgggacttactggtaaggacctaaatcaaatgtttaaaattaaaatgatgttttataataatgcatagcttactgttgttgacttcaattaagattgttcctgttcccttgagagttaatattggatatacttcaccttctgaattttcttaaggaaataaaaatagctttgattatacacctaaaagtgaaatgaatagcttttttaaaaaaagttttatttcagttgaatttag

SEQ ID NO: 23369 - DNA, 568 bp, Homo sapiens
  misc_feature 1..568: note = ENST00000560392
  source 1..568: mol_type = unassigned DNA; mol_type = unassigned DNA
acagcttcaagtgaagttaatctgaggtgaagcaaacagaaaattgtggaggttttgttggtggagataagtaattaacatttcgaaacaggaaatgaaaggatttatatttttaaaagctataggaatgaatctgaagtctgctgcagtaaaacacagaaggctttaaaatgttttcttgcataaaattcaaaacttttaagtagctgcttatgagaatagggaaggcagaaagctaatgtctgtctcaagatacaggacagctgtttgctcatcaacctcaactgtgtgtgcaactgaggaacatggctcaagaaactaatcacagccaagtgcctatgctttgttccactggctgtggattttatggaaaccctcgtacaaatggcatgtgttcagtatgctataaagaacatcttcaaagacagaatagtagtaatggtagaataagcccacctgcaacctctgtcagtagtctgtctgaatctttaccagttcaatgcacagatggcagtgtgccagaagcccagtcagcattagactctacatcttcatctatgcagcccag

SEQ ID NO: 23370 - DNA, 560 bp, Homo sapiens
  misc_feature 1..560: note = ENST00000560976
  source 1..560: mol_type = unassigned DNA; mol_type = unassigned DNA
acagcttcaagtgaagttaatctgaggtgaagcaaacagaaaattgtggaggttttgttggtggagataagtaattaacatttcgaaacaggaaatgaaaggatttatatttttaaaagctataggtgtgcaactgaggaacatggctcaagaaactaatcacagccaagtgcctatgctttgttccactggctgtggattttatggaaaccctcgtacaaatggcatgtgttcagtatgctataaagaacatcttcaaagacagaatagtagtaatggtagaataagcccacctgcaacctctgtcagtagtctgtctgaatctttaccagttcaatgcacagatggcagtgtgccagaagcccagtcagcattagactctacatcttcatctatgcagcccagccctgtatcaaatcagtcacttttatcagaatctgtagcatcttctcaattggacagtacatctgtggacaaagcagtacctgaaacagaagatgtgcaggcttcagtatcagacacagcacagcagccatctgaagagcaaagcaagtctcttg

SEQ ID NO: 23371 - DNA, 583 bp, Homo sapiens
  misc_feature 1..583: note = ENST00000558272
  source 1..583: mol_type = unassigned DNA; mol_type = unassigned DNA
agcttcaagtgaagttaatctgaggtgaagcaaacagaaaattgtggaggttttgttgatactttggtgttgaacatttgggatagaagagagaaatttaaaattaaaaattttccatatttctatcacaaatattggtaatttgacaacatgtaatttgattgtcgtcttaataaaatttaatgttattgctaccaaatagagataaaggaatgaatctgaagtctgctgcagtaaaacacagaaggctttaaaatgttttcttgcataaaattcaaaacttttaagtagctgcttatgagaatagggaaggcagaaagctaatgtctgtctcaagatacaggacagctgtttgctcatcaacctcaactgtgtgtgcaactgaggaacatggctcaagaaactaatcacagccaagtgcctatgctttgttccactggctgtggattttatggaaaccctcgtacaaatggcatgtgttcagtatgctataaagaacatcttcaaagacagaatagtagtaatggtagaataagcccacctgcaacctctgtcagtagtctgtctgaatctttaccagttc

SEQ ID NO: 23372 - DNA, 566 bp, Homo sapiens
  misc_feature 1..566: note = ENST00000558390
  source 1..566: mol_type = unassigned DNA; mol_type = unassigned DNA
agcttcaagtgaagttaatctgaggtgaagcaaacagaaaattgtggaggttttgttggtggagataagtaattaacatttcgaaacaggaaatgaaaggatttatatttttaaaagctataggtgtgcaactgaggaacatggctcaagaaactaatcacagccaagtgcctatgctttgttccactggctgtggattttatggaaaccctcgtacaaatggcatgtgttcagtatgctataaagaacatcttcaaagacagaatagtagtaatggtagaataagcccacctgcaacctctgtcagtagtctgtctgaatctttaccagttcaatgcacagatggcagtgtgccagaagcccagtcagcattagactctacatcttcatctatgcagcccagccctgtatcaaatcagtcacttttatcagaatctgtagcatcttctcaattggacagtacatctgtggacaaagcagtacctgaaacagaagatgtgcaggcttcagtatcagacacagcacagcagccatctgaagagcaaagcaagtctcttgaaaaaccg

SEQ ID NO: 23373 - DNA, 532 bp, Homo sapiens
  misc_feature 1..532: note = ENST00000557793
  source 1..532: mol_type = unassigned DNA; mol_type = unassigned DNA
gcttcaagtgaagttaatctgaggtgaagcaaacagaaaattgtggaggttttgttggtgtgcaactgaggaacatggctcaagaaactaatcacagccaagtgcctatgctttgttccactggctgtggattttatggaaaccctcgtacaaatggcatgtgttcagtatgctataaagaacatcttcaaagacagaatagtagtaatggtagaataagcccacctggtaagtaattctagtgaaacccgtctatattcataattgaaatacaagtggatatttcggtatacccaatacctttttctgctctcacattatatttatattaccatattcatatcagtaaaatttctcattacacattgtgattataatcagtagtgaggagttaggaatgagtatcatcactcattgaaaatactgtaaattcataccataatcttatttctgtggctgtggaattctgttactttatttagaggggacacctcaagtgtcttggaaagtaagggaagagagtgataaaaga

SEQ ID NO: 23374 - DNA, 741 bp, Homo sapiens
  misc_feature 1..741: note = ENST00000558997
  source 1..741: mol_type = unassigned DNA; mol_type = unassigned DNA
cagatactttggtgttgaacatttgggatagaagagagaaatttaaaattaaaaattttccatatttctatcacaaatattggaatgaatctgaagtctgctgcagtaaaacacagaaggctttaaaatgttttcttgcataaaattcaaaacttttaagtagctgcttatgagaatagggaaggcagaaagctaatgtctgtctcaagatacaggacagctgtttgctcatcaacctcaactgtgtgtgcaactgaggaacatggctcaagaaactaatcacagccaagtgcctatgctttgttccactggctgtggattttatggaaaccctcgtacaaatggcatgtgttcagtatgctataaagaacatcttcaaagacagaatagtagtaatggtagaataagcccacctgcaacctctgtcagtagtctgtctgaatctttaccagttcaatgcacagatggcagtgtgccagaagcccagtcagcattagactctacatcttcatctatgcagcccagccctgtatcaaatcagtcacttttatcagaatctgtagcatcttctcaattggacagtacatctgtggacaaagcagtacctgaaacagaagatgtgcaggcttcagtatcagacacagcacagcagccatctgaagagcaaagcaagtctcttgaaaaaccgaaacaaaaaaagaatcgctgtttcatgtgcaggaagaaagtgggacttactgg

SEQ ID NO: 23375 - DNA, 909 bp, Homo sapiens
  misc_feature 1..909: note = ENST00000558087
  source 1..909: mol_type = unassigned DNA; mol_type = unassigned DNA
cagatactttggtgttgaacatttgggatagaagagagaaatttaaaattaaaaattttccatatttctatcacaaatattggtgtgcaactgaggaacatggctcaagaaactaatcacagccaagtgcctatgctttgttccactggctgtggattttatggaaaccctcgtacaaatggcatgtgttcagtatgctataaagaacatcttcaaagacagaatagtagtaatggtagaataagcccacctgcaacctctgtcagtagtctgtctgaatctttaccagttcaatgcacagatggcagtgtgccagaagcccagtcagcattagactctacatcttcatctatgcagcccagccctgtatcaaatcagtcacttttatcagaatctgtagcatcttctcaattggacagtacatctgtggacaaagcagtacctgaaacagaagatgtgcaggcttcagtatcagacacagcacagcagccatctgaagagcaaagcaagtctcttgaaaaaccgaaacaaaaaaagaatcgctgtttcatgtgcaggaagaaagtgggacttactgggtttgaatgccggtgtggaaatgtttactgtggtgtacaccgttactcagatgtacacaattgctcttacaattacaaagccgatgctgctgagaaaatcagaaaagaaaatccagtagttgttggtgaaaagatccaaaagatttgaactcctgctggaatacaaaattcttgagcatctgcaaactaaaaattgacttgaggttttttttttcctagtcattgggaatgtagagcagtgtatcttgcatgtcatcggaagaatagatttttgttttggttttgttttgaaaatgactctgaacatttatttccattgcaatttctgtgg

SEQ ID NO: 23376 - DNA, 621 bp, Homo sapiens
  misc_feature 1..621: note = ENST00000558724
  source 1..621: mol_type = unassigned DNA; mol_type = unassigned DNA
gaagagagaaatttaaaattaaaaattttccatatttctatcacaaatattggtaatttgacaacatgtaatttgattgtcgtcttaataaaatttaatgttattgctaccaaatagagataaaggtgtgcaactgaggaacatggctcaagaaactaatcacagccaagtgcctatgctttgttccactggctgtggattttatggaaaccctcgtacaaatggcatgtgttcagtatgctataaagaacatcttcaaagacagaatagtagtaatggtagaataagcccacctgcaacctctgtcagtagtctgtctgaatctttaccagttcaatgcacagatggcagtgtgccagaagcccagtcagcattagactctacatcttcatctatgcagcccagccctgtatcaaatcagtcacttttatcagaatctgtagcatcttctcaattggacagtacatctgtggacaaagcagtacctgaaacagaagatgtgcaggcttcagtatcagacacagcacagcagccatctgaagagcaaagcaagtctcttgaaaaaccgaaacaaaaaaagaatcgctgtttcatgtgcaggaagaaagtgggacttactgg

SEQ ID NO: 23377 - DNA, 470 bp, Homo sapiens
  misc_feature 1..470: note = ENST00000561017
  source 1..470: mol_type = unassigned DNA; mol_type = unassigned DNA
tgtcagtagtctgtctgaatctttaccagttcaatgcacagatggcagtgtgccagaagcccagtcagcattagactctacatcttcatctatgcagcccagccctgtatcaaatcagtcacttttatcagaatctgtagcatcttctcaattggacagtacatctgtggacaaagcagtacctgaaacagaagatgtgcagggtttgtatatgaactagcatgtattttgttatttgagtattataggccagacactatcctaggtgcatgtataaaaaaattgccagcttaaaatacatgtttttctgttttccctatgaacacaatactttatatctttaagtatttaattaacatgttggggagccatttcacacttacatgtaattttatcatcagcataaatgttgcaaattcaaaatttgtttagtttggaaaatataattaaatgaatgtgtggcagtgtta

SEQ ID NO: 23378 - DNA, 2594 bp, Homo sapiens
  misc_feature 1..2594: note = ENST00000557983
  source 1..2594: mol_type = unassigned DNA; mol_type = unassigned DNA
ttgtcgaatgtctgctatgtggttggagacactgggataggcactgataatgggataaataggaccgatgtctcccctcaaagaattcaaagttaaaccaagttaagccaatgagggaattttaatatgaaaagtgctatacacagggtttcccaccccaaggttgttggagaggcagtggaggaagagctgattatataagcttaaacaagaaaaacaagttagagttagcctgataaaaagagggacaggaggggcatagaaagagtattttgtatggaaagcacaacttatacaagagcccagaggcaaaagagagtttgatatgtccagggaaactgcaagtccttcagtatggctgaatcatggagtactgttgaggaatagtgagagatgaggctagagaaagaaggatgaagaaaatcatgaaggacctctgggctttatcctggggggtagttgggagccattgaggaattctaaacatcagagggaacaccattagattttcacttaaggcagatgattggatgcaatgtgtgaagcatggattgtagagggaactcatgaggtgcccagtatttggaaaaggtgttaaggaaaatcagagtgagaagctacagagaattgagacaaggaaagggtatttgaccttggtcttgaaaaagaggaggacctagatcaaatggggaaaaaggaaaccctttggaatagattctaagaagtgtgagcaaaggtacatggcatattcccagtgtagattaatggagcagtggatccctggggaaagtctagttggggataaaactggagaggttaagaatttgatccatgggaaattccaccattttagagcaaaatgtcacgtctgcaaggtcatattatatgattctgactctggcgacagcattcatgagggctagagtagttagcaactggagggaggcatgttaagatttcagagtagtaatttaacccgaatcttggtaaatctggctttggtttccatacataaatgcatcaacttattatcttacaacattttaaagcttctttgcttcaatttgccttatttctaacatttaaagtgcttttatgtgaaacattctgggaactttaaacatacttaatattccacagaatcttggtttcaccttttccctcctcgttctctgagagacctatgtcattctgaccccgaacaatattaagaactatgcatatggctattgtcttgcacactcccttagaatattcaagtagtatttgtttatgtgccttttattgattaaatttgtagttactagaaaaattagaaagtacagttaaaacctaaagaaagtctataaaaccactgttaacatatcattacatattctagattattttctacatgcatatatacatacatttaacaaaaaggggtcatatttttgtaaacaactttgtaatttaatgactagttttctgtgctaataaattcctcagtatcctctgaataatagactagggagggtgggatgaggaatagcaaaatcttacagaataattaaattttgccaccttcgtatttttgttagcttcagtatcagacacagcacagcagccatctgaagagcaaagcaagtctcttgaaaaaccgaaacaaaaaaagaatcgctgtttcatgtgcaggaagaaagtgggacttactgggtttgaatgccggtgtggaaatgtttactgtggtgtacaccgttactcagatgtacacaattgctcttacaattacaaagccgatgctgctgagaaaatcagaaaagaaaatccagtagttgttggtgaaaagatccaaaagatttgaactcctgctggaatacaaaattcttgagcatctgcaaactaaaaattgacttgaggttttttttttcctagtcattgggaatgtagagcagtgtatcttgcatgtcatcggaagaatagatttttgttttggttttgttttgaaaatgactctgaacatttatttccattgcaatttctgtggctgaggagacttaaactttacaagtattatccttttaagatcattttaattttagttgagtgcagagggcttttataacaaacgtgcagaaattttggagggctgtgatttttccagtattaaacatgcatgcattaatcttgcagtttattttctcattgtgtatgtatatatcgcttttctctgcagcacgatttctcttttgataatgccctttagggcacaactagttatcagtaactgaatgtatcttaatcattatggctgcttctgttttttcattaacaaaggttattcatatgttagcatatagtttctttgcacccactatttatgtctgaatcatttgtcacaagagagtgtgtgctgatgagattgtaagtttgtgtgtttaaacttttttttgagcgagggaagaaaaagctgtatgcatttcattgctgtctacaggtttctttcagattatgttcatgggtttgtgtgtatacaatatgaagaatgatctgaagtaattgtgctgtatttatgtttattcaccagtctttgattaaataaaaaggaaaaccag

SEQ ID NO: 23379 - DNA, 1659 bp, Homo sapiens
  misc_feature 1..1659: note = ENST00000618205
  source 1..1659: mol_type = unassigned DNA; mol_type = unassigned DNA
agcgggttgcgagcggttggctggcgggggtcggaagggccccgggcacactggggcgcgtcagttccccgcctcctccgagtctcaggaatgaatctgaagtctgctgcagtaaaacacagaaggctttaaaatgttttcttgcataaaattcaaaacttttaagtagctgcttatgagaatagggaaggcagaaagctaatgtctgtctcaagatacaggacagctgtttgctcatcaacctcaactgtgtgtgcaactgaggaacatggctcaagaaactaatcacagccaagtgcctatgctttgttccactggctgtggattttatggaaaccctcgtacaaatggcatgtgttcagtatgctataaagaacatcttcaaagacagaatagtagtaatggtagaataagcccacctgcaacctctgtcagtagtctgtctgaatctttaccagttcaatgcacagatggcagtgtgccagaagcccagtcagcattagactctacatcttcatctatgcagcccagccctgtatcaaatcagtcacttttatcagaatctgtagcatcttctcaattggacagtacatctgtggacaaagcagtacctgaaacagaagatgtgcaggcttcagtatcagacacagcacagcagccatctgaagagcaaagcaagtctcttgaaaaaccgaaacaaaaaaagaatcgctgtttcatgtgcaggaagaaagtgggacttactgggtttgaatgccggtgtggaaatgtttactgtggtgtacaccgttactcagatgtacacaattgctcttacaattacaaagccgatgctgctgagaaaatcagaaaagaaaatccagtagttgttggtgaaaagatccaaaagatttgaactcctgctggaatacaaaattcttgagcatctgcaaactaaaaattgacttgaggttttttttttcctagtcattgggaatgtagagcagtgtatcttgcatgtcatcggaagaatagatttttgttttggttttgttttgaaaatgactctgaacatttatttccattgcaatttctgtggctgaggagacttaaactttacaagtattatccttttaagatcattttaattttagttgagtgcagagggcttttataacaaacgtgcagaaattttggagggctgtgatttttccagtattaaacatgcatgcattaatcttgcagtttattttctcattgtgtatgtatatatcgcttttctctgcagcacgatttctcttttgataatgccctttagggcacaactagttatcagtaactgaatgtatcttaatcattatggctgcttctgttttttcattaacaaaggttattcatatgttagcatatagtttctttgcacccactatttatgtctgaatcatttgtcacaagagagtgtgtgctgatgagattgtaagtttgtgtgtttaaacttttttttgagcgagggaagaaaaagctgtatgcatttcattgctgtctacaggtttctttcagattatgttcatgggtttgtgtgtatacaatatgaagaatgatctgaagtaattgtgctgtatttatgtttattcaccagtctttgattaaataaaaaggaaaaccagaatgctcccttgt

SEQ ID NO: 23380 - DNA, 1653 bp, Homo sapiens
  misc_feature 1..1653: note = ENST00000616533
  source 1..1653: mol_type = unassigned DNA; mol_type = unassigned DNA
cagatactttggtgttgaacatttgggatagaagagagaaatttaaaattaaaaattttccatatttctatcacaaatattggaatgaatctgaagtctgctgcagtaaaacacagaaggctttaaaatgttttcttgcataaaattcaaaacttttaagtagctgcttatgagaatagggaaggcagaaagctaatgtctgtctcaagatacaggacagctgtttgctcatcaacctcaactgtgtgtgcaactgaggaacatggctcaagaaactaatcacagccaagtgcctatgctttgttccactggctgtggattttatggaaaccctcgtacaaatggcatgtgttcagtatgctataaagaacatcttcaaagacagaatagtagtaatggtagaataagcccacctgcaacctctgtcagtagtctgtctgaatctttaccagttcaatgcacagatggcagtgtgccagaagcccagtcagcattagactctacatcttcatctatgcagcccagccctgtatcaaatcagtcacttttatcagaatctgtagcatcttctcaattggacagtacatctgtggacaaagcagtacctgaaacagaagatgtgcaggcttcagtatcagacacagcacagcagccatctgaagagcaaagcaagtctcttgaaaaaccgaaacaaaaaaagaatcgctgtttcatgtgcaggaagaaagtgggacttactgggtttgaatgccggtgtggaaatgtttactgtggtgtacaccgttactcagatgtacacaattgctcttacaattacaaagccgatgctgctgagaaaatcagaaaagaaaatccagtagttgttggtgaaaagatccaaaagatttgaactcctgctggaatacaaaattcttgagcatctgcaaactaaaaattgacttgaggttttttttttcctagtcattgggaatgtagagcagtgtatcttgcatgtcatcggaagaatagatttttgttttggttttgttttgaaaatgactctgaacatttatttccattgcaatttctgtggctgaggagacttaaactttacaagtattatccttttaagatcattttaattttagttgagtgcagagggcttttataacaaacgtgcagaaattttggagggctgtgatttttccagtattaaacatgcatgcattaatcttgcagtttattttctcattgtgtatgtatatatcgcttttctctgcagcacgatttctcttttgataatgccctttagggcacaactagttatcagtaactgaatgtatcttaatcattatggctgcttctgttttttcattaacaaaggttattcatatgttagcatatagtttctttgcacccactatttatgtctgaatcatttgtcacaagagagtgtgtgctgatgagattgtaagtttgtgtgtttaaacttttttttgagcgagggaagaaaaagctgtatgcatttcattgctgtctacaggtttctttcagattatgttcatgggtttgtgtgtatacaatatgaagaatgatctgaagtaattgtgctgtatttatgtttattcaccagtctttgattaaataaaaaggaaaaccagaatgctcccttgt

SEQ ID NO: 23381 - DNA, 1729 bp, Homo sapiens
  misc_feature 1..1729: note = ENST00000613266
  source 1..1729: mol_type = unassigned DNA; mol_type = unassigned DNA
aataattagcgggcgggcggggcccgcgcgtcagccgcgggagccggccaatccagtggctctcctccgcggtcgcgtcataggccgaacaaccaaacagaaaagtttaataaacagcggacggaggggccggcggtggcggagccggagcaagcaggggttcggcggcattacctgtacccattcaccggcggctaccggcggcggcgcgcagcgtgtcaggcggagagacccgccgccagatactttggtgttgaacatttgggatagaagagagaaatttaaaattaaaaattttccatatttctatcacaaatattggtgtgcaactgaggaacatggctcaagaaactaatcacagccaagtgcctatgctttgttccactggctgtggattttatggaaaccctcgtacaaatggcatgtgttcagtatgctataaagaacatcttcaaagacagaatagtagtaatggtagaataagcccacctgcaacctctgtcagtagtctgtctgaatctttaccagttcaatgcacagatggcagtgtgccagaagcccagtcagcattagactctacatcttcatctatgcagcccagccctgtatcaaatcagtcacttttatcagaatctgtagcatcttctcaattggacagtacatctgtggacaaagcagtacctgaaacagaagatgtgcaggcttcagtatcagacacagcacagcagccatctgaagagcaaagcaagtctcttgaaaaaccgaaacaaaaaaagaatcgctgtttcatgtgcaggaagaaagtgggacttactgggtttgaatgccggtgtggaaatgtttactgtggtgtacaccgttactcagatgtacacaattgctcttacaattacaaagccgatgctgctgagaaaatcagaaaagaaaatccagtagttgttggtgaaaagatccaaaagatttgaactcctgctggaatacaaaattcttgagcatctgcaaactaaaaattgacttgaggttttttttttcctagtcattgggaatgtagagcagtgtatcttgcatgtcatcggaagaatagatttttgttttggttttgttttgaaaatgactctgaacatttatttccattgcaatttctgtggctgaggagacttaaactttacaagtattatccttttaagatcattttaattttagttgagtgcagagggcttttataacaaacgtgcagaaattttggagggctgtgatttttccagtattaaacatgcatgcattaatcttgcagtttattttctcattgtgtatgtatatatcgcttttctctgcagcacgatttctcttttgataatgccctttagggcacaactagttatcagtaactgaatgtatcttaatcattatggctgcttctgttttttcattaacaaaggttattcatatgttagcatatagtttctttgcacccactatttatgtctgaatcatttgtcacaagagagtgtgtgctgatgagattgtaagtttgtgtgtttaaacttttttttgagcgagggaagaaaaagctgtatgcatttcattgctgtctacaggtttctttcagattatgttcatgggtttgtgtgtatacaatatgaagaatgatctgaagtaattgtgctgtatttatgtttattcaccagtctttgattaaataaaaaggaaaaccagaatgctcccttgt

SEQ ID NO: 23382 - DNA, 14019 bp, Homo sapiens
  misc_feature 1..14019: note = ENST00000521891
  source 1..14019: mol_type = unassigned DNA; mol_type = unassigned DNA
attcccagagtgcatatcgggaatagacacacaaagacatgcgcactcaacttaatcagccatttttttaaacagggctaaaacgataataattagcagaataaagacatatcggattttcatttcctttcctccttttcccaaccccttcacaaccaaacagcgagaccgcggtcggcacatgctttaactcctcccggacccccgaggaccgctccatgccccccactttctgctccagcgtttttattttcacccaataaagttcgaggattattttttattttttttgtttttttaatgaaccctctcgttttacttggatgtgatcagctgtaagtaaaataaaagcaaaacaaaaaagaggcgaagatcgagtaggaactgcaggggaaatggaaagtccctgacaggctggatgaaatgagatccccatgtagcaattgccatggaaacctgtgactcccctcctatctcaaggcaggaaaatgggcagagcacatcaaagctatgtggaacgacacaacttgataatgaggtgccagagaaagttgcagggatggagcctgacagggaaaacagctccacagatgacaacctgaaaacggatgagcgcaaaagtgaagccttgctgggtttcagcgttgagaatgcagctgccactcaggttacctcagcaaaggagataccctgcaacgaatgtgccacttcttttcccagtttacagaaatacatggaacaccactgccctaatgcccgccttcctgtcctgaaggatgacaacgagagcgagatcagcgagttagaggacagtgacgtggaaaatctaacaggggagatcgtttaccagcctgatgggtcagcatatataattgaggactccaaagaaagtgggcagaatgcacagactggggcaaatagcaaactcttttctacagcgatgttcctggactccctggcatctgctggagagaagagtgatcagtctgcttctgcacctatgtcgttctacccacagatcatcaacacttttcatatcgcttcatccctcgggaaaccatttacagccgatcaggctttcccaaatacctcagcattagcaggagttggtcctgtgttgcacagtttccgtgtctatgatctccgacacaagagagagaaagactatctaaccagtgatggctcagccaaaaactcctgtgtgtccaaagatgtccctaacaatgtggacttgtccaaattcgatggttgtgttagcgatgggaaaaggaaacctgttttaatgtgtttcttgtgcaagttgtcttttggttatatcaggtcatttgtaacccatgctgtgcatgatcatcggatgaccctcaatgacgaggagcagaagctcctcagtaataaatgcgtctccgccataatacaggggattggcaaagacaaagaacctcttataagctttctggaaccaaaaaaatccacttctgtttatccccatttttctactacaaacctcataggacccgatccaaccttccgcggtttatggagcgcttttcatgttgaaaatggtgactctttgccggctggctttgccttcttaaaaggaagcgcgagcacctcgagctcagcagagcagccgctggggattacccaaatgccaaaggctgaagtgaatctgggggggctgtctagtttagtagtgaacaccccaattacctctgtctccctcagccactcatcgtctgagtctagcaagatgtcagagagcaaagaccaagagaacaactgtgaaaggccaaaagaaagcaacgttttacacccaaacggggagtgccctgtcaaaagtgaacccactgaaccgggagatgaggatgaagaagatgcgtactccaatgaacttgatgacgaggaagtattaggtgaactcaccgatagtattggtaacaaagatttccctctcttaaaccaaagcatttctcctttatcatccagtgtgctaaaatttattgaaaagggtacctcgtcctcctcggcgactgtttctgatgacacagaaaagaaaaaacagactgctgctgttagggccagtggcagtgttgctagtaactatggcatcagtggcaaggactttgcagacgcaagtgccagtaaagacagtgccacagctgctcatccaagtgaaatagcccggggagacgaagacagttcagccactcctcaccagcatggctttaccccgagtactcctggcacaccagggcctggaggagacggctcaccgggcagtggcatcgagtgtccaaagtgcgacactgtgttggggtcttcgaggtctcttggtggtcatatgactatgatgcactcgaggaactcatgcaaaaccctcaaatgtcctaaatgtaactggcactacaaatatcagcagaccctggaggcccatatgaaggagaaacaccctgagccgggtggctcttgtgtttattgtaagactggacagcctcaccccaggcttgcccggggtgagagttacacgtgtggctataaacccttccgttgtgaggtttgtaactactctaccactaccaaaggcaacctcagtattcatatgcagtcggacaagcacctgaacaatgttcagaatctccaaaatggcaatggtgagcaggtgtttggccactctgccccagcccccaacaccagcctcagtggctgcggaacaccctctccgtccaaacccaaacagaaacccacctggcggtgtgaagtttgtgattatgaaaccaatgtcgccaggaacctccgaattcatatgaccagcgaaaagcacatgcataatatgatgcttttgcagcagaacatgaagcagatccagcataatctgcacttgggcctcgccccggcggaagcagagctttatcagtactacctagcccagaacataggcctgaccggaatgaagctggaaaaccctgccgaccctcagctgatgatcaatccattccagctggatccagcgacagcagcggctttggcaccagggctcgtaaataatgagctgccgcctgaaatccggcttgccagtggtcagctaatgggtgatgacctgtccctccttactgcaggagagctgtcaccttatatcagtgacccagcgctgaagctattccagtgtgctgtttgcaacaaattcacctctgacagcctggaggccctaagtgtgcatgtgagcagtgagcgctctctccctgaagaggaatggagggcagtaattggagatatctaccagtgcaagctctgcaactacaacactcagctcaaagccaacttccagctacactgcaagactgataaacatatgcagaaatatcaactggtggctcacattaaagaagggggcaaaagcaatgagtggaggttgaagtgtattgccattggcaaccctgttcacctaaaatgtaacgcctgtgactattacaccaacagtgtggataaattacgcttgcataccaccaatcacaggcacgaggcggccctgaagctctacaagcacttgcagaagcaagagggtgcagtgaatcccgaatcctgctattactactgtgccgtgtgtgattacaccaccaaggtcaagttgaatctggtacaacatgtccgttcggtgaagcatcagcagactgagggcctacggaagctccagctccaccagcaaggcctggcaccagaggaggacaacctcagtgagatcttttttgttaaagattgcccaccaaatgagcttgaaactgcctcattgggagccaggacttgtgatgatgatcttacagagcagcagttgagatcgacctcagaagaacaaagtgaggaggcagaaggagctattaagcctacagcagtggccgaggacgatgaaaaagacacaagtgagagagacaatagtgaaggcaaaaactctaataaagactctgggataatcacaccagagaaggaactaaaagttagtgtggcagggggtacccagccactcctgctggcaaaagaagaggatgttgcaacaaaaaggtcaaaacctacagaggacaataaattctgtcatgaacagttctatcaatgtccttattgtaactacaatagtagggaccaaagtcgtatccagatgcacgtcctatcacagcactcggtgcagccggtcatctgctgtcctctctgtcaggacgtcctcagcaacaaaatgcatctccaactgcatctgacgcatttgcacagtgtgtctccagactgtgtggagaagctgcttatgacagtgcctgtccctgatgtgatgatgccaaacagtatgctactgccagcagctgcctctgagaaatcagagcgggacacacctgcagccgtgacagctgaggggtctgggaaatattcaggtgaaagtccaatggatgacaaaagcatggcaggtctcgaggattcaaaggctaatgtggaagtaaagaatgaggagcagaaaccgactaaagaacccttggaagtctcagaatggaataaaaatagcagtaaggatgtgaaaatccccgacacactgcaagatcaattaaatgaacagcaaaaaaggcaaccgctctctgtttctgaccgtcatgtctacaagtatcgctgtaaccattgtagcttggctttcaaaactatgcagaagcttcagatacattcccagtatcatgcaattcgggctgcgacaatgtgtaacctctgccagcgcagtttccgtacattccaggctttaaaaaaacacttggaagcaggccaccctgaactgagtgaagctgaacttcaacagctatatgcctccttgcccgtgaatggagaactgtgggcagagagcgaaactatgtcccaggatgaccatggcctagagcaggaaatggagagagagtatgaggtggaccacgaagggaaagcaagtcctgtaggaagtgatagtagctctattccagatgacatgggctctgaaccaaagcggaccttaccttttagaaaagggcccaattttacgatggaaaaattccttgatccatctcgtccatataaatgtacagtgtgtaaagagtcattcacccaaaagaacattctcttggtccactataattcagtttctcacttgcataagctgaaaaaagttttgcaggaagcctccagtcctgtcccacaagaaaccaacagcaacacagataacaaaccctacaagtgcagcatctgcaatgttgcatacagccaaagctcaacattggaaatccacatgaggtctgtgctccaccagacaaaggctagggctgcaaagctggagcccagtggtcatgtggctggtgggcacagcattgcagcaaatgtcaacagccctggccaggggatgttagattccatgagtttagcagctgtaaacagcaaagatacccatttagatgccaaagaattaaataaaaagcaaactcctgatttaatctctgctcaacctgcacatcacccaccacagtcaccagcacaaattcagatgcaactacagcacgaattacaacagcaagccgcattctttcagcctcagtttctaaacccagcctttttgcctcattttcctatgaccccagaagcactgctgcagtttcagcagcctcagtttctctttccattttatatacctgggacggagttcagcttggggccagatttgggcttgccaggctctgccacatttgggatgcctggcatgacaggaatggctggctccttgcttgaagacctaaagcagcagattcaaacccaacatcacgttggtcaaactcaactccagatactacagcaacaagcacaacaataccaagccacacagccccagctgcagcctcaaaaacaacagcagcagccaccacctccacagcagcagcagcaacagcaggcaagcaaattattgaaacaagagcaaagtaacatagtgagtgcagactgccaaatcatgaaggatgtgccatcttataaggaggcagaagatatttctgaaaagccagaaaaaccaaagcaggaatttataagtgaaggtgaaggactcaaagaaggcaaagacacaaagaagcaaaaatccttggaaccatccatcccaccaccccgaatagcttcaggggccagaggaaatgctgccaaagcgttattggaaaactttggttttgaactggtcattcagtataacgaaaacaggcagaaggtacagaagaagggcaaaagtggtgaaggcgaaaacactgacaaactagaatgtggaacatgtggtaaattgttttccaatgttcttattttaaagagtcaccaagaacatgtacatgggcaattttttccatatgcagcgctagaaaaatttgctcgtcaatacagggaggcctatgacaagctttatccaatttctccatcttctccagaaacgccgcccccgccacctcctcctcctcccttgcctccggctcctccacagccttcttctatgggtcctgtaaagatccccaacacggtttctactcctctgcaagctccaccacccactcctcccccaccaccaccacctcctcctcctcctcctcctccccccccacctcctccaccttctgctcctccacaggtccaactgccggtttctctggacctgccgctctttccttccattatgatgcaacctgtgcaacaccctgcgcttcctccccagcttgccctgcagctgccacagatggacgcactctctgcagacctcacccaactttgccagcagcagctcggattagatcccaacttcttaagacattctcagttcaaacgcccacggacaagaattacagatgatcagctaaaaatcctgagggcttattttgacattaataattctccaagtgaagaacagatccaggaaatggcagagaaatctggcctctcccaaaaagttatcaaacactggtttagaaatacgctttttaaggaacgacagagaaataaagattcaccatacaacttcagtaaccctcctataacggttttagaagatatcagaattgatccacagcccacctctttagaacattacaaatctgatgcatcattcagtaaaaggtcttctagaacgagatttactgactaccagcttagggttctgcaagacttttttgacacaaacgcttacccaaaagatgatgaaatagaacaactctccactgttctcaatctgcctacccgggttattgttgtatggttccagaatgctcgtcagaaagcacgaaagagttatgagaatcaagcagaaacaaaagataatgaaaaaagagaactcactaatgaacggtacattcgaacaagcaacatgcagtaccagtgtaaaaagtgcaatgtggttttccccaggatctttgacttgattacgcatcagaaaaagcagtgttacaaggatgaagatgatgatgcccaagatgaaagccaaacagaagactccatggatgccactgatcaagtggtatacaagcattgcacagtgtctggccaaacggatgcagctaaaaacgctgctgcccctgcagcaagttctggctctgggaccagcacccccctgattccatcacccaaaccagaacctgagaagacttctccaaaacctgaatatcccgcagaaaagccaaagcagagtgacccctctcccccttctcaaggcaccaaaccagccctgccattagcatcgacttcctcggacccaccacaggcatccacagcccagccacagccacagccacagccaccaaaacaaccccaacttatcggaagacctccctcggcctctcaaacaccggtcccttccagtccactgcaaatttccatgacgtctctccagaacagtctacctccacagttactacaataccaatgtgatcagtgtacagttgccttcccaactctggaactctggcaggaacaccagcacatgcacttccttgctgctcaaaaccaattccttcactctccgttcttggaaaggcccatggacatgccctacatgatatttgaccccaacaatccgctgatgactggacaactgctgggcagttccctcactcaaatgccccctcaggccagttcctcccacaccacagcccccacaacggttgctgcttccctaaaaaggaaactagacgataaagaagataataattgcagtgaaaaagaaggagggaatagcggtgaagaccaacaccgagataaacgcttgagaaccacgatcaccccggaacagctggaaatactctatgaaaaatacttgctggattccaatcctaccagaaaaatgcttgatcatattgcccgcgaagtcgggctgaaaaaaagggtcgtgcaagtctggttccagaatacacgagcgcgggagaggaaaggccagttccgggcggtgggtccagcacagtctcataaacggtgtccgttttgccgagccctgtttaaagcaaagtcggccttagaaagccacattcgctctcggcactggaatgaaggaaagcaggcaggttacagcttgccaccaagccctttaatatccaccgaagatgggggagaaagcccacagaaatacatctattttgattacccatctttgccattaactaaaattgatctatcaagtgagaatgaattggcttctacagtgtcaacacctgttagtaaaacagcagagctgtcaccgaagaatcttttaagcccttcttcttttaaagcagagtgttctgaggatgtagagaatttaaatgcccctcctgctgaggctgggtatgatcaaaataaaaccgattttgatgagacttcatcgattaatacggcaatcagtgacgccaccaccggagacgagggaaacactgaaatggaaagcaccacaggaagttccggagatgtgaaaccggctttgtctcccaaagagccaaaaactctggatactctgccaaaacctgcaaccacacctaccacggaggtctgcgatgacaaatttctcttttctctcacaagcccatccatccatttcaatgacaaagatggcgaccacgaccaaagcttttacatcacagatgacccggatgacaacgccgaccgcagcgaaacgtccagcatagcggacccgagctccccaaatccattcggatccagcaatccctttaaatccaaaagtaatgatcggccgggtcacaagcgttttcgaacgcaaatgagcaatcttcaactcaaggttctcaaggcttgctttagtgactaccgaactccaaccatgcaagaatgtgaaatgttagggaatgagattggtctgcccaaacgcgtagtccaggtgtggttccaaaatgcaagggcaaaggaaaagaaatttaaaattaacatagggaagcctttcatgatcaatcaaggcggaacggaaggcaccaaaccagagtgtaccctctgcggggtgaagtactctgcccgcttgtccatcagagatcacattttctccaaacagcacatttcaaaagtgagggagaccgttggcagtcagctcgatcgggagaaagattacttggctccgaccacggttcggcagctgatggcacagcaagaacttgatcgtataaagaaagcttcagacgtgctgggcttgacggtacagcagccaggcatgatggacagcagttctctccacggcatcagcctgccaacagcctaccccggactccccggccttcctccagtccttctccccggaatgaacggtccatcctccttgccgggatttccacaaaattcaaacactttaacacctcccggtgcaggcatgcttgggtttcctacttcagctacttcgtctcctgccctgtctctcagcagtgcccccaccaaacctttgctgcagactccaccacctccaccacctcctcctcctcctcctccttcatcctctctgtcaggacagcagaccgagcaacagaacaaagaatctgagaaaaagcaaactaagccaaacaaggtgaaaaaaatcaaagaggaggaattagaggccaccaaacccgaaaaacaccccaaaaaagaggaaaaaatctcatctgctctttcagtgttgggcaaagttgtaggtgaaacacatgtcgatcctattcagttgcaggcattacagaatgcaattgctggtgacccagcttcctttataggcggacagttcttgccatactttatccctgggtttgcttcttattttacacctcagctccctggaacagtgcaggggggatacttcccacctgtctgtggcatggagagcctctttccttatggccctacaatgccccagacactggcaggtctgtccccaggtgcactgttgcagcagtaccaacagtatcagcagaacctgcaggagtccctgcaaaagcagcaaaagcaacagcaagaacagcagcagaaaccagttcaggcaaagacatccaaagtagaaagtgaccagccgcaaaactccaacgatgcttcagaaacaaaggaagacaaaagtactgctacagaaagcacaaaagaagaaccccagttagaatccaaaagtgcagacttttcagacacttacgttgttccattcgtcaagtatgagtttatatgcagaaagtgccagatgatgtttactgatgaagacgccgcagtaaatcatcaaaagtccttctgttatttcggtcagcctttgattgacccacaagagacagtgcttcgtgtcccagtcagcaaatatcagtgtcttgcctgtgatgtggctatcagtgggaatgaagcacttagccaacacctccagtcaagcttgcacaaagagaaaacaatcaaacaagcaatgagaaatgccaaagagcatgttagattattacctcactcagtctgctcccctaatcctaacaccacatctacctcgcagtctgcagcttcttctaataacacctatcctcatctttcttgcttctccatgaagtcctggcctaatatccttttccaagcgtctgccaggagagctgcttctcccccttcttctcctccttccctttccttgccttcaacggttacctcaagtttgtgcagcacctcaggggttcaaacctcactacccacagaaagttgttcagatgagtctgacagtgagctgagccagaagctagaagacttagataattctttggaagtgaaggctaagcctgcttctggcctagatggtaatttcaatagcatccgaatggatatgttcagtgtgtaggagtgaagacaggatcccgtgcttaaaaaaataaaaaataaaaaaataaaaaaaaaataagactttaactgcagttccaaagcttctctaacccaaaaattacagtaccaaatgattgactcaggattgtttttcccatattgatatgctggcaatataggatggtatgtaatggacagaactgatgcagatggttgaatgcgcttgtactatatgctaaaatatggaaaaggaaaaaaaaatctcacaagttcttttggaacttgtttcaagccaaaaactctcaagaaagcaaattgcacctcagctggattgatttccaaatgctagcatgtactgtatgggaggatgatccagatgtttcaaagagaatttctcttagtttagttaggtgtaattcagtagctttaaattctcaggtcagaacataacatttctcatttgttaaaagcagcaagaagcctggtaaaactgtgacttttccccaaacgtcaatctttattagaaagcattttctaggtgtgtttagtgtacaaagagactttataacccttactggacaacacacagatccttgagctcacgctgcaggatagtacagttttaccgcagagggaatctggaacagtggaatcatgtgtctgccctgtgtattgcagtttgtattgccacaagctatatttataccagtgtcacccttttcttgtagaatatactaataatctgtgccaactctaccttctcacttttacctctgacgtcattctttttttctgaaagaggtaataattctagttttgatagactctgaggattatgtgaacaggacatttttcatttgtgaatttaatgctatactgtcaaggtacttgcttgtgtctgaactctagtgcacttatgattttgtagaccatgtgaaatttaataagataccttttttttcctttctttgtgtgtagtgcagcaacagtttggtctgcatttgttagaagtttaactcctaacaacccaaagacctatttaacaattggtgcataaatgaaagtagtactgtatacttgaaactgtttaagtacaagttgaacaaaaattatgaaaaggtatatttgcttctcgggaaagcaaagaagctgctttaaaaaataaaaaggggactaaaaatttgttttgtataaagaggttagccctgcgcacgtaggactgaattcagtgatatccctatacactgccatttagtggataggttattgtacttccattcatactctgggcacttgtgttgtattgttctgttacatactttttttaacctgttttgttttatcatatatgcattaaaagtattatctttatcaacatttgctgctactgtgttaacatttttgttttgcttgccatgaatttcaacttccaccacccagtgaattgatttataaattgctatgctttgctgtttttctgttgctgtggaacttaaagaatgtgaaagctgtcaaagggtattttacgaatcacttttgtgtttgatatagtaaaacaatgtgattcattccaaagtaacagaaggttatttgtaagaaagttaaaggcttgtgaacaaagaaagctaagctgttgtacatatttgtagttggctgtgcatggtacaaatttattaatatgaagaaatgcaaaatgtattgcttttgatatttctcttccgagatgaacaagtagcatgtaatgcaactgtttgacagtttaactcaagtcatgcttcaaactgttttaatgatcaaatcaagacacatttcattttacattttattattgtacagtttttgtttcggatgatgatcacagcaatctttattctatacattttatgtgaacttttttaatgtctttaatttggattttttttttttttagtattttaacatttattttaatcctgaagacacttttttgattgtgtttcgtaagagacaacatggcctcctaaggtgcaatcctgccgctatagtgagctaatgtcctgaatccaaaggcttcagaaaattgcttttgcctttttcatgaatgttaagcagcagcattgtgagatcgatctgtcctggcagttaacacgatgtgcaacagtgtgttagcatggaacagaacgcttttcacaaaacaaaggactgttttacaaatgattattccgacagtgtgtcgacataaacttttacaactgcacagcagccaaaaaaagaaaaaaaaaagaaaaaaaactttaactggatggacgttgttagggtgagaaataaaaggacagcctccaaaggttgagaatgagaattgttttttcctggatatcaaagggattatcacagcgcaatcattgtctacacaacatgtactctcaacgcctgggttacataggaaatgcaccctgaggttttaataaaagcccctatggctataactttaaataaactaaaccaaaaatgttattgatgttttatatatagagagtagtctcattagtttttgttactgtaatgtttgaagtctcaaatgcaccgtattacggtaaataacatggttttgaaaacttttttttattttgtcacagacctgttgtcatagttgaaatgatgtttattgtagatggtatttgaacttattcttctggaaatagttcatcaagtatgtttgttgctcattgtgatacattaaaaactgtatctacatattta

SEQ ID NO: 23383 - DNA, 614 bp, Homo sapiens
  misc_feature 1..614: note = ENST00000517683
  source 1..614: mol_type = unassigned DNA; mol_type = unassigned DNA
gaatagacacacaaagacatgcgcactcaacttaatcagccatttttttaaacagggctaaaacgataataattagcagaataaagacatatcggattttcatttcctttcctccttttcccaaccccttcacaaccaaacagcgagaccgcggtcggcacatgctttaactcctcccggacccccgaggaccgctccatgccccccactttctgctccagcgtttttattttcacccaataaagttcgaggattattttttattttttttgtttttttaatgaaccctctcgttttacttggatgtgatcagctgtaagtaaaataaaagcaaaacaaaaaagaggcgaagatcgagtaggaactgcaggggaaatggaaacacttgcagaagcaagagggtgcagtgaatcccgaatcctgctattactactgtgccgtgtgtgattacaccaccaaggtcaagttgaatctggtacaacatgtccgttcggtgaagcatcagcagactgagggcctacggaagctccagctccaccagcaaggcctggcaccagaggaggacaacctcagtgagatcttttttgttaaagattgcccaccaaatgagcttg

SEQ ID NO: 23384 - DNA, 3612 bp, Homo sapiens
  misc_feature 1..3612: note = ENST00000458716
  source 1..3612: mol_type = unassigned DNA; mol_type = unassigned DNA
atttttttaaacagggctaaaacgataataattagcagaataaagacatatcggattttcatttcctttcctccttttcccaaccccttcacaaccaaacagcgagaccgcggtcggcacatgctttaactcctcccggacccccgaggaccgctccatgccccccactttctgctccagcgtttttattttcacccaataaagttcgaggattattttttattttttttgtttttttaatgaaccctctcgttttacttggatgtgatcagctgtaagtaaaataaaagcaaaacaaaaaagaggcgaagatcgagtaggaactgcaggggaaatggaaagtccctgacaggctggatgaaatgagatccccatgtagcaattgccatggaaacctgtgactcccctcctatctcaaggcaggaaaatgggcagagcacatcaaagctatgtggaacgacacaacttgataatgaggtgccagagaaagttgcagggatggagcctgacagggaaaacagctccacagatgacaacctgaaaacggatgagcgcaaaagtgaagccttgctgggtttcagcgttgagaatgcagctgccactcaggttacctcagcaaaggagataccctgcaacgaatgtgccacttcttttcccagtttacagaaatacatggaacaccactgccctaatgcccgccttcctgtcctgaaggatgacaacgagagcgagatcagcgagttagaggacagtgacgtggaaaatctaacaggggagatcgtttaccagcctgatgggtcagcatatataattgaggactccaaagaaagtgggcagaatgcacagactggggcaaatagcaaactcttttctacagcgatgttcctggactccctggcatctgctggagagaagagtgatcagtctgcttctgcacctatgtcgttctacccacagatcatcaacacttttcatatcgcttcatccctcgggaaaccatttacagccgatcaggctttcccaaatacctcagcattagcaggagttggtcctgtgttgcacagtttccgtgtctatgatctccgacacaagagagagaaagactatctaaccagtgatggctcagccaaaaactcctgtgtgtccaaagatgtccctaacaatgtggacttgtccaaattcgatggttgtgttagcgatgggaaaaggaaacctgttttaatgtgtttcttgtgcaagttgtcttttggttatatcaggtcatttgtaacccatgctgtgcatgatcatcggatgaccctcaatgacgaggagcagaagctcctcagtaataaatgcgtctccgccataatacaggggattggcaaagacaaagaacctcttataagctttctggaaccaaaaaaatccacttctgtttatccccatttttctactacaaacctcataggacccgatccaaccttccgcggtttatggagcgcttttcatgttgaaaatggtgactctttgccggctggctttgccttcttaaaaggaagcgcgagcacctcgagctcagcagagcagccgctggggattacccaaatgccaaaggctgaagtgaatctgggggggctgtctagtttagtagtgaacaccccaattacctctgtctccctcagccactcatcgtctgagtctagcaagatgtcagagagcaaagaccaagagaacaactgtgaaaggccaaaagaaagcaacgttttacacccaaacggggagtgccctgtcaaaagtgaacccactgaaccgggagatgaggatgaagaagatgcgtactccaatgaacttgatgacgaggaagtattaggtgaactcaccgatagtattggtaacaaagatttccctctcttaaaccaaagcatttctcctttatcatccagtgtgctaaaatttattgaaaagggtacctcgtcctcctcggcgactgtttctgatgacacagaaaagaaaaaacagactgctgctgttagggccagtggcagtgttgctagtaactatggcatcagtggcaaggactttgcagacgcaagtgccagtaaagacagtgccacagctgctcatccaagtgaaatagcccggggagacgaagacagttcagccactcctcaccagcatggctttaccccgagtactcctggcacaccagggcctggaggagacggctcaccgggcagtggcatcgagtgtccaaagtgcgacactgtgttggggtcttcgaggtctcttggtggtcatatgactatgatgcactcgaggaactcatgcaaaaccctcaaatgtcctaaatgtaactggcactacaaatatcagcagaccctggaggcccatatgaaggagaaacaccctgagccgggtggctcttgtgtttattgtaagactggacagcctcaccccaggcttgcccggggtgagagttacacgtgtggctataaacccttccgttgtgaggtttgtaactactctaccactaccaaaggcaacctcagtattcatatgcagtcggacaagcacctgaacaatgttcagaatctccaaaatggcaatggtgagcaggtgtttggccactctgccccagcccccaacaccagcctcagtggctgcggaacaccctctccgtccaaacccaaacagaaacccacctggcggtgtgaagtttgtgattatgaaaccaatgtcgccaggaacctccgaattcatatgaccagcgaaaagcacatgcataatatgatgcttttgcagcagaacatgaagcagatccagcataatctgcacttgggcctcgccccggcggaagcagagctttatcagtactacctagcccagaacataggcctgaccggaatgaagctggaaaaccctgccgaccctcagctgatgatcaatccattccagctggatccagcgacagcagcggctttggcaccagggctcggagagctgtcaccttatatcagtgacccagcgctgaagctattccagtgtgctgtttgcaacaaattcacctctgacagcctggaggccctaagtgtgcatgtgagcagtgagcgctctctccctgaagaggaatggagggcagtaattggagatatctaccagtgcaagctctgcaactacaacactcagctcaaagccaacttccagctacactgcaagactgataaacatatgcagaaatatcaactggtggctcacattaaagaagggggcaaaagcaatgagtggaggttgaagtgtattgccattggcaaccctgttcacctaaaatgtaacgcctgtgactattacaccaacagtgtggataaattacgcttgcataccaccaatcacaggcacgaggcggccctgaagctctacaaggtaagcagtgacatccatttccgttggcacagagtagaaaagggaattaactctttcagagcttggagcacaagtctccaacttaaggaaaaaaaaagagaaaaaacatcaaagggcagggggcacagtttctgattaacattataaaaacatattgaaatatatggaattgaaggctttatttataaagttttaccctatgtctcactt

SEQ ID NO: 23385 - DNA, 618 bp, Homo sapiens
  misc_feature 1..618: note = ENST00000520307
  source 1..618: mol_type = unassigned DNA; mol_type = unassigned DNA
atcgcccggcctctgggccagggacccgcgaggcggcggctgcttgctccgaacggaacgccgccgggtgtgcgttagaccagcggatagacgcccgcggcttggggtccctgacaggctggatgaaatgagatccccatgtagcaattgccatggaaacctgtgactcccctcctatctcaaggcaggaaaatgggcagagcacatcaaagctatgtggaacgacacaacttgataatgaggtgccagagaaagttgcagggatggagcctgacagggaaaacagctccacagatgacaacctgaaaacggatgagcgcaaaagtgaagccttgctgggtttcagcgttgagaatgcagctgccactcaggttacctcagcaaaggagataccctgcaacgaatgtgccacttcttttcccagtttacagaaatacatggaacaccactgccctaatgcccgccttcctgtcctgaaggatgacaacgagagcgagatcagcgagttagaggacagtgacgtggaaaatctaacaggggagatcgtttaccagcctgatgggtcagcatatataattgaggactccaaagaaagtgggcagaatgcacagactgggg

SEQ ID NO: 23386 - DNA, 524 bp, Homo sapiens
  misc_feature 1..524: note = ENST00000523885
  source 1..524: mol_type = unassigned DNA; mol_type = unassigned DNA
gtagtattatatttttagttgggtggatggatggaagagtgagagagaggctgcggctgccgctgccttttcgggtgttgcttagattaaggctgagacttggctgcgattgggacgcgacagtgacacgggcatcgatcgcttccattgagagcaatgcaaaaacacagcccgggtccctgacaggctggatgaaatgagatccccatgtagcaattgccatggaaacctgtgactcccctcctatctcaaggcaggaaaatgggcagagcacatcaaagctatgtggaacgacacaacttgataatgaggtgccagagaaagttgcagggatggagcctgacagggaaaacagctccacagatgacaacctgaaaacggatgagcgcaaaagtgaagccttgctgggtttcagcgttgagaatgcagctgccactcaggttacctcagcaaaggagataccctgcaacgaatgtgccacttcttttcccagtttacagaaatacatggaacaccactgccct

SEQ ID NO: 23387 - DNA, 613 bp, Homo sapiens
  misc_feature 1..613: note = ENST00000517585
  source 1..613: mol_type = unassigned DNA; mol_type = unassigned DNA
atagcacaatccccttgtttaaccaatacggaaaccaaagctcatggaaattcctgggaaacatcacataactacagagtgcagctgaagaaattgagtgtgtccctgacaggctggatgaaatgagatccccatgtagcaattgccatggaaacctgtgactcccctcctatctcaaggcaggaaaatgggcagagcacatcaaagctatgtggaacgacacaacttgataatgaggtgccagagaaagttgcagggatggagcctgacagggaaaacagctccacagatgacaacctgaaaacggatgagcgcaaaagtgaagccttgctgggtttcagcgttgagaatgcagctgccactcaggttacctcagcaaaggagataccctgcaacgaatgtgccacttcttttcccagtttacagaaatacatggaacaccactgccctaatgcccgccttcctgtcctgaaggatgacaacgagagcgagatcagcgagttagaggacagtgacgtggaaaatctaacaggggagatcgtttaccagcctgatgggtcagcatatataattgaggactccaaagaaagtgggcagaatgcacagactgggg

SEQ ID NO: 23388 - DNA, 561 bp, Homo sapiens
  misc_feature 1..561: note = ENST00000523809
  source 1..561: mol_type = unassigned DNA; mol_type = unassigned DNA
acggaaaccaaagctcatggaaattcctgggaaacatcacataactacagagtgcagctgaagaaattgagtgttcactgcctgataaagaaaaggtccctgacaggctggatgaaatgagatccccatgtagcaattgccatggaaacctgtgactcccctcctatctcaaggcaggaaaatgggcagagcacatcaaagctatgtggaacgacacaacttgataatgaggtgccagagaaagttgcagggatggagcctgacagggaaaacagctccacagatgacaacctgaaaacggatgagcgcaaaagtgaagccttgctgggtttcagcgttgagaatgcagctgccactcaggttacctcagcaaaggagataccctgcaacgaatgtgccacttcttttcccagtttacagaaatacatggaacaccactgccctaatgcccgccttcctgtcctgaaggatgacaacgagagcgagatcagcgagttagaggacagtgacgtggaaaatctaacaggggagatcgtttaccagcctgatgggtcagcatat

SEQ ID NO: 23389 - DNA, 12175 bp, Homo sapiens
  misc_feature 1..12175: note = ENST00000518282
  source 1..12175: mol_type = unassigned DNA; mol_type = unassigned DNA
ccctgacaggctggatgaaatgagatccccatgtagcaattgccatggaaacctgtgactcccctcctatctcaaggcaggaaaatgggcagagcacatcaaagctatgtggaacgacacaacttgataatgaggtgccagagaaagttgcagggatggagcctgacagggaaaacagctccacagatgacaacctgaaaacggatgagcgcaaaagtgaagccttgctgggtttcagcgttgagaatgcagctgccactcaggttacctcagcaaaggagataccctgcaacgaatgtgccacttcttttcccagtttacagaaatacatggaacaccactgccctaatgcccgccttcctgtcctgaaggatgacaacgagagcgagatcagcgagttagaggacagtgacgtggaaaatctaacaggggagatcgtttaccagcctgatgggtcagcatatataattgaggactccaaagaaagtgggcagaatgcacagactggggcaaatagcaaactcttttctacagcgatgttcctggactccctggcatctgctggagagaagagtgatcagtctgcttctgcacctatgtcgttctacccacagatcatcaacacttttcatatcgcttcatccctcgggaaaccatttacagccgatcaggctttcccaaatacctcagcattagcaggagttggtcctgtgttgcacagtttccgtgtctatgatctccgacacaagagagagaaagactatctaaccagtgatggctcagccaaaaactcctgtgtgtccaaagatgtccctaacaatgtggacttgtccaaattcgatggttgtgttagcgatgggaaaaggaaacctgttttaatgtgtttcttgtgcaagttgtcttttggttatatcaggtcatttgtaacccatgctgtgcatgatcatcggatgaccctcaatgacgaggagcagaagctcctcagtaataaatgcgtctccgccataatacaggggattggcaaagacaaagaacctcttataagctttctggaaccaaaaaaatccacttctgtttatccccatttttctactacaaacctcataggacccgatccaaccttccgcggtttatggagcgcttttcatgttgaaaatggtgactctttgccggctggctttgccttcttaaaaggaagcgcgagcacctcgagctcagcagagcagccgctggggattacccaaatgccaaaggctgaagtgaatctgggggggctgtctagtttagtagtgaacaccccaattacctctgtctccctcagccactcatcgtctgagtctagcaagatgtcagagagcaaagaccaagagaacaactgtgaaaggccaaaagaaagcaacgttttacacccaaacggggagtgccctgtcaaaagtgaacccactgaaccgggagatgaggatgaagaagatgcgtactccaatgaacttgatgacgaggaagtattaggtgaactcaccgatagtattggtaacaaagatttccctctcttaaaccaaagcatttctcctttatcatccagtgtgctaaaatttattgaaaagggtacctcgtcctcctcggcgactgtttctgatgacacagaaaagaaaaaacagactgctgctgttagggccagtggcagtgttgctagtaactatggcatcagtggcaaggactttgcagacgcaagtgccagtaaagacagtgccacagctgctcatccaagtgaaatagcccggggagacgaagacagttcagccactcctcaccagcatggctttaccccgagtactcctggcacaccagggcctggaggagacggctcaccgggcagtggcatcgagtgtccaaagtgcgacactgtgttggggtcttcgaggtctcttggtggtcatatgactatgatgcactcgaggaactcatgcaaaaccctcaaatgtcctaaatgtaactggcactacaaatatcagcagaccctggaggcccatatgaaggagaaacaccctgagccgggtggctcttgtgtttattgtaagactggacagcctcaccccaggcttgcccggggtgagagttacacgtgtggctataaacccttccgttgtgaggtttgtaactactctaccactaccaaaggcaacctcagtattcatatgcagtcggacaagcacctgaacaatgttcagaatctccaaaatggcaatggtgagcaggtgtttggccactctgccccagcccccaacaccagcctcagtggctgcggaacaccctctccgtccaaacccaaacagaaacccacctggcggtgtgaagtttgtgattatgaaaccaatgtcgccaggaacctccgaattcatatgaccagcgaaaagcacatgcataatatgatgcttttgcagcagaacatgaagcagatccagcataatctgcacttgggcctcgccccggcggaagcagagctttatcagtactacctagcccagaacataggcctgaccggaatgaagctggaaaaccctgccgaccctcagctgatgatcaatccattccagctggatccagcgacagcagcggctttggcaccagggctcggagagctgtcaccttatatcagtgacccagcgctgaagctattccagtgtgctgtttgcaacaaattcacctctgacagcctggaggccctaagtgtgcatgtgagcagtgagcgctctctccctgaagaggaatggagggcagtaattggagatatctaccagtgcaagctctgcaactacaacactcagctcaaagccaacttccagctacactgcaagactgataaacatatgcagaaatatcaactggtggctcacattaaagaagggggcaaaagcaatgagtggaggttgaagtgtattgccattggcaaccctgttcacctaaaatgtaacgcctgtgactattacaccaacagtgtggataaattacgcttgcataccaccaatcacaggcacgaggcggccctgaagctctacaagcacttgcagaagcaagagggtgcagtgaatcccgaatcctgctattactactgtgccgtgtgtgattacaccaccaaggtcaagttgaatctggtacaacatgtccgttcggtgaagcatcagcagactgagggcctacggaagctccagctccaccagcaaggcctggcaccagaggaggacaacctcagtgagatcttttttgttaaagattgcccaccaaatgagcttgaaactgcctcattgggagccaggacttgtgatgatgatcttacagagcagcagttgagatcgacctcagaagaacaaagtgaggaggcagaaggagctattaagcctacagcagtggccgaggacgatgaaaaagacacaagtgagagagacaatagtgaaggcaaaaactctaataaagactctgggataatcacaccagagaaggaactaaaagttagtgtggcagggggtacccagccactcctgctggcaaaagaagaggatgttgcaacaaaaaggtcaaaacctacagaggacaataaattctgtcatgaacagttctatcaatgtccttattgtaactacaatagtagggaccaaagtcgtatccagatgcacgtcctatcacagcactcggtgcagccggtcatctgctgtcctctctgtcaggacgtcctcagcaacaaaatgcatctccaactgcatctgacgcatttgcacagtgtgtctccagactgtgtggagaagctgcttatgacagtgcctgtccctgatgtgatgatgccaaacagtatgctactgccagcagctgcctctgagaaatcagagcgggacacacctgcagccgtgacagctgaggggtctgggaaatattcaggtgaaagtccaatggatgacaaaagcatggcaggtctcgaggattcaaaggctaatgtggaagtaaagaatgaggagcagaaaccgactaaagaacccttggaagtctcagaatggaataaaaatagcagtaaggatgtgaaaatccccgacacactgcaagatcaattaaatgaacagcaaaaaaggcaaccgctctctgtttctgaccgtcatgtctacaagtatcgctgtaaccattgtagcttggctttcaaaactatgcagaagcttcagatacattcccagtatcatgcaattcgggctgcgacaatgtgtaacctctgccagcgcagtttccgtacattccaggctttaaaaaaacacttggaagcaggccaccctgaactgagtgaagctgaacttcaacagctatatgcctccttgcccgtgaatggagaactgtgggcagagagcgaaactatgtcccaggatgaccatggcctagagcaggaaatggagagagagtatgaggtggaccacgaagggaaagcaagtcctgtaggaagtgatagtagctctattccagatgacatgggctctgaaccaaagcggaccttaccttttagaaaagggcccaattttacgatggaaaaattccttgatccatctcgtccatataaatgtacagtgtgtaaagagtcattcacccaaaagaacattctcttggtccactataattcagtttctcacttgcataagctgaaaaaagttttgcaggaagcctccagtcctgtcccacaagaaaccaacagcaacacagataacaaaccctacaagtgcagcatctgcaatgttgcatacagccaaagctcaacattggaaatccacatgaggtctgtgctccaccagacaaaggctagggctgcaaagctggagcccagtggtcatgtggctggtgggcacagcattgcagcaaatgtcaacagccctggccaggggatgttagattccatgagtttagcagctgtaaacagcaaagatacccatttagatgccaaagaattaaataaaaagcaaactcctgatttaatctctgctcaacctgcacatcacccaccacagtcaccagcacaaattcagatgcaactacagcacgaattacaacagcaagccgcattctttcagcctcagtttctaaacccagcctttttgcctcattttcctatgaccccagaagcactgctgcagtttcagcagcctcagtttctctttccattttatatacctgggacggagttcagcttggggccagatttgggcttgccaggctctgccacatttgggatgcctggcatgacaggaatggctggctccttgcttgaagacctaaagcagcagattcaaacccaacatcacgttggtcaaactcaactccagatactacagcaacaagcacaacaataccaagccacacagccccagctgcagcctcaaaaacaacagcagcagccaccacctccacagcagcagcagcaacagcaggcaagcaaattattgaaacaagagcaaagtaacatagtgagtgcagactgccaaatcatgaaggatgtgccatcttataaggaggcagaagatatttctgaaaagccagaaaaaccaaagcaggaatttataagtgaaggtgaaggactcaaagaaggcaaagacacaaagaagcaaaaatccttggaaccatccatcccaccaccccgaatagcttcaggggccagaggaaatgctgccaaagcgttattggaaaactttggttttgaactggtcattcagtataacgaaaacaggcagaaggtacagaagaagggcaaaagtggtgaaggcgaaaacactgacaaactagaatgtggaacatgtggtaaattgttttccaatgttcttattttaaagagtcaccaagaacatgtacatgggcaattttttccatatgcagcgctagaaaaatttgctcgtcaatacagggaggcctatgacaagctttatccaatttctccatcttctccagaaacgccgcccccgccacctcctcctcctcccttgcctccggctcctccacagccttcttctatgggtcctgtaaagatccccaacacggtttctactcctctgcaagctccaccacccactcctcccccaccaccaccacctcctcctcctcctcctcctccccccccacctcctccaccttctgctcctccacaggtccaactgccggtttctctggacctgccgctctttccttccattatgatgcaacctgtgcaacaccctgcgcttcctccccagcttgccctgcagctgccacagatggacgcactctctgcagacctcacccaactttgccagcagcagctcggattagatcccaacttcttaagacattctcagttcaaacgcccacggacaagaattacagatgatcagctaaaaatcctgagggcttattttgacattaataattctccaagtgaagaacagatccaggaaatggcagagaaatctggcctctcccaaaaagttatcaaacactggtttagaaatacgctttttaaggaacgacagagaaataaagattcaccatacaacttcagtaaccctcctataacggttttagaagatatcagaattgatccacagcccacctctttagaacattacaaatctgatgcatcattcagtaaaaggtcttctagaacgagatttactgactaccagcttagggttctgcaagacttttttgacacaaacgcttacccaaaagatgatgaaatagaacaactctccactgttctcaatctgcctacccgggttattgttgtatggttccagaatgctcgtcagaaagcacgaaagagttatgagaatcaagcagaaacaaaagataatgaaaaaagagaactcactaatgaacggtacattcgaacaagcaacatgcagtaccagtgtaaaaagtgcaatgtggttttccccaggatctttgacttgattacgcatcagaaaaagcagtgttacaaggatgaagatgatgatgcccaagatgaaagccaaacagaagactccatggatgccactgatcaagtggtatacaagcattgcacagtgtctggccaaacggatgcagctaaaaacgctgctgcccctgcagcaagttctggctctgggaccagcacccccctgattccatcacccaaaccagaacctgagaagacttctccaaaacctgaatatcccgcagaaaagccaaagcagagtgacccctctcccccttctcaaggcaccaaaccagccctgccattagcatcgacttcctcggacccaccacaggcatccacagcccagccacagccacagccacagccaccaaaacaaccccaacttatcggaagacctccctcggcctctcaaacaccggtcccttccagtccactgcaaatttccatgacgtctctccagaacagtctacctccacagttactacaataccaatgtgatcagtgtacagttgccttcccaactctggaactctggcaggaacaccagcacatgcacttccttgctgctcaaaaccaattccttcactctccgttcttggaaaggcccatggacatgccctacatgatatttgaccccaacaatccgctgatgactggacaactgctgggcagttccctcactcaaatgccccctcaggccagttcctcccacaccacagcccccacaacggttgctgcttccctaaaaaggaaactagacgataaagaagataataattgcagtgaaaaagaaggagggaatagcggtgaagaccaacaccgagataaacgcttgagaaccacgatcaccccggaacagctggaaatactctatgaaaaatacttgctggattccaatcctaccagaaaaatgcttgatcatattgcccgcgaagtcgggctgaaaaaaagggtcgtgcaagtctggttccagaatacacgagcgcgggagaggaaaggccagttccgggcggtgggtccagcacagtctcataaacggtgtccgttttgccgagccctgtttaaagcaaagtcggccttagaaagccacattcgctctcggcactggaatgaaggaaagcaggcaggttacagcttgccaccaagccctttaatatccaccgaagatgggggagaaagcccacagaaatacatctattttgattacccatctttgccattaactaaaattgatctatcaagtgagaatgaattggcttctacagtgtcaacacctgttagtaaaacagcagagctgtcaccgaagaatcttttaagcccttcttcttttaaagcagagtgttctgaggatgtagagaatttaaatgcccctcctgctgaggctgggtatgatcaaaataaaaccgattttgatgagacttcatcgattaatacggcaatcagtgacgccaccaccggagacgagggaaacactgaaatggaaagcaccacaggaagttccggagatgtgaaaccggctttgtctcccaaagagccaaaaactctggatactctgccaaaacctgcaaccacacctaccacggaggtctgcgatgacaaatttctcttttctctcacaagcccatccatccatttcaatgacaaagatggcgaccacgaccaaagcttttacatcacagatgacccggatgacaacgccgaccgcagcgaaacgtccagcatagcggacccgagctccccaaatccattcggatccagcaatccctttaaatccaaaagtaatgatcggccgggtcacaagcgttttcgaacgcaaatgagcaatcttcaactcaaggttctcaaggcttgctttagtgactaccgaactccaaccatgcaagaatgtgaaatgttagggaatgagattggtctgcccaaacgcgtagtccaggtgtggttccaaaatgcaagggcaaaggaaaagaaatttaaaattaacatagggaagcctttcatgatcaatcaaggcggaacggaaggcaccaaaccagagtgtaccctctgcggggtgaagtactctgcccgcttgtccatcagagatcacattttctccaaacagcacatttcaaaagtgagggagaccgttggcagtcagctcgatcgggagaaagattacttggctccgaccacggttcggcagctgatggcacagcaagaacttgatcgtataaagaaagcttcagacgtgctgggcttgacggtacagcagccaggcatgatggacagcagttctctccacggcatcagcctgccaacagcctaccccggactccccggccttcctccagtccttctccccggaatgaacggtccatcctccttgccgggatttccacaaaattcaaacactttaacacctcccggtgcaggcatgcttgggtttcctacttcagctacttcgtctcctgccctgtctctcagcagtgcccccaccaaacctttgctgcagactccaccacctccaccacctcctcctcctcctcctccttcatcctctctgtcaggacagcagaccgagcaacagaacaaagaatctgagaaaaagcaaactaagccaaacaaggtgaaaaaaatcaaagaggaggaattagaggccaccaaacccgaaaaacaccccaaaaaagaggaaaaaatctcatctgctctttcagtgttgggcaaagttgtaggtgaaacacatgtcgatcctattcagttgcaggcattacagaatgcaattgctggtgacccagcttcctttataggcggacagttcttgccatactttatccctgggtttgcttcttattttacacctcagctccctggaacagtgcaggggggatacttcccacctgtctgtggcatggagagcctctttccttatggccctacaatgccccagacactggcaggtctgtccccaggtgcactgttgcagcagtaccaacagtatcagcagaacctgcaggagtccctgcaaaagcagcaaaagcaacagcaagaacagcagcagaaaccagttcaggcaaagacatccaaagtagaaagtgaccagccgcaaaactccaacgatgcttcagaaacaaaggaagacaaaagtactgctacagaaagcacaaaagaagaaccccagttagaatccaaaagtgcagacttttcagacacttacgttgttccattcgtcaagtatgagtttatatgcagaaagtgccagatgatgtttactgatgaagacgccgcagtaaatcatcaaaagtccttctgttatttcggtcagcctttgattgacccacaagagacagtgcttcgtgtcccagtcagcaaatatcagtgtcttgcctgtgatgtggctatcagtgggaatgaagcacttagccaacacctccagtcaagcttgcacaaagagaaaacaatcaaacaagcaatgagaaatgccaaagagcatgttagattattacctcactcagtctgctcccctaatcctaacaccacatctacctcgcagtctgcagcttcttctaataacacctatcctcatctttcttgcttctccatgaagtcctggcctaatatccttttccaagcgtctgccaggagagctgcttctcccccttcttctcctccttccctttccttgccttcaacggttacctcaagtttgtgcagcacctcaggggttcaaacctcactacccacagaaagttgttcagatgagtctgacagtgagctgagccagaagctagaagacttagataattctttggaagtgaaggctaagcctgcttctggcctagatggtaatttcaatagcatccgaatggatatgttcagtgtgtaggagtgaagacaggatcccgtgcttaaaaaaataaaaaataaaaaaataaaaaaaaaataagactttaactgcagttccaaagcttctctaacccaaaaattacagtaccaaatgattgactcaggattgtttttcccatattgatatgctggcaatataggatggtatgtaatggacagaactgatgcagatggttgaatgcgcttgtactatatgctaaaatatggaaaaggaaaaaaaaatctcacaagttcttttggaacttgtttcaagccaaaaactctcaagaaagcaaattgcacctcagctggattgatttccaaatgctagcatgtactgtatgggaggatgatccagatgtttcaaagagaatttctcttagtttagttaggtgtaattcagtagctttaaattctcaggtcagaacataacatttctcatttgttaaaagcagcaagaagcctggtaaaactgtgacttttccccaaacgtcaatctttattagaaagcattttctaggtgtgtttagtgtacaaagagactttataacccttactggacaacacacagatccttgagctcacgctgcaggatagtacagttttaccgcagagggaatctggaacagtggaatcatgtgtctgccctgtgtattgcagtttgtattgccacaagctatatttataccagtgtcacccttttcttgtagaatatactaataatctgtgccaactctaccttctcacttttacctctgacgtcattctttttttctgaaagaggtaataattctagttttgatagactctgaggattatgtgaacaggacatttttcatttgtgaatttaatgctatactgtcaaggtacttgcttgtgtctgaactctagtgcacttatgattttgtagaccatgtgaaatttaataagataccttttttttcctttctttgtgtgtagtgcagcaacagtttggtctgcatttgttagaagtttaactcctaacaacccaaagacctatttaacaattggtgcataaatgaaagtagtactgtatacttgaaactgtttaagtacaagttgaacaaaaattatgaaaaggtatatttgcttctcgggaaagcaaagaagctgctttaaaaaataaaaaggggactaaaaatttgttttgtataaagaggttagccctgcgcacgtaggactgaattcagtgatatccctatacactgccatttagtggataggttattgtacttccattcatactctgggcacttgtgttgtattgttctgttacatactttttttaacctgttttgttttatcatatatgcattaaaagtattatctttatcaaca

SEQ ID NO: 23390 - DNA, 989 bp, Homo sapiens
  misc_feature 1..989: note = ENST00000523625
  source 1..989: mol_type = unassigned DNA; mol_type = unassigned DNA
caaggtcaagttgaatctggtacaacatgtccgttcggtgaagcatcagcagactgagggcctacggaagctccagctccaccagcaaggcctggcaccagaggaggacaacctcagtgagatcttttttgttaaagattgcccaccaaatgagcttgaaactgcctcattgggagccaggacttgtgatgatgatcttacagagcagcagttgagatcgacctcagcttatttatccacctactgagaacatcttggttgattccaagttttggcaattacgaataaaactactatgagcatcggtgtccaggcttttgtgtggacataaattttcaactccctttgataaatgccaaggagtacaattactagattgtatgataagagcatgtttagttttgtaaaaaccaccaaactgtcttccaaagtggttgtaccattttgcattcccaccagcgatgaatgagagttcctgttgccccacatcatcaccagcatttgatgttgtcagtgttctggattttggccattttcatagaagaacaaagtgaggaggcagaaggagctattaagcctacagcagtggccgaggacgatgaaaaagacacaagtgagagagacaatagtgaaggcaaaaactctaataaagactctgggataatcacaccagagaaggaactaaaagttagtgtggcagggggtacccagccactcctgctggcaaaagaagaggatgttgcaacaaaaaggtcaaaacctacagaggacaataaattctgtcatgaacagttctatcaatgtccttattgtaactacaatagtagggaccaaagtcgtatccagatgcacgtcctatcacagcactcggtgcagccggtcatctgctgtcctctctgtcaggacgtcctcagcaacaaaatgcatctccaactgcatctgacgcatttgcacagtgtgtctccagactgtgtggagaagctgcttat

SEQ ID NO: 23391 - DNA, 441 bp, Homo sapiens
  misc_feature 1..441: note = ENST00000524290
  source 1..441: mol_type = unassigned DNA; mol_type = unassigned DNA
caagttgaatctggtacaacatgtccgttcggtgaagcatcagcagactgagggcctacggaagctccagctccaccagcaaggcctggcaccagaggaggacaacctcagtgagatcttttttgttaaagattgcccaccaaatgagcttgaaactgcctcattgggagccaggacttgtgatgatgatcttacagagcagcagttgagatcgacctcaggtaatggttcctactccttctcaaaatatttccttgtcctaaatgagttgcttttgttactctcataattgatggaataaacattctctggaacttctctaattagatctgatcatatgccttattcaaataagtaaaaagcaaaatgaaataaattcaataattggaagtatatgtaaattgactttacattttagagcagttttaggttcacagcaaa

SEQ ID NO: 23392 - DNA, 491 bp, Homo sapiens
  misc_feature 1..491: note = ENST00000519536
  source 1..491: mol_type = unassigned DNA; mol_type = unassigned DNA
caagttgaatctggtacaacatgtccgttcggtgaagcatcagcagactgagggcctacggaagctccagctccaccagcaaggcctggcaccagaggaggacaacctcagtgagatcttttttgttaaagattgcccaccaaatgagcttgcatcttcttgccaaatcttctggagcgcttgtaatttcctctgtacagagcccaacaggctcatcagcagcagaagaaactgcctcattgggagccaggacttgtgatgatgatcttacagagcagcagttgagatcgacctcagaagaacaaagtgaggaggcagaaggagctattaagcctacagcagtggccgaggacgatgaaaaagacacaagtgagagagacaatagtgaaggcaaaaactctaataaagactctgggataatcacaccagagaaggaactaaaagttagtgtggcagggggtacccagccactcctgctggcaaaagaagag

SEQ ID NO: 23393 - DNA, 623 bp, Homo sapiens
  misc_feature 1..623: note = ENST00000522409
  source 1..623: mol_type = unassigned DNA; mol_type = unassigned DNA
gtatttcttcagagctaattaaagctctgttattgctcgtgttatagtagtcacactcaaggcccatttgtgacctcttttgcttggaaaaaaatatggtacaaggcatagcttagtaaagaacattattttgcagtcttctttttatatctataatgttcatcaaataaccccagtgggcaccttgcatttcaaacttgcttcattatcattataaaaaaataaacctacaggaacctttaagccataataataataatacaacattgccacagcattgatctaaagtggcaaggtgtggcattgatctgtaacatctgcaaaacatccctgctttggctaaaataaacaaatgtaagtgggatatgctaccagcaaaagagagatgtgatggaatttgtgatttctggggtacatttaacataaacccctttggtttccaaaggtgcctgtccctgatgtgatgatgccaaacagtatgctactgccagcagctgcctctgagaaatcagagcgggacacacctgcagccgtgacagctgaggggtctgggaaatattcaggtgaaagtccaatggatgacaaaagcatggcaggtctcgaggattcaaaggctaatgtgg

SEQ ID NO: 23394 - DNA, 3094 bp, Homo sapiens
  misc_feature 1..3094: note = ENST00000555997
  source 1..3094: mol_type = unassigned DNA; mol_type = unassigned DNA
aattgcaaaggcatcttctcagtgaagggggcggggtgggctagggctgagtggaaatggtgagagagattattgtagaaaatatctcttccgggaacttagggcaaagagttttattttcaggaatcacatccctgtctcccccaacctcagaccaggcccccaatctcctccccacaagaaaaagcaaaggcagtctgaaaacctgttgccaaaggaagggaacacttctgaaggaggaagttgagagtcttaggccagggtaacaagatgctcaactatagtgctcccagtgcagggggttgcctgctggacagaaaggcagtgggcacccctgctggtgggggcttccctcggaggcactcagtcaccctgcccagctccaagttccaccagaaccagctcctcagcagcctcaagggtgagccagcccccgctctgagctcgcgagacagccgcttccgagaccgctccttctcggaagggggcgagcggctgctgcccacccagaagcagcccgggggcggccaggtcaactccagccgctacaagacggagctgtgccgcccctttgaggaaaacggtgcctgtaagtacggggacaagtgccagttcgcacacggcatccacgagctccgcagcctgacccgccaccccaagtacaagacggagctgtgccgcaccttccacaccatcggcttttgcccctacgggccccgctgccacttcatccacaacgctgaagagcgccgtgccctggccggggcccgggacctctccgctgaccgtccccgcctccagcatagctttagctttgctgggtttcccagtgccgctgccaccgccgctgccaccgggctgctggacagccccacgtccatcaccccaccccctattctgagcgccgatgacctcctgggctcacctaccctgcccgatggcaccaataacccttttgccttctccagccaggagctggcaagcctctttgcccctagcatggggctgcccgggggtggctccccgaccaccttcctcttccggcccatgtccgagtcccctcacatgtttgactctccccccagccctcaggattctctctcggaccaggagggctacctgagcagctccagcagcagccacagtggctcagactccccgaccttggacaactcaagacgcctgcccatcttcagcagactttccatctcagatgactaagccagggtagggagggacctcctgcctactccagcccctaccctgcacccacatcccataccctcttctccctacccatcccattccccacaggccctacattaacaaggttaagctcaacccctttcccccagcacctcagaatgtgccctccctctccccctcataaccccacctaacataaggacaagtcaatttgtcagtagcttcttctggcttgaaaccccctccctggattttatagcccacttaccatgcataacagacaagtcccatattttgtcagtagatgcctttttttttccggcttaagccttaagtgccaaatcacaagagaaaaagcagtaacagtttacagaagcaacttagtgccttgtaatctaactttgtcactgtgactacattacctcttcagcgccagagggcacccgtgggcctcccggagcctctgcccatggcggggtggagacccggaaccagcagccccctccactggcgacacaactgcaccttccctcatttcagtctcccgcacacttattcctcctcccctcttcccggtggcacctctccacctgtacccgcccccccaccccccccacccctgccccttggaagagttgttgccagaccagggttttgggggaaacctgtcttgacattcaaaacctttttcttcccgatctgaacccctgttgactaatcttgcctgggtttgtgtaggtctgcaggaaggaaggctgaaaaagcggacgaagattttgacttaagtgggactttgtgatttaattttttcttttttttaagtggggaggaaggggaagctagatggactaggagagacttgattttggtgctaaagttccccagttcatatgtgacatctttttaaaaaaaataacaacaaaaaaaaaatgagagaaaagctaaaaaaaaaaaagtaaggggtgagcagttaatggtattcattccacatacaatatctgtgtaaaacgatttcctgtagaagtagctttaatggtttttgctctagaataccgtaggtctatccttagagcactcacgccatgctttcttccctgggttttaaacttcatataactttcagaaattggagagcaaaaattttgcttgtcactgcacatcaatataaaaaagcttatttaacttatcaaaacgtatttattgccaaactatgcttttttttgttaattttgttcatatttatcgggatgacaaatccatagaatatattcttttatgttaaattatgatcttcatattaatcttaaaattttgtgacgtgtctttttcctttttttccacagttttaatatattattcttcaacgacattttttgtaactttacacttttttggttattttattttaaaaaaatgaaaaattaatttaaaaaaatgcaaaaaactgttggattatttattttagaaattcccccctttgtgttggactgcaaattgagtttctttctctttaggcctttcacaactaggactgagaatgtatgtaaaagttctgtgacagtacagaaggaaaacaactttttatgtatagcttctaaaaggggaaaaaaaaaaaaagagaaaccctttgacttccacgtgcccatctcaagacattccactcacagatttgaggttctggattccaggtctggagttttccaatgttaatgtaaacagaactggcacacacacattaagatgaatgtaattattattcctcttgctggtcactaccgtcgctttctatttctctttctttgtgtgaatttatttaaaagaaaaaaaaactttttgtaacgactatttgcagtttaaaaatcaataaaccccgttttttcaagaaaca

SEQ ID NO: 23395 - DNA, 3190 bp, Homo sapiens
  misc_feature 1..3190: note = ENST00000439696
  source 1..3190: mol_type = unassigned DNA; mol_type = unassigned DNA
gtttcttctcctccccctgccccccctccccgcctgaccgcatggctgattcaactccagtgtcaatcaacttctttttcctcctcttcctcatttaaataagtttaaagctcctcctccccccggcccaccaaatctgaactttataaattgggctttgcgcgccccagcccggagtcagaaaggcgaggggcgccgggaactggcgtgtgggactccagacaggagaggctgcgccttccccgcaccgggaccttcgcgacacaccagatcctcgcccctggctcgcgcgaacgcacaggatgaccaccaccctcgtgtctgccaccatcttcgacttgagcgaagttttatgcaagggtaacaagatgctcaactatagtgctcccagtgcagggggttgcctgctggacagaaaggcagtgggcacccctgctggtgggggcttccctcggaggcactcagtcaccctgcccagctccaagttccaccagaaccagctcctcagcagcctcaagggtgagccagcccccgctctgagctcgcgagacagccgcttccgagaccgctccttctcggaagggggcgagcggctgctgcccacccagaagcagcccgggggcggccaggtcaactccagccgctacaagacggagctgtgccgcccctttgaggaaaacggtgcctgtaagtacggggacaagtgccagttcgcacacggcatccacgagctccgcagcctgacccgccaccccaagtacaagacggagctgtgccgcaccttccacaccatcggcttttgcccctacgggccccgctgccacttcatccacaacgctgaagagcgccgtgccctggccggggcccgggacctctccgctgaccgtccccgcctccagcatagctttagctttgctgggtttcccagtgccgctgccaccgccgctgccaccgggctgctggacagccccacgtccatcaccccaccccctattctgagcgccgatgacctcctgggctcacctaccctgcccgatggcaccaataacccttttgccttctccagccaggagctggcaagcctctttgcccctagcatggggctgcccgggggtggctccccgaccaccttcctcttccggcccatgtccgagtcccctcacatgtttgactctccccccagccctcaggattctctctcggaccaggagggctacctgagcagctccagcagcagccacagtggctcagactccccgaccttggacaactcaagacgcctgcccatcttcagcagactttccatctcagatgactaagccagggtagggagggacctcctgcctactccagcccctaccctgcacccacatcccataccctcttctccctacccatcccattccccacaggccctacattaacaaggttaagctcaacccctttcccccagcacctcagaatgtgccctccctctccccctcataaccccacctaacataaggacaagtcaatttgtcagtagcttcttctggcttgaaaccccctccctggattttatagcccacttaccatgcataacagacaagtcccatattttgtcagtagatgcctttttttttccggcttaagccttaagtgccaaatcacaagagaaaaagcagtaacagtttacagaagcaacttagtgccttgtaatctaactttgtcactgtgactacattacctcttcagcgccagagggcacccgtgggcctcccggagcctctgcccatggcggggtggagacccggaaccagcagccccctccactggcgacacaactgcaccttccctcatttcagtctcccgcacacttattcctcctcccctcttcccggtggcacctctccacctgtacccgcccccccaccccccccacccctgccccttggaagagttgttgccagaccagggttttgggggaaacctgtcttgacattcaaaacctttttcttcccgatctgaacccctgttgactaatcttgcctgggtttgtgtaggtctgcaggaaggaaggctgaaaaagcggacgaagattttgacttaagtgggactttgtgatttaattttttcttttttttaagtggggaggaaggggaagctagatggactaggagagacttgattttggtgctaaagttccccagttcatatgtgacatctttttaaaaaaaataacaacaaaaaaaaaatgagagaaaagctaaaaaaaaaaaagtaaggggtgagcagttaatggtattcattccacatacaatatctgtgtaaaacgatttcctgtagaagtagctttaatggtttttgctctagaataccgtaggtctatccttagagcactcacgccatgctttcttccctgggttttaaacttcatataactttcagaaattggagagcaaaaattttgcttgtcactgcacatcaatataaaaaagcttatttaacttatcaaaacgtatttattgccaaactatgcttttttttgttaattttgttcatatttatcgggatgacaaatccatagaatatattcttttatgttaaattatgatcttcatattaatcttaaaattttgtgacgtgtctttttcctttttttccacagttttaatatattattcttcaacgacattttttgtaactttacacttttttggttattttattttaaaaaaatgaaaaattaatttaaaaaaatgcaaaaaactgttggattatttattttagaaattcccccctttgtgttggactgcaaattgagtttctttctctttaggcctttcacaactaggactgagaatgtatgtaaaagttctgtgacagtacagaaggaaaacaactttttatgtatagcttctaaaaggggaaaaaaaaaaaaagagaaaccctttgacttccacgtgcccatctcaagacattccactcacagatttgaggttctggattccaggtctggagttttccaatgttaatgtaaacagaactggcacacacacattaagatgaatgtaattattattcctcttgctggtcactaccgtcgctttctatttctctttctttgtgtgaatttatttaaaagaaaaaaaaactttttgtaacgactatttgcagtttaaaaatcaataaaccccgttttttcaagaaa

SEQ ID NO: 23396 - DNA, 3026 bp, Homo sapiens
  misc_feature 1..3026: note = ENST00000336440
  source 1..3026: mol_type = unassigned DNA; mol_type = unassigned DNA
gtgtgttgggggtggtgagaatgcgctctcttcggcccgccccgtcctttccaaagaaacgtgctcataatggggtgacctaattacatcgcaatggaactcaatcttagccactccgcagcaccgggtttcataacagactcggcggcctcgagtgctgggaagaaacgtgcgagggccgaggggggcggcggagcccgcgtggaaatcggaaagaagcgcagccctgcgacttccgcctgggtcatcacgccagcagtcgggccaaggcgcagggggcgggtgggggactcgttaactttttatttgggtgggcggcatccaaacctaacagtatatattttatcattttcaagggagtcatgctccattgcgggcccttcggtttcgtggctcccatgtccccctctccacctcccgccaaaacggcgcagcgtgacaagccatatgttccactccggtgggggcgagagagaagcaacaataagttaaaagtgccgcctccctccacctctttaccttcattcttaccaaagtaaccttttttcattgttctagagtcttgaggtgtgtgtggggaggatggaggaggagggagggttgtggcgccgcccagaattcggagcgcgcgtggaaagtagtgagttgctcggtgggctttttctgggaggaaggggcattcaggaaggattagggttttcttgactaaaaagtttaaagattggatgcgtgaaaagaaacggcacgcctaggcctggtaaaacaaacaatcgtcccgggttgtggtctttttttgcggcgccccccacccgcccacacccggagagcgccggctgcaaagcgagcgcgagtgtcgacgcgtgcggcgcactaaattgtgccgcgctcgcccccgccagaccatgtcctcctggggaaaaagtttccctagtccccccagcagcgcgccccaccctacgccccgctggaaaaaaaacagcaacataaaatcctaggcttgaacattctgtgcgtcccaaatttctaatgtcctcggcctgcccggtttgccgaagggagccgagtgtcgaagagaagtcgggaaaaggtaagttgtgcagacacttggggaagtttcaaggagaccgccagctcaagatggaaaccgcggcccgggcgctaaggacgggcttcagctcccgctggcaaaaagagaaagtcgagcccgccttcctgcccaacaaaaaacaacaacatgacaacaagaaccccggagggagtggaatgagtgacgtcacagccgcgctctgaggctgacaaaggagggggcgcgcccctcccgctctgcgcccgcgcggccccggagagggggcgcctgaagcgccgggtagggaagtcagccgacttgaaacttttcctcttaaagaaaaaaaaaaaaaagttgtgcgcggctcacagtggggttttttttttccgccttcttttctcgtctcccctcccccttcttccttttgaaagtttcttctcctccccctgccccccctccccgcctgaccgcatggctgattcaactccagtgtcaatcaacttctttttcctcctcttcctcatttaaataagtttaaagctcctcctccccccggcccaccaaatctgaactttataaattgggctttgcgcgccccagcccggagtcagaaaggcgaggggcgccgggaactggcgtgtgggactccagacaggagaggctgcgccttccccgcaccgggaccttcgcgacacaccagatcctcgcccctggctcgcgcgaacgcacaggatgaccaccaccctcgtgtctgccaccatcttcgacttgagcgaagttttatgcaagggtaacaagatgctcaactatagtgctcccagtgcagggggttgcctgctggacagaaaggcagtgggcacccctgctggtgggggcttccctcggaggcactcagtcaccctgcccagctccaagttccaccagaaccagctcctcagcagcctcaagggtgagccagcccccgctctgagctcgcgagacagccgcttccgagaccgctccttctcggaagggggcgagcggctgctgcccacccagaagcagcccgggggcggccaggtcaactccagccgctacaagacggagctgtgccgcccctttgaggaaaacggtgcctgtaagtacggggacaagtgccagttcgcacacggcatccacgagctccgcagcctgacccgccaccccaagtacaagacggagctgtgccgcaccttccacaccatcggcttttgcccctacgggccccgctgccacttcatccacaacgctgaagagcgccgtgccctggccggggcccgggacctctccgctgaccgtccccgcctccagcatagctttagctttgctgggtttcccagtgccgctgccaccgccgctgccaccgggctgctggacagccccacgtccatcaccccaccccctattctgagcgccgatgacctcctgggctcacctaccctgcccgatggcaccaataacccttttgccttctccagccaggagctggcaagcctctttgcccctagcatggggctgcccgggggtggctccccgaccaccttcctcttccggcccatgtccgagtcccctcacatgtttgactctccccccagccctcaggattctctctcggaccaggagggctacctgagcagctccagcagcagccacagtggctcagactccccgaccttggacaactcaagacgcctgcccatcttcagcagactttccatctcagatgactaagccagggtctgcaggaaggaaggctgaaaaagcggacgaagattttgacttaagtgggactttgtgatttaattttttcttttttttaagtggggaggaaggggaagctagatggactaggagagacttgattttggtgctaaagttccccagttcatatgtgacatctttttaaaaaaaataacaacaaaaaaaaaatgagagaaaagct

SEQ ID NO: 23397 - DNA, 727 bp, Homo sapiens
  misc_feature 1..727: note = ENST00000557086
  source 1..727: mol_type = unassigned DNA; mol_type = unassigned DNA
tttcactttcccccttgcacaaaaccgaacatcccaccccaccaccacctccaagctaaaatacctgggccgcccctccccacgaagggacgcgctccaggcgaatggggagggcccggaagtcgggcctgggacagaggagccggcccaccgcctcccggtcggaagcggcagtgcagggtaacaagatgctcaactatagtgctcccagtgcagggggttgcctgctggacagaaaggcagtgggcacccctgctggtgggggcttccctcggaggcactcagtcaccctgcccagctccaagttccaccagaaccagctcctcagcagcctcaagggtgagccagcccccgctctgagctcgcgagacagccgcttccgagaccgctccttctcggaagggggcgagcggctgctgcccacccagaagcagcccgggggcggccaggtcaactccagccgctacaagacggagctgtgccgcccctttgaggaaaacggtgcctgtaagtacggggacaagtgccagttcgcacacggcatccacgagctccgcagcctgacccgccaccccaagtacaagacggagctgtgccgcaccttccacaccatcggcttttgcccctacgggccccgctgccacttcatccacaacgctgaagagcgccgtgccctggccggggcccgggacctctccgctgaccgtccccgcctccagcatagctt

SEQ ID NO: 23398 - DNA, 577 bp, Homo sapiens
  misc_feature 1..577: note = ENST00000557022
  source 1..577: mol_type = unassigned DNA; mol_type = unassigned DNA
agtgcaggtgaggcggcggccagcctggggactgcgcggggtaacaagatgctcaactatagtgctcccagtgcagggggttgcctgctggacagaaaggcagtgggcacccctgctggtgggggcttccctcggaggcactcagtcaccctgcccagctccaagttccaccagaaccagctcctcagcagcctcaagggtgagccagcccccgctctgagctcgcgagacagccgcttccgagaccgctccttctcggaagggggcgagcggctgctgcccacccagaagcagcccgggggcggccaggtcaactccagccgctacaagacggagctgtgccgcccctttgaggaaaacggtgcctgtaagtacggggacaagtgccagttcgcacacggcatccacgagctccgcagcctgacccgccaccccaagtacaagacggagctgtgccgcaccttccacaccatcggcttttgcccctacgggccccgctgccacttcatccacaacgctgaagagcgccgtgccctggccggggcccgggacctctccgctgaccgtccccgcctcc

SEQ ID NO: 23399 - DNA, 633 bp, Homo sapiens
  misc_feature 1..633: note = ENST00000553375
  source 1..633: mol_type = unassigned DNA; mol_type = unassigned DNA
caccaccacctccaagctaaaatacctgggccgcccctccccacgaagggacgcgctccaggcgaatggggagggcccggaagtcgggcctgggacagaggagccggcccaccgcctcccggtcggaagcggcagtgcagcccggagtcagaaaggcgaggggcgccgggaactggcgtgtgggactccagacaggagaggctgcgccttccccgcaccgggaccttcgcgacacaccagatcctcgcccctggctcgcgcgaacgcacaggatgaccaccaccctcgtgtctgccaccatcttcgacttgagcgaagttttatgcaagggtaacaagatgctcaactatagtgctcccagtgcagggggttgcctgctggacagaaaggcagtgggcacccctgctggtgggggcttccctcggaggcactcagtcaccctgcccagctccaagttccaccagaaccagctcctcagcagcctcaagggtgagccagcccccgctctgagctcgcgagacagccgcttccgagaccgctccttctcggaagggggcgagcggctgctgcccacccagaagcagcccgggggcggccaggtcaactccagccgctacaagacggagctgtgcc

SEQ ID NO: 23400 - DNA, 2072 bp, Homo sapiens
  misc_feature 1..2072: note = ENST00000496039
  source 1..2072: mol_type = unassigned DNA; mol_type = unassigned DNA
gggcggccggcaggggcccagccctgccttccactgtgctctctgtcagctccaggtcaattcagagacccaactgaagcaggtgggagaagtgaggctgtgactggggttggagccaggggagggggttggggggcagggcagcagagggagggaccctgaagagagcaggcagggcacagcagagcaggctggagaagcgaggccagcaggccagtgggccaattaagggcaaaggccaagactcacctccccttcccagggcctaccccagggtgaggacccagtctgtgtgctttggatgtatgagctgtggatagaggaaggggaagagtcgaggatgatggtcttggggtccttgggctttgtcatcttgttcccagtctgtctgtctgtccattagcacatgagcagcaggaggcacaaagaccgcctggccgggaagacccccaagccctccagccagcacagcaagctgcagaagcacgcagcgctggctgtgagtatcctcaagtctaaactggccttgcagaagcaactcaccaagacgttggcagcccgcttcctgcccagcccgctccccaccgcagccactgccatctgtgctctgccagggcccctggccctccgccctgcccctacagcagccactaccctcttcccggctcccatcctgggcccagctctgtttcgcaccccagcaggagctgtccgccctgccacaggacctatcgtccttgccccttattagccctcatggggaggccagagctgatttcccaatagccactccttgtctcctcctgtcctgagacaccttggtttcctacatgccacagggactgtgaacagcttcaggggtcctgcccgatccagaaagagctgggctagttttaagggcagctgccttccaaggactgtccccaccctcctttcgcaggccttccagggttaatcctaggcttgcctgcatttcccaccctgacagaccccaaagatctatgcaaaatctcagccccagccatgtggtgctctcactttcctccacccaagacccacatggccagactctaggaatcttagcttctacaagccatcctctcctagccaggggacgactctctgacctctattcctaggctttggggcttcactggagatagggatggggtctctagctgcagcaggctcaaggctgtcaggacaaggtgaccatgggagtgtgacagaggaccatggaggagaaagggggacccaaaagtccttcgatcagcagtgctaaggtggggcagagccaaggaggtagtggggctggttctgaaagcttttgggggcttcatctgctctgaaggggtgggactaagagaggaggtgatgttctggttgggcccagggttttgttttaatcttaagtcttctgggcattcatgggcccagtctttttttctgtctgagagtatcattctgttgcccaggttagagtgcagtggtgcaatcttggctcactgcatgcagcctctgcctccctggttcaagtgatacttgctgataagcccagtcttaatattgagggagtaactcatccctcagaagctcttcttcttagcctttctctgacttcctgaaccccaactcttggagggcgggtgtgggtctccctcagactatggactcagctaacaccgaaccccccgcagagctcccaaaggaagagctttcccctacagcttcccactccaaactggtcctagcactaaattcagctttcccttctcccaaccagcccctgccactgtgaagctgagtgttgggaggcagtctcacatgcactggcaagacccattttcatgctgtcaatgtcaatgtcacaaactcctttccactgcagcactgccccctccccaccccacaatatgggaccctgccagtatccccctgtatcttttttttgttttttaaagacatttccaatgggagaaccagaaaaagggggaggggagggaaactttttgataacaattgtggttttattgtgtccaaccaatgcatcaataaatgaacttgaagcccaa

SEQ ID NO: 23401 - DNA, 1989 bp, Homo sapiens
  misc_feature 1..1989: note = ENST00000461831
  source 1..1989: mol_type = unassigned DNA; mol_type = unassigned DNA
ctcaagggttggatggcggaggctttgtgcttgtgtgttactgaacggacgtttctgggtcctcccattactccttggggaaggagaattgggaagagaagtctgaggcagcaagaactgaaggagccaagcaccggtggatgatggaaggtcagcgaggggctccccggaggagccggggccgcccggtgtccaggggaggtgccggacacaaagccaagagagtcacagggggccggggcggccggcaggggcccagccctgccttccactgtgctctctgtcagctccaggtcaattcagagacccaactgaagcagcacatgagcagcaggaggcacaaagaccgcctggccgggaagacccccaagccctccagccagcacagcaagctgcagaagcacgcagcgctggctgtgagtatcctcaagtctaaactggccttgcagaagcaactcaccaagacgttggcagcccgcttcctgcccagcccgctccccaccgcagccactgccatctgtgctctgccagggcccctggccctccgccctgcccctacagcagccactaccctcttcccggctcccatcctgggcccagctctgtttcgcaccccagcaggagctgtccgccctgccacaggacctatcgtccttgccccttattagccctcatggggaggccagagctgatttcccaatagccactccttgtctcctcctgtcctgagacaccttggtttcctacatgccacagggactgtgaacagcttcaggggtcctgcccgatccagaaagagctgggctagttttaagggcagctgccttccaaggactgtccccaccctcctttcgcaggccttccagggttaatcctaggcttgcctgcatttcccaccctgacagaccccaaagatctatgcaaaatctcagccccagccatgtggtgctctcactttcctccacccaagacccacatggccagactctaggaatcttagcttctacaagccatcctctcctagccaggggacgactctctgacctctattcctaggctttggggcttcactggagatagggatggggtctctagctgcagcaggctcaaggctgtcaggacaaggtgaccatgggagtgtgacagaggaccatggaggagaaagggggacccaaaagtccttcgatcagcagtgctaaggtggggcagagccaaggaggtagtggggctggttctgaaagcttttgggggcttcatctgctctgaaggggtgggactaagagaggaggtgatgttctggttgggcccagggttttgttttaatcttaagtcttctgggcattcatgggcccagtctttttttctgtctgagagtatcattctgttgcccaggttagagtgcagtggtgcaatcttggctcactgcatgcagcctctgcctccctggttcaagtgatacttgctgataagcccagtcttaatattgagggagtaactcatccctcagaagctcttcttcttagcctttctctgacttcctgaaccccaactcttggagggcgggtgtgggtctccctcagactatggactcagctaacaccgaaccccccgcagagctcccaaaggaagagctttcccctacagcttcccactccaaactggtcctagcactaaattcagctttcccttctcccaaccagcccctgccactgtgaagctgagtgttgggaggcagtctcacatgcactggcaagacccattttcatgctgtcaatgtcaatgtcacaaactcctttccactgcagcactgccccctccccaccccacaatatgggaccctgccagtatccccctgtatcttttttttgttttttaaagacatttccaatgggagaaccagaaaaagggggaggggagggaaactttttgataacaattgtggttttattgtgtccaaccaatgcatcaataaatgaacttgaagcccaa

SEQ ID NO: 23402 - DNA, 1572 bp, Homo sapiens
  misc_feature 1..1572: note = ENST00000436535
  source 1..1572: mol_type = unassigned DNA; mol_type = unassigned DNA
agccccacacgcagcgttcccagccaggcgagagcaggtggccgcggcgggctccgtctctgccccgcagatatgaagcggccactgagcccacccccaccggctgagaaggagacccccatatctggagctgctgagtgcctccctcggcccccagaaccacctaagcccaagcgagaaagaaagcggccatcgtacacgctctgtgatgtctgcaacatccagctgaactcggcggcccaggcccaggtgcactgtggggggcgggcccaccagaggcggcttcggcagctcagcttggggaagagcccctcagggccagcaggcccggcctccggcgcccccagccccctgctggcctccctgcccctgcccacccggcctctgcagcccccgctggacttcaagcacttgctcgccttccacttcaatggcgctgccccgctcagtctcttccccaacttcagcacgatggacccggtccagaaagctgtcatcagccacacgtttggtgtcccctcccctctgaagaagaagctgttcatttcctgtaacatctgtcacctgaggttcaactcagcgaaccaggccgaggcacattataaaggccacaaacacgccagaaaactcaaggctgtcgaggctgccaagagcaagcagaggccacacacccaggcccaggatggggctgtagtgtccccaatcccaacgctggccagtggagcccctggagagccacagagtaaagcagttcctgcagcccctcctcttgggcctccactccagccaccaccaactccagaccctacatgcagggagccagcccactcagagctcttggatgctgcctcctcatcctcttcttcctcctgcccaccttgctccccagagcctgggagagaggcaccggggcctgagccagcggcagctgccgtgggaagcagcatgagtggggaaggcaggagtgagaaggggcacctctactgccccacgtgtaaggtgacagtgaactcggcctcccagcttcaggctcacaacacaggagccaagcaccggtggatgatggaaggtcagcgaggggctccccggaggagccggggccgcccggtgtccaggggaggtgccggacacaaagccaagagagtcacagggggccggggcggccggcaggggcccagccctgccttccactgtgctctctgtcagctccaggtcaattcagagacccaactgaagcagcacatgagcagcaggaggcacaaagaccgcctggccgggaagacccccaagccctccagccagcacagcaagctgcagaagcacgcagcgctggcttctaaactggccttgcagaagcaactcaccaagacgttggcagcccgcttcctgcccagcccgctccccaccgcagccactgccatctgtgctctgccagggcccctggccctccgccctgcccctacagcagccactaccctcttcccggctcccatcctgggcccagctctgtttcgcaccccagcaggagctgtccgccctgccacaggacctatcgtccttgccccttattag

SEQ ID NO: 23403 - DNA, 2085 bp, Homo sapiens
  misc_feature 1..2085: note = ENST00000453355
  source 1..2085: mol_type = unassigned DNA; mol_type = unassigned DNA
gtctgctcaggttgccataacaaagtaccacagactcagtggcttcgacagtggagatgtaatttctcacagttctggaggctagaagtccaagatcaaggtgtcaggagggttcatttcttcaaaggcctctcttcttggcttgaagatggtcttccctctataactatctgtgtctaaatttcctcttcttataaagacaccagtcatatgagacccagcgcggtggctcacacctgaaatcccagcgctttgggaggctgagatatgaagcggccactgagcccacccccaccggctgagaaggagacccccatatctggagctgctgagtgcctccctcggcccccagaaccacctaagcccaagcgagaaagaaagcggccatcgtacacgctctgtgatgtctgcaacatccagctgaactcggcggcccaggcccaggtgcactgtggggggcgggcccaccagaggcggcttcggcagctcagcttggggaagagcccctcagggccaggtcagtgtagaggggacgctgctcccacaaatttggtttggggagtatctctgtctgggcccctctgaggggctctgggtctgtggcctccctccatgggggtctttgcgtctggggtgccctcaatggggtcttagggtctgaagcctccccgatgccagcaagttttattctgcatctggacaacccttctgtaggacctctcggaatctgtgggtccttaggccgcctcttgggtctttgtttctagggaactctccctgtgggatcttttgggatcaggactcctaagcagcacttctccagcctggagcctcctggtagccacaggctttcagacaagggcctcatctgcggggtgggggtcccaggctccagctcaggtctgtggtctctgaaggccaaggtcagcaaggtacacagcactccaacccagggacaagggggaggcccctcttcctttggactcctggccaggatttctgcttctccctagctggggtgactttgcagaggtttggctatgagcttggaaggggcagctggctgcaaggcagatttctgggggaaatgggtgaatgcctccatgagggtgattctagctgacaggtgcacaggggccatagggaaagtaagaaccacccaggctgctgttggcagagcaaacagattcacattcaggctcagtgtggggaggtgggaaaggcaggaacttacccctggctcctgggggaggccaacagaaacctaccttgcagcccaggctggcagttttgccggaggctacactctgacctcagacaccctcttgagggctgtcttctcttttggtgatattcatggggcacccactgtgtcccccgctccacacacacaatcctgtaggccagagacaagtaagatccaatctctctgcttaccaccctccccaagattgagtgggtcttttgggtggagacacatgtgaaaagggataagggttgtggttgccacatgggacataccctcagggcacaaaggcaaagctgcagtccctgggggcagcaggaaagtctcctgaaggaagagggggctgagcctcggaacatggatgaggggagtaggggcattacaggcagaggtcacggcataagcaaaggccagggtgctctggtgactgggaccagctcctccccacccaattatttcaggctggacaccaaaagcatgactctgagcaagagagtatctgactgatgggtgtttctggagcatatgtgtctgtctggattcgaaagtcactcattggctgggcatggtggctcatgcctgtaatcctagcactttgggaggctgaggcaggtgggtcacttaaggccaggagtttgagaccagcctggccaacatggcaaaaccccatttctactaaaaatgcaaaaattagccaggtatggtggcacacacctgtagtcccagctactcgggaggctgaggcagacgaatcacttgaacccaggaggtggaggttgcagtgagccgagattgtgccactgcactccagcctgggtgacagagtgagaccctgtctc

SEQ ID NO: 23404 - DNA, 2596 bp, Homo sapiens
  misc_feature 1..2596: note = ENST00000618554
  source 1..2596: mol_type = unassigned DNA; mol_type = unassigned DNA
atgggtctggctgcaggcccggcctccggcgcccccagccccctgctggcctccctgcccctgcccacccggcctctgcagcccccgctggacttcaagcacttgctcgccttccacttcaatggcgctgccccgctcagtctcttccccaacttcagcacgatggacccggtccagaaagctgtcatcagccacacgtttggtgtcccctcccctctgaagaagaagctgttcatttcctgtaacatctgtcacctgaggttcaactcagcgaaccaggccgaggcacattataaaggccacaaacacgccagaaaactcaaggctgtcgaggctgccaagagcaagcagaggccacacacccaggcccaggatggggctgtagtgtccccaatcccaacgctggccagtggagcccctggagagccacagagtaaagttcctgcagcccctcctcttgggcctccactccagccaccaccaactccagaccctacatgcagggagccagcccactcagagctcttggatgctgcctcctcatcctcttcttcctcctgcccaccttgctccccagagcctgggagagaggcaccggggcctgagccagcggcagctgccgtgggaagcagcatgagtggggaaggcaggagtgagaaggggcacctctactgccccacgtgtaaggtgacagtgaactcggcctcccagcttcaggctcacaacacaggagccaagcaccggtggatgatggaaggtcagcgaggggctccccggaggagccggggccgcccggtgtccaggggaggtgccggacacaaagccaagagagtcacagggggccggggcggccggcaggggcccagccctgccttccactgtgctctctgtcagctccaggtcaattcagagacccaactgaagcagcacatgagcagcaggaggcacaaagaccgcctggccgggaagacccccaagccctccagccagcacagcaagctgcagaagcacgcagcgctggctgtgagtatcctcaagtctaaactggccttgcagaagcaactcaccaagacgttggcagcccgcttcctgcccagcccgctccccaccgcagccactgccatctgtgctctgccagggcccctggccctccgccctgcccctacagcagccactaccctcttcccggctcccatcctgggcccagctctgtttcgcaccccagcaggagctgtccgccctgccacaggacctatcgtccttgccccttattagccctcatggggaggccagagctgatttcccaatagccactccttgtctcctcctgtcctgagacaccttggtttcctacatgccacagggactgtgaacagcttcaggggtcctgcccgatccagaaagagctgggctagttttaagggcagctgccttccaaggactgtccccaccctcctttcgcaggccttccagggttaatcctaggcttgcctgcatttcccaccctgacagaccccaaagatctatgcaaaatctcagccccagccatgtggtgctctcactttcctccacccaagacccacatggccagactctaggaatcttagcttctacaagccatcctctcctagccaggggacgactctctgacctctattcctaggctttggggcttcactggagatagggatggggtctctagctgcagcaggctcaaggctgtcaggacaaggtgaccatgggagtgtgacagaggaccatggaggagaaagggggacccaaaagtccttcgatcagcagtgctaaggtggggcagagccaaggaggtagtggggctggttctgaaagcttttgggggcttcatctgctctgaaggggtgggactaagagaggaggtgatgttctggttgggcccagggttttgttttaatcttaagtcttctgggcattcatgggcccagtctttttttctgtctgagagtatcattctgttgcccaggttagagtgcagtggtgcaatcttggctcactgcatgcagcctctgcctccctggttcaagtgatacttgctgataagcccagtcttaatattgagggagtaactcatccctcagaagctcttcttcttagcctttctctgacttcctgaaccccaactcttggagggcgggtgtgggtctccctcagactatggactcagctaacaccgaaccccccgcagagctcccaaaggaagagctttcccctacagcttcccactccaaactggtcctagcactaaattcagctttcccttctcccaaccagcccctgccactgtgaagctgagtgttgggaggcagtctcacatgcactggcaagacccattttcatgctgtcaatgtcaatgtcacaaactcctttccactgcagcactgccccctccccaccccacaatatgggaccctgccagtatccccctgtatcttttttttgttttttaaagacatttccaatgggagaaccagaaaaagggggaggggagggaaactttttgataacaattgtggttttattgtgtccaaccaatgcatcaataaatgaacttgaagcccaa

SEQ ID NO: 23405 - DNA, 4808 bp, Homo sapiens
  misc_feature 1..4808: note = ENST00000344423
  source 1..4808: mol_type = unassigned DNA; mol_type = unassigned DNA
aggttcaagtgcgcatgtgcgcgaggagtcgctcgggcacttattgagcgccgactgtctacgggcggccgggggtgatgggcagaggcttcagtgtccccttcgcctccgcaggagaggagaggcagcagcatggcgagtgtcctgtcccgacgccttggaaagcggtccctcctgggagcccgggtgttgggacccagtgcctcggaggggccctcggctgccccaccctcggagccactgctagaaggggccgctccccagcctttcaccacctctgatgacaccccctgccaggagcagcccaaggaagtccttaaggctcccagcacctcgggccttcagcaggtggcctttcagcctgggcagaaggtttatgtgtggtacgggggtcaagagtgcacaggactggtggagcagcacagctggatggagggtcaggtgaccgtctggctgctggagcagaagctgcaggtctgctgcagggtggaggaggtgtggctggcagagctgcagggcccctgtccccaggcaccacccctggagcccggagcccaggccctggcctacaggcccgtctccaggaacatcgatgtcccaaagaggaagtcggacgcagtggaaatggatgagatgatggcggccatggtgctgacgtccctgtcctgcagccctgttgtacagagtcctcccgggaccgaggccaacttctctgcttcccgtgcggcctgcgacccatggaaggagagtggtgacatctcggacagcggcagcagcactaccagcggtcactggagtgggagcagtggtgtctccaccccctcgcccccccacccccaggccagccccaagtatttgggggatgcttttggttctccccaaactgatcatggctttgagaccgatcctgaccctttcctgctggacgaaccagctccacgaaaaagaaagaactctgtgaaggtgatgtacaagtgcctgtggccaaactgtggcaaagttctgcgctccattgtgggcatcaaacgacacgtcaaagccctccatctgggggacacagtggactctgatcagttcaagcgggaggaggatttctactacacagaggtgcagctgaaggaggaatctgctgctgctgctgctgctgctgccgcaggcaccccagtccctgggactcccacctccgagccagctcccacccccagcatgactggcctgcctctgtctgctcttccaccacctctgcacaaagcccagtcctccggcccagaacatcctggcccggagtcctccctgccctcaggggctctcagcaagtcagctcctgggtccttctggcacattcaggcagatcatgcataccaggctctgccatccttccagatcccagtctcaccacacatctacaccagtgtcagctgggctgctgccccctccgccgcctgctctctctctccggtccggagccggtcgctaagcttcagcgagccccagcagccagcacctgcgatgaaatctcatctgatcgtcacttctccaccccgggcccagagtggtgccaggaaagcccgaggggaggctaagaagtgccgcaaggtgtatggcatcgagcaccgggaccagtggtgcacggcctgccggtggaagaaggcctgccagcgctttctggactgagctgtgctgcaggttctactctgttcctggccctgccggcagccactgacaagaggccagtgtgtcaccagccctcagcagaaaccgaaagagaaagaacggaaacacggagtttgggctctgttggctaaggtgtaacacttaaagcaattttctcccattgtgcgaacattttattttttaaaaaaaagaaacaaaaatatttttccccctaaaataggagagagccaaaactgaccaaggctattcagcagtgaaccagtgaccaaagaattaattaccctccgtttcccacatccccactctctaggggattagcttgtgcgtgtcaaaagaaggaacagctcgttctgcttcctgctgagtcggtgaattctttgctttctaaactcttccagaaaggactgtgagcaagatgaatttacttttcttaaaaaaaaaaaaaaaaaaaaaaaaaaagagtttctggctgatgggtgactcagagtgcaggactgcctggccgtggggcagaggggtttgcccttctcggagggtacctcctgttccctgtctgagcatcctgcatggaagtcaaaggaaatccctttcttggtgacgacttaaatctgggttccctcagacattgggttgcaccccaacaaatattaaatggcttcttcttaaagcccagagaaagaggttttttaaaagactgtcgccaaatagctgagccaaaaggctgatcagaattcactttttggaatgtggcagttaaacactaccttgatcattctctcctctttcctcgaggaactcctggagggtttgagcgtctggaaactctctgctctgacccgaggaagcaccctcctgacgccgccttcctccggttattgaaaggacgcctcagaaatgctttgttttcttttacgatgtattcagaagcctttactgattaaagttttcttttatttgggtggccgggagagacccagggaggttctggaggttcctttctgtctcctggccccaccagggatttccccatttctgtttgctgcctgaaagcaggatgaggaaggccaaggagagtccttgcacccgtgagcgtcaggatgaggaaatgacaggaggaagacgtgggtttgggttagtggctgctggcgttttggcccttggtgtttctggagcctccagggatctaggggagcctgggctgcgtgcatgtcgataagcagagctgttcttggggagaaggagggaggtctcgggagtgtagcaccatgccaaccagccctgcgcgaagacagagtgagccacgcccggatggcagggcatgtttctgttttggtgtctcactttcctcccagcgtgacttatttggggattcctcagggcctactggaatgtgactgcccactgcccagctgcctcgggtacaagtcctggccctatgtcccagctgtcaggggctcagggaatcctacccagccacctgtcctgggatggagtgtcagcatccaccccttggttgtcatcgaggccgccctcccagtcctgggtgaagatatttgggccaccagggctcccttggccccttcacgtaggaaatagacacgtgctttttaatgcaggacactttgagtgttacaaaatctgtagacctggcagtagggtcatgatgttgggaagggtgtagtgccctaggttggtgacagaagggacagacacttgtgcacaggtgtctttggtgatggggtttttttttttataacttagtaaaaaaaaaaaaatgtatgtggaattctgtctcttggtaaagctcaaagccaggctagcctgaggtggcgcagggctctccttcctgtcccttcgatctccttgagaattaagagctggcagctgctgatggtgtttcccaacccccctcacttcccaagacaacccccagcttcaggtcctcatggggaggggagggcacgttcttgacacatgggaacttcgctcaggagggcctccccttcccctctccctcagagttttcactgccgtctcgtctttagaaagctgtttgaattccccccgcccccagtttggaccgtgtagatataactggatatacggatttttctctttgtgcaggcttcttatgccgttggtatacagggcaggaaagagaggaataaagggagagagcagtgtggaaaccacggtggttttgctttgttcttactaggttttggtgccaccttccctgcctgcgcttgtgccccctctcctccttggcactggcggcctccttgcctcccttccacccgtgctgccatcccgtgcctgtcgtgttggttcttcacacgtgctctgttctcggggttgttccattcatgccttcttggagggtgagggtggcttgggaaccgacccagtgatcatgcctactttcttctttgtatctccctccttcccagcccacccgggcagcagactctgatggaaggaaggtgccgtaggtgggcttttagaaactaacgggactggttttcaaagcagttatcttgggaaactgtttattccagcgatgtgacttttttcagaatatttcttggaatcatattcagagtctggggctgtgtgttgagcagccttaaggatgctagacactcatttagtgcccagggagtccagcgaatgacgtctgtggccaagcgaggtctcaggtgcaaagcaaaaggaccatttaaagtaaaatagcttggattcaatcatgtgacttttaaattggctcagaaagcaattttgtaatttcagagagtgttttgagccatggccacgttgtcattgtgagtctatagcttgactccttggagaacaatattcatttggttgtggagactgatttgctgggagaaatctgtcctgttactttctggtcatcccaggttctgacttttaccaggggcaaaaaaaaaaaaagcaagagggagataaatcccatctgtgagtttgtcttattggcgcctttttcctcagctgtcttccaagtattatttttactgttaaaaaattttttaaaaatgtgaaatgtaatgtttttacagcaacaatatgaaatatattttataaggaataaaatggtaccttgtctgatttaa

SEQ ID NO: 23406 - DNA, 625 bp, Homo sapiens
  misc_feature 1..625: note = ENST00000520535
  source 1..625: mol_type = unassigned DNA; mol_type = unassigned DNA
ctgccctcaggggctctcagcaagtcagctcctgggtccttctggcacattcaggcagatcatgcataccaggaaagcccgaggggaggctaagaagtgccgcaaggtgtatggcatcgagcaccgggaccagtggtgcacggcctgccggtggaagaaggcctgccagcgctttctggactgagctgtgctgcaggttctactctgttcctggccctgccggcagccactgacaagaggccagtgtgtcaccagccctcagcagaaaccgaaagagaaagaacggaaacacggagtttgggctctgttggctaaggtgtaacacttaaagcaattttctcccattgtgcgaacattttattttttaaaaaaaagaaacaaaaatatttttccccctaaaataggagagagccaaaactgaccaaggctattcagcagtgaaccagtgaccaaagaattaattaccctccgtttcccacatccccactctctaggggattagcttgtgcgtgtcaaaagaaggaacagctcgttctgcttcctgctgagtcggtgaattctttgctttctaaactcttccagaaaggactgtgagcaagatgaatttacttttcttaaaaaaaaa

SEQ ID NO: 23407 - DNA, 2068 bp, Homo sapiens
  misc_feature 1..2068: note = ENST00000523202
  source 1..2068: mol_type = unassigned DNA; mol_type = unassigned DNA
ctgcacagggagtttgtcttgtgcaaacaatttccaaggcagcgttttcttccctgcctgggagtgcagggctcagcgccttcactttggaactgactcagagacctaaagaagcccacctggccagcgggaaggggggccgccgccgcctcccggttttgggcagccctggccagctccctgtggccttggaggacttccaccgggcaggcgttcccatgatgccaggctaccaggcgcgggggattcctgcaggccggcgctgcttttcttagaaccccctttctagaaaagtacacctgggggttttgcttcaaagagaggagaggcagcagcatggcgagtgtcctgtcccgacgccttggaaagcggtccctcctgggagcccgggtgttgggacccagtgcctcggaggggccctcggctgccccaccctcggagccactgctagaaggggccgctccccagcctttcaccacctctgatgacaccccctgccaggagcagcccaaggaagtccttaaggctcccagcacctcgggccttcagcaggtggcctttcagcctgggcagaaggtttatgtgtggtacgggggtcaagagtgcacaggactggtggagcagcacagctggatggagggtcaggtgaccgtctggctgctggagcagaagctgcaggtctgctgcagggtggaggaggtgtggctggcagagctgcagggcccctgtccccaggcaccacccctggagcccggagcccaggccctggcctacaggcccgtctccaggaacatcgatgtcccaaagaggaagtcggacgcagtggaaatggatgagatgatggcggccatggtgctgacgtccctgtcctgcagccctgttgtacagagtcctcccgggaccgaggccaacttctctgcttcccgtgcggcctgcgacccatggaaggagagtggtgacatctcggacagcggcagcagcactaccagcggtcactggagtgggagcagtggtgtctccaccccctcgcccccccacccccaggccagccccaagtatttgggggatgcttttggttctccccaaactgatcatggctttgagaccgatcctgaccctttcctgctggacgaaccagctccacgaaaaagaaagaactctgtgaaggtgatgtacaagtgcctgtggccaaactgtggcaaagttctgcgctccattgtgggcatcaaacgacacgtcaaagccctccatctgggggacacagtggactctgatcagttcaagcgggaggaggatttctactacacagaggtgcagctgaaggaggaatctgctgctgctgctgctgctgctgccgcaggcaccccagtccctgggactcccacctccgagccagctcccacccccagcatgactggcctgcctctgtctgctcttccaccacctctgcacaaagcccagtcctccggcccagaacatcctggcccggagtcctccctgccctcaggggctctcagcaagtcagctcctgggtccttctggcacattcaggcagatcatgcataccaggctctgccatccttccagatcccagtctcaccacacatctacaccagtgtcagctgggctgctgccccctccgccgcctgctctctctctccggtccggagccggtcgctaagcttcagcgagccccagcagccagcacctgcgatgaaatctcatctgatcgtcacttctccaccccgggcccagagtggtgccaggaaagcccgaggggaggctaagaagtgccgcaaggtgtatggcatcgagcaccgggaccagtggtgcacggcctgccggtggaagaaggcctgccagcgctttctggactgagctgtgctgcaggttctactctgttcctggccctgccggcagccactgacaagaggccagtgtgtcaccagccctcagcagaaaccgaaagagaaagaacggaaacacggagtttgggctctgttggctaaggtgtaacacttaaagcaattttctcccattgtgcgaacattttattttttaaaaaaaa

SEQ ID NO: 23408 - DNA, 1790 bp, Homo sapiens
  misc_feature 1..1790: note = ENST00000523095
  source 1..1790: mol_type = unassigned DNA; mol_type = unassigned DNA
gctagccgtccgagccgagccgtccgagccggggaagccgggcgcgtgctgccgctcgtggcgggccgaggagaggagaggcagcagcatggcgagtgtcctgtcccgacgccttggaaagcggtccctcctgggagcccgggtgttgggacccagtgcctcggaggggccctcggctgccccaccctcggagccactgctagaaggggccgctccccagcctttcaccacctctgatgacaccccctgccaggagcagcccaaggaagtccttaaggctcccagcacctcgggccttcagcaggtggcctttcagcctgggcagaaggtttatgtgtggtacgggggtcaagagtgcacaggactggtggagcagcacagctggatggagggtcaggtgaccgtctggctgctggagcagaagctgcaggtctgctgcagggtggaggaggtgtggctggcagagctgcagggcccctgtccccaggcaccacccctggagcccggagcccaggccctggcctacaggcccgtctccaggaacatcgatgtcccaaagaggaagtcggacgcagtggaaatggatgagatgatggcggccatggtgctgacgtccctgtcctgcagccctgttgtacagagtcctcccgggaccgaggccaacttctctgcttcccgtgcggcctgcgacccatggaaggagagtggtgacatctcggacagcggcagcagcactaccagcggtcactggagtgggagcagtggtgtctccaccccctcgcccccccacccccaggccagccccaagtatttgggggatgcttttggttctccccaaactgatcatggctttgagaccgatcctgaccctttcctgctggacgaaccagctccacgaaaaagaaagaactctgtgaaggtgatgtacaagtgcctgtggccaaactgtggcaaagttctgcgctccattgtgggcatcaaacgacacgtcaaagccctccatctgggggacacagtggactctgatcagttcaagcgggaggaggatttctactacacagaggtgcagctgaaggaggaatctgctgctgctgctgctgctgctgccgcaggcaccccagtccctgggactcccacctccgagccagctcccacccccagcatgactggcctgcctctgtctgctcttccaccacctctgcacaaagcccagtcctccggcccagaacatcctggcccggagtcctccctgccctcaggggctctcagcaagtcagctcctgggtccttctggcacattcaggcagatcatgcataccaggctctgccatccttccagatcccagtctcaccacacatctacaccagtgtcagctgggctgctgccccctccgccgcctgctctctctctccggtccggagccggtcgctaagcttcagcgagccccagcagccagcacctgcgatgaaatctcatctgatcgtcacttctccaccccgggcccagagtggtgccaggaaagcccgaggggaggctaagaagtgccgcaaggtgtatggcatcgagcaccgggaccagtggtgcacggcctgccggtggaagaaggcctgccagcgctttctggactgagctgtgctgcaggttctactctgttcctggccctgccggcagccactgacaagaggccagtgtgtcaccagccctcagcagaaaccgaaagagaaagaacggaaacacggagtttgggctctgttggctaaggtgtaacacttaaagcaattttctccca

SEQ ID NO: 23409 - DNA, 573 bp, Homo sapiens
  misc_feature 1..573: note = ENST00000517372
  source 1..573: mol_type = unassigned DNA; mol_type = unassigned DNA
tggttctccccaaactgatcatggctttgagaccgatcctgaccctttcctgctggacgaaccagctccacgaaaaagaaagaactctgtgaaggtgatgtacaagtgcctgtggccaaactgtggcaaagttctgcgctccattgtgggcatcaaacgacacgtcaaagccctccatctgggggacacagtggactctgatcagttcaagcgggaggaggatttctactacacagaggtgcagctgaaggaggaatctgctgctgctgctgctgctgctgccgcaggcaccccagtccctgggactcccacctccgagccagctcccacccccagcatgactggcctgcctctgtctgctcttccaccacctctgcacaaagcccagtcctccggcccagaacatcctggcccggagtcctccctgccctcaggggctctcagcaagtcagctcctgggtccttctggcacattcaggcagatcatgcataccaggtatggggcggggctcgctggaggctcaggctcatagctgactcatcacgggccagcttgattacaggctaccgacc

SEQ ID NO: 23410 - DNA, 699 bp, Homo sapiens
  misc_feature 1..699: note = ENST00000521912
  source 1..699: mol_type = unassigned DNA; mol_type = unassigned DNA
gtcttgcactgtttcctaggctggagtgcagtggcacaatcacagctcactgcagccttgacttccccaggctcaagccattctcctacctcagcctcccaagcagttgggaccacaggagaggagaggcagcagcatggcgagtgtcctgtcccgacgccttggaaagcggtccctcctgggagcccgggtgttgggacccagtgcctcggaggggccctcggctgccccaccctcggagccactgctagaaggggccgctccccagcctttcaccacctctgatgacaccccctgccaggagcagcccaaggaagtccttaaggctcccagcacctcgggccttcagcaggtggcctttcagcctgggcagaaggtttatgtgtggtacgggggtcaagagtgcacaggactggtggagcagcacagctggatggagggtcaggtgaccgtctggctgctggagcagaagctgcaggtctgctgcagggtggaggaggtgtggctggcagagctgcagggcccctgtccccaggcaccacccctggagcccggagcccaggccctggcctacaggcccgtctccaggaacatcgatgtcccaaagaggaagtcggacgcagtggaaatggatgagatgatggcggccatggtgctgacgtccctgtcctgcagccctgttgtacagagtcctcccgg

SEQ ID NO: 23411 - DNA, 703 bp, Homo sapiens
  misc_feature 1..703: note = ENST00000520290
  source 1..703: mol_type = unassigned DNA; mol_type = unassigned DNA
gcgaggagtcgctcgggcacttattgagcgccgactgtctacgggcggccggggacagtcttgcactgtttcctaggctggagtgcagtggcacaatcacagctcactgcagccttgacttccccaggctcaagccattctcctacctcagcctcccaagcagttgggaccacaggtgatgggcagaggcttcagtgtccccttcgcctccgcaggagaggagaggcagcagcatggcgagtgtcctgtcccgacgccttggaaagcggtccctcctgggagcccgggtgttgggacccagtgcctcggaggggccctcggctgccccaccctcggagccactgctagaaggggccgctccccagcctttcaccacctctgatgacaccccctgccaggagcagcccaaggaagtccttaaggctcccagcacctcgggccttcagcaggtggcctttcagcctgggcagaaggtttatgtgtggtacgggggtcaagagtgcacaggactggtggagcagcacagctggatggagggtcaggtgaccgtctggctgctggagcagaagctgcaggtctgctgcagggtggaggaggtgtggctggcagagctgcagggcccctgtccccaggcaccacccctggagcccggagcccaggccctggcctacaggcccgtctccaggaacatcgatgtcccaaa

SEQ ID NO: 23412 - DNA, 584 bp, Homo sapiens
  misc_feature 1..584: note = ENST00000521185
  source 1..584: mol_type = unassigned DNA; mol_type = unassigned DNA
acttattgagcgccgactgtctacgggcggccgggggcctgagccgcgccttgctgctgggtctccacttgtggggaagagagaactggaccaggacagcgcgggaaactgacaatgccactgcttgctagctttgggattttggacaaataggtgatgggcagaggcttcagtgtccccttcgcctccgcaggagaggagaggcagcagcatggcgagtgtcctgtcccgacgccttggaaagcggtccctcctgggagcccgggtgttgggacccagtgcctcggaggggccctcggctgccccaccctcggagccactgctagaaggggccgctccccagcctttcaccacctctgatgacaccccctgccaggagcagcccaaggaagtccttaaggctcccagcacctcgggccttcagcaggtggcctttcagcctgggcagaaggtttatgtgtggtacgggggtcaagagtgcacaggactggtggagcagcacagctggatggagggtcaggtgaccgtctggctgctggagcagaagctgcaggtctgctgcagggtggaggaggtgtggctgg

SEQ ID NO: 23413 - DNA, 501 bp, Homo sapiens
  misc_feature 1..501: note = ENST00000522795
  source 1..501: mol_type = unassigned DNA; mol_type = unassigned DNA
ggagccgggccgcgggccgcgccgggagggcgggcagggccgcggccgctgcagcccggagctgagctagccgtccgagccgagccgtccgagccggggaagccgggcgcgtgctgccgctcgtggcgggccgaggtgatgggcagaggcttcagtgtccccttcgcctccgcaggagaggagaggcagcagcatggcgagtgtcctgtcccgacgccttggaaagcggtccctcctgggagcccgggtgttgggacccagtgcctcggaggggccctcggctgccccaccctcggagccactgctagaaggggccgctccccagcctttcaccacctctgatgacaccccctgccaggagcagcccaaggaagtccttaaggctcccagcacctcgggccttcagcaggtggcctttcagcctgggcagaaggtttatgtgtggtacgggggtcaagagtgcacaggactggtggagcagcacagctggatggagggtca

SEQ ID NO: 23414 - DNA, 224 bp, Homo sapiens
  misc_feature 1..224: note = ENST00000517459
  source 1..224: mol_type = unassigned DNA; mol_type = unassigned DNA
tcgggttctgtggacacaggcaggaagcttaagaggctctgctgagcagggacctggggaagaggagaggagaggcagcagcatggcgagtgtcctgtcccgacgccttggaaagcggtccctcctgggagcccgggtgttgggacccagtgcctcggaggggccctcggctgccccaccctcggagccactgctagaaggggccgctccccagcctttcacca

SEQ ID NO: 23415 - DNA, 413 bp, Homo sapiens
  misc_feature 1..413: note = ENST00000519730
  source 1..413: mol_type = unassigned DNA; mol_type = unassigned DNA
tcttgcactgtttcctaggctggagtgcagtggcacaatcacagctcactgcagccttgacttccccaggctcaagccattctcctacctcagcctcccaagcagttgggaccacaggcctgagccgcgccttgctgctgggtctccacttgtggggaagagagaactggaccaggacagcgcgggaaactgacaatgccactgcttgctagctttgggattttggacaaataggtgtttcttgatttctcttggctgctccagaaccatatggcaaactaggggatggctggtttatagggaccattgatagctcccaagaaagaacttaccagaggagtgaatgaagtggagattctggaggagagaggttggaaggaggccaccgctggaatggtggaagtgcaccaggt

SEQ ID NO: 23416 - DNA, 7907 bp, Homo sapiens
  misc_feature 1..7907: note = ENST00000561648
  source 1..7907: mol_type = unassigned DNA; mol_type = unassigned DNA
gaagaaaatcaaaccctccggaatgtccccctgaagaggaccactgttgcagcggggaccctcctttcaggcatcctcattttatcatgtccctttgctttcttccccagtggccttttcaaaggtcagagagaaatgcttagtcaaacccctacttgagtatcacaggtgactaattttgggatcgaagattaaggaggttttgttgcgtccttaaagaacttggaattggagtccaggtagttttggaaaacttcctggagaaggatggattttaccctgtaaaagaagaaagacatggatgcataagaagagggttgaagagggggaggcctcagacttctcgctggcctgggattcctccgtgacagcagcaggaggcctagaaggagagccagagtgcgatcagaaaaccagccgtgcgctggaagacaggaacagcgtgacaagtcaagaggagagaaatgaggatgatgaagacatggaggatgaatcaatttacacctgcgatcactgtcagcaggacttcgagtctctggcagacctgacggaccaccgggcccaccgctgtcctggagatggtgatgacgacccacaactctcctgggtggcctcgtctccctccagcaaggatgttgcgtcacccacgcagatgatcggagatggttgtgacctcggcctcggcgaggaggaagggggcacgggcctgccatacccttgccagttctgcgacaagtccttcatccgcttgagctacttgaagaggcacgagcagatccacagcgacaagctgccgttcaagtgcacctactgcagccgcctcttcaagcacaagaggagccgtgaccggcacatcaagctgcatacgggcgacaagaagtatcactgccacgagtgcgaggcagccttctcccgcagcgaccacctcaagatccacctgaagacccacagctccagcaagcccttcaagtgcactgtgtgcaagcgcggcttctcctccaccagctcgctgcagagccacatgcaggcccacaaaaagaacaaggagcatctggccaagtcggagaaggaagccaagaaggacgacttcatgtgcgactactgcgaggacaccttcagccagacggaggagctggagaagcacgtgctcacccgccacccgcagctgtccgagaaggcggacctgcagtgcattcactgccctgaggtcttcgtcgacgagaacacactgctcgcccatatccaccaagcccacgccaaccagaaacacaagtgccccatgtgccctgagcagttctcctcagtggaaggtgtctactgccacctggacagccaccggcagcccgactccagcaaccacagtgtcagtcccgaccctgtactgggcagcgtggcctccatgagcagcgccacacccgactccagcgcctctgtggagcgtggctccaccccggactccaccttgaagccgctgcgggggcagaagaagatgcgggatgacgggcagggctggaccaaggtggtctatagctgcccctattgttccaagcgggactttaacagcctggccgtgctggagatccacctgaagaccatccacgcggacaagccccagcagagccacacatgtcagatctgcctggactccatgcccaccctctacaacctcaacgagcacgttcgcaagctgcacaagaaccatgcctaccctgtgatgcagtttggcaacatctctgccttccactgcaactactgccccgagatgttcgccgacatcaatagcctgcaggagcacatccgcgtctcccactgcggccccaacgccaacccctctgacggtaataatgctttcttctgcaaccagtgctccatgggtttccttactgagtcctccctcaccgagcacatccagcaggcccactgcagtgtgggcagtgccaaactagagtctccggtggtgcagcccacgcagtccttcatggaggtctattcctgcccctactgcaccaactcccccatctttggctccatcctgaaactcaccaagcacatcaaggagaaccacaagaacattccactggcccacagcaagaagtccaaggccgagcagagcccagtctcgtccgatgtggaggtgtcttccccgaagcggcagcggctctcagcaagcgccaactccatctccaatggggagtatccttgcaatcaatgcgacctcaagttctccaactttgagagcttccagacccacctgaagctgcacctggagctgctgctgcggaagcaagcgtgcccccagtgcaaagaggactttgactcccaggagtccctcctgcagcacctgacagtgcattacatgaccacgtcgacccactatgtgtgcgagagctgcgacaagcaattttcctcggtggatgacctgcagaagcacctgctggacatgcacacctttgtgttgtaccactgcaccctgtgtcaggaggtcttcgactccaaggtgtccatccaggtgcacctggcggtgaagcacagcaatgagaagaagatgtaccgctgcacggcctgcaactgggacttccgcaaggaggctgacctgcaggtgcacgtcaaacacagccacctgggcaacccggccaaggctcacaagtgcatcttctgtggggagaccttcagcaccgaggtggagctgcagtgccacatcaccacacacagcaagaagtataactgtaagttctgcagcaaggccttccacgccatcatcctgctggagaagcacctgcgggagaagcactgtgtgtttgatgctgcgaccgagaacggcacggccaatggggtacccccaatggccaccaagaaagctgagcctgctgacctgcagggcatgctgcttaagaaccctgaggcacctaacagccatgaggccagcgaggatgacgtggacgcgtcggagcccatgtacggctgtgacatctgtggggcggcctacaccatggaggtgctgctgcagaatcaccggctgcgggaccacaatatccggccgggcgaggatgatggctcacgcaagaaggctgagtttatcaagggcagtcacaagtgcaacgtttgttcacggactttcttctcggagaacgggctacgggagcacctgcagacgcaccggggccctgccaagcactacatgtgtcccatctgtggtgagcgcttcccttcgctgctgacgctcaccgaacacaaggtgacccacagcaagagcctggacacgggcacctgtcgcatctgcaagatgcccctgcagagcgaggaggagtttattgagcactgccagatgcaccctgacctgcgcaactcactcacgggcttccgctgtgtggtctgcatgcagacagtcacttccacgcttgagctcaagatccatggcaccttccacatgcagaagctggcgggcagctcagcggcgtcctcccccaatggccaggggctgcagaagctctacaagtgcgccctgtgcctcaaggagttccgcagcaagcaggacctggtgaagcttgacgtcaatgggctgccctacggcctctgcgccggctgcatggcccgcagcgccaacggacaggtgggtggcctggccccgcccgagcccgccgaccggccctgtgccggcctccgttgccccgagtgcagtgtcaagtttgagagtgccgaagacctggagagccacatgcaggtggaccaccgtgacctcacgccggagaccagtgggccccggaaaggcacccagacatcgccagtgccccggaaaaagacataccagtgcatcaagtgccagatgaccttcgagaacgagagagagatccaaatccacgttgccaaccacatgattgaggaaggcatcaaccacgagtgtaagctgtgcaaccagatgttcgactccccggccaagctcctctgtcacctcattgagcacagcttcgagggcatgggcggcaccttcaaatgccccgtgtgtttcacagtcttcgtccaggccaacaagttgcagcagcacatctttgccgtgcacgggcaggaggacaagatctacgactgctcacagtgccctcagaagttcttcttccagaccgagctgcagaaccacacgatgagccagcacgcacagtgagggatcgctcaacaggacacctctccgcagaaggcttgccggagacgccgtggggagggccatttgaacattacatccaatcaaagtgtcatttgcaacccagatgtaaaactctaatgatttggccatgaggcgctgctattataagcagctggaaatgaatattaatggcagagattaaaagtattccatgctcagtattttttattgtcctgctacagctagtgtgcttttagactttccgccgcagactacatttctagagttagagaaacctgctttttaaggctattgtcctttgttccttcatgtattatattgatagtttttaaaaaagaattagtgtgattttttttctttgcttcttttttttctttcttgtttttcttcccccccaccccccacccccttcggttaactactttttaattgcaattctaggtaattgtgcatcgtgatgtgattgcttggctattgtctgaatatttccttttaattttttaattaaagactaatgctttgattggatttgccagttcaccggacagtgattaaaactatgtaatgaatataatcggtttcagtgcaactggatggtctgcttttaaatgtgacttaatctgactgcagtaactagtacagttcaataaagggaatccatgcgattagcatccggctgcctggttctctcctccccagcctagggccgcgtggggggctgtcagctcctgtaaggtgtgttcccctacaagttcctgtgggcttgcacacgcccttggggacctgcacacaatagaccctgctccccttggaaaagaatcgtagtaacctaatgcatgcagactggacaggctggcagtggccacaggagtcaaagcagaagaccccttaatgatggaataccctgatcttcccactcttggatggggaaacagaggcccaagggtaacgtgcagctttcccaaggccacgcagcaggttggtcaccatgctgattgtgaagtcttcttggctttcccttcagggttggctttcccctttgttggatacaggcaggcaagtgggtagcccttcccttgccaggactccaggtggcacttgggttctgaggcacggagatgtgtgactggggactgcagagcagagccaggtaggagccgcaggttcccagtcatagagatcagtaggatgtgagagcattgagactggtggcgggggccaggtctggagtgaggcaggcaggggcctggggtacattatttcagggggcactcgctctcagggcccccctacacctgcaagtgctgggaatgggtgtcctcttgcattttacactctaggcaccttgcttatttcacctactcctggccctgctggcctcccagggcccacccagcagccttggtctccaggcctcctccatgttacctcccacacctccatcatgctggtgctcagctgacttgccaatcagaggccagaacttgcacggggaaacccttccttgctaacttttcacaaggggcaaggaaattggttattaccctctgcagagcggaaatgaaacaggcagacagattgcacctaattataatgtaatactaagtcacgggtgtggaatttggagcaattatacccatcatcttctagaagactcccatatcaaggggcttctggtgacctataagagttcccctttctttctgtcacctcatgtaatgttctcacgcgggtggggctttcagtttttcaaaaggcatcttacatatgtgaatcatagagcagaccctgccagtagtgggctgttgcctcctggaaactgaaggctgtgaatgccaattttcagcctcctggagacctggcagttttgggggaagaccccagggtagacaccagtgttcctctaagtgtgcccacccgtggactggggcttggggcctggggctggggctatgtctgagtgaggctgccacacatccacagccaggcctaccttttgggcagtgctgggactgtcgatgggaccagtatgtcccggggcctgccacatctccgtctcagggccctctccagctctggatttatcccaaaccccatggagcccaggtgagccctcagtaactaccaatagaagattcgatttgacggttggtggcgtagggctaaattagtcactgcccccattaaaaatacagcggggggtttaagagcttttcacgccatgtgggaatcagcagcgaagccggctgatgccttgggtaaggagagaggcggcctaggggaccgtgaggtaatgaggtttatggcggtgacaaggcagccagggaaccccaccgactcccccctcaccccggccgcattgttctccggctggctctgtccctgctgctacggctgagagcccctcgtgactttgtgtggggagggggctggcagtggggaccctgaggcccttcctgggactggcattctttaccatcaggtggtattagggttggggagcagtgtagggttataaacctgtgcctcggagaactcactaaccccttccagaggaaaggtctggagctgggatgagacacttgcctttcaactgtgaggggccttagagggtctctgggaggcttgtatgaagtgatgcctgacaaagggctgcacacagagacctgtaagcagcatggtcatcaatgatggtgccaggcatcctgcaggagggcaccttttcagccaggagggcgcgatggaatcagcctctcatttggatttggctttggggagtgggcgaggtgactgaaagcctaaggttcattgctgctgtatttagatgtacaaattgtcagtttctagcggctctctgggcagaggaattttgcccaggctgggaaatggaccaggacccttgggccacaggcccctgtcatggaacacctgcccagagtgcccagaagcaggcaggtaagggtttcagtctcagtggagaaactgtcatgggagaaatcttctcgagttccccagccttaaagaacgctccttttaaattcacagttgtgtaatattgaacttttcacctgtttttcttccctcctaaggtgtgtgttcctagggatggaacctgtacctataaatattcagtaaataggaccaaaactcaaatccatcccttcctctactcatccattcagcaagtatttactgagctgcccccaggtgccaggcactgcacagggcactggggataaggagatgaccagcagatgtggtccctggcctcatggaggccacagtggcacaggcaagcatgccagtaaatgcatagccacacctggtcatgagtgccgtgatggcaaagccagaagctgccagggattaatggagggacccgtgtatgagacacaggggtgcattaaggaaggccttgctgaggcaggggcttgagacctgaagaaataagggaggtgggcagtccaagagcagtgggaagagaacactgcaaatgcagaagccgtgagctggaaacgagccagaagtacccttagagagctgtattcctatggagtttcaattctaggtggcttaaaacaatcccagagaagttcagaatcttgtccaagatcataccattcaggatagacttgcgactataacttgggtgcctcaccttccagcctggggtgtctgactccattgttaattttattataacaatcatgatgacaacgatgaataaagtgaaattgtactgtacaggaaa

SEQ ID NO: 23417 - DNA, 4911 bp, Homo sapiens
  misc_feature 1..4911: note = ENST00000563137
  source 1..4911: mol_type = unassigned DNA; mol_type = unassigned DNA
ttttttttttttttttttttttgcataactcggctcggccgagtggcctccggactccccgcgccgctgggaccgccgcttggatcgggagccccggactgccgcattgcaacaggcagggccccggcgcgccccccgggcctccccccgccttcgagcggcctcggccggcccgggctgcccccccaagggaggccgccccggacctgcggtccgctccccacagccgccaaccgggctgcaaaaaaaaaagtttccaagagacaggcggaggagaagggggagaagggctgcccggagcggcggggggcggcggggggagccggctgcggagggcgacggagcgcccggagccccggacatgtccaggcggaagcaggcgaagccgcgctcggtgaaagttgaagagggggaggcctcagacttctcgctggcctgggattcctccgtgacagcagcaggaggcctagaaggagagccagagtgcgatcagaaaaccagccgtgcgctggaagacaggaacagcgtgacaagtcaagaggagagaaatgaggatgatgaagacatggaggatgaatcaatttacacctgcgatcactgtcagcaggacttcgagtctctggcagacctgacggaccaccgggcccaccgctgtcctggagatggtgatgacgacccacaactctcctgggtggcctcgtctccctccagcaaggatgttgcgtcacccacgcagatgatcggagatggttgtgacctcggcctcggcgaggaggaagggggcacgggcctgccatacccttgccagttctgcgacaagtccttcatccgcttgagctacttgaagaggcacgagcagatccacagcgacaagctgccgttcaagtgcacctactgcagccgcctcttcaagcacaagaggagccgtgaccggcacatcaagctgcatacgggcgacaagaagtatcactgccacgagtgcgaggcagccttctcccgcagcgaccacctcaagatccacctgaagacccacagctccagcaagcccttcaagtgcactgtgtgcaagcgcggcttctcctccaccagctcgctgcagagccacatgcaggcccacaaaaagaacaaggagcatctggccaagtcggagaaggaagccaagaaggacgacttcatgtgcgactactgcgaggacaccttcagccagacggaggagctggagaagcacgtgctcacccgccacccgcagctgtccgagaaggcggacctgcagtgcattcactgccctgaggtcttcgtcgacgagaacacactgctcgcccatatccaccaagcccacgccaaccagaaacacaagtgccccatgtgccctgagcagttctcctcagtggaaggtgtctactgccacctggacagccaccggcagcccgactccagcaaccacagtgtcagtcccgaccctgtactgggcagcgtggcctccatgagcagcgccacacccgactccagcgcctctgtggagcgtggctccaccccggactccaccttgaagccgctgcgggggcagaagaagatgcgggatgacgggcagggctggaccaaggtggtctatagctgcccctattgttccaagcgggactttaacagcctggccgtgctggagatccacctgaagaccatccacgcggacaagccccagcagagccacacatgtcagatctgcctggactccatgcccaccctctacaacctcaacgagcacgttcgcaagctgcacaagaaccatgcctaccctgtgatgcagtttggcaacatctctgccttccactgcaactactgccccgagatgttcgccgacatcaatagcctgcaggagcacatccgcgtctcccactgcggccccaacgccaacccctctgacggtaataatgctttcttctgcaaccagtgctccatgggtttccttactgagtcctccctcaccgagcacatccagcaggcccactgcagtgtgggcagtgccaaactagagtctccggtggtgcagcccacgcagtccttcatggaggtctattcctgcccctactgcaccaactcccccatctttggctccatcctgaaactcaccaagcacatcaaggagaaccacaagaacattccactggcccacagcaagaagtccaaggccgagcagagcccagtctcgtccgatgtggaggtgtcttccccgaagcggcagcggctctcagcaagcgccaactccatctccaatggggagtatccttgcaatcaatgcgacctcaagttctccaactttgagagcttccagacccacctgaagctgcacctggagctgctgctgcggaagcaagcgtgcccccagtgcaaagaggactttgactcccaggagtccctcctgcagcacctgacagtgcattacatgaccacgtcgacccactatgtgtgcgagagctgcgacaagcaattttcctcggtggatgacctgcagaagcacctgctggacatgcacacctttgtgttgtaccactgcaccctgtgtcaggaggtcttcgactccaaggtgtccatccaggtgcacctggcggtgaagcacagcaatgagaagaagatgtaccgctgcacggcctgcaactgggacttccgcaaggaggctgacctgcaggtgcacgtcaaacacagccacctgggcaacccggccaaggctcacaagtgcatcttctgtggggagaccttcagcaccgaggtggagctgcagtgccacatcaccacacacagcaagaagtataactgtaagttctgcagcaaggccttccacgccatcatcctgctggagaagcacctgcgggagaagcactgtgtgtttgatgctgcgaccgagaacggcacggccaatggggtacccccaatggccaccaagaaagctgagcctgctgacctgcagggcatgctgcttaagaaccctgaggcacctaacagccatgaggccagcgaggatgacgtggacgcgtcggagcccatgtacggctgtgacatctgtggggcggcctacaccatggaggtgctgctgcagaatcaccggctgcgggaccacaatatccggccgggcgaggatgatggctcacgcaagaaggctgagtttatcaagggcagtcacaagtgcaacgtttgttcacggactttcttctcggagaacgggctacgggagcacctgcagacgcaccggggccctgccaagcactacatgtgtcccatctgtggtgagcgcttcccttcgctgctgacgctcaccgaacacaaggtgacccacagcaagagcctggacacgggcacctgtcgcatctgcaagatgcccctgcagagcgaggaggagtttattgagcactgccagatgcaccctgacctgcgcaactcactcacgggcttccgctgtgtggtctgcatgcagacagtcacttccacgcttgagctcaagatccatggcaccttccacatgcagaagctggcgggcagctcagcggcgtcctcccccaatggccaggggctgcagaagctctacaagtgcgccctgtgcctcaaggagttccgcagcaagcaggacctggtgaagcttgacgtcaatgggctgccctacggcctctgcgccggctgcatggcccgcagcgccaacggacaggtgggtggcctggccccgcccgagcccgccgaccggccctgtgccggcctccgttgccccgagtgcagtgtcaagtttgagagtgccgaagacctggagagccacatgcaggtggaccaccgtgacctcacgccggagaccagtgggccccggaaaggcacccagacatcgccagtgccccggaaaaagacataccagtgcatcaagtgccagatgaccttcgagaacgagagagagatccaaatccacgttgccaaccacatgattgaggaaggcatcaaccacgagtgtaagctgtgcaaccagatgttcgactccccggccaagctcctctgtcacctcattgagcacagcttcgagggcatgggcggcaccttcaaatgccccgtgtgtttcacagtcttcgtccaggccaacaagttgcagcagcacatctttgccgtgcacgggcaggaggacaagatctacgactgctcacagtgccctcagaagttcttcttccagaccgagctgcagaaccacacgatgagccagcacgcacagtgagggatcgctcaacaggacacctctccgcagaaggcttgccggagacgccgtggggagggccatttgaacattacatccaatcaaagtgtcatttgcaacccagatgtaaaactctaatgatttggccatgaggcgctgctattataagcagctggaaatgaatattaatggcagagattaaaagtattccatgctcagtattttttattgtcctgctacagctagtgtgcttttagactttccgccgcagactacatttctagagttagagaaacctgctttttaaggctattgtcctttgttccttcatgtattatattgatagtttttaaaaaagaattagtgtgattttttttctttgcttcttttttttctttcttgtttttcttcccccccaccccccacccccttcggttaactactttttaattgcaattctaggtaattgtgcatcgtgatgtgattgcttggctattgtctgaatatttccttttaattttttaattaaagactaatgctttgattggatttgccagttcaccggacagtgattaaaactatgtaatgaatataatcggtttcagtgcaactggatggtctgcttttaaatgtgacttaatctgactgcagtaactagtacagttcaataaagggaatccatgcgattagca

SEQ ID NO: 23418 - DNA, 4514 bp, Homo sapiens
  misc_feature 1..4514: note = ENST00000562871
  source 1..4514: mol_type = unassigned DNA; mol_type = unassigned DNA
cacagggggcctcagaaatcgtcaggtggtgactggagctgagaggtggccactctgttaccatggaggcctagaaggagagccagagtgcgatcagaaaaccagccgtgcgctggaagacaggaacagcgtgacaagtcaagaggagagaaatgaggatgatgaagacatggaggatgaatcaatttacacctgcgatcactgtcagcaggacttcgagtctctggcagacctgacggaccaccgggcccaccgctgtcctggagatggtgatgacgacccacaactctcctgggtggcctcgtctccctccagcaaggatgttgcgtcacccacgcagatgatcggagatggttgtgacctcggcctcggcgaggaggaagggggcacgggcctgccatacccttgccagttctgcgacaagtccttcatccgcttgagctacttgaagaggcacgagcagatccacagcgacaagctgccgttcaagtgcacctactgcagccgcctcttcaagcacaagaggagccgtgaccggcacatcaagctgcatacgggcgacaagaagtatcactgccacgagtgcgaggcagccttctcccgcagcgaccacctcaagatccacctgaagacccacagctccagcaagcccttcaagtgcactgtgtgcaagcgcggcttctcctccaccagctcgctgcagagccacatgcaggcccacaaaaagaacaaggagcatctggccaagtcggagaaggaagccaagaaggacgacttcatgtgcgactactgcgaggacaccttcagccagacggaggagctggagaagcacgtgctcacccgccacccgcagctgtccgagaaggcggacctgcagtgcattcactgccctgaggtcttcgtcgacgagaacacactgctcgcccatatccaccaagcccacgccaaccagaaacacaagtgccccatgtgccctgagcagttctcctcagtggaaggtgtctactgccacctggacagccaccggcagcccgactccagcaaccacagtgtcagtcccgaccctgtactgggcagcgtggcctccatgagcagcgccacacccgactccagcgcctctgtggagcgtggctccaccccggactccaccttgaagccgctgcgggggcagaagaagatgcgggatgacgggcagggctggaccaaggtggtctatagctgcccctattgttccaagcgggactttaacagcctggccgtgctggagatccacctgaagaccatccacgcggacaagccccagcagagccacacatgtcagatctgcctggactccatgcccaccctctacaacctcaacgagcacgttcgcaagctgcacaagaaccatgcctaccctgtgatgcagtttggcaacatctctgccttccactgcaactactgccccgagatgttcgccgacatcaatagcctgcaggagcacatccgcgtctcccactgcggccccaacgccaacccctctgacggtaataatgctttcttctgcaaccagtgctccatgggtttccttactgagtcctccctcaccgagcacatccagcaggcccactgcagtgtgggcagtgccaaactagagtctccggtggtgcagcccacgcagtccttcatggaggtctattcctgcccctactgcaccaactcccccatctttggctccatcctgaaactcaccaagcacatcaaggagaaccacaagaacattccactggcccacagcaagaagtccaaggccgagcagagcccagtctcgtccgatgtggaggtgtcttccccgaagcggcagcggctctcagcaagcgccaactccatctccaatggggagtatccttgcaatcaatgcgacctcaagttctccaactttgagagcttccagacccacctgaagctgcacctggagctgctgctgcggaagcaagcgtgcccccagtgcaaagaggactttgactcccaggagtccctcctgcagcacctgacagtgcattacatgaccacgtcgacccactatgtgtgcgagagctgcgacaagcaattttcctcggtggatgacctgcagaagcacctgctggacatgcacacctttgtgttgtaccactgcaccctgtgtcaggaggtcttcgactccaaggtgtccatccaggtgcacctggcggtgaagcacagcaatgagaagaagatgtaccgctgcacggcctgcaactgggacttccgcaaggaggctgacctgcaggtgcacgtcaaacacagccacctgggcaacccggccaaggctcacaagtgcatcttctgtggggagaccttcagcaccgaggtggagctgcagtgccacatcaccacacacagcaagaagtataactgtaagttctgcagcaaggccttccacgccatcatcctgctggagaagcacctgcgggagaagcactgtgtgtttgatgctgcgaccgagaacggcacggccaatggggtacccccaatggccaccaagaaagctgagcctgctgacctgcagggcatgctgcttaagaaccctgaggcacctaacagccatgaggccagcgaggatgacgtggacgcgtcggagcccatgtacggctgtgacatctgtggggcggcctacaccatggaggtgctgctgcagaatcaccggctgcgggaccacaatatccggccgggcgaggatgatggctcacgcaagaaggctgagtttatcaagggcagtcacaagtgcaacgtttgttcacggactttcttctcggagaacgggctacgggagcacctgcagacgcaccggggccctgccaagcactacatgtgtcccatctgtggtgagcgcttcccttcgctgctgacgctcaccgaacacaaggtgacccacagcaagagcctggacacgggcacctgtcgcatctgcaagatgcccctgcagagcgaggaggagtttattgagcactgccagatgcaccctgacctgcgcaactcactcacgggcttccgctgtgtggtctgcatgcagacagtcacttccacgcttgagctcaagatccatggcaccttccacatgcagaagctggcgggcagctcagcggcgtcctcccccaatggccaggggctgcagaagctctacaagtgcgccctgtgcctcaaggagttccgcagcaagcaggacctggtgaagcttgacgtcaatgggctgccctacggcctctgcgccggctgcatggcccgcagcgccaacggacaggtgggtggcctggccccgcccgagcccgccgaccggccctgtgccggcctccgttgccccgagtgcagtgtcaagtttgagagtgccgaagacctggagagccacatgcaggtggaccaccgtgacctcacgccggagaccagtgggccccggaaaggcacccagacatcgccagtgccccggaaaaagacataccagtgcatcaagtgccagatgaccttcgagaacgagagagagatccaaatccacgttgccaaccacatgattgaggaaggcatcaaccacgagtgtaagctgtgcaaccagatgttcgactccccggccaagctcctctgtcacctcattgagcacagcttcgagggcatgggcggcaccttcaaatgccccgtgtgtttcacagtcttcgtccaggccaacaagttgcagcagcacatctttgccgtgcacgggcaggaggacaagatctacgactgctcacagtgccctcagaagttcttcttccagaccgagctgcagaaccacacgatgagccagcacgcacagtgagggatcgctcaacaggacacctctccgcagaaggcttgccggagacgccgtggggagggccatttgaacattacatccaatcaaagtgtcatttgcaacccagatgtaaaactctaatgatttggccatgaggcgctgctattataagcagctggaaatgaatattaatggcagagattaaaagtattccatgctcagtattttttattgtcctgctacagctagtgtgcttttagactttccgccgcagactacatttctagagttagagaaacctgctttttaaggctattgtcctttgttccttcatgtattatattgatagtttttaaaaaagaattagtgtgattttttttctttgcttcttttttttctttcttgtttttcttcccccccaccccccacccccttcggttaactactttttaattgcaattctaggtaattgtgcatcgtgatgtgattgcttggctattgtctgaatatttccttttaattttttaattaaagactaatgctttgattggatttgccagttcaccggacagtgattaaaactatgtaatgaatataatcggtttcagtgcaactggatggtctgcttttaaatgtgacttaatctgactgcagtaactagtacagttcaataaagggaatccatgcgattagc

SEQ ID NO: 23419 - DNA, 4201 bp, Homo sapiens
  misc_feature 1..4201: note = ENST00000535559
  source 1..4201: mol_type = unassigned DNA; mol_type = unassigned DNA
accagtgggccggtgggaagcgcctctccagccctcgcctgccctgccgccgggtgctgggaacccgggctcaggttctggccctcttggcatcggccagtttgccctgggacgccctggtgagcagggggaaagatggtgatgacgacccacaactctcctgggtggcctcgtctccctccagcaaggatgttgcgtcacccacgcagatgatcggagatggttgtgacctcggcctcggcgaggaggaagggggcacgggcctgccatacccttgccagttctgcgacaagtccttcatccgcttgagctacttgaagaggcacgagcagatccacagcgacaagctgccgttcaagtgcacctactgcagccgcctcttcaagcacaagaggagccgtgaccggcacatcaagctgcatacgggcgacaagaagtatcactgccacgagtgcgaggcagccttctcccgcagcgaccacctcaagatccacctgaagacccacagctccagcaagcccttcaagtgcactgtgtgcaagcgcggcttctcctccaccagctcgctgcagagccacatgcaggcccacaaaaagaacaaggagcatctggccaagtcggagaaggaagccaagaaggacgacttcatgtgcgactactgcgaggacaccttcagccagacggaggagctggagaagcacgtgctcacccgccacccgcagctgtccgagaaggcggacctgcagtgcattcactgccctgaggtcttcgtcgacgagaacacactgctcgcccatatccaccaagcccacgccaaccagaaacacaagtgccccatgtgccctgagcagttctcctcagtggaaggtgtctactgccacctggacagccaccggcagcccgactccagcaaccacagtgtcagtcccgaccctgtactgggcagcgtggcctccatgagcagcgccacacccgactccagcgcctctgtggagcgtggctccaccccggactccaccttgaagccgctgcgggggcagaagaagatgcgggatgacgggcagggctggaccaaggtggtctatagctgcccctattgttccaagcgggactttaacagcctggccgtgctggagatccacctgaagaccatccacgcggacaagccccagcagagccacacatgtcagatctgcctggactccatgcccaccctctacaacctcaacgagcacgttcgcaagctgcacaagaaccatgcctaccctgtgatgcagtttggcaacatctctgccttccactgcaactactgccccgagatgttcgccgacatcaatagcctgcaggagcacatccgcgtctcccactgcggccccaacgccaacccctctgacggtaataatgctttcttctgcaaccagtgctccatgggtttccttactgagtcctccctcaccgagcacatccagcaggcccactgcagtgtgggcagtgccaaactagagtctccggtggtgcagcccacgcagtccttcatggaggtctattcctgcccctactgcaccaactcccccatctttggctccatcctgaaactcaccaagcacatcaaggagaaccacaagaacattccactggcccacagcaagaagtccaaggccgagcagagcccagtctcgtccgatgtggaggtgtcttccccgaagcggcagcggctctcagcaagcgccaactccatctccaatggggagtatccttgcaatcaatgcgacctcaagttctccaactttgagagcttccagacccacctgaagctgcacctggagctgctgctgcggaagcaagcgtgcccccagtgcaaagaggactttgactcccaggagtccctcctgcagcacctgacagtgcattacatgaccacgtcgacccactatgtgtgcgagagctgcgacaagcaattttcctcggtggatgacctgcagaagcacctgctggacatgcacacctttgtgttgtaccactgcaccctgtgtcaggaggtcttcgactccaaggtgtccatccaggtgcacctggcggtgaagcacagcaatgagaagaagatgtaccgctgcacggcctgcaactgggacttccgcaaggaggctgacctgcaggtgcacgtcaaacacagccacctgggcaacccggccaaggctcacaagtgcatcttctgtggggagaccttcagcaccgaggtggagctgcagtgccacatcaccacacacagcaagaagtataactgtaagttctgcagcaaggccttccacgccatcatcctgctggagaagcacctgcgggagaagcactgtgtgtttgatgctgcgaccgagaacggcacggccaatggggtacccccaatggccaccaagaaagctgagcctgctgacctgcagggcatgctgcttaagaaccctgaggcacctaacagccatgaggccagcgaggatgacgtggacgcgtcggagcccatgtacggctgtgacatctgtggggcggcctacaccatggaggtgctgctgcagaatcaccggctgcgggaccacaatatccggccgggcgaggatgatggctcacgcaagaaggctgagtttatcaagggcagtcacaagtgcaacgtttgttcacggactttcttctcggagaacgggctacgggagcacctgcagacgcaccggggccctgccaagcactacatgtgtcccatctgtggtgagcgcttcccttcgctgctgacgctcaccgaacacaaggtgacccacagcaagagcctggacacgggcacctgtcgcatctgcaagatgcccctgcagagcgaggaggagtttattgagcactgccagatgcaccctgacctgcgcaactcactcacgggcttccgctgtgtggtctgcatgcagacagtcacttccacgcttgagctcaagatccatggcaccttccacatgcagaagctggcgggcagctcagcggcgtcctcccccaatggccaggggctgcagaagctctacaagtgcgccctgtgcctcaaggagttccgcagcaagcaggacctggtgaagcttgacgtcaatgggctgccctacggcctctgcgccggctgcatggcccgcagcgccaacggacaggtgggtggcctggccccgcccgagcccgccgaccggccctgtgccggcctccgttgccccgagtgcagtgtcaagtttgagagtgccgaagacctggagagccacatgcaggtggaccaccgtgacctcacgccggagaccagtgggccccggaaaggcacccagacatcgccagtgccccggaaaaagacataccagtgcatcaagtgccagatgaccttcgagaacgagagagagatccaaatccacgttgccaaccacatgattgaggaaggcatcaaccacgagtgtaagctgtgcaaccagatgttcgactccccggccaagctcctctgtcacctcattgagcacagcttcgagggcatgggcggcaccttcaaatgccccgtgtgtttcacagtcttcgtccaggccaacaagttgcagcagcacatctttgccgtgcacgggcaggaggacaagatctacgactgctcacagtgccctcagaagttcttcttccagaccgagctgcagaaccacacgatgagccagcacgcacagtgagggatcgctcaacaggacacctctccgcagaaggcttgccggagacgccgtggggagggccatttgaacattacatccaatcaaagtgtcatttgcaacccagatgtaaaactctaatgatttggccatgaggcgctgctattataagcagctggaaatgaatattaatggcagagattaaaagtattccatgctcagtattttttattgtcctgctacagctagtgtgcttttagactttccgccgcagactacatttctagagttagagaaacctgctttttaaggctattgtcctttgttccttcatgtattatattgatagtttttaaaaaagaattagtgtgattttttttctttgcttcttttttttctttcttgtttttcttcccccccaccccccacccccttcggttaactactttttaattgcaattctaggtaattgtgcatcgtgatgtgattgcttggctattgtctgaatattt

SEQ ID NO: 23420 - DNA, 4017 bp, Homo sapiens
  misc_feature 1..4017: note = ENST00000567169
  source 1..4017: mol_type = unassigned DNA; mol_type = unassigned DNA
atccttcccgtctgccgagcccgtcatgtgaggcccccgggggagaaggtgctggtgctctgggagggtgttccaggaggccccttgagctgggctggggagctgggcttcagagatggtgatgacgacccacaactctcctgggtggcctcgtctccctccagcaaggatgttgcgtcacccacgcagatgatcggagatggttgtgacctcggcctcggcgaggaggaagggggcacgggcctgccatacccttgccagttctgcgacaagtccttcatccgcttgagctacttgaagaggcacgagcagatccacagcgacaagctgccgttcaagtgcacctactgcagccgcctcttcaagcacaagaggagccgtgaccggcacatcaagctgcatacgggcgacaagaagtatcactgccacgagtgcgaggcagccttctcccgcagcgaccacctcaagatccacctgaagacccacagctccagcaagcccttcaagtgcactgtgtgcaagcgcggcttctcctccaccagctcgctgcagagccacatgcaggcccacaaaaagaacaaggagcatctggccaagtcggagaaggaagccaagaaggacgacttcatgtgcgactactgcgaggacaccttcagccagacggaggagctggagaagcacgtgctcacccgccacccgcagctgtccgagaaggcggacctgcagtgcattcactgccctgaggtcttcgtcgacgagaacacactgctcgcccatatccaccaagcccacgccaaccagaaacacaagtgccccatgtgccctgagcagttctcctcagtggaaggtgtctactgccacctggacagccaccggcagcccgactccagcaaccacagtgtcagtcccgaccctgtactgggcagcgtggcctccatgagcagcgccacacccgactccagcgcctctgtggagcgtggctccaccccggactccaccttgaagccgctgcgggggcagaagaagatgcgggatgacgggcagggctggaccaaggtggtctatagctgcccctattgttccaagcgggactttaacagcctggccgtgctggagatccacctgaagaccatccacgcggacaagccccagcagagccacacatgtcagatctgcctggactccatgcccaccctctacaacctcaacgagcacgttcgcaagctgcacaagaaccatgcctaccctgtgatgcagtttggcaacatctctgccttccactgcaactactgccccgagatgttcgccgacatcaatagcctgcaggagcacatccgcgtctcccactgcggccccaacgccaacccctctgacggtaataatgctttcttctgcaaccagtgctccatgggtttccttactgagtcctccctcaccgagcacatccagcaggcccactgcagtgtgggcagtgccaaactagagtctccggtggtgcagcccacgcagtccttcatggaggtctattcctgcccctactgcaccaactcccccatctttggctccatcctgaaactcaccaagcacatcaaggagaaccacaagaacattccactggcccacagcaagaagtccaaggccgagcagagcccagtctcgtccgatgtggaggtgtcttccccgaagcggcagcggctctcagcaagcgccaactccatctccaatggggagtatccttgcaatcaatgcgacctcaagttctccaactttgagagcttccagacccacctgaagctgcacctggagctgctgctgcggaagcaagcgtgcccccagtgcaaagaggactttgactcccaggagtccctcctgcagcacctgacagtgcattacatgaccacgtcgacccactatgtgtgcgagagctgcgacaagcaattttcctcggtggatgacctgcagaagcacctgctggacatgcacacctttgtgttgtaccactgcaccctgtgtcaggaggtcttcgactccaaggtgtccatccaggtgcacctggcggtgaagcacagcaatgagaagaagatgtaccgctgcacggcctgcaactgggacttccgcaaggaggctgacctgcaggtgcacgtcaaacacagccacctgggcaacccggccaaggctcacaagtgcatcttctgtggggagaccttcagcaccgaggtggagctgcagtgccacatcaccacacacagcaagaagtataactgtaagttctgcagcaaggccttccacgccatcatcctgctggagaagcacctgcgggagaagcactgtgtgtttgatgctgcgaccgagaacggcacggccaatggggtacccccaatggccaccaagaaagctgagcctgctgacctgcagggcatgctgcttaagaaccctgaggcacctaacagccatgaggccagcgaggatgacgtggacgcgtcggagcccatgtacggctgtgacatctgtggggcggcctacaccatggaggtgctgctgcagaatcaccggctgcgggaccacaatatccggccgggcgaggatgatggctcacgcaagaaggctgagtttatcaagggcagtcacaagtgcaacgtttgttcacggactttcttctcggagaacgggctacgggagcacctgcagacgcaccggggccctgccaagcactacatgtgtcccatctgtggtgagcgcttcccttcgctgctgacgctcaccgaacacaaggtgacccacagcaagagcctggacacgggcacctgtcgcatctgcaagatgcccctgcagagcgaggaggagtttattgagcactgccagatgcaccctgacctgcgcaactcactcacgggcttccgctgtgtggtctgcatgcagacagtcacttccacgcttgagctcaagatccatggcaccttccacatgcagaagctggcgggcagctcagcggcgtcctcccccaatggccaggggctgcagaagctctacaagtgcgccctgtgcctcaaggagttccgcagcaagcaggacctggtgaagcttgacgtcaatgggctgccctacggcctctgcgccggctgcatggcccgcagcgccaacggacaggtgggtggcctggccccgcccgagcccgccgaccggccctgtgccggcctccgttgccccgagtgcagtgtcaagtttgagagtgccgaagacctggagagccacatgcaggtggaccaccgtgacctcacgccggagaccagtgggccccggaaaggcacccagacatcgccagtgccccggaaaaagacataccagtgcatcaagtgccagatgaccttcgagaacgagagagagatccaaatccacgttgccaaccacatgattgaggaaggcatcaaccacgagtgtaagctgtgcaaccagatgttcgactccccggccaagctcctctgtcacctcattgagcacagcttcgagggcatgggcggcaccttcaaatgccccgtgtgtttcacagtcttcgtccaggccaacaagttgcagcagcacatctttgccgtgcacgggcaggaggacaagatctacgactgctcacagtgccctcagaagttcttcttccagaccgagctgcagaaccacacgatgagccagcacgcacagtgagggatcgctcaacaggacacctctccgcagaaggcttgccggagacgccgtggggagggccatttgaacattacatccaatcaaagtgtcatttgcaacccagatgtaaaactctaatgatttggccatgaggcgctgctattataagcagctggaaatgaatattaatggcagagattaaaagtattccatgctcagtattttttattgtcctgctacagctagtgtgcttttagactttccgccgcagactacatttctagagttagagaaacctgctttttaaggctattgtcctttgttccttcatgtattatattgata

SEQ ID NO: 23421 - DNA, 4018 bp, Homo sapiens
  misc_feature 1..4018: note = ENST00000562520
  source 1..4018: mol_type = unassigned DNA; mol_type = unassigned DNA
ttttcccaagtcagaacccttcccgggcctgcccggagaccagagtctcagccggttcaggagctgcgggggacgcgcggcgccccctggcggctgggtaaaacctcgcagaaagtagcagctggtttatttcttctgacaactgcgcggggagggggtgctcctgcaaggtctcagggttgaagagggggaggcctcagacttctcgctggcctgggattcctccgtgacagcagcaggaggcctagaaggagagccagagtgcgatcagaaaaccagccgtgcgctggaagacaggaacagcgtgacaagtcaagaggagagaaatgaggatgatgaagacatggaggatgaatcaatttacacctgcgatcactgtcagcaggacttcgagtctctggcagacctgacggaccaccgggcccaccgctgtcctggagatggtgatgacgacccacaactctcctgggtggcctcgtctccctccagcaaggatgttgcgtcacccacgcagatgatcggagatggttgtgacctcggcctcggcgaggaggaagggggcacgggcctgccatacccttgccagttctgcgacaagtccttcatccgcttgagctacttgaagaggcacgagcagatccacagcgacaagctgccgttcaagtgcacctactgcagccgcctcttcaagcacaagaggagccgtgaccggcacatcaagctgcatacgggcgacaagaagtatcactgccacgagtgcgaggcagccttctcccgcagcgaccacctcaagatccacctgaagacccacagctccagcaagcccttcaagtgcactgtgtgcaagcgcggcttctcctccaccagctcgctgcagagccacatgcaggcccacaaaaagaacaaggagcatctggccaagtcggagaaggaagccaagaaggacgacttcatgtgcgactactgcgaggacaccttcagccagacggaggagctggagaagcacgtgctcacccgccacccgcagctgtccgagaaggcggacctgcagtgcattcactgccctgaggtcttcgtcgacgagaacacactgctcgcccatatccaccaagcccacgccaaccagaaacacaagtgccccatgtgccctgagcagttctcctcagtggaaggtgtctactgccacctggacagccaccggcagcccgactccagcaaccacagtgtcagtcccgaccctgtactgggcagcgtggcctccatgagcagcgccacacccgactccagcgcctctgtggagcgtggctccaccccggactccaccttgaagccgctgcgggggcagaagaagatgcgggatgacgggcagggctggaccaaggtggtctatagctgcccctattgttccaagcgggactttaacagcctggccgtgctggagatccacctgaagaccatccacgcggacaagccccagcagagccacacatgtcagatctgcctggactccatgcccaccctctacaacctcaacgagcacgttcgcaagctgcacaagaaccatgcctaccctgtgatgcagtttggcaacatctctgccttccactgcaactactgccccgagatgttcgccgacatcaatagcctgcaggagcacatccgcgtctcccactgcggccccaacgccaacccctctgacggtaataatgctttcttctgcaaccagtgctccatgggtttccttactgagtcctccctcaccgagcacatccagcaggcccactgcagtgtgggcagtgccaaactagagtctccggtggtgcagcccacgcagtccttcatggaggtctattcctgcccctactgcaccaactcccccatctttggctccatcctgaaactcaccaagcacatcaaggagaaccacaagaacattccactggcccacagcaagaagtccaaggccgagcagagcccagtctcgtccgatgtggaggtgtcttccccgaagcggcagcggctctcagcaagcgccaactccatctccaatggggagtatccttgcaatcaatgcgacctcaagttctccaactttgagagcttccagacccacctgaagctgcacctggagctgctgctgcggaagcaagcgtgcccccagtgcaaagaggactttgactcccaggagtccctcctgcagcacctgacagtgcattacatgaccacgtcgacccactatgtgtgcgagagctgcgacaagcaattttcctcggtggatgacctgcagaagcacctgctggacatgcacacctttgtgttgtaccactgcaccctgtgtcaggaggtcttcgactccaaggtgtccatccaggtgcacctggcggtgaagcacagcaatgagaagaagatgtaccgctgcacggcctgcaactgggacttccgcaaggaggctgacctgcaggtgcacgtcaaacacagccacctgggcaacccggccaaggctcacaagtgcatcttctgtggggagaccttcagcaccgaggtggagctgcagtgccacatcaccacacacagcaagaagtataactgtaagttctgcagcaaggccttccacgccatcatcctgctggagaagcacctgcgggagaagcactgtgtgtttgatgctgcgaccgagaacggcacggccaatggggtacccccaatggccaccaagaaagctgagcctgctgacctgcagggcatgctgcttaagaaccctgaggcacctaacagccatgaggccagcgaggatgacgtggacgcgtcggagcccatgtacggctgtgacatctgtggggcggcctacaccatggaggtgctgctgcagaatcaccggctgcgggaccacaatatccggccgggcgaggatgatggctcacgcaagaaggctgagtttatcaagggcagtcacaagtgcaacgtttgttcacggactttcttctcggagaacgggctacgggagcacctgcagacgcaccggggccctgccaagcactacatgtgtcccatctgtggtgagcgcttcccttcgctgctgacgctcaccgaacacaaggtgacccacagcaagagcctggacacgggcacctgtcgcatctgcaagatgcccctgcagagcgaggaggagtttattgagcactgccagatgcaccctgacctgcgcaactcactcacgggcttccgctgtgtggtctgcatgcagacagtcacttccacgcttgagctcaagatccatggcaccttccacatgcagaagctggcgggcagctcagcggcgtcctcccccaatggccaggggctgcagaagctctacaagtgcgccctgtgcctcaaggagttccgcagcaagcaggacctggtgaagcttgacgtcaatgggctgccctacggcctctgcgccggctgcatggcccgcagcgccaacggacaggtgggtggcctggccccgcccgagcccgccgaccggccctgtgccggcctccgttgccccgagtgcagtgtcaagtttgagagtgccgaagacctggagagccacatgcaggtggaccaccgtgacctcacgccggagaccagtgggccccggaaaggcacccagacatcgccagtgccccggaaaaagacataccagtgcatcaagtgccagatgaccttcgagaacgagagagagatccaaatccacgttgccaaccacatgattgaggaaggcatcaaccacgagtgtaagctgtgcaaccagatgttcgactccccggccaagctcctctgtcacctcattgagcacagcttcgagggcatgggcggcaccttcaaatgccccgtgtgtttcacagtcttcgtccaggccaacaagttgcagcagcacatctttgccgtgcacgggcaggaggacaagatctacgactgctcacagtgccctcagaagttcttcttccagaccgagctgcagaaccacacgatgagccagcacgcacagtga

SEQ ID NO: 23422 - DNA, 456 bp, Homo sapiens
  misc_feature 1..456: note = ENST00000568094
  source 1..456: mol_type = unassigned DNA; mol_type = unassigned DNA
ttgaagagggggaggcctcagacttctcgctggcctgggattcctccgtgacagcagcaggaggcctagaaggagagccagagtgcgatcagaaaaccagccgtgcgctggaagacaggaacagcgtgacaagtcaagaggagagaaatgaggatgatgaagacatggaggatgaatcaatttacacctgcgatcactgtcagcaggacttcgagtctctggcagacctgacggaccaccgggcccaccgctgtcctggaggtaatgcaaaacagccccaggactctgacaggtggttacacgggtaattggacatagcaacagcttgaagcctcaagtgagattaaagaattaataatgtaattttacagttaatgtcattttattgtggtgtcttgggtaccctgtatccgccttttaaatacaattaaaaataaaagcaacagctttccggca

SEQ ID NO: 23423 - DNA, 4578 bp, Homo sapiens
  misc_feature 1..4578: note = ENST00000262383
  source 1..4578: mol_type = unassigned DNA; mol_type = unassigned DNA
gaaaacttcctggagaaggatggattttaccctgtaaaagaagaaagacatggatgcataagaagagggttgaagagggggaggcctcagacttctcgctggcctgggattcctccgtgacagcagcaggaggcctagaaggagagccagagtgcgatcagaaaaccagccgtgcgctggaagacaggaacagcgtgacaagtcaagaggagagaaatgaggatgatgaagacatggaggatgaatcaatttacacctgcgatcactgtcagcaggacttcgagtctctggcagacctgacggaccaccgggcccaccgctgtcctggagatggtgatgacgacccacaactctcctgggtggcctcgtctccctccagcaaggatgttgcgtcacccacgcagatgatcggagatggttgtgacctcggcctcggcgaggaggaagggggcacgggcctgccatacccttgccagttctgcgacaagtccttcatccgcttgagctacttgaagaggcacgagcagatccacagcgacaagctgccgttcaagtgcacctactgcagccgcctcttcaagcacaagaggagccgtgaccggcacatcaagctgcatacgggcgacaagaagtatcactgccacgagtgcgaggcagccttctcccgcagcgaccacctcaagatccacctgaagacccacagctccagcaagcccttcaagtgcactgtgtgcaagcgcggcttctcctccaccagctcgctgcagagccacatgcaggcccacaaaaagaacaaggagcatctggccaagtcggagaaggaagccaagaaggacgacttcatgtgcgactactgcgaggacaccttcagccagacggaggagctggagaagcacgtgctcacccgccacccgcagctgtccgagaaggcggacctgcagtgcattcactgccctgaggtcttcgtcgacgagaacacactgctcgcccatatccaccaagcccacgccaaccagaaacacaagtgccccatgtgccctgagcagttctcctcagtggaaggtgtctactgccacctggacagccaccggcagcccgactccagcaaccacagtgtcagtcccgaccctgtactgggcagcgtggcctccatgagcagcgccacacccgactccagcgcctctgtggagcgtggctccaccccggactccaccttgaagccgctgcgggggcagaagaagatgcgggatgacgggcagggctggaccaaggtggtctatagctgcccctattgttccaagcgggactttaacagcctggccgtgctggagatccacctgaagaccatccacgcggacaagccccagcagagccacacatgtcagatctgcctggactccatgcccaccctctacaacctcaacgagcacgttcgcaagctgcacaagaaccatgcctaccctgtgatgcagtttggcaacatctctgccttccactgcaactactgccccgagatgttcgccgacatcaatagcctgcaggagcacatccgcgtctcccactgcggccccaacgccaacccctctgacggtaataatgctttcttctgcaaccagtgctccatgggtttccttactgagtcctccctcaccgagcacatccagcaggcccactgcagtgtgggcagtgccaaactagagtctccggtggtgcagcccacgcagtccttcatggaggtctattcctgcccctactgcaccaactcccccatctttggctccatcctgaaactcaccaagcacatcaaggagaaccacaagaacattccactggcccacagcaagaagtccaaggccgagcagagcccagtctcgtccgatgtggaggtgtcttccccgaagcggcagcggctctcagcaagcgccaactccatctccaatggggagtatccttgcaatcaatgcgacctcaagttctccaactttgagagcttccagacccacctgaagctgcacctggagctgctgctgcggaagcaagcgtgcccccagtgcaaagaggactttgactcccaggagtccctcctgcagcacctgacagtgcattacatgaccacgtcgacccactatgtgtgcgagagctgcgacaagcaattttcctcggtggatgacctgcagaagcacctgctggacatgcacacctttgtgttgtaccactgcaccctgtgtcaggaggtcttcgactccaaggtgtccatccaggtgcacctggcggtgaagcacagcaatgagaagaagatgtaccgctgcacggcctgcaactgggacttccgcaaggaggctgacctgcaggtgcacgtcaaacacagccacctgggcaacccggccaaggctcacaagtgcatcttctgtggggagaccttcagcaccgaggtggagctgcagtgccacatcaccacacacagcaagaagtataactgtaagttctgcagcaaggccttccacgccatcatcctgctggagaagcacctgcgggagaagcactgtgtgtttgatgctgcgaccgagaacggcacggccaatggggtacccccaatggccaccaagaaagctgagcctgctgacctgcagggcatgctgcttaagaaccctgaggcacctaacagccatgaggccagcgaggatgacgtggacgcgtcggagcccatgtacggctgtgacatctgtggggcggcctacaccatggaggtgctgctgcagaatcaccggctgcgggaccacaatatccggccgggcgaggatgatggctcacgcaagaaggctgagtttatcaagggcagtcacaagtgcaacgtttgttcacggactttcttctcggagaacgggctacgggagcacctgcagacgcaccggggccctgccaagcactacatgtgtcccatctgtggtgagcgcttcccttcgctgctgacgctcaccgaacacaaggtgacccacagcaagagcctggacacgggcacctgtcgcatctgcaagatgcccctgcagagcgaggaggagtttattgagcactgccagatgcaccctgacctgcgcaactcactcacgggcttccgctgtgtggtctgcatgcagacagtcacttccacgcttgagctcaagatccatggcaccttccacatgcagaagctggcgggcagctcagcggcgtcctcccccaatggccaggggctgcagaagctctacaagtgcgccctgtgcctcaaggagttccgcagcaagcaggacctggtgaagcttgacgtcaatgggctgccctacggcctctgcgccggctgcatggcccgcagcgccaacggacaggtgggtggcctggccccgcccgagcccgccgaccggccctgtgccggcctccgttgccccgagtgcagtgtcaagtttgagagtgccgaagacctggagagccacatgcaggtggaccaccgtgacctcacgccggagaccagtgggccccggaaaggcacccagacatcgccagtgccccggaaaaagacataccagtgcatcaagtgccagatgaccttcgagaacgagagagagatccaaatccacgttgccaaccacatgattgaggaaggcatcaaccacgagtgtaagctgtgcaaccagatgttcgactccccggccaagctcctctgtcacctcattgagcacagcttcgagggcatgggcggcaccttcaaatgccccgtgtgtttcacagtcttcgtccaggccaacaagttgcagcagcacatctttgccgtgcacgggcaggaggacaagatctacgactgctcacagtgccctcagaagttcttcttccagaccgagctgcagaaccacacgatgagccagcacgcacagtgagggatcgctcaacaggacacctctccgcagaaggcttgccggagacgccgtggggagggccatttgaacattacatccaatcaaagtgtcatttgcaacccagatgtaaaactctaatgatttggccatgaggcgctgctattataagcagctggaaatgaatattaatggcagagattaaaagtattccatgctcagtattttttattgtcctgctacagctagtgtgcttttagactttccgccgcagactacatttctagagttagagaaacctgctttttaaggctattgtcctttgttccttcatgtattatattgatagtttttaaaaaagaattagtgtgattttttttctttgcttcttttttttctttcttgtttttcttcccccccaccccccacccccttcggttaactactttttaattgcaattctaggtaattgtgcatcgtgatgtgattgcttggctattgtctgaatatttccttttaattttttaattaaagactaatgctttgattggatttgccagttcaccggacagtgattaaaactatgtaatgaatataatcggtttcagtgcaactggatggtctgcttttaaatgtgacttaatctgactgcagtaactagtacagttcaataaagggaatccatgcgattagc

SEQ ID NO: 23424 - DNA, 10414 bp, Homo sapiens
  misc_feature 1..10414: note = ENST00000277225
  source 1..10414: mol_type = unassigned DNA; mol_type = unassigned DNA
ggagagggagggagggagagagagagagagggagagagacggatatctcaggtcatctgcagctgcagcgagtctgaggagccgaggaaggcagggaagatggcgatcctccattgctgagacccggcagaagcacatgagactcccaaacaacttccacaacaataacccgagcaggaagaggagaaagagaaagaggataaggaggcggtggggctggagaacccgaagcacctcccggcgccgggacgcttcttctgttcctaatgtgagaggctagacccagatcatggaggtgcttcagtgtgatggctgtgatttccgagccccgtcttatgaagatctcaaggcacacattcaggatgtccacacggcatttctgcagccaactgatgttgctgaggacaatgtgaatgagctacgatgtgggtccgtgaatgccagtaatcagacagaggtggagttttcttctataaaggatgaatttgccattgcagaagatttatcaggtcaaaatgcaacttcattggggaccggaggttactatggccacagtccaggatattatggtcagcatattgccgctaatcccaaaccaacaaacaagttttttcaatgcaagttctgtgtacgctacttcaggtcaaaaaacctcctcatagaacacactagaaaggtccatggagctcaagctgaagggagttcatcaggaccccctgtcccgggatccttaaattataatatcatgatgcacgagggatttggaaaggtcttctcttgccagttttgcacatacaagtcaccaagaagggcaagaataattaagcatcagaagatgtatcacaaaaacaatttgaaggagaccactgctcccccacctgctcctgctccaatgccagaccctgtggttccgcccgtatcactgcaggacccctgcaaggaactgccagcagaggttgtggagcgcagcatcttagagtctatggtcaagcctttgaccaaatctcgaggcaacttttgttgtgagtggtgcagctaccagaccccccgccgagaacgctggtgtgaccacatgatgaagaaacaccgcagtatggtcaagatcctttccagtctcagacagcaacaagaaggaactaatctacctgatgtgccgaacaagagtgcccccagccccacttccaactccacctatctgaccatgaatgctgcaagccgggagatacccaatactaccgtctccaacttcaggggctccatgggcaactccatcatgagacccaattcttcagcttccaagttttcgcccatgtcttaccctcagatgaagccgaagtcacctcacaattctggtctagttaacttgacagagagatcccgttatggaatgactgacatgaccaattcttctgctgacctggaaactaacagcatgctaaatgactctagttctgatgaagagttaaatgaaatagacagtgagaatggtttaagtgctatggatcaccagacatcaggcctgtctgcagagcagctgatgggctcagatggcaacaaattattggagaccaaggggattccatttagaagattcatgaataggttccagtgccccttttgtcctttcctcaccatgcatcgacgtagcatctctcgtcacatagaaaacatccacttatctggaaagacagctgtctacaaatgtgacgaatgtccgtttacttgcaagagctcgttgaaacttggggctcacaaacagtgtcacacgggtacaacgtcagattgggatgctgtgaattcccagagtgaaagcatttcttcctcactgaatgaaggtgtggtgtcttatgagagctcaagcatcaatggtagaaagtcaggagtcatgttggatcccttgcagcagcaacagccaccgcagccaccaccaccgccgccgccaccaccaccatcacagccacagccactgcagcagccacagccaccacagctgcagccaccacatcaggtgccaccccagccacaaacacagccaccaccaacgcagcagccacagccacccacacaagccgcacctctgcacccatacaaatgcaccatgtgtaattactccaccacaactctgaaagggctaagagtccatcagcagcataaacattcattctgtgacaacttgccaaaattcgaggggcagccctcaagcctaccattggaaaatgagacagacagccacccctcttccagcaacactgtgaagaaaagtcagacctcaattcttgggttgtcctccaagaacaattttgtagctaaagcctctaggaagctcgccaatgactttcctctagatttgtcacccgtgaagaagagaaccaggattgacgagatagcaagcaaccttcagagcaaaattaaccaaaccaaacagcaggaagatgcagtgatcaatgttgaggatgatgaagaggaagaggaagacaacgaagtcgagatagaggttgagttggacagggaggaagaaccgacagaacccatcatagaggttcccacttccttttctgcccaacagatatgggtaagagataccagtgagccccagaaagagcccaacttcagaaacatcacccacgattacaatgccaccaatggggctgagattgagctcaccctttctgaagatgaagaggattattatggctcctcaacaaacttgaaagatcaccaagtttccaatactgctctgctgaatacccaaactcccatctatgggactgagcacaatagtgaaaacacagactttggtgactctggaaggctttactattgtaaacactgtgactttaacaacaaatctgcccggagtgttagcacccactaccaacgaatgcacccatacattaaattcagctttaggtacatcttggaccccaatgatcacagtgcagtgtacaggtgcctggaatgctacatcgattacaccaacttcgaagatctccagcagcattatggcgagcaccacccagaagccatgaatgtactcaactttgatcactcggacctgatctaccggtgtcggttttgttcatacacgagcccgaatgttagaagcctgatgccacattaccaaagaatgcatcccacggtgaagatcaacaacgcgatgatattttcaagctatgtcgtggagcagcaggaagggctgaatacagaatcccagaccctgagggagattctgaattcggctcccaagaacatggcgacttccacacctgtggctcgtggtggtggtttgccagctacgttcaacaaaaacactcctaagacctttactcctgaatgtgaaaatcagaaggaccctttggtcaacactgttgttgtttatgattgtgatgtttgttcgtttgcaagccccaacatgcattctgtcttggttcattatcagaagaaacaccccgaagaaaaggcttcctactttaggatccagaaaactatgcgaatggtgtctgtggacaggggctctgccctttctcaattatcatttgaggtgggtgctccaatgtctcccaaaatgtccaacatgggttccccaccccccccacaacccccgccaccagacctcagtactgagctttactactgcaaacactgttcctacagcaatcggtcagttgtgggagtgcttgtccactaccagaaaagacacccagaaataaaggttactgccaaatatatcagacaggctcctcccacagctgcaatgatgagaggggtcgaagggccccaaggctccccccggccacccgcccccatacaacagctgaaccgaagcagctctgagagagatggccctcctgtggagaatgagatgttcttttgccagcactgtgattatgggaaccggacggtcaaaggggtactcattcattatcagaagaagcaccgagacttcaaggccaatgcagatgtgatccggcagcatacggccaccattcgaagcctctgcgaccgaaatcagaagaagcctgccagctgcgtgcttgtctccccctctaatctggagcgggacaaaacgaaactccgagcactcaaatgtaggcagtgctcatatacctccccctacttctatgcactgaggaagcatatcaagaaagaccaccccgccctgaaagccacagtcacgtccatcatgcgatgggcatttctagatggcttgatagaagctggctaccactgcgagtggtgcatctactcccatacggagcccaacggtttgctcctgcattaccaacggaggcatccagaacactatgttgattacacctacatggctactaaactgtgggctgggccagacccatcccctccctctctcacaatgccagccgaagccaaaacctacagatgcagggactgtgttttcgaagctgtttccatctgggacatcactaatcactaccaagcattccacccctgggccatgaatggtgatgagtcagtgctactggacatcatcaaggagaaagatgctgtggagaagcccattctttcatccgaagagttggcaggccctgtgaattgtgaaaacagtatacccacccctttcccggagcaggaagctgaatgtccagaggatgcaagactgtcccctgagaaaagcctgcagctagcttcagccaaccccgccatatcctccaccccataccagtgcacggtatgccaatctgagtataacaacttgcacggccttctcactcattatgggaagaagcaccctggcatgaaagtgaaggctgctgactttgcccaggacattgacatcaacccaggtgccgtctacaaatgcaggcattgcccatacatcaacacccgcatccacggcgtactgacccactaccagaagcgacacccgtccatcaaggtgaccgctgaggactttgtgcacgacgtagagcagtctgctgacatatcccagaatgacgtggaggagacgagcaggatcttcaagcaagggtatggcgcctaccggtgcaaactgtgtccgtacacacacggcactttggagaaactaaaaatccactacgagaagtatcacaatcagcctgaatttgatgtcttttcccagtcgcccccgaagctgccagtccccctcgagcccgagatgaccactgaagtgagcccttcccaagtctccatcactgaggaggaggtgggagaggagcccgtgtccacttctcacttctctacctcccacctggtctcccacactgtgttccggtgccagctctgcaagtacttctgctccacgaggaaggggatcgccaggcactaccgcatcaagcacaataatgtccgagcccagccagaaggcaagaacaacctcttcaagtgtgccctgtgtgcctacaccaaccccatccgcaaaggtctggcagcccactaccagaagcgccacgacattgatgcgtattacactcactgcttggcagcctccaggaccatcagcgacaagcccaacaaagtgatcatcccatccccgcccaaggacgactcccctcagctgagcgaggaactccggcgggcagtggagaagaaaaagtgctccttgtgctctttccagtcgttcagcaagaagggcatcgtgtcccattacatgaaacgccacccaggggtgttcccaaagaagcagcacgccagcaagttggggggctacttcacggccgtctatgcagatgagcatgagaagcccacactgatggaagaagaggagagaggcaactttgagaaagccgaggtggagggtgaagctcaggaaatcgagtggctcccattccgctgcatcaaatgcttcaagctgtcctttagcactgcagagctgctgtgcatgcattacactgaccaccacagtcgggacctaaagagggacttcatcattctgggcaacggcccccgcttgcagaactccacctaccagtgtaagcactgtgatagcaaactgcaaagcacagccgagctgacctcacacttgaacattcacaatgaggaattccagaagcgtgccaaacgtcaggagaggaggaaacagcttttgagcaagcagaaatatgcagatggtgcttttgcagatttcaaacaagagaggccttttggtcacttagaagaggtgccaaagatcaaggagaggaaagtggtgggctacaaatgtaaattctgtgtggaagtgcacccaacgctccgagccatctgcaatcacctccgaaagcacgtccagtatggcaatgtcccagctgtgtcagctgctgtgaaggggctgcgttctcatgagaggagccacctggccctggccatgtttacccgcgaggacaagtacagctgccagtattgctcgtttgtttctgctttcaggcacaatttggatcgccatatgcaaacccaccacggacaccataaaccattccgatgcaaactctgctccttcaagtcctcctataacagccggctgaaaacacatatactcaaagctcatgctggtgagcatgcctacaagtgttcttggtgctcattctccaccatgacaatcagccagctgaaggaacactccctcaaggtccacggaaaagccctgaccctccccaggccacggatcgtcagtctcctctcctcacactcccaccactcctcccaaaaagctaccccggctgaagaagtggaagactccaatgactcatcatattcagagcccccagatgttcagcagcagttgaaccactatcagtcagctgccctggcaaggaacaacagccgtgttagccctgtgcctctttctggggctgctgctggcactgagcagaaaactgaagccgtgcttcactgcgaattctgtgaattctcctccggctacatccagagcatcaggcgtcattaccgggacaagcatggtgggaagaagcttttcaagtgcaaagactgctccttttacacaggctttaaatctgcttttactatgcacgtggaagctgggcactcagcagttcccgaggagggccccaaagatcttcgctgtcctctctgcctctatcacaccaaatacaagcgcaacatgattgaccacatcgtgctgcaccgagaagagcgtgttgtccccattgaagtttgccggtccaaactgtccaaatacttgcagggagtagttttccgctgtgataagtgtaccttcacctgctccagtgatgagagcctccagcaacatatagaaaagcacaatgaactgaaaccttacaaatgccagctctgctactatgagaccaagcacacggaggaactggacagccaccttcgggatgagcataaggtaagccgtaactttgagctggttggacgggttaacttggatcagctggaacagatgaaggagaaaatggagagctccagcagcgatgatgaggacaaggaagaagaaatgaacagcaaggctgaagacagagagctgatgagattttctgaccacggggctgctcttaacactgagaagcgttttccatgtgaattttgtggacgggcgttttcacagggctctgagtgggaaagacatgtgctgagacacggcatggcattgaatgacaccaagcaggtgagcagagaagaaatccacccaaaagagatcatggagaacagtgttaaaatgccctccatagaggaaaaggaagatgacgaggccattgggatagacttttccctaaagaatgaaacagtagccatctgtgtagtaactgccgacaaatctctcctggagaatgcagaggccaaaaaagaatgagcgtttggtgaaattcttaatcaaaccttacttgaacagtgatgaaaaagtgggagggctggcttgggctgagaagggagggacagaaaagagaagacagaacaaagctgctttttaggactgaacaatctattttcaaagcactggtacctgtgtgagtgagtatgtaaattaaagttatttaaatggttggaatatgtggctccttttccatcactacatcttttcttccggatcttcatcatggaagtttcatttgttgcggaatatggaagcacctcccaatggtacggtgcaccctgtggtggtcttggacagtatgtggaaacagaagctccatgacggtagaagacttctcattggggagcaactttttgacgcacaacttttggtgcgtttttctagttttaataccttaagctttttcaagacctaactgcagccgctttgggaaaaaaaaacaaaaaacaaaaaacagaaaacaaaaaaaaaaaaactgctttgcataaaacagtcacctgtttcctagtacctcaaacttaaccaagggaactctctgcatttgtcagtactacctgtcgtcgttgtggttaaatgtagagagaactgctgggcaagatggtgaatggagaaaaaaaaagagttttaaagaaaggaacacaaattgtgcttaaaatccccatgtgggttttatttcttaaaatactgtgatttttttaattattttagtaaaaaacaaaacaaaaaaaagaaacagactttaattattagataactgtttgtgaattgtcatcctttattccaggtaagctgtttattagtgttcaactataatttagaatttggtagattcatgtgagctaattttaaggtgattgtggagttttgtttgccacatgtttattttctatcaatttgagtgttacaaacacagcacaattcagtttttcatatgaattgtttttcgtgtgtgtgttgttattgttgttttaatttcggggcaagggagatttagttttttgtgaataggaatgtttttattttaaacatggaaataacaaagaagttaactttcttttttttttttttttttttttttaatttaactaaagaaccaaactttcggcacagctatgcagcttgtgggccagacgaggaggtcctcctcacccttttgttgcctgtcaaattcacgcattatccgtctcataaataatttctgttaggattggctggcttttgtgtgtgattttaaaatctgtgttttgtttctgctggcattgtgttttgttgggggttttcatttatttaggggacgaggggatgtactagaatcccatccctttcgtgagagtggacaagaaataacatatcctacaaggagcctggagaactactttctttctttctttttttttttttttttttttttttaaatctagctgccagctgctctgtcccccatatcagctttttcaggagggagcagcttagactaaatctaagcctacatttataatatgttctgattgtgaacaaagggtttcgttccaaaaaatagaaaagaacttttcttgaagcctaggttttagaagcccgtgtgtgtgtgtgcttggatgtgtgtgtgcgtgtatgagtgtgtgtgtgcatgtgtgcacgtgtgaatcctttggttttcatgtttttttttttttttttttacttggaagggttgtgggagggtgggagggaagaaagggaaggggaattgctgagatgacagtgtcccacacagcttcaaataaaatccatggaaagatgttgcatttgtggaataagtgcttacttgaaaagcatgttcttcttttattttcttactgttaagaatttttatttgtaggatgtttgttttaatttaatttttttaagggatgggggccatcatgtggaaaccagaaaatggggaaagtgtgaactatccagacaaagattcattttgtgtctatatttgtttttaattggcctcatttcaaatgtattaaacagttccatacctggattgggtgtttgtaatggttaccaaaaaacaaacaaaaaaagaaagaaaaaggaaaaaaaaaaagaaaataattgtgacatgcttttatcactactttatttttcaaataacatgtaaatattgtaatccattggattttgttttgctaacctgttaataaaaatatgggaccattatccttttaacaaggctagaatgtcatttttttctttttcaaacatatacctgatattttgtggccgcacattttggatgcattattataattctgttgactgtaatgacatagaatttacaacattttttgttgttgtttaatttatacagaggacatttttttcagagcttgagagaagaaaataaatagcaaaatgataacctattgactccagtaatcagtgtttcccaatacttcataagagatagggagaccctgagtccttgaagccaagggtttaaaaacaaaacaaaaacaaaaaaaaccacaagtaggttattcaagttgtttgcaacatacattttgtaatgaaatgtgagaaattaataaagaatttttttcacatgtg

SEQ ID NO: 23425 - DNA, 551 bp, Homo sapiens
  misc_feature 1..551: note = ENST00000472574
  source 1..551: mol_type = unassigned DNA; mol_type = unassigned DNA
gagtctgaggagccgaggaaggcagggaagatggcgatcctccattgctgagacccggcagaagcacatgagactcccaaacaacttccacaacaataacccgagcaggaagaggagaaagagaaagaggataaggaggcggtggggctggagaacccgaagcacctcccggcgccgggacgcttcttctgttcctaatgtgagaggctagacccagatcatggaggtgcttcagtgtgatggctgtgatttccgagccccgtcttatgaagatctcaaggcacacattcaggatgtccacacggcatttctgcagccaactgatgttgctgaggacaatgtgaatgagctacgatgtgggtccgtgaatgccagtaatcagacagaggtggagttttcttctataaaggatgaatttgccattgcagaagatttatcaggtcaaaatgcaacttcattggggaccggaggttactatggccacagtccaggatattatgccttttggtcacttagaagaggtgccaaagatcaaggagaggaaagtggtg

SEQ ID NO: 23426 - DNA, 422 bp, Homo sapiens
  misc_feature 1..422: note = ENST00000480607
  source 1..422: mol_type = unassigned DNA; mol_type = unassigned DNA
aacaaaaacactcctaagacctttactcctgaatgtgaaaatcagaaggaccctttggtcaacactgttgttgtttatgattgtgatgtttgttcgtttgcaagccccaacatgcattctgtcttggttcattatcagaagaaacaccccgaagaaaaggcttcctactttaggatccagaaaactatgcgaatggtgtctgtggacaggggctctgccctttctcaattatcatttgagccttttggtcacttagaagaggtgccaaagatcaaggagaggaaagtggtgggctacaaatgtaaattctgtgtggaagtgcacccaacgctccgagccatctgcaatcacctccgaaagcacgtccagtatggcaatgtcccagctgtgtcagctgctgtgaaggggctgcgttctcatga

SEQ ID NO: 23427 - DNA, 4828 bp, Homo sapiens
  misc_feature 1..4828: note = ENST00000374686
  source 1..4828: mol_type = unassigned DNA; mol_type = unassigned DNA
cactgttcctacagcaatcggtcagttgtgggagtgcttgtccactaccagaaaagacacccagaaataaaggttactgccaaatatatcagacaggctcctcccacagctgcaatgatgagaggggtcgaagggccccaaggctccccccggccacccgcccccatacaacagctgaaccgaagcagctctgagagagatggccctcctgtggagaatgagatgttcttttgccagcactgtgattatgggaaccggacggtcaaaggggtactcattcattatcagaagaagcaccgagacttcaaggccaatgcagatgtgatccggcagcatacggccaccattcgaagcctctgcgaccgaaatcagaagaagcctgccagctgcgtgcttgtctccccctctaatctggagcgggacaaaacgaaactccgagcactcaaatgtaggcagtgctcatatacctccccctacttctatgcactgaggaagcatatcaagaaagaccaccccgccctgaaagccacagtcacgtccatcatgcgatgggcatttctagatggcttgatagaagctggctaccactgcgagtggtgcatctactcccatacggagcccaacggtttgctcctgcattaccaacggaggcatccagaacactatgttgattacacctacatggctactaaactgtgggctgggccagacccatcccctccctctctcacaatgccagccgaagccaaaacctacagatgcagggactgtgttttcgaagctgtttccatctgggacatcactaatcactaccaagcattccacccctgggccatgaatggtgatgagtcagtgctactggacatcatcaaggagaaagatgctgtggagaagcccattctttcatccgaagagttggcaggccctgtgaattgtgaaaacagtatacccacccctttcccggagcaggaagctgaatgtccagaggatgcaagactgtcccctgagaaaagcctgcagctagcttcagccaaccccgccatatcctccaccccataccagtgcacggtatgccaatctgagtataacaacttgcacggccttctcactcattatgggaagaagcaccctggcatgaaagtgaaggctgctgactttgcccaggacattgacatcaacccaggtgccgtctacaaatgcaggcattgcccatacatcaacacccgcatccacggcgtactgacccactaccagaagcgacacccgtccatcaaggtgaccgctgaggactttgtgcacgacgtagagcagtctgctgacatatcccagaatgacgtggaggagacgagcaggatcttcaagcaagggtatggcgcctaccggtgcaaactgtgtccgtacacacacggcactttggagaaactaaaaatccactacgagaagtatcacaatcagcctgaatttgatgtcttttcccagtcgcccccgaagctgccagtccccctcgagcccgagatgaccactgaagtgagcccttcccaagtctccatcactgaggaggaggtgggagaggagcccgtgtccacttctcacttctctacctcccacctggtctcccacactgtgttccggtgccagctctgcaagtacttctgctccacgaggaaggggatcgccaggcactaccgcatcaagcacaataatgtccgagcccagccagaaggcaagaacaacctcttcaagtgtgccctgtgtgcctacaccaaccccatccgcaaaggtctggcagcccactaccagaagcgccacgacattgatgcgtattacactcactgcttggcagcctccaggaccatcagcgacaagcccaacaaagtgatcatcccatccccgcccaaggacgactcccctcagctgagcgaggaactccggcgggcagtggagaagaaaaagtgctccttgtgctctttccagtcgttcagcaagaagggcatcgtgtcccattacatgaaacgccacccaggggtgttcccaaagaagcagcacgccagcaagttggggggctacttcacggccgtctatgcagatgagcatgagaagcccacactgatggaagaagaggagagaggcaactttgagaaagccgaggtggagggtgaagctcaggaaatcgagtggctcccattccgctgcatcaaatgcttcaagctgtcctttagcactgcagagctgctgtgcatgcattacactgaccaccacagtcgggacctaaagagggacttcatcattctgggcaacggcccccgcttgcagaactccacctaccagtgtaagcactgtgatagcaaactgcaaagcacagccgagctgacctcacacttgaacattcacaatgaggaattccagaagcgtgccaaacgtcaggagaggaggaaacagcttttgagcaagcagaaatatgcagatggtgcttttgcagatttcaaacaagagaggccttttggtcacttagaagaggtgccaaagatcaaggagaggaaagtggtgggctacaaatgtaaattctgtgtggaagtgcacccaacgctccgagccatctgcaatcacctccgaaagcacgtccagtatggcaatgtcccagctgtgtcagctgctgtgaaggaggcggatgaccctgcccacttgttcctggatggattggaagcagccaaagacgccagtggcgccctggtgggccgggtggatggtgaacactgcttgcttgatggaatgttggaggatgaaacccggccggggggataccattgcagtcaatgtgacagagtcctgatgtccatgcaggggctgcgttctcatgagaggagccacctggccctggccatgtttacccgcgaggacaagtacagctgccagtattgctcgtttgtttctgctttcaggcacaatttggatcgccatatgcaaacccaccacggacaccataaaccattccgatgcaaactctgctccttcaagtcctcctataacagccggctgaaaacacatatactcaaagctcatgctggtgagcatgcctacaagtgttcttggtgctcattctccaccatgacaatcagccagctgaaggaacactccctcaaggtccacggaaaagccctgaccctccccaggccacggatcgtcagtctcctctcctcacactcccaccactcctcccaaaaagctaccccggctgaagaagtggaagactccaatgactcatcatattcagagcccccagatgttcagcagcagttgaaccactatcagtcagctgccctggcaaggaacaacagccgtgttagccctgtgcctctttctggggctgctgctggcactgagcagaaaactgaagccgtgcttcactgcgaattctgtgaattctcctccggctacatccagagcatcaggcgtcattaccgggacaagcatggtgggaagaagcttttcaagtgcaaagactgctccttttacacaggctttaaatctgcttttactatgcacgtggaagctgggcactcagcagttcccgaggagggccccaaagatcttcgctgtcctctctgcctctatcacaccaaatacaagcgcaacatgattgaccacatcgtgctgcaccgagaagagcgtgttgtccccattgaagtttgccggtccaaactgtccaaatacttgcagggagtagttttccgctgtgataagtgtaccttcacctgctccagtgatgagagcctccagcaacatatagaaaagcacaatgaactgaaaccttacaaatgccagctctgctactatgagaccaagcacacggaggaactggacagccaccttcgggatgagcataaggtaagccgtaactttgagctggttggacgggttaacttggatcagctggaacagatgaaggagaaaatggagagctccagcagcgatgatgaggacaaggaagaagaaatgaacagcaaggctgaagacagagagctgatgagattttctgaccacggggctgctcttaacactgagaagcgttttccatgtgaattttgtggacgggcgttttcacagggctctgagtgggaaagacatgtgctgagacacggcatggcattgaatgacaccaagcaggtgagcagagaagaaatccacccaaaagagatcatggagaacagtgttaaaatgccctccatagaggaaaaggaagatgacgaggccattgggatagacttttccctaaagaatgaaacagtagccatctgtgtagtaactgccgacaaatctctcctggagaatgcagaggccaaaaaagaatgagcgtttggtgaaattcttaatcaaaccttacttgaacagtgatgaaaaagtgggagggctggcttgggctgagaagggagggacagaaaagagaagacagaacaaagctgctttttaggactgaacaatctattttcaaagcactggtacctgtgtgagtgagtatgtaaattaaagttatttaaatggttggaatatgtggctccttttccatcactacatcttttcttccggatcttcatcatggaagtttcatttgttgcggaatatggaagcacctcccaatggtacggtgcaccctgtggtggtcttggacagtatgtggaaacagaagctccatgacggtagaagacttctcattggggagcaactttttgacgcacaacttttggtgcgtttttctagttttaataccttaagctttttcaagacctaactgcagccgctttgggaaaaaaaaacaaaaaacaaaaaacag

SEQ ID NO: 23428 - DNA, 4691 bp, Homo sapiens
  misc_feature 1..4691: note = ENST00000441147
  source 1..4691: mol_type = unassigned DNA; mol_type = unassigned DNA
atgatgagaggggtcgaagggccccaaggctccccccggccacccgcccccatacaacagctgaaccgaagcagctctgagagagatggccctcctgtggagaatgagatgttcttttgccagcactgtgattatgggaaccggacggtcaaaggggtactcattcattatcagaagaagcaccgagacttcaaggccaatgcagatgtgatccggcagcatacggccaccattcgaagcctctgcgaccgaaatcagaagaagcctgccagctgcgtgcttgtctccccctctaatctggagcgggacaaaacgaaactccgagcactcaaatgtaggcagtgctcatatacctccccctacttctatgcactgaggaagcatatcaagaaagaccaccccgccctgaaagccacagtcacgtccatcatgcgatgggcatttctagatggcttgatagaagctggctaccactgcgagtggtgcatctactcccatacggagcccaacggtttgctcctgcattaccaacggaggcatccagaacactatgttgattacacctacatggctactaaactgtgggctgggccagacccatcccctccctctctcacaatgccagccgaagccaaaacctacagatgcagggactgtgttttcgaagctgtttccatctgggacatcactaatcactaccaagcattccacccctgggccatgaatggtgatgagtcagtgctactggacatcatcaaggagaaagatgctgtggagaagcccattctttcatccgaagagttggcaggccctgtgaattgtgaaaacagtatacccacccctttcccggagcaggaagctgaatgtccagaggatgcaagactgtcccctgagaaaagcctgcagctagcttcagccaaccccgccatatcctccaccccataccagtgcacggtatgccaatctgagtataacaacttgcacggccttctcactcattatgggaagaagcaccctggcatgaaagtgaaggctgctgactttgcccaggacattgacatcaacccaggtgccgtctacaaatgcaggcattgcccatacatcaacacccgcatccacggcgtactgacccactaccagaagcgacacccgtccatcaaggtgaccgctgaggactttgtgcacgacgtagagcagtctgctgacatatcccagaatgacgtggaggagacgagcaggatcttcaagcaagggtatggcgcctaccggtgcaaactgtgtccgtacacacacggcactttggagaaactaaaaatccactacgagaagtatcacaatcagcctgaatttgatgtcttttcccagtcgcccccgaagctgccagtccccctcgagcccgagatgaccactgaagtgagcccttcccaagtctccatcactgaggaggaggtgggagaggagcccgtgtccacttctcacttctctacctcccacctggtctcccacactgtgttccggtgccagctctgcaagtacttctgctccacgaggaaggggatcgccaggcactaccgcatcaagcacaataatgtccgagcccagccagaaggcaagaacaacctcttcaagtgtgccctgtgtgcctacaccaaccccatccgcaaaggtctggcagcccactaccagaagcgccacgacattgatgcgtattacactcactgcttggcagcctccaggaccatcagcgacaagcccaacaaagtgatcatcccatccccgcccaaggacgactcccctcagctgagcgaggaactccggcgggcagtggagaagaaaaagtgctccttgtgctctttccagtcgttcagcaagaagggcatcgtgtcccattacatgaaacgccacccaggggtgttcccaaagaagcagcacgccagcaagttggggggctacttcacggccgtctatgcagatgagcatgagaagcccacactgatggaagaagaggagagaggcaactttgagaaagccgaggtggagggtgaagctcaggaaatcgagtggctcccattccgctgcatcaaatgcttcaagctgtcctttagcactgcagagctgctgtgcatgcattacactgaccaccacagtcgggacctaaagagggacttcatcattctgggcaacggcccccgcttgcagaactccacctaccagtgtaagcactgtgatagcaaactgcaaagcacagccgagctgacctcacacttgaacattcacaatgaggaattccagaagcgtgccaaacgtcaggagaggaggaaacagcttttgagcaagcagaaatatgcagatggtgcttttgcagatttcaaacaagagaggccttttggtcacttagaagaggtgccaaagatcaaggagaggaaagtggtgggctacaaatgtaaattctgtgtggaagtgcacccaacgctccgagccatctgcaatcacctccgaaagcacgtccagtatggcaatgtcccagctgtgtcagctgctgtgaagcaggaggcggatgaccctgcccacttgttcctggatggattggaagcagccaaagacgccagtggcgccctggtgggccgggtggatggtgaacactgcttgcttgatggaatgttggaggatgaaacccggccggggggataccattgcagtcaatgtgacagagtcctgatgtccatgcaggggctgcgttctcatgagaggagccacctggccctggccatgtttacccgcgaggacaagtacagctgccagtattgctcgtttgtttctgctttcaggcacaatttggatcgccatatgcaaacccaccacggacaccataaaccattccgatgcaaactctgctccttcaagtcctcctataacagccggctgaaaacacatatactcaaagctcatgctggtgagcatgcctacaagtgttcttggtgctcattctccaccatgacaatcagccagctgaaggaacactccctcaaggtccacggaaaagccctgaccctccccaggccacggatcgtcagtctcctctcctcacactcccaccactcctcccaaaaagctaccccggctgaagaagtggaagactccaatgactcatcatattcagagcccccagatgttcagcagcagttgaaccactatcagtcagctgccctggcaaggaacaacagccgtgttagccctgtgcctctttctggggctgctgctggcactgagcagaaaactgaagccgtgcttcactgcgaattctgtgaattctcctccggctacatccagagcatcaggcgtcattaccgggacaagcatggtgggaagaagcttttcaagtgcaaagactgctccttttacacaggctttaaatctgcttttactatgcacgtggaagctgggcactcagcagttcccgaggagggccccaaagatcttcgctgtcctctctgcctctatcacaccaaatacaagcgcaacatgattgaccacatcgtgctgcaccgagaagagcgtgttgtccccattgaagtttgccggtccaaactgtccaaatacttgcagggagtagttttccgctgtgataagtgtaccttcacctgctccagtgatgagagcctccagcaacatatagaaaagcacaatgaactgaaaccttacaaatgccagctctgctactatgagaccaagcacacggaggaactggacagccaccttcgggatgagcataaggtaagccgtaactttgagctggttggacgggttaacttggatcagctggaacagatgaaggagaaaatggagagctccagcagcgatgatgaggacaaggaagaagaaatgaacagcaaggctgaagacagagagctgatgagattttctgaccacggggctgctcttaacactgagaagcgttttccatgtgaattttgtggacgggcgttttcacagggctctgagtgggaaagacatgtgctgagacacggcatggcattgaatgacaccaagcaggtgagcagagaagaaatccacccaaaagagatcatggagaacagtgttaaaatgccctccatagaggaaaaggaagatgacgaggccattgggatagacttttccctaaagaatgaaacagtagccatctgtgtagtaactgccgacaaatctctcctggagaatgcagaggccaaaaaagaatgagcgtttggtgaaattcttaatcaaaccttacttgaacagtgatgaaaaagtgggagggctggcttgggctgagaagggagggacagaaaagagaagacagaacaaagctgctttttaggactgaacaatctattttcaaagcactggtacctgtgtgagtgagtatgtaaattaaagttatttaaatggttggaatatgtggctccttttccatcactacatcttttcttccggatcttcatcatggaagtttcatttgttgcggaatatggaagcacctcccaatggtacggtgcaccctgtggtggtcttggacagtatgtggaaacagaagctccatgacggtagaagacttctcattggggagcaactttttgacgcacaacttttggtgcgtttttctagttttaataccttaagctttttcaagacctaactgcagccgctttggg

SEQ ID NO: 23429 - DNA, 841 bp, Homo sapiens
  misc_feature 1..841: note = ENST00000497489
  source 1..841: mol_type = unassigned DNA; mol_type = unassigned DNA
aacgtcaggagaggaggaaacagcttttgagcaagcagaaatatgcagatggtgcttttgcagatttcaaacaagagaggccttttggtcacttagaagaggtgccaaagatcaaggagaggaaagtggtgggctacaaatgtaaattctgtgtggaagtgcacccaacgctccgagccatctgcaatcacctccgaaagcacgtccagtatggcaatgtcccagctgtgtcagctgctgtgaaggttggaccttcctcatctttctgttcagggaaaggtcgagtttcgatctggtttccttccacgcggatagtttggtggcagcagaaggtccaggattctcggtctaggaggcttcgggtcgtccttctattctgcgtttagtgccattagctcttcgttcttccaagttgcccgagctcttgagaggaatcaagaggcggatgaccctgcccacttgttcctggatggattggaagcagccaaagacgccagtggcgccctggtgggccgggtggatggtgaacactgcttgcttgatggaatgttggaggatgaaacccggccggggggataccattgcagtcaatgtgacagagtcctgatgtccatgcaggggctgcgttctcatgagaggagccacctggccctggccatgtttacccgcgaggacaagtacagctgccagtattgctcgtttgtttctgctttcaggcacaatttggatcgccatatgcaaacccaccacggacaccataaaccattccgatgcaaactctgctccttcaagtcctcctataacagccggctgaaaacacatatactcaaagctcatgctg

SEQ ID NO: 23430 - DNA, 669 bp, Homo sapiens
  misc_feature 1..669: note = ENST00000469433
  source 1..669: mol_type = unassigned DNA; mol_type = unassigned DNA
actaagctaaagcagaagcttggatgagtaagaaggccccactcatggttcacacctgctgctatgttacctggagcctcagtcaccttttctgtaaaatggggctgagaacaggagattgatcggatggcgttagatttggcaaatgcaggcattttaaaaatgagaattggaggaattgctatgatttacccaaagtttggatcgccatatgcaaacccaccacggacaccataaaccattccgatgcaaactctgctccttcaagtcctcctataacagccggctgaaaacacatatactcaaagctcatgctgactcatcatattcagagcccccagatgttcagcagcagttgaaccactatcagtcagctgccctggcaaggaacaacagccgtgttagccctgtgcctctttctggggctgctgctggcactgagcagaaaactgaagccgtgcttcactgcgaattctgtgaattctcctccggctacatccagagcatcaggcgtcattaccgggacaagcatggtgggaagaagcttttcaagtgcaaagactgctccttttacacaggctttaaatctgcttttactatgcacgtggaagctgggcactcagcagttcccgaggagggccccaaagatcttcgctgtcctctctgcct

SEQ ID NO: 23431 - DNA, 538 bp, Homo sapiens
  misc_feature 1..538: note = ENST00000471032
  source 1..538: mol_type = unassigned DNA; mol_type = unassigned DNA
agaagcttggatgagtaagaaggccccactcatggttcacacctgctgctatgttacctggagcctcagtcaccttttctgtaaaatggggctgagaacaggagattgatcggatggcgttagatttggcaaatgcaggcattttaaaaatgagaattggaggaattgctatgatttacccaaagccgtgtaaaagagagataaatattcaataatgcgtttggacagtcttggataaagtttggatcgccatatgcaaacccaccacggacaccataaaccattccgatgcaaactctgctccttcaagtcctcctataacagccggctgaaaacacatatactcaaagctcatgctggtgagcatgcctacaagtgttcttggtgctcattctccaccatgacaatcagccagctgaaggaacactccctcaaggtccacggaaaagccctgaccctccccaggccacggatcgtcagtctcctctcctcacactcccaccactcctcccaaaaagctaccccggctgaagaagtg

SEQ ID NO: 23432 - DNA, 701 bp, Homo sapiens
  misc_feature 1..701: note = ENST00000479166
  source 1..701: mol_type = unassigned DNA; mol_type = unassigned DNA
aagaaggccccactcatggttcacacctgctgctatgttacctggagcctcagtcaccttttctgtaaaatggggctgagaacaggagattgatcggatggcgttagatttggcaaatgcaggcattttaaaaatgagaattggaggaattgctatgatttacccaaagtttggatcgccatatgcaaacccaccacggacaccataaaccattccgatgcaaactctgctccttcaagtcctcctataacagccggctgaaaacacatatactcaaagctcatgctggtgagcatgcctacaagtgttcttggtgctcattctccaccatgacaatcagccagctgaaggaacactccctcaaggtccacggaaaagccctgaccctccccaggccacggatcgtcagtctcctctcctcacactcccaccactcctcccaaaaagctaccccggctgaagaagtggaagactccaatgactcatcatattcagagcccccagatgttcagcagcagttgaaccactatcagtcagctgccctggcaaggaacaacagccgtgttagccctgtgcctctttctggggctgctgctggcactgagcagaaaactgaagccgtgcttcactgcgaattctgtgaattctcctccggctacatccagagcatcaggcgtcattaccgggacaagcatggtggg

SEQ ID NO: 23433 - DNA, 1233 bp, Homo sapiens
  misc_feature 1..1233: note = ENST00000427098
  source 1..1233: mol_type = unassigned DNA; mol_type = unassigned DNA
ggaacactccctcaaggtccacggaaaagccctgaccctccccaggccacggatcgtcagtctcctctcctcacactcccaccactcctcccaaaaagctaccccggctgaagaagtggaagactccaatgactcatcatattcagagcccccagatgttcagcagcagttgaaccactatcagtcagctgccctggcaaggaacaacagccgtgttagccctgtgcctctttctggggctgctgctggcactgagcagaaaactgaagccgtgcttcactgcgaattctgtgaattctcctccggctacatccagagcatcaggcgtcattaccgggacaagcatggtgggaagaagcttttcaagtgcaaagactgctccttttacacaggctttaaatctgcttttactatgcacgtggaagctgggcactcagcagttcccgaggagggccccaaagatcttcgctgtcctctctgcctctatcacaccaaatacaagcgcaacatgattgaccacatcgtgctgcaccgaggtaacctttctaacttggttttcttggatgcagcggggggcaggcagcagagatggccttctagggatgctctctcagagtggcagtagcacctgtgccttgttcctcaccttatcttcaggcaagaaaccacagtgataaccacagtgacagccaaaagggcaaaaacaccttcctgctgggagtatttcctccacctggagggaggcaaaggtgatggattctgcagtgaacatttccgtagggcttcccagcatgggggatttgtacattctgacaattctgccacccacagccttgcgtagactgcatagaaggaatgaacaagaaacaaaatgggtgggtgaaagcaaatgtgaaatgtggagagctctatggctgtgagagattctttcaagaagaccaaaatgatttccaaagcagaacatggaacttcccttgaaatggttgaagggagagagaattctttaaaataatgtatattatacattctaataatagtctctattatatattctaataataattagaaaatccatgggctttggatttaaattctggttttagagcccactgtgtttaacctctccatccattaaaagagatgattgtacctatgagataatgggtaaagtgtccagtggtttttcataatggatgcataatgactgctcaataaatgttggttcctgctgat

SEQ ID NO: 23434 - DNA, 655 bp, Homo sapiens
  misc_feature 1..655: note = ENST00000482115
  source 1..655: mol_type = unassigned DNA; mol_type = unassigned DNA
gccgtgcttcactgcgaattctgtgaattctcctccggctacatccagagcatcaggcgtcattaccgggacaagcatggtgggaagaagcttttcaagtgcaaagactgctccttttacacaggctttaaatctgcttttactatgcacgtggaagctgggcactcagcagttcccgaggagggccccaaagatcttcgctgtcctctctgcctctatcacaccaaatacaagcgcaacatgattgaccacatcgtgctgcaccgagaagagcgtgttgtccccattgaagtttgccggtccaaactgtccaaatacttgcagggagtagttttccgctgtgataagtgtaccttcacctgctccagtgatgagagcctccagcaacatatagaaaagcacaatgaactgaaaccttacaaatgccagctctgctactatgagaccaagcacacggaggaactggacagccaccttcgggatgagcataagatgatttgcattataatgggaaaagcttgagctgtgtcatgtggagatctgagtcctaactaatcctggcttcatcacctacctgttttgtgatcttcatctacaaatatagaaggcaacacatttactgcacaatggtcgtaagggataagtgatacatgta

SEQ ID NO: 23435 - DNA, 676 bp, Homo sapiens
  misc_feature 1..676: note = ENST00000483287
  source 1..676: mol_type = unassigned DNA; mol_type = unassigned DNA
ctgatataaatcatcacacaagggagagaataaatcggaaaaaataatgctcagattcctttggaatctcgggcaagcggctcttcagtcaagaaagacccagattttgtgatagaagcattggggaggtgaggcgaaatgaggtcttggggcccaagaaccagaaacagttctcgaatgctattcaaggaatgccctaagggggaaacctaagaaaaagtgaggaatctggaaattgctttcaccacatggctttatcagtgaaggtaggagagagggtatcctaatgaatgctgacttacctattctgctgattcccacagcacacaggtaacacttctgctttctctttgcagagctgatgagattttctgaccacggggctgctcttaacactgagaagcgttttccatgtgaattttgtggacgggcgttttcacagggctctgagtgggaaagacatgtgctgagacacggcatggcattgaatgacaccaagcaggtgagcagagaagaaatccacccaaaagagatcatggagaacagtgttaaaatgccctccatagaggaaaaggaagatgacgaggccattgggatagacttttccctaaagaatgaaacagtagccatctgtgtagtaactgccgacaaatctctcctggagaatgcagaggcc

SEQ ID NO: 23436 - DNA, 4871 bp, Homo sapiens
  misc_feature 1..4871: note = ENST00000361524
  source 1..4871: mol_type = unassigned DNA; mol_type = unassigned DNA
aatgatttcctcagtgattacgtacagagcgagtccctgcgggttaggggccccctctggagccatcctgatggctttgggggccttgcttccattttccattattatgtggactaccggagcgacagcgcagtccaagaccttgcaggatgtctcgccgcaagcaagcgaaaccgagatccctcaaagaccccaactgtaaacttgaagacaagactgaagatggagaggcactagattgtaagaagaggccggaagacggggaggagttggaagacgaagctgtgcacagctgtgacagctgcctccaggtgtttgaatcgctgagcgatatcacagaacacaagattaatcaatgtcaactgacagatggagtggatgttgaagatgatccgacttgctcttggccagcttcctcaccttctagcaaggatcagacttcccctagccatggagaaggttgcgattttggagaggaagaaggtggccctgggcttccatacccgtgtcaattctgtgacaagtcgtttagccgcctcagctacctaaagcaccatgagcagagtcacagtgacaaactgcctttcaaatgcacctactgcagtaggctgttcaaacacaagcgcagccgagatcgccacataaaactccacaccggggacaagaagtaccactgcagtgaatgtgatgctgcgttttccagaagtgatcacttgaagatccacttaaagactcacacgtccaacaagccatataaatgtgccatttgtcgccgtgggtttctgtcctctagttccttacacggacacatgcaggttcatgagaggaacaaggacggctctcagtccggttccaggatggaggactggaagatgaaggacactcagaagtgcagtcagtgtgaggaaggctttgacttcccggaagacctccaaaaacacattgcagagtgccaccccgaatgctccccaaatgaggaccgagcggccctccagtgtgtctactgccacgagctcttcgtagaggagacctccctcatgaaccacatggagcaggtgcatagcggggagaagaagaactcatgcagcatttgttctgagagtttccacacagttgaggaactgtacagccacatggacagtcaccagcaaccggagtcatgcaatcacagcaacagcccttccctggtcacggtgggctatacctccgtgtccagtacgactccagattccaacctctcagtggacagctcaaccatggtggaagctgccccgccaatcccaaagagtcgagggaggaagagggccgctcaacaaacccctgacatgactggtccctcgagtaaacaagcaaaagttacctacagctgtatttactgcaacaaacaattattttcaagtcttgcagttctgcagattcacctgaaaactatgcacttagataagccagaacaggcccatatttgtcagtattgcttggaggtcctgccctcactctataacctaaatgaacatcttaagcaagtgcatgaagctcaggacccaggtctgattgtttctgccatgcctgccattgtctaccagtgtaacttctgttccgaagttgtcaacgacctcaacactcttcaggaacacatccgatgttctcatggatttgcaaaccctgcagctaaagatagtaatgcattcttttgtccccattgctatatggggtttctcactgactcttccctggaagagcatattagacaggttcattgtgacctcagtggctcccgatttgggtctccagtgcttgggactcccaaagaaccagtagtagaagtctattcttgttcctattgtacaaattcgccaatattcaacagcgttcttaaactgaacaagcatatcaaagagaatcataaaaacattcccttggccctgaattatatccacaatgggaagaaatccagggccttaagccccctatctcctgtggccatagagcagacatctcttaagatgatgcaggcagtaggaggtgcacctgcacgtcccactggagaatatatctgtaatcaatgtggtgctaagtacacatccctagacagctttcagactcacctaaaaactcatctcgacactgtgcttccaaaattgacctgtcctcagtgcaacaaggaattccccaaccaagaatccttgctgaagcatgttaccattcactttatgatcacttcaacgtattacatctgtgagagttgtgacaagcaattcacatcagtggatgaccttcagaaacacctgctggacatgcacacctttgtcttctttcgctgcaccctctgccaggaagtttttgactcaaaagtctccattcagctccacttggctgtgaagcacagtaacgaaaagaaagtctataggtgcacatcttgcaactgggacttccgcaacgaaactgacttgcagctccatgtgaaacacaaccacctggaaaaccaagggaaagtgcataagtgcattttctgcggtgagtcctttggcaccgaggtggagctgcaatgccacatcaccactcacagtaagaagtacaactgcaagttctgtagcaaagccttccatgcgatcattttgttagaaaaacacttgcgagaaaaacactgtgtattcgaaaccaagacacccaactgtggaacaaatggagcttccgagcaagtgcagaaagaggaagtggagctgcagactttgctgaccaacagccaggagtcccacaacagtcacgatgggagcgaagaagacgttgacacctctgagcctatgtacggctgcgacatttgtggggcagcctacactatggaaactttgctgcagaatcaccagctccgagaccacaacatcagacctggagaaagtgccatcgtgaaaaagaaagctgagctcattaaagggaattacaagtgcaacgtgtgctctcgaaccttcttctccgaaaatggcctccgggaacatatgcagacccacctaggccctgtcaaacactacatgtgccctatttgcggagagcggtttccctcccttttaactcttactgaacacaaagtcacgcatagtaagagtcttgatactggaaactgccggatttgcaagatgcctctccagagtgaagaggagtttttagagcattgccaaatgcaccctgacttgaggaattccctgacaggctttcgctgcgtggtgtgcatgcagacagtgacctccaccttggaactcaaaatccatgggacgttccacatgcaaaagacagggaatgggtctgcagttcagaccacagggcggggccagcacgtccaaaaactgtataagtgcgcatcttgcctcaaagaattccgttccaagcaagatctggtgaaacttgatatcaatggcctgccatatggtctgtgtgccggctgcgtgaatctcagtaagagcgccagcccaggcattaacgtccctcccggcacgaatagaccaggcttgggccagaatgagaatctgagtgccattgaggggaaaggcaaggtggggggactgaagacacgctgctctagctgcaacgttaagtttgagtctgaaagtgaactccagaaccacatccaaaccatccaccgagagctcgtgccagacagcaacagcacacagttgaaaacgccccaagtatcaccaatgcccagaatcagtccctcccagtcggatgagaagaagacctatcaatgcatcaagtgtcagatggttttctacaatgaatgggatattcaggttcatgttgcaaatcacatgattgatgaaggactgaaccatgaatgcaaactctgcagccagacctttgactctcctgccaaactccagtgccacctgatagagcacagcttcgaagggatgggaggcaccttcaagtgtccagtctgctttacagtatttgttcaagcaaacaagttgcagcagcatattttctctgcccatggacaagaagacaagatctatgactgtacacaatgtccacagaagtttttcttccaaacagagctgcagaatcatacaatgacccaacacagcagttagtgcaagtacagtctctcaaggagaattgattttgtggcacaaaaagggaacatgttttactctttgcacgaaactttcattgttaatgtatattattcagaaacattgtattgtaccataaaacttgtattatcaaactgttggatgttcatgtgtttgaacttttgcgcaccggatagaccccttgtatataaagtgttgcacatgtattatgtcgtctgatactaaaatggtcttataaagacaagtggacttgggccctattcaggcaagattaaaaaaaaaaaaagactatgaccaaaatggcttaagataaagtatttttaaggaagaaagattaaaaacaactgttatacatgagactatggttggacttccttttctttacacttaagcctagaatttctctttaggtatatcagcgcttaaatccaagactattttttattgctgaagattcttgcaaaccatgaagagatgttctcacagaacagaaccccacagctggataaggcccgtatatatatatttgtaagccttgcaatgtgacaggtagcatcactatatatgcaatagttgttatgtagactgtcaaagaatttttttttccctggatacatttgaagctttgagtgttcaaggttttccttaatgatttcacgcagccaaattcttgaatcagttgaactaacctgtatgttactgttattaatgtttactctgcagtctgaacctggagattactggaattgttttccaagaggaaataaattcagtttaccatta

SEQ ID NO: 23437 - DNA, 4327 bp, Homo sapiens
  misc_feature 1..4327: note = ENST00000584787
  source 1..4327: mol_type = unassigned DNA; mol_type = unassigned DNA
atttcctcagtgattacgtacagagcgagtccctgcgggttaggggccccctctggagccatcctgatggctttgggggccttgcttccattttccattattatgtggactaccggagcgacagcgcagtccaagaccttgcagaccccaactgtaaacttgaagacaagactgaagatggagaggcactagattgtaagaagaggccggaagacggggaggagttggaagacgaagctgtgcacagctgtgacagctgcctccaggtgtttgaatcgctgagcgatatcacagaacacaagattaatcaatgtcaactgacagatggagtggatgttgaagatgatccgacttgctcttggccagcttcctcaccttctagcaaggatcagacttcccctagccatggagaaggttgcgattttggagaggaagaaggtggccctgggcttccatacccgtgtcaattctgtgacaagtcgtttagccgcctcagctacctaaagcaccatgagcagagtcacagtgacaaactgcctttcaaatgcacctactgcagtaggctgttcaaacacaagcgcagccgagatcgccacataaaactccacaccggggacaagaagtaccactgcagtgaatgtgatgctgcgttttccagaagtgatcacttgaagatccacttaaagactcacacgtccaacaagccatataaatgtgccatttgtcgccgtgggtttctgtcctctagttccttacacggacacatgcaggttcatgagaggaacaaggacggctctcagtccggttccaggatggaggactggaagatgaaggacactcagaagtgcagtcagtgtgaggaaggctttgacttcccggaagacctccaaaaacacattgcagagtgccaccccgaatgctccccaaatgaggaccgagcggccctccagtgtgtctactgccacgagctcttcgtagaggagacctccctcatgaaccacatggagcaggtgcatagcggggagaagaagaactcatgcagcatttgttctgagagtttccacacagttgaggaactgtacagccacatggacagtcaccagcaaccggagtcatgcaatcacagcaacagcccttccctggtcacggtgggctatacctccgtgtccagtacgactccagattccaacctctcagtggacagctcaaccatggtggaagctgccccgccaatcccaaagagtcgagggaggaagagggccgctcaacaaacccctgacatgactggtccctcgagtaaacaagcaaaagttacctacagctgtatttactgcaacaaacaattattttcaagtcttgcagttctgcagattcacctgaaaactatgcacttagataagccagaacaggcccatatttgtcagtattgcttggaggtcctgccctcactctataacctaaatgaacatcttaagcaagtgcatgaagctcaggacccaggtctgattgtttctgccatgcctgccattgtctaccagtgtaacttctgttccgaagttgtcaacgacctcaacactcttcaggaacacatccgatgttctcatggatttgcaaaccctgcagctaaagatagtaatgcattcttttgtccccattgctatatggggtttctcactgactcttccctggaagagcatattagacaggttcattgtgacctcagtggctcccgatttgggtctccagtgcttgggactcccaaagaaccagtagtagaagtctattcttgttcctattgtacaaattcgccaatattcaacagcgttcttaaactgaacaagcatatcaaagagaatcataaaaacattcccttggccctgaattatatccacaatgggaagaaatccagggccttaagccccctatctcctgtggccatagagcagacatctcttaagatgatgcaggcagtaggaggtgcacctgcacgtcccactggagaatatatctgtaatcaatgtggtgctaagtacacatccctagacagctttcagactcacctaaaaactcatctcgacactgtgcttccaaaattgacctgtcctcagtgcaacaaggaattccccaaccaagaatccttgctgaagcatgttaccattcactttatgatcacttcaacgtattacatctgtgagagttgtgacaagcaattcacatcagtggatgaccttcagaaacacctgctggacatgcacacctttgtcttctttcgctgcaccctctgccaggaagtttttgactcaaaagtctccattcagctccacttggctgtgaagcacagtaacgaaaagaaagtctataggtgcacatcttgcaactgggacttccgcaacgaaactgacttgcagctccatgtgaaacacaaccacctggaaaaccaagggaaagtgcataagtgcattttctgcggtgagtcctttggcaccgaggtggagctgcaatgccacatcaccactcacagtaagaagtacaactgcaagttctgtagcaaagccttccatgcgatcattttgttagaaaaacacttgcgagaaaaacactgtgtattcgaaaccaagacacccaactgtggaacaaatggagcttccgagcaagtgcagaaagaggaagtggagctgcagactttgctgaccaacagccaggagtcccacaacagtcacgatgggagcgaagaagacgttgacacctctgagcctatgtacggctgcgacatttgtggggcagcctacactatggaaactttgctgcagaatcaccagctccgagaccacaacatcagacctggagaaagtgccatcgtgaaaaagaaagctgagctcattaaagggaattacaagtgcaacgtgtgctctcgaaccttcttctccgaaaatggcctccgggaacatatgcagacccacctaggccctgtcaaacactacatgtgccctatttgcggagagcggtttccctcccttttaactcttactgaacacaaagtcacgcatagtaagagtcttgatactggaaactgccggatttgcaagatgcctctccagagtgaagaggagtttttagagcattgccaaatgcaccctgacttgaggaattccctgacaggctttcgctgcgtggtgtgcatgcagacagtgacctccaccttggaactcaaaatccatgggacgttccacatgcaaaagacagggaatgggtctgcagttcagaccacagggcggggccagcacgtccaaaaactgtataagtgcgcatcttgcctcaaagaattccgttccaagcaagatctggtgaaacttgatatcaatggcctgccatatggtctgtgtgccggctgcgtgaatctcagtaagagcgccagcccaggcattaacgtccctcccggcacgaatagaccaggcttgggccagaatgagaatctgagtgccattgaggggaaaggcaaggtggggggactgaagacacgctgctctagctgcaacgttaagtttgagtctgaaagtgaactccagaaccacatccaaaccatccaccgagagctcgtgccagacagcaacagcacacagttgaaaacgccccaagtatcaccaatgcccagaatcagtccctcccagtcggatgagaagaagacctatcaatgcatcaagtgtcagatggttttctacaatgaatgggatattcaggttcatgttgcaaatcacatgattgatgaaggactgaaccatgaatgcaaactctgcagccagacctttgactctcctgccaaactccagtgccacctgatagagcacagcttcgaagggatgggaggcaccttcaagtgtccagtctgctttacagtatttgttcaagcaaacaagttgcagcagcatattttctctgcccatggacaagaagacaagatctatgactgtacacaatgtccacagaagtttttcttccaaacagagctgcagaatcatacaatgacccaacacagcagttagtgcaagtacagtctctcaaggagaattgattttgtggcacaaaaagggaacatgttttactctttgcacgaaactttcattgttaatgtatattattcagaaacattgtattgtaccataaaacttgtattatcaaactgttggatgttcatgtgtttgaacttttgcgcaccggatagaccccttgtatataaagtgttgcacatgtattatgtcgtctgatactaaaatggtcttataaagacaagtggacttgggccctattcaggcaagattaaaaaaaaaaa

SEQ ID NO: 23438 - DNA, 4345 bp, Homo sapiens
  misc_feature 1..4345: note = ENST00000399425
  source 1..4345: mol_type = unassigned DNA; mol_type = unassigned DNA
ggccttgcttccattttccattattatgtggactaccggagcgacagcgcagtccaagaccttgcaggatgtctcgccgcaagcaagcgaaaccgagatccctcaaagaccccaactgtaaacttgaagacaagactgaagatggagaggcactagattgtaagaagaggccggaagacggggaggagttggaagacgaagctgtgcacagctgtgacagctgcctccaggtgtttgaatcgctgagcgatatcacagaacacaagattaatcaatgtcaactgacagatggagtggatgttgaagatgatccgacttgctcttggccagcttcctcaccttctagcaaggatcagacttcccctagccatggagaaggttgcgattttggagaggaagaaggtggccctgggcttccatacccgtgtcaattctgtgacaagtcgtttagccgcctcagctacctaaagcaccatgagcagagtcacagtgacaaactgcctttcaaatgcacctactgcagtaggctgttcaaacacaagcgcagccgagatcgccacataaaactccacaccggggacaagaagtaccactgcagtgaatgtgatgctgcgttttccagaagtgatcacttgaagatccacttaaagactcacacgtccaacaagccatataaatgtgccatttgtcgccgtgggtttctgtcctctagttccttacacggacacatgcaggttcatgagaggaacaaggacggctctcagtccggttccaggatggaggactggaagatgaaggacactcagaagtgcagtcagtgtgaggaaggctttgacttcccggaagacctccaaaaacacattgcagagtgccaccccgaatgctccccaaatgaggaccgagcggccctccagtgtgtctactgccacgagctcttcgtagaggagacctccctcatgaaccacatggagcaggtgcatagcggggagaagaagaactcatgcagcatttgttctgagagtttccacacagttgaggaactgtacagccacatggacagtcaccagcaaccggagtcatgcaatcacagcaacagcccttccctggtcacggtgggctatacctccgtgtccagtacgactccagattccaacctctcagtggacagctcaaccatggtggaagctgccccgccaatcccaaagagtcgagggaggaagagggccgctcaacaaacccctgacatgactggtccctcgagtaaacaagcaaaagttacctacagctgtatttactgcaacaaacaattattttcaagtcttgcagttctgcagattcacctgaaaactatgcacttagataagccagaacaggcccatatttgtcagtattgcttggaggtcctgccctcactctataacctaaatgaacatcttaagcaagtgcatgaagctcaggacccaggtctgattgtttctgccatgcctgccattgtctaccagtgtaacttctgttccgaagttgtcaacgacctcaacactcttcaggaacacatccgatgttctcatggatttgcaaaccctgcagctaaagatagtaatgcattcttttgtccccattgctatatggggtttctcactgactcttccctggaagagcatattagacaggttcattgtgacctcagtggctcccgatttgggtctccagtgcttgggactcccaaagaaccagtagtagaagtctattcttgttcctattgtacaaattcgccaatattcaacagcgttcttaaactgaacaagcatatcaaagagaatcataaaaacattcccttggccctgaattatatccacaatgggaagaaatccagggccttaagccccctatctcctgtggccatagagcagacatctcttaagatgatgcaggcagtaggaggtgcacctgcacgtcccactggagaatatatctgtaatcaatgtggtgctaagtacacatccctagacagctttcagactcacctaaaaactcatctcgacactgtgcttccaaaattgacctgtcctcagtgcaacaaggaattccccaaccaagaatccttgctgaagcatgttaccattcactttatgatcacttcaacgtattacatctgtgagagttgtgacaagcaattcacatcagtggatgaccttcagaaacacctgctggacatgcacacctttgtcttctttcgctgcaccctctgccaggaagtttttgactcaaaagtctccattcagctccacttggctgtgaagcacagtaacgaaaagaaagtctataggtgcacatcttgcaactgggacttccgcaacgaaactgacttgcagctccatgtgaaacacaaccacctggaaaaccaagggaaagtgcataagtgcattttctgcggtgagtcctttggcaccgaggtggagctgcaatgccacatcaccactcacagtaagaagtacaactgcaagttctgtagcaaagccttccatgcgatcattttgttagaaaaacacttgcgagaaaaacactgtgtattcgaaaccaagacacccaactgtggaacaaatggagcttccgagcaagtgcagaaagaggaagtggagctgcagactttgctgaccaacagccaggagtcccacaacagtcacgatgggagcgaagaagacgttgacacctctgagcctatgtacggctgcgacatttgtggggcagcctacactatggaaactttgctgcagaatcaccagctccgagaccacaacatcagacctggagaaagtgccatcgtgaaaaagaaagctgagctcattaaagggaattacaagtgcaacgtgtgctctcgaaccttcttctccgaaaatggcctccgggaacatatgcagacccacctaggccctgtcaaacactacatgtgccctatttgcggagagcggtttccctcccttttaactcttactgaacacaaagtcacgcatagtaagagtcttgatactggaaactgccggatttgcaagatgcctctccagagtgaagaggagtttttagagcattgccaaatgcaccctgacttgaggaattccctgacaggctttcgctgcgtggtgtgcatgcagacagtgacctccaccttggaactcaaaatccatgggacgttccacatgcaaaagacagggaatgggtctgcagttcagaccacagggcggggccagcacgtccaaaaactgtataagtgcgcatcttgcctcaaagaattccgttccaagcaagatctggtgaaacttgatatcaatggcctgccatatggtctgtgtgccggctgcgtgaatctcagtaagagcgccagcccaggcattaacgtccctcccggcacgaatagaccaggcttgggccagaatgagaatctgagtgccattgaggggaaaggcaaggtggggggactgaagacacgctgctctagctgcaacgttaagtttgagtctgaaagtgaactccagaaccacatccaaaccatccaccgagagctcgtgccagacagcaacagcacacagttgaaaacgccccaagtatcaccaatgcccagaatcagtccctcccagtcggatgaggatattgtcttctctatgactgaagagaccagcgctcatgccaacactactgagatctggaatctcagcatagcttcaccaagaagacctatcaatgcatcaagtgtcagatggttttctacaatgaatgggatattcaggttcatgttgcaaatcacatgattgatgaaggactgaaccatgaatgcaaactctgcagccagacctttgactctcctgccaaactccagtgccacctgatagagcacagcttcgaagggatgggaggcaccttcaagtgtccagtctgctttacagtatttgttcaagcaaacaagttgcagcagcatattttctctgcccatggacaagaagacaagatctatgactgtacacaatgtccacagaagtttttcttccaaacagagctgcagaatcatacaatgacccaacacagcagttagtgcaagtacagtctctcaaggagaattgattttgtggcacaaaaagggaacatgttttactctttgcacgaaactttcattgttaatgtatattattcagaaacattgtattgtaccataaaacttgtattatcaaactgttggatgttcatgtgtttgaacttttgcgcaccggatagaccccttgtatataaagtgttgcacatgtattatgtcgtctgatactaaaatggtcttataaagacaagtggacttgggccc

SEQ ID NO: 23439 - DNA, 4253 bp, Homo sapiens
  misc_feature 1..4253: note = ENST00000538137
  source 1..4253: mol_type = unassigned DNA; mol_type = unassigned DNA
gacaatgatttcctcagtgattacgtacagagcgagtccctgcgggttaggggccccctctggagccatcctgatggctttgggggccttgcttccattttccattattatgtggactaccggagcgacagcgcagtccaagaccttgcagtttctttcagggctgaattgaaacaacttcagctgtttgcttttaggatgtctcgccgcaagcaagcgaaaccgagatccctcaaagaccccaactgtaaacttgaagacaagactgaagatggagaggcactagattgtaagaagaggccggaagacggggaggagttggaagacgaagctgtgcacagctgtgacagctgcctccaggtgtttgaatcgctgagcgatatcacagaacacaagattaatcaatgtcaactgacagatggagtggatgttgaagatgatccgacttgctcttggccagcttcctcaccttctagcaaggatcagacttcccctagccatggagaaggttgcgattttggagaggaagaaggtggccctgggcttccatacccgtgtcaattctgtgacaagtcgtttagccgcctcagctacctaaagcaccatgagcagagtcacagtgacaaactgcctttcaaatgcacctactgcagtaggctgttcaaacacaagcgcagccgagatcgccacataaaactccacaccggggacaagaagtaccactgcagtgaatgtgatgctgcgttttccagaagtgatcacttgaagatccacttaaagactcacacgtccaacaagccatataaatgtgccatttgtcgccgtgggtttctgtcctctagttccttacacggacacatgcaggttcatgagaggaacaaggacggctctcagtccggttccaggatggaggactggaagatgaaggacactcagaagtgcagtcagtgtgaggaaggctttgacttcccggaagacctccaaaaacacattgcagagtgccaccccgaatgctccccaaatgaggaccgagcggccctccagtgtgtctactgccacgagctcttcgtagaggagacctccctcatgaaccacatggagcaggtgcatagcggggagaagaagaactcatgcagcatttgttctgagagtttccacacagttgaggaactgtacagccacatggacagtcaccagcaaccggagtcatgcaatcacagcaacagcccttccctggtcacggtgggctatacctccgtgtccagtacgactccagattccaacctctcagtggacagctcaaccatggtggaagctgccccgccaatcccaaagagtcgagggaggaagagggccgctcaacaaacccctgacatgactggtccctcgagtaaacaagcaaaagttacctacagctgtatttactgcaacaaacaattattttcaagtcttgcagttctgcagattcacctgaaaactatgcacttagataagccagaacaggcccatatttgtcagtattgcttggaggtcctgccctcactctataacctaaatgaacatcttaagcaagtgcatgaagctcaggacccaggtctgattgtttctgccatgcctgccattgtctaccagtgtaacttctgttccgaagttgtcaacgacctcaacactcttcaggaacacatccgatgttctcatggatttgcaaaccctgcagctaaagatagtaatgcattcttttgtccccattgctatatggggtttctcactgactcttccctggaagagcatattagacaggttcattgtgacctcagtggctcccgatttgggtctccagtgcttgggactcccaaagaaccagtagtagaagtctattcttgttcctattgtacaaattcgccaatattcaacagcgttcttaaactgaacaagcatatcaaagagaatcataaaaacattcccttggccctgaattatatccacaatgggaagaaatccagggccttaagccccctatctcctgtggccatagagcagacatctcttaagatgatgcaggcagtaggaggtgcacctgcacgtcccactggagaatatatctgtaatcaatgtggtgctaagtacacatccctagacagctttcagactcacctaaaaactcatctcgacactgtgcttccaaaattgacctgtcctcagtgcaacaaggaattccccaaccaagaatccttgctgaagcatgttaccattcactttatgatcacttcaacgtattacatctgtgagagttgtgacaagcaattcacatcagtggatgaccttcagaaacacctgctggacatgcacacctttgtcttctttcgctgcaccctctgccaggaagtttttgactcaaaagtctccattcagctccacttggctgtgaagcacagtaacgaaaagaaagtctataggtgcacatcttgcaactgggacttccgcaacgaaactgacttgcagctccatgtgaaacacaaccacctggaaaaccaagggaaagtgcataagtgcattttctgcggtgagtcctttggcaccgaggtggagctgcaatgccacatcaccactcacagtaagaagtacaactgcaagttctgtagcaaagccttccatgcgatcattttgttagaaaaacacttgcgagaaaaacactgtgtattcgaaaccaagacacccaactgtggaacaaatggagcttccgagcaagtgcagaaagaggaagtggagctgcagactttgctgaccaacagccaggagtcccacaacagtcacgatgggagcgaagaagacgttgacacctctgagcctatgtacggctgcgacatttgtggggcagcctacactatggaaactttgctgcagaatcaccagctccgagaccacaacatcagacctggagaaagtgccatcgtgaaaaagaaagctgagctcattaaagggaattacaagtgcaacgtgtgctctcgaaccttcttctccgaaaatggcctccgggaacatatgcagacccacctaggccctgtcaaacactacatgtgccctatttgcggagagcggtttccctcccttttaactcttactgaacacaaagtcacgcatagtaagagtcttgatactggaaactgccggatttgcaagatgcctctccagagtgaagaggagtttttagagcattgccaaatgcaccctgacttgaggaattccctgacaggctttcgctgcgtggtgtgcatgcagacagtgacctccaccttggaactcaaaatccatgggacgttccacatgcaaaagacagggaatgggtctgcagttcagaccacagggcggggccagcacgtccaaaaactgtataagtgcgcatcttgcctcaaagaattccgttccaagcaagatctggtgaaacttgatatcaatggcctgccatatggtctgtgtgccggctgcgtgaatctcagtaagagcgccagcccaggcattaacgtccctcccggcacgaatagaccaggcttgggccagaatgagaatctgagtgccattgaggggaaaggcaaggtggggggactgaagacacgctgctctagctgcaacgttaagtttgagtctgaaagtgaactccagaaccacatccaaaccatccaccgagagctcgtgccagacagcaacagcacacagttgaaaacgccccaagtatcaccaatgcccagaatcagtccctcccagtcggatgagaagaagacctatcaatgcatcaagtgtcagatggttttctacaatgaatgggatattcaggttcatgttgcaaatcacatgattgatgaaggactgaaccatgaatgcaaactctgcagccagacctttgactctcctgccaaactccagtgccacctgatagagcacagcttcgaagggatgggaggcaccttcaagtgtccagtctgctttacagtatttgttcaagcaaacaagttgcagcagcatattttctctgcccatggacaagaagacaagatctatgactgtacacaatgtccacagaagtttttcttccaaacagagctgcagaatcatacaatgacccaacacagcagttagtgcaagtacagtctctcaaggagaattgattttgtggcacaaaaagggaacatgttttactctttgcacgaaactttcattgttaatgtatattattcagaaacattgtattgtaccat

SEQ ID NO: 23440 - DNA, 552 bp, Homo sapiens
  misc_feature 1..552: note = ENST00000577775
  source 1..552: mol_type = unassigned DNA; mol_type = unassigned DNA
gcaaaagacagggaatgggtctgcagttcagaccacagggcggggccagcacgtccaaaaactgtataagtgcgcatcttgcctcaaagaattccgttccaagcaagatctggtgaaacttgatatcaatggcctgccatatggtctgtgtgccggctgcgtgaatctcagtaagagcgccagcccaggcattaacgtccctcccggcacgaatagaccaggcttgggccagaatgagaatctgagtgccattgaggggaaaggcaaggtggggggactgaagacacgctgctctagctgcaacgttaagtttgagtctgaaagtgaactccagaaccacatccaaaccatccaccgagagctcgtgccagacagcaacagcacacagttgaaaacgccccaagtatcaccaatgcccagaatcagtccctcccagtcggatgagaagaagacctatcaatgcatcaagtgtcagatggttttctacaatgaatgggatattcaggttcatgttgcaaatcacatgattgactccaaaacaaaggatctggc

SEQ ID NO: 23441 - DNA, 555 bp, Homo sapiens
  misc_feature 1..555: note = ENST00000577720
  source 1..555: mol_type = unassigned DNA
agtctctgcttcctcctccccaggttggcacacgaggggctgatggctcacgtcacaaagatggagtggatgttgaagatgatccgacttgctcttggccagcttcctcaccttctagcaaggatcagacttcccctagccatggagaaggttgcgattttggagaggaagaaggtggccctgggcttccatacccgtgtcaattctgtgacaagtcgtttagccgcctcagctacctaaagcaccatgagcagagtcacagtgacaaactgcctttcaaatgcacctactgcagtaggctgttcaaacacaagcgcagccgagatcgccacataaaactccacaccggggacaagaagtaccactgcagtgaatgtgatgctgcgttttccagaagtgatcacttgaagatccacttaaagactcacacgtccaacaagccatataaatgtgccatttgtcgccgtgggtttctgtcctctagttccttacacggacacatgcaggttcatgagaggaacaaggacggctctcagtccggttccaggatggagg

SEQ ID NO: 23442 - DNA, 694 bp, Homo sapiens
  misc_feature 1..694: note = ENST00000577801
  source 1..694: mol_type = unassigned DNA; mol_type = unassigned DNA
ctgggggccgtcggctcgggatgtctcgccgcaagcaagcgaaaccgagatccctcaaagaccccaactgtaaacttgaagacaagactgaagatggagaggcactagattgtaagaagaggccggaagacggggaggagttggaagacgaagctgtgcacagctgtgacagctgcctccaggtgtttgaatcgctgagcgatatcacagaacacaagattaatcaatgtcaactgacagatggagtggatgttgaagatgatccgacttgctcttggccagcttcctcaccttctagcaaggatcagacttcccctagccatggagaaggttgcgattttggagaggaagaaggtggccctgggcttccatacccgtgtcaattctgtgacaagtcgtttagccgcctcagctacctaaagcaccatgagcagagtcacagtgacaaactgcctttcaaatgcacctactgcagtaggctgttcaaacacaagcgcagccgagatcgccacataaaactccacaccggggacaagaagtaccactgcagtgaatgtgatgctgcgttttccagaagtgatcacttgaagatccacttaaagactcacacgtccaacaagccatataaatgtgccatttgtcgccgtgggtttctgtcctctagttccttacacggacacatgcaggttcatga

SEQ ID NO: 23443 - DNA, 531 bp, Homo sapiens
  misc_feature 1..531: note = ENST00000581869
  source 1..531: mol_type = unassigned DNA; mol_type = unassigned DNA
attgtcacttagtgatttactggctctgtcatgatttagacattgaacttctgactccaagtccagtgttggtttgctacaattgtttcatcaagatgggaaagctatggaccagaaaaggcaaataacttgtccaaagtcacgtaaatatgaataatgaagctcgggtttcaacttaggcatcctgcctccagattccatgcccttaactcctataccagatggagtggatgttgaagatgatccgacttgctcttggccagcttcctcaccttctagcaaggatcagacttcccctagccatggagaaggttgcgattttggagaggaagaaggtggccctgggcttccatacccgtgtcaattctgtgacaagtcgtttagccgcctcagctacctaaagcaccatgagcagagtcacagtgacaaactgcctttcaaatgcacctactgcagtaggctgttcaaacacaagcgcagccgagatcgccacataaaactccacaccggggacaagaagtaccactgcag

SEQ ID NO: 23444 - DNA, 547 bp, Homo sapiens
  misc_feature 1..547: note = ENST00000580488
  source 1..547: mol_type = unassigned DNA; mol_type = unassigned DNA
gttcgcatctgcctcggatggtgggagatttttctttccaagaccttttcatcgccttgcagggtcgatttccccccctcgtccccccaactacaaaagagcacgactcgctttgatgtctcgccgcaagcaagcgaaaccgagatccctcaaagaccccaactgtaaacttgaagacaagactgaagatggagaggcactagattgtaagaagaggccggaagacggggaggagttggaagacgaagctgtgcacagctgtgacagctgcctccaggtgtttgaatcgctgagcgatatcacagaacacaagattaatcaatgtcaactgacagatggagtggatgttgaagatgatccgacttgctcttggccagcttcctcaccttctagcaaggatcagacttcccctagccatggagaaggttgcgattttggagaggaagaaggtggccctgggcttccatacccgtgtcaattctgtgacaagtcgtttagccgcctcagctacctaaagcaccatgagcagagtcacagtgacaaactg

SEQ ID NO: 23445 - DNA, 541 bp, Homo sapiens
  misc_feature 1..541: note = ENST00000583005
  source 1..541: mol_type = unassigned DNA; mol_type = unassigned DNA
gagtgcaggcaggctgacaatgatttcctcagtgattacgtacagagcgagtccctgcgggttaggggccccctctggagccatcctgatggctttgggggccttgcttccattttccattattatgtggactaccggagcgacagcgcagtccaagaccttgcaggatgtctcgccgcaagcaagcgaaaccgagatccctcaaaggtgtgggacttctaaatatgtcacgaaacctagaaggctagttaccccaactgtaaacttgaagacaagactgaagatggagaggcactagattgtaagaagaggccggaagacggggaggagttggaagacgaagctgtgcacagctgtgacagctgcctccaggtgtttgaatcgctgagcgatatcacagaacacaagattaatcaatgtcaactgacagatggagtggatgttgaagatgatccgacttgctcttggccagcttcctcaccttctagcaaggatcagacttcccctagccatggagaaggttgcgattttggagaggaag

SEQ ID NO: 23446 - DNA, 594 bp, Homo sapiens
  misc_feature 1..594: note = ENST00000579111
  source 1..594: mol_type = unassigned DNA
atgcccctctgtctgtgtgtgagtgcaggcaggctgacaatgatttcctcagtgattacgtacagagcgagtccctgcgggttaggggccccctctggagccatcctgatggctttgggggccttgcttccattttccattattatgtggactaccggagcgacagcgcagtccaagaccttgcaggatgtctcgccgcaagcaagcgaaaccgagatccctcaaagagtatttccatatcctttaaaaaccactgtagttatccttactgacagcagtgacgtctaacagtgatgacagaatttttcaactttttgcttccgaccccaactgtaaacttgaagacaagactgaagatggagaggcactagattgtaagaagaggccggaagacggggaggagttggaagacgaagctgtgcacagctgtgacagctgcctccaggtgtttgaatcgctgagcgatatcacagaacacaagattaatcaatgtcaactgacagatggagtggatgttgaagatgatccgacttgctcttggccagcttcctcaccttctagcaaggatcagacttcccctagccatggagaagg

SEQ ID NO: 23447 - DNA, 406 bp, Homo sapiens
  misc_feature 1..406: note = ENST00000583398
  source 1..406: mol_type = unassigned DNA; mol_type = unassigned DNA
gattctcctgtaataaaatctgcaatgaagccctcctattgcaacttcaaggaaaatggtgtttctgtttttggtagcaagaagattaaatgttactttaaaagaacctgtctttaaaccccatacttacagtgttgatatttttcagaccccaactgtaaacttgaagacaagactgaagatggagaggcactagattgtaagaagaggccggaagacggggaggagttggaagacgaagctgtgcacagctgtgacagctgcctccaggtgtttgaatcgctgagcgatatcacagaacacaagattaatcaatgtcaactgacagatggagtggatgttgaagatgatccgacttgctcttggccagcttcctcaccttctagcaaggatcagacttccccta

SEQ ID NO: 23448 - DNA, 590 bp, Homo sapiens
  misc_feature 1..590: note = ENST00000582584
  source 1..590: mol_type = unassigned DNA; mol_type = unassigned DNA
gatttcctcagtgattacgtacagagcgagtccctgcgggttaggggccccctctggagccatcctgatggctttgggggccttgcttccattttccattattatgtggactaccggagcgacagcgcagtccaagaccttgcagaccccaactgtaaacttgaagacaagactgaagatggagaggcactagattgtaagaagaggccggaagacggggaggagttggaagacgaagctgtgcacagctgtgacagctgcctccaggtgtttgaatcgctgagcgatatcacagaacacaagattaatcaatgtcaactgacagggtgacgcacattccttggagagcctgccttgatgaaaacctattcactccgtatcaaaagtcttgaaactgagccaaggccaaacgaagcctttggagatgaaggtcaaatacagaagaacaagatgatcaattctagacccagatttgaaagtcagctataagattatgtgccaggtaaaataatgattagctgtccacgtggactgaaattttagacagtggatcctgcagggataaagaaaatgcgagctcacacacacct

SEQ ID NO: 23449 - DNA, 338 bp, Homo sapiens
  misc_feature 1..338: note = ENST00000577461
  source 1..338: mol_type = unassigned DNA; mol_type = unassigned DNA
gggaaagtttggtgcagcagccgccgccgccgccgccgccgtcgtgcagagcgcggagctcgggcagccgcgagccccgcgcgcgagcgcgagccggagccggagcgaggagcggagcgcggagcgagggcgcgagggaggccgagcggagggcgcgaggcgccgcggcccgaggggcgcgcggccacgaggaagtatagtttctttcagggctgaattgaaacaacttcagctgtttgcttttaggatgtctcgccgcaagcaagcgaaaccgagatccctcaaagaccccaactgtaaacttgaagacaagactgaagatggagaggcactagatt

SEQ ID NO: 23450 - DNA, 1539 bp, Homo sapiens
  misc_feature 1..1539: note = ENST00000513985
  source 1..1539: mol_type = unassigned DNA; mol_type = unassigned DNA
cagtacttgcatgcttatccttacccacagatgtacgaccccagccatcctgcataccgggctgtttctcccgtcctaatgcacagttatcctggggcatatctctctccaggatttcattatcctgtttatgggaagatgtcagggagagaagagacagagaaagtcaataccagccctagcgtcaacacgaaaacaaccactgaatctaaagcactggatttgctccagcagcatgctaaccaataccgcagcaagtctcctgctcctgtggaaaaggctacagctgagcgggaacgggaggcagaaagggaaagggatcgccactcccccttcggccagcggcacctgcacacgcaccaccacacccacgttggcatgggttacccgctaatcccgggtcaatatgacccttttcaaggcttgacctctgctgcccttgttgcctctcagcaggtggctgcccaggcatctgcatctggaatgtttcctggacaaagaagataaagtcgcaaatggagacatttattttcataatgctaaagagaataacaagattggacatgtacattgtcatgtgactggatcacatggggaagcgctttatacagacatcagttccatggtgttaatttgaaatgccttaatggcaggcaaaaaccagtcatttcatttttgtaaattacagattttatcacagagtaacaaatgttgctgtaattaaacttctgttttatatatatatacgtatacatatctgtatatatacatatatatatatataaatataaatatattctttactttttgtatcagtaaccaggctcgcacacacagggtctgctgccacgtcgcaaaccactcagtaaaggaaattaaaaatgtatttgtcatgttaaaaagtgttagccacaaaaggctacttactttcttttccttttcctttaaaattgtaaataaataatgttatgtatcagtgtgcctgaaccttgcatatccttcacatatttcccataagcccctcagaaaggctaactgtgatgatgacactttggtacaatttagatgtctatttggtggctcctgttaaagacgcaccagtgtaaaatgttcctgtagtcactgtttgtacttgtgtattgtggaaaaagtacttttggaaggcatggggttgccagtaccacaaaaactgtgttgtatataatgtaaagattaaaatggggaaataatgagcatctgtgaataatgaggtgtcattttttgataatcttgaatggcaaataacccaatagcctgcgtaccagagacatctgtgattgttctattacttgaatagttctacagtctttttttttttttaatgtttacaattatccagttttagaagagagagactttaacgccattgcctggttacttgttttatgctgtaatctagtttattttatgtaaaatgtatattgaatgctttccttttttatacctgccttaaataatttggcaatcagaattaaaaagtttttttttttttaaataatg

SEQ ID NO: 23451 - DNA, 4726 bp, Homo sapiens
  misc_feature 1..4726: note = ENST00000504926
  source 1..4726: mol_type = unassigned DNA; mol_type = unassigned DNA
gtgagcagcggcggcagcggcaacccaaacagcaatagtaccagcaccagcacctctgccgccaccgcgggggcaggctcctgtgggaaaagcaaagaggagaagccaggttgaccccctgtttacagtgccagcgccaccaccgccgatttccagcagtctcacgcctcagattctaccctcctacttttccccatcttcatccaatattgcagcaccggttgaacagcttttggttcggactcgttctgtgggtgtcaatacatgtgaagttggagtagtgacagagccagagtgtcttgggccctgtgaacctgggaccagtgtgaatttggaagggatcgtgtggcatgaaacagaagaaggtgtcctagtggtcaatgtcacgtggaggaacaaaacgtacgtgggaaccctactggactgcaccaagcacgactgggcccctcccaggttttgtgagtcaccgacaagtgacctggagatgagagggggccggggcagagggaagagagcgaggtctgctgctgctgccccgggctccgaggccagcttcacagagtccagagggctgcagaataagaacagagggggggccaatgggaaagggaggcggggcagcctcaatgccagcggacgaaggacacccccaaattgtgctgctgaggatatcaaagccagcccttcctccaccaacaaaaggaaaaacaagcctccaatggagctggacctgaactccagctctgaggacaataagcctggaaagcgtgtccgcacaaattccagaagcactcccactacccctcaagggaaaccagagactacttttttggaccaaggctgctcttctccagtgttaatcgactgtccccacccaaactgcaacaaaaagtacaagcacattaacggcctgaggtaccaccaggctcatgcacacttagacccagaaaacaagctggagttcgagcctgacagtgaggacaagatctcggactgtgaggaaggattgagtaatgtggcacttgaatgcagtgagccaagcacaagtgtatctgcttatgaccagttgaaggcaccggcatcccctggtgctggaaacccacctgggaccccaaagggaaagagagagctgatgagcaatggcccaggttccattattggtgctaaagctgggaagaattctggcaaaaagaagggccttaacaatgaactgaacaaccttccagtaatctccaacatgacggctgcgttagacagttgctcggcagcagacggcagtttggctgctgagatgcctaaactggaagcagaaggattaattgacaagaaaaatttaggagataaagaaaagggcaaaaaagctaccaactgcaaaacggacaaaaacctctctaaactgaaaagtgcccggcccattgcccctgccccagcccccactcccccgcagctaatcgctatacccactgcaacctttacaacgaccaccactgggacaatacccggactgccctccctcacaacaactgttgttcaggctacaccaaagagtcctccgttaaaacccattcaaccaaagcccacaattatgggagagcccatcaccgtgaacccagctctggtgtcactcaaagacaaaaagaaaaaggagaagcgaaagctaaaggacaaagaagggaaagagacgggaagcccaaaaatggatgccaagctggggaaactagaggactccaagggggccagcaaagatttacctgggcattttttaaaggatcatctcaacaagaatgaagggctggcaaatggactgtcggagtctcaggagagccgcatggccagtatcaaagctgaggccgataaggtttacactttcacagacaacgctcccagcccttccatagggagcgcctcgaggctggaatgcagcactttggtgaacgggcaggcaccaatggcacctctgcatgtgttgacccagaatggggcagagagttcagctgcaaagacaagcagcccggcctattcagacatatctgatgctgctgacgatggtggttctgacagcaggtcggagggtatgagatcaaaggccagttccccatcagatattatttctagtaaggacagtgttgtaaaagggcattcttcaactacagcacaatcatctcaactgaaagagtcccattctccctattaccacagctatgatccttattattctccaagttacatgcaccctgggcaggtcggtgcccctgcagctggaaatagtgggagcacgcagggaatgaagatcaagaaggagtctgaggaagatgctgaaaagaaagacaaggcagagcagttagattctaagaaagtggaccacaattctgcatccttacagcctcagcaccagtcggtgatcacacaaagacatcctgccctggctcagtcactttattatggccagtatgcatatgggctctatatggaccagaagtctctgatggccaccagccctgcctatagacagcagtatgagaagtactatgaggaccagaggctggcagagcagaaaatggcccagactgggagaggagactgtgaaaggaaaagtgagctccccttgaaagagctgggcaaggaggaaactaaacagaaaaatatgccatcggccacaatctcaaaagctccctctactccggagcctaacaaaaaccattctaaactagggccatcagtgcctaataaaactgaggagacaggtaaatcgcagcttctctccaatcaccagcagcagcttcaggccgacagcttcaaagctaagcagatggaaaaccaccagcttattaaggaggctgtagaaatgaagtctgtcatggactctatgaagcagacaggtgtagacccaacctcgagatttaaacaagacccagattcaagaacatggcatcattatgtataccagcccaaatatctggatcagcaaaagtcagaagaacttgatagagagaagaaattaaaagaggatagtccgaggaaaactcctaataaagagagtggtgtgcccagccttcctgtatcgttaacaagcattaaagaggagcccaaagaggccaagcatcctgattctcaatcaatggaggagagcaagctgaaaaatgatgatcgaaagactcctgtgaactggaaggactctcggggaacaagagtggctgtctcctcacccatgagtcagcatcagtcatacatacagtacttgcatgcttatccttacccacagatgtacgaccccagccatcctgcataccgggctgtttctcccgtcctaatgcacagttatcctggggcatatctctctccaggatttcattatcctgtttatgggaagatgtcagggagagaagagacagagaaagtcaataccagccctagcgtcaacacgaaaacaaccactgaatctaaagcactggatttgctccagcagcatgctaaccaataccgcagcaagtctcctgctcctgtggaaaaggctacagctgagcgggaacgggaggcagaaagggaaagggatcgccactcccccttcggccagcggcacctgcacacgcaccaccacacccacgttggcatgggttacccgctaatcccgggtcaatatgacccttttcaaggcttgacctctgctgcccttgttgcctctcagcaggtggctgcccaggcatctgcatctggaatgtttcctggacaaagaagagaataacaagattggacatgtacattgtcatgtgactggatcacatggggaagcgctttatacagacatcagttccatggtgttaatttgaaatgccttaatggcaggcaaaaaccagtcatttcatttttgtaaattacagattttatcacagagtaacaaatgttgctgtaattaaacttctgttttatatatatatacgtatacatatctgtatatatacatatatatatatataaatataaatatattctttactttttgtatcagtaaccaggctcgcacacacagggtctgctgccacgtcgcaaaccactcagtaaaggaaattaaaaatgtatttgtcatgttaaaaagtgttagccacaaaaggctacttactttcttttccttttcctttaaaattgtaaataaataatgttatgtatcagtgtgcctgaaccttgcatatccttcacatatttcccataagcccctcagaaaggctaactgtgatgatgacactttggtacaatttagatgtctatttggtggctcctgttaaagacgcaccagtgtaaaatgttcctgtagtcactgtttgtacttgtgtattgtggaaaaagtacttttggaaggcatggggttgccagtaccacaaaaactgtgttgtatataatgtaaagattaaaatggggaaataatgagcatctgtgaataatgaggtgtcattttttgataatcttgaatggcaaataacccaatagcctgcgtaccagagacatctgtgattgttctattacttgaatagttctacagtctttttttttttttaatgtttacaattatccagttttagaagagagagactttaacgccattgcctggttacttgttttatgctgtaatctagtttattttatgtaaaatgtatattgaatgctttccttttttatacctgccttaaataatttggcaatcagaattaaaaagtttttttttttttaaata

SEQ ID NO: 23452 - DNA, 5958 bp, Homo sapiens
  misc_feature 1..5958: note = ENST00000306315
  source 1..5958: mol_type = unassigned DNA; mol_type = unassigned DNA
aaaaggtgattatccttgtgttgttgataaagggattttctttttagctaccgtaagatgcttactgtcataggtttatttttcgggtttggttattttcctttaaacctgatattggactgtgaggacaatacatgagccaccttactctccatccttccctgtcccctttactgattccccaatactaatcgttttttattctggtaacacccagacaagaaatattcgacttttcccccccccttcacaggaaaaggtggacctggactgagggtgtaaaatccctggacacattcgtggggcaggaaaaagaagaggaagattagaagattttttttttctttgagagaaagcccagcggagataaacgaatgtcccctcatctccaaagaaaagttcatcggatttttattctagagagctcatcttcaggatgtcagtgaacatttctactgcaggaaaaggtgtggatccaaatacagttgatacttatgacagtggcgatgattgggaaatcggggttggaaatttaataattgatttggacgctgatttggagaaggacagacagaaatttgagatgaataattccaccaccaccactagtagcagcaactccaaggattgtggaggtccggcctccagtggggctggtgctaccgcagccttagctgatggcctaaaatttgcttctgttcaggcctctgctccccaggggaattcacacaaagagaccagcaaatcaaaagtgaaaaggagtaaaacttctaaggatgctaataaatctctgccttctgctgccttgtatgggattcccgagatcagcagcactggcaagaggcaggaagtccaagggcgccctggagaggcaactggcatgaattcagcgctgggtcaaagtgtgagcagcggcggcagcggcaacccaaacagcaatagtaccagcaccagcacctctgccgccaccgcgggggcaggctcctgtgggaaaagcaaagaggagaagccaggtaaaagccagagcagccgaggcgccaagcgggataaggatgcggggaaatccaggaaggacaagcacgacctgcttcagggccaccagaatggcagtggcagccaggccccttccggggggcacctctatggctttggggccaagagcaatggaggtggcgcgagccccttccactgcgggggcactgggagtggcagcgtcgccgctgcaggggaagttagcaaaagtgccccggattcagggctcatgggaaactctatgttggtaaagaaggaagaggaggaggaggagagccacaggcgaatcaagaaactgaaaactgagaaggttgaccccctgtttacagtgccagcgccaccaccgccgatttccagcagtctcacgcctcagattctaccctcctacttttccccatcttcatccaatattgcagcaccggttgaacagcttttggttcggactcgttctgtgggtgtcaatacatgtgaagttggagtagtgacagagccagagtgtcttgggccctgtgaacctgggaccagtgtgaatttggaagggatcgtgtggcatgaaacagaagaaggtgtcctagtggtcaatgtcacgtggaggaacaaaacgtacgtgggaaccctactggactgcaccaagcacgactgggcccctcccaggttttgtgagtcaccgacaagtgacctggagatgagagggggccggggcagagggaagagagcgaggtctgctgctgctgccccgggctccgaggccagcttcacagagtccagagggctgcagaataagaacagagggggggccaatgggaaagggaggcggggcagcctcaatgccagcggacgaaggacacccccaaattgtgctgctgaggatatcaaagccagcccttcctccaccaacaaaaggaaaaacaagcctccaatggagctggacctgaactccagctctgaggacaataagcctggaaagcgtgtccgcacaaattccagaagcactcccactacccctcaagggaaaccagagactacttttttggaccaaggctgctcttctccagtgttaatcgactgtccccacccaaactgcaacaaaaagtacaagcacattaacggcctgaggtaccaccaggctcatgcacacttagacccagaaaacaagctggagttcgagcctgacagtgaggacaagatctcggactgtgaggaaggattgagtaatgtggcacttgaatgcagtgagccaagcacaagtgtatctgcttatgaccagttgaaggcaccggcatcccctggtgctggaaacccacctgggaccccaaagggaaagagagagctgatgagcaatggcccaggttccattattggtgctaaagctgggaagaattctggcaaaaagaagggccttaacaatgaactgaacaaccttccagtaatctccaacatgacggctgcgttagacagttgctcggcagcagacggcagtttggctgctgagatgcctaaactggaagcagaaggattaattgacaagaaaaatttaggagataaagaaaagggcaaaaaagctaccaactgcaaaacggacaaaaacctctctaaactgaaaagtgcccggcccattgcccctgccccagcccccactcccccgcagctaatcgctatacccactgcaacctttacaacgaccaccactgggacaatacccggactgccctccctcacaacaactgttgttcaggctacaccaaagagtcctccgttaaaacccattcaaccaaagcccacaattatgggagagcccatcaccgtgaacccagctctggtgtcactcaaagacaaaaagaaaaaggagaagcgaaagctaaaggacaaagaagggaaagagacgggaagcccaaaaatggatgccaagctggggaaactagaggactccaagggggccagcaaagatttacctgggcattttttaaaggatcatctcaacaagaatgaagggctggcaaatggactgtcggagtctcaggagagccgcatggccagtatcaaagctgaggccgataaggtttacactttcacagacaacgctcccagcccttccatagggagcgcctcgaggctggaatgcagcactttggtgaacgggcaggcaccaatggcacctctgcatgtgttgacccagaatggggcagagagttcagctgcaaagacaagcagcccggcctattcagacatatctgatgctgctgacgatggtggttctgacagcaggtcggagggtatgagatcaaaggccagttccccatcagatattatttctagtaaggacagtgttgtaaaagggcattcttcaactacagcacaatcatctcaactgaaagagtcccattctccctattaccacagctatgatccttattattctccaagttacatgcaccctgggcaggtcggtgcccctgcagctggaaatagtgggagcacgcagggaatgaagatcaagaaggagtctgaggaagatgctgaaaagaaagacaaggcagagcagttagattctaagaaagtggaccacaattctgcatccttacagcctcagcaccagtcggtgatcacacaaagacatcctgccctggctcagtcactttattatggccagtatgcatatgggctctatatggaccagaagtctctgatggccaccagccctgcctatagacagcagtatgagaagtactatgaggaccagaggctggcagagcagaaaatggcccagactgggagaggagactgtgaaaggaaaagtgagctccccttgaaagagctgggcaaggaggaaactaaacagaaaaatatgccatcggccacaatctcaaaagctccctctactccggagcctaacaaaaaccattctaaactagggccatcagtgcctaataaaactgaggagacaggtaaatcgcagcttctctccaatcaccagcagcagcttcaggccgacagcttcaaagctaagcagatggaaaaccaccagcttattaaggaggctgtagaaatgaagtctgtcatggactctatgaagcagacaggtgtagacccaacctcgagatttaaacaagacccagattcaagaacatggcatcattatgtataccagcccaaatatctggatcagcaaaagtcagaagaacttgatagagagaagaaattaaaagaggatagtccgaggaaaactcctaataaagagagtggtgtgcccagccttcctgtatcgttaacaagcattaaagaggagcccaaagaggccaagcatcctgattctcaatcaatggaggagagcaagctgaaaaatgatgatcgaaagactcctgtgaactggaaggactctcggggaacaagagtggctgtctcctcacccatgagtcagcatcagtcatacatacagtacttgcatgcttatccttacccacagatgtacgaccccagccatcctgcataccgggctgtttctcccgtcctaatgcacagttatcctggggcatatctctctccaggatttcattatcctgtttatgggaagatgtcagggagagaagagacagagaaagtcaataccagccctagcgtcaacacgaaaacaaccactgaatctaaagcactggatttgctccagcagcatgctaaccaataccgcagcaagtctcctgctcctgtggaaaaggctacagctgagcgggaacgggaggcagaaagggaaagggatcgccactcccccttcggccagcggcacctgcacacgcaccaccacacccacgttggcatgggttacccgctaatcccgggtcaatatgacccttttcaaggcttgacctctgctgcccttgttgcctctcagcaggtggctgcccaggcatctgcatctggaatgtttcctggacaaagaagagaataacaagattggacatgtacattgtcatgtgactggatcacatggggaagcgctttatacagacatcagttccatggtgttaatttgaaatgccttaatggcaggcaaaaaccagtcatttcatttttgtaaattacagattttatcacagagtaacaaatgttgctgtaattaaacttctgttttatatatatatacgtatacatatctgtatatatacatatatatatatataaatataaatatattctttactttttgtatcagtaaccaggctcgcacacacagggtctgctgccacgtcgcaaaccactcagtaaaggaaattaaaaatgtatttgtcatgttaaaaagtgttagccacaaaaggctacttactttcttttccttttcctttaaaattgtaaataaataatgttatgtatcagtgtgcctgaaccttgcatatccttcacatatttcccataagcccctcagaaaggctaactgtgatgatgacactttggtacaatttagatgtctatttggtggctcctgttaaagacgcaccagtgtaaaatgttcctgtagtcactgtttgtacttgtgtattgtggaaaaagtacttttggaaggcatggggttgccagtaccacaaaaactgtgttgtatataatgtaaagattaaaatggggaaataatgagcatctgtgaataatgaggtgtcattttttgataatcttgaatggcaaataacccaatagcctgcgtaccagagacatctgtgattgttctattacttgaatagttctacagtctttttttttttttaatgtttacaattatccagttttagaagagagagactttaacgccattgcctggttacttgttttatgctgtaatctagtttattttatgtaaaatgtatattgaatgctttccttttttatacctgccttaaataatttggcaatcagaattaaaaagtttttttttttttaaat

SEQ ID NO: 23453 - DNA, 2686 bp, Homo sapiens
  misc_feature 1..2686: note = ENST00000505686
  source 1..2686: mol_type = unassigned DNA; mol_type = unassigned DNA
tttgagagaaagcccagcggagataaacgaatgtcccctcatctccaaagaaaagttcatcggatttttattctagagagctcatcttcaggatgtcagtgaacatttctactgcaggaaaaggtgtggatccaaatacagttgatacttatgacagtggcgatgattgggaaatcggggttggaaatttaataattgatttggacgctgatttggagaaggacagacagaaatttgagatgaataattccaccaccaccactagtagcagcaactccaaggattgtggaggtccggcctccagtggggctggtgctaccgcagccttagctgatggcctaaaatttgcttctgttcaggcctctgctccccaggggaattcacacaaagagaccagcaaatcaaaagtgaaaaggagtaaaacttctaaggatgctaataaatctctgccttctgctgccttgtatgggattcccgagatcagcagcactggcaagaggcaggaagtccaagggcgccctggagaggcaactggcatgaattcagcgctgggtcaaagtgtgagcagcggcggcagcggcaacccaaacagcaatagtaccagcaccagcacctctgccgccaccgcgggggcaggctcctgtgggaaaagcaaagaggagaagccaggtaaaagccagagcagccgaggcgccaagcgggataaggatgcggggaaatccaggaaggacaagcacgacctgcttcagggccaccagaatggcagtggcagccaggccccttccggggggcacctctatggctttggggccaagagcaatggaggtggcgcgagccccttccactgcgggggcactgggagtggcagcgtcgccgctgcaggggaagttagcaaaagtgccccggattcagggctcatgggaaactctatgttggtaaagaaggaagaggaggaggaggagagccacaggcgaatcaagaaactgaaaactgagaaggttgaccccctgtttacagtgccagcgccaccaccgccgatttccagcagtctcacgcctcagattctaccctcctacttttccccatcttcatccaatattgcagcaccggttgaacagcttttggttcggactcgttctgtgggtgtcaatacatgtgaagttggagtagtgacagagccagagtgtcttgggccctgtgaacctgggaccagtgtgaatttggaagggatcgtgtggcatgaaacagaagaaggtgtcctagtggtcaatgtcacgtggaggaacaaaacgtacgtgggaaccctactggactgcaccaagcacgactgggcccctcccaggacccagattcaagaacatggcatcattatgtataccagcccaaatatctggatcagcaaaagtcagaagaacttgatagagagaagaaattaaaagaggatagtccgaggaaaactcctaataaagagagtggtgtgcccagccttcctgtatcgttaacaagcattaaagaggagcccaaagaggccaagcatcctgattctcaatcaatggaggagagcaagctgaaaaatgatgatcgaaagactcctgtgaactggaaggactctcggggaacaagagtggctgtctcctcacccatgagtcagcatcagtcatacatacagtacttgcatgcttatccttacccacagatgtacgaccccagccatcctgcataccgggctgtttctcccgtcctaatgcacagttatcctggggcatatctctctccaggatttcattatcctgtttatgggaagatgtcagggagagaagagacagagaaagtcaataccagccctagcgtcaacacgaaaacaaccactgaatctaaagcactggatttgctccagcagcatgctaaccaataccgcagcaagtctcctgctgcttgacctctgctgcccttgttgcctctcagcaggtggctgcccaggcatctgcatctggaatgtttcctggacaaagaagataaagtcgcaaatggagacatttattttcataatgctaaagagaataacaagattggacatgtacattgtcatgtgactggatcacatggggaagcgctttatacagacatcagttccatggtgttaatttgaaatgccttaatggcaggcaaaaaccagtcatttcatttttgtaaattacagattttatcacagagtaacaaatgttgctgtaattaaacttctgttttatatatatatacgtatacatatctgtatatatacatatatatatatataaatataaatatattctttactttttgtatcagtaaccaggctcgcacacacagggtctgctgccacgtcgcaaaccactcagtaaaggaaattaaaaatgtatttgtcatgttaaaaagtgttagccacaaaaggctacttactttcttttccttttcctttaaaattgtaaataaataatgttatgtatcagtgtgcctgaaccttgcatatccttcacatatttcccataagcccctcagaaaggctaactgtgatgatgacactttggtacaatttagatgtctatttggtggctcctgttaaagacgcaccagtgtaaaatgttcctgtagtcactgtttgtacttgtgtattgtggaaaaagtacttttggaaggcatggggttg

SEQ ID NO: 23454 - DNA, 801 bp, Homo sapiens
  misc_feature 1..801: note = ENST00000503896
  source 1..801: mol_type = unassigned DNA; mol_type = unassigned DNA
ggaaatccaggaaggacaagcacgacctgcttcagggccaccagaatggcagtggcagccaggccccttccggggggcacctctatggctttggggccaagagcaatggaggtggcgcgagccccttccactgcgggggcactgggagtggcagcgtcgccgctgcaggggaagttagcaaaagtgccccggattcagggctcatgggaaactctatgttggtaaagaaggaagaggaggaggaggagagccacaggcgaatcaagaaactgaaaactgagaaggttgaccccctgtttacagtgccagcgccaccaccgccgatttccagcagtctcacgcctcagattctaccctcctacttttccccatcttcatccaatattgcagcaccggttgaacagcttttggttcggactcgttctgtgggtgtcaatacatgtgaagttggagtagtgacagagccagagtgtcttgggccctgtgaacctgggaccagtgtgaatttggaagggatcgtgtggcatgaaacagaagaaggtgtcctagtggtcaatgtcacgtggaggaacaaaacgtacgtgggaaccctactggactgcaccaagcacgactgggcccctcccaggggcatatctctctccaggatttcattatcctgtttatgggaagatgtcagggagagaagagacagagaaagtcaataccagccctagcgtcaacacgaaaacaaccactgaatctaaagcactggatttgctccagcagcatgctaaccaataccgcagcaagtctcctgct

SEQ ID NO: 23455 - DNA, 2605 bp, Homo sapiens
  misc_feature 1..2605: note = ENST00000509799
  source 1..2605: mol_type = unassigned DNA; mol_type = unassigned DNA
cactccccctgtgtgtgtgttgtgtttcagtcctgatttagtgttgcagaacaagcttgttgtgtgtgtgcaccagggggatttttgttttgctttttttaaattttaatttttgcttttataaaaaatacacaggacggtctgtgacatttgatggtccatcttctttaataataaatttgttgaagagattataatttccaaaataaagcggctgcaaccaaacacattcaatgcagttagaaggaaaaggtcaactcgatccaatacagaccgaaaaggtggacctggactgagggtgtaaaatccctggacacattcgtggggcaggaaaaagaagaggaagattagaagattttttttttctttgagagaaagcccagcggagataaacgaatgtcccctcatctccaaagaaaagttcatcggatttttattctagagagctcatcttcaggatgtcagtgaacatttctactgcaggaaaaggtgtggatccaaatacagttgatacttatgacagtggcgatgattgggaaatcggggttggaaatttaataattgatttggacgctgatttggagaaggacagacagaaatttgagatgaataattccaccaccaccactagtagcagcaactccaaggattgtggaggtccggcctccagtggggctggtgctaccgcagccttagctgatggcctaaaatttgcttctgttcaggcctctgctccccaggggaattcacacaaagagaccagcaaatcaaaagtgaaaaggagtaaaacttctaaggatgctaataaatctctgccttctgctgccttgtatgggattcccgagatcagcagcactggcaagaggcaggaagtccaagggcgccctggagaggcaactggcatgaattcagcgctgggtcaaagtgtgagcagcggcggcagcggcaacccaaacagcaatagtaccagcaccagcacctctgccgccaccgcgggggcaggctcctgtgggaaaagcaaagaggagaagccaggtaaaagccagagcagccgaggcgccaagcgggataaggatgcggggaaatccaggaaggacaagcacgacctgcttcagggccaccagaatggcagtggcagccaggccccttccggggggcacctctatggctttggggccaagagcaatggaggtggcgcgagccccttccactgcgggggcactgggagtggcagcgtcgccgctgcaggggaagttagcaaaagtgccccggattcagggctcatgggaaactctatgttggtaaagaaggaagaggaggaggaggagagccacaggcgaatcaagaaactgaaaactgagaaggttgaccccctgtttacagtgccagcgccaccaccgccgatttccagcagtctcacgcctcagattctaccctcctacttttccccatcttcatccaatattgcagcaccggttgaacagcttttggttcggactcgttctgtgggtgtcaatacatgtgaagttggagtagtgacagagccagagtgtcttgggccctgtgaacctgggaccagtgtgaatttggaagggatcgtgtggcatgaaacagaagaaggtgtcctagtggtcaatgtcacgtggaggaacaaaacgtacgtgggaaccctactggactgcaccaagcacgactgggcccctcccaggttttgtgagtcaccgacaagtgacctggagatgagagggggccggggcagagggaagagagcgaggtctgctgctgctgccccgggctccgaggccagcttcacagagtccagagggctgcagaataagaacagagggggggccaatgggaaagggaggcggggcagcctcaatgccagcggacgaaggacacccccaaattgtgctgctgaggatatcaaagccagcccttcctccaccaacaaaaggaaaaacaagcctccaatggagctggacctgaactccagctctgaggacaataagcctggaaagcgtgtccgcacaaattccagaagcactcccactacccctcaagggaaaccagagactacttttttggaccaaggctgctcttctccagtgttaatcgactgtccccacccaaactgcaacaaaaagtacaagcacattaacggcctgaggtaccaccaggctcatgcacacttagacccagaaaacaagctggagttcgagcctgacagtgaggacaagatctcggactgtgaggaaggattgagtaatgtggcacttgaatgcagtgagccaagcacaagtgtatctgcttatgaccagttgaaggcaccggcatcccctggtgctggaaacccacctgggaccccaaagggaaagagagagctgatgagcaatggcccaggttccattattggtgctaaagctgggaagaattctggcaaaaagaagggccttaacaatgaactgaacaaccttccagtaatctccaacatgacggctgcgttagacagttgctcggcagcagacggcagtttggctgctgagatgcctaaactggaagcagaaggattaattgacaagaaaaatttaggagataaagaaaa

SEQ ID NO: 23456 - DNA, 2737 bp, Homo sapiens
  misc_feature 1..2737: note = ENST00000513986
  source 1..2737: mol_type = unassigned DNA; mol_type = unassigned DNA
cgcctgtaggtttgctacatgggatcattactgatcacggtgactctgaagtctggaactgaaggcggaatgagaagttgggaaaacttttttctctaaactctctgttttttaaaaaactattattctcgatgcttgttaagaggaaaaaaaaacctttggtgcttctgttgtgaatgtgaaacattattttccagctgtacagtgacacattttttttaaggagaaaaggactgattcgtttgccaaaaggggggtggggaggtggaataatgttatcgagtgattattctggctgagatgtgttatttggtttcttccttcttgatcatttggtgtttaagtaaaatgaggcacaggcttgtttgccgagtggagtgggaaaggcattttgatttgctggcctaattaaaaaatgataaaggattaaaaggaaaaggtggacctggactgagggtgtaaaatccctggacacattcgtggggcaggaaaaagaagaggaagattagaagattttttttttctttgagagaaagcccagcggagataaacgaatgtcccctcatctccaaagaaaagttcatcggatttttattctagagagctcatcttcaggatgtcagtgaacatttctactgcaggaaaaggtgtggatccaaatacagttgatacttatgacagtggcgatgattgggaaatcggggttggaaatttaataattgatttggacgctgatttggagaaggacagacagaaatttgagatgaataattccaccaccaccactagtagcagcaactccaaggattgtggaggtccggcctccagtggggctggtgctaccgcagccttagctgatggcctaaaatttgcttctgttcaggcctctgctccccaggggaattcacacaaagagaccagcaaatcaaaagtgaaaaggagtaaaacttctaaggatgctaataaatctctgccttctgctgccttgtatgggattcccgagatcagcagcactggcaagaggcaggaagtccaagggcgccctggagaggcaactggcatgaattcagcgctgggtcaaagtgtgagcagcggcggcagcggcaacccaaacagcaatagtaccagcaccagcacctctgccgccaccgcgggggcaggctcctgtgggaaaagcaaagaggagaagccaggtaaaagccagagcagccgaggcgccaagcgggataaggatgcggggaaatccaggaaggacaagcacgacctgcttcagggccaccagaatggcagtggcagccaggccccttccggggggcacctctatggctttggggccaagagcaatggaggtggcgcgagccccttccactgcgggggcactgggagtggcagcgtcgccgctgcaggggaagttagcaaaagtgccccggattcagggctcatgggaaactctatgttggtaaagaaggaagaggaggaggaggagagccacaggcgaatcaagaaactgaaaactgagaaggttgaccccctgtttacagtgccagcgccaccaccgccgatttccagcagtctcacgcctcagattctaccctcctacttttccccatcttcatccaatattgcagcaccggttgaacagcttttggttcggactcgttctgtgggtgtcaatacatgtgaagttggagtagtgacagagccagagtgtcttgggccctgtgaacctgggaccagtgtgaatttggaagggatcgtgtggcatgaaacagaagaaggtgtcctagtggtcaatgtcacgtggaggaacaaaacgtacgtgggaaccctactggactgcaccaagcacgactgggcccctcccaggttttgtgagtcaccgacaagtgacctggagatgagagggggccggggcagagggaagagagcgaggtctgctgctgctgccccgggctccgaggccagcttcacagagtccagagggctgcagaataagaacagagggggggccaatgggaaagggaggcggggcagcctcaatgccagcggacgaaggacacccccaaattgtgctgctgaggatatcaaagccagcccttcctccaccaacaaaaggaaaaacaagcctccaatggagctggacctgaactccagctctgaggacaataagcctggaaagcgtgtccgcacaaattccagaagcactcccactacccctcaagggaaaccagagactacttttttggaccaaggctgctcttctccagtgttaatcgactgtccccacccaaactgcaacaaaaagtacaagcacattaacggcctgaggtaccaccaggctcatgcacacttagacccagaaaacaagctggagttcgagcctgacagtgaggacaagatctcggactgtgaggaaggattgagtaatgtggcacttgaatgcagtgagccaagcacaagtgtatctgcttatgaccagttgaaggcaccggcatcccctggtgctggaaacccacctgggaccccaaagggaaagagagagctgatgagcaatggcccaggttccattattggtgctaaagctgggaagaattctggcaaaaagaagggccttaacaatgaactgaacaaccttccagtaatctccaacatgacggctgcgttagacagttgctcggcagcagacggcagtttggctgctgagatgcctaaactggaagcagaaggattaattgac

SEQ ID NO: 23457 - DNA, 413 bp, Homo sapiens
  misc_feature 1..413: note = ENST00000511308
  source 1..413: mol_type = unassigned DNA; mol_type = unassigned DNA
gttgaccccctgtttacagtgccagcgccaccaccgccgatttccagcagtctcacgcctcagattctaccctcctacttttccccatcttcatccaatattgcagcaccggttgaacagcttttggttcggactcgttctgtgggtgtcaatacatgtgaagttggagtagtgacagagccagagtgtcttgggccctgtgaacctgggaccagtgtgaatttggaagggatcgtgtggcatgaaacagaagaagtatttcagctagtacaagggaagtgcctattagaagcaatgggccgcttgaggacatggattgcatccagtagtggcgcattcaccaaaaggcagatgaaaataatctgtaccaacaaggatcacaacaggaaacatcatctgaattttccactatt

SEQ ID NO: 23458 - DNA, 570 bp, Homo sapiens
  misc_feature 1..570: note = ENST00000512940
  source 1..570: mol_type = unassigned DNA; mol_type = unassigned DNA
aaacacactcatttgcggtcattgaggccaccttggcgcagatcacttaaagtgaaaaggtggacctggactgagggtgtaaaatccctggacacattcgtggggcaggaaaaagaagaggaagattagaagattttttttttctttgagagaaagcccagcggagataaacgaatgtcccctcatctccaaagaaaagttcatcggatttttattctagagagctcatcttcaggatgtcagtgaacatttctactgcaggaaaaggtgtggatccaaatacagttgatacttatgacagtggcgatgattgggaaatcggggttggaaatttaataattgatttggacgctgatttggagaaggacagacagaaatttgagatgaataattccaccaccaccactagtagcagcaactccaaggattgtggaggtccggcctccagtggggctggtgctaccgcagccttagctgatggcctaaaatttgcttctgttcaggcctctgctccccaggggaattcacacaaagagaccagcaaatcaaaagtgaaaaggagtaaaactt

SEQ ID NO: 23459 - DNA, 3190 bp, Homo sapiens
  misc_feature 1..3190: note = ENST00000613878
  source 1..3190: mol_type = unassigned DNA; mol_type = unassigned DNA
agaagaggaagattagaagattttttttttctttgagagaaagcccagcggagataaacgaatgtcccctcatctccaaagaaaagttcatcggatttttattctagagagctcatcttcaggatgtcagtgaacatttctactgcaggaaaaggtgtggatccaaatacagttgatacttatgacagtggcgatgattgggaaatcggggttggaaatttaataattgatttggacgctgatttggagaaggacagacagaaatttgagatgaataattccaccaccaccactagtagcagcaactccaaggattgtggaggtccggcctccagtggggctggtgctaccgcagccttagctgatggcctaaaatttgcttctgttcaggcctctgctccccaggggaattcacacaaagagaccagcaaatcaaaagtgaaaaggagtaaaacttctaaggatgctaataaatctctgccttctgctgccttgtatgggattcccgagatcagcagcactggcaagaggcaggaagtccaagggcgccctggagaggcaactggcatgaattcagcgctgggtcaaagtgtgagcagcggcggcagcggcaacccaaacagcaatagtaccagcaccagcacctctgccgccaccgcgggggcaggctcctgtgggaaaagcaaagaggagaagccaggtaaaagccagagcagccgaggcgccaagcgggataaggatgcggggaaatccaggaaggacaagcacgacctgcttcagggccaccagaatggcagtggcagccaggccccttccggggggcacctctatggctttggggccaagagcaatggaggtggcgcgagccccttccactgcgggggcactgggagtggcagcgtcgccgctgcaggggaagttagcaaaagtgccccggattcagggctcatgggaaactctatgttggtaaagaaggaagaggaggaggaggagagccacaggcgaatcaagaaactgaaaactgagaaggttgaccccctgtttacagtgccagcgccaccaccgccgatttccagcagtctcacgcctcagattctaccctcctacttttccccatcttcatccaatattgcagcaccggttgaacagcttttggttcggactcgttctgtgggtgtcaatacatgtgaagttggagtagtgacagagccagagtgtcttgggccctgtgaacctgggaccagtgtgaatttggaagggatcgtgtggcatgaaacagaagaaggtgtcctagtggtcaatgtcacgtggaggaacaaaacgtacgtgggaaccctactggactgcaccaagcacgactgggcccctcccaggacccagattcaagaacatggcatcattatgtataccagcccaaatatctggatcagcaaaagtcagaagaacttgatagagagaagaaattaaaagaggatagtccgaggaaaactcctaataaagagagtggtgtgcccagccttcctgtatcgttaacaagcattaaagaggagcccaaagaggccaagcatcctgattctcaatcaatggaggagagcaagctgaaaaatgatgatcgaaagactcctgtgaactggaaggactctcggggaacaagagtggctgtctcctcacccatgagtcagcatcagtcatacatacagtacttgcatgcttatccttacccacagatgtacgaccccagccatcctgcataccgggctgtttctcccgtcctaatgcacagttatcctggggcatatctctctccaggatttcattatcctgtttatgggaagatgtcagggagagaagagacagagaaagtcaataccagccctagcgtcaacacgaaaacaaccactgaatctaaagcactggatttgctccagcagcatgctaaccaataccgcagcaagtctcctgctcctgtggaaaaggctacagctgagcgggaacgggaggcagaaagggaaagggatcgccactcccccttcggccagcggcacctgcacacgcaccaccacacccacgttggcatgggttacccgctaatcccgggtcaatatgacccttttcaaggcttgacctctgctgcccttgttgcctctcagcaggtggctgcccaggcatctgcatctggaatgtttcctggacaaagaagagaataacaagattggacatgtacattgtcatgtgactggatcacatggggaagcgctttatacagacatcagttccatggtgttaatttgaaatgccttaatggcaggcaaaaaccagtcatttcatttttgtaaattacagattttatcacagagtaacaaatgttgctgtaattaaacttctgttttatatatatatacgtatacatatctgtatatatacatatatatatatataaatataaatatattctttactttttgtatcagtaaccaggctcgcacacacagggtctgctgccacgtcgcaaaccactcagtaaaggaaattaaaaatgtatttgtcatgttaaaaagtgttagccacaaaaggctacttactttcttttccttttcctttaaaattgtaaataaataatgttatgtatcagtgtgcctgaaccttgcatatccttcacatatttcccataagcccctcagaaaggctaactgtgatgatgacactttggtacaatttagatgtctatttggtggctcctgttaaagacgcaccagtgtaaaatgttcctgtagtcactgtttgtacttgtgtattgtggaaaaagtacttttggaaggcatggggttgccagtaccacaaaaactgtgttgtatataatgtaaagattaaaatggggaaataatgagcatctgtgaataatgaggtgtcattttttgataatcttgaatggcaaataacccaatagcctgcgtaccagagacatctgtgattgttctattacttgaatagttctacagtctttttttttttttaatgtttacaattatccagttttagaagagagagactttaacgccattgcctggttacttgttttatgctgtaatctagtttattttatgtaaaatgtatattgaatgctttccttttttatacctgccttaaataatttggcaatcagaattaaaaagtttttttttttttaaat

SEQ ID NO: 23460 - DNA, 4659 bp, Homo sapiens
  misc_feature 1..4659: note = ENST00000333190
  source 1..4659: mol_type = unassigned DNA; mol_type = unassigned DNA
cccaactccctgtcctcaccccggcccgcccgtctcctcctccgccctctcccgactgcagcgggggcagcgctttggcgctcccaaggactccccgccactctccccacaaagcagcggcggtggcggcggctgctgctggatcttcacactgcagccagcagcccaggacgcccccggccggacgatgggtacccgcgcctgagcatcccccgggcaggcgccaggcgcgaaggcagggggcgggaggaaaggggcgggggaattcctgattccctggtggaccctggaagttgtccttaaataaatatatcgctggcccgcggttgagcagccacctcgtcagagcagcatgtggactggctcgccgggtcccctccgtgctctgtgctgtcgccgccgccgcctctgtcagagcagcagctgtcggcagcaggagccccgcacggggcgcggagcagggacgcgctgccaccgcctccccctgcgtcctgctggccgcgtcttctcgggaggtggtagtcgctgttgccgctgagaaacccgcccgctttccacggctggtcgcctggtgaggagttgagactctgcgcctccgcccggacccacatggcttgttacctggtcatcagttcgagacatctcagcaatgggcactaccggggcattaaaggagtcttcaggggacccctgtgcaagaacggatctccctctccggattttgcagaaaagaagtccacagcaaaggccctggaagatgtaaaggcaaacttttactgtgaattatgtgacaagcagtatcacaaacaccaggagtttgacaatcatattaattcttatgaccatgctcataagcagagactgaaagaattaaagcaacgggaatttgctcgaaatgtagcttctaagtcatggaaagatgagaaaaaacaagaaaaagcacttaaacgacttcatcagctggctgagttaaggcagcaatctgaatgtgtttctggaaatggaccagcatacaaagcccccagggtagccatagaaaagcaactccagcaaggaattttccccattaagaatggcagaaaggtatcatgcatgaagagtgctcttctccttaaaggaaaaaatctccccagaatcatatccgataaacagcggtccaccatgccaaatcgacaccaattacaatcagacaggcgttgtttgtttggaaatcaggtactgcaaacatcttcagatctcagcaatgcaaatcacagaacaggagtatcatttactttttccaaaaaagtgcacctaaaattagaatcttcagcatcagttttcagtgagaacacagaagaaacccatgattgtaacaagtcacccatttataaaacaaaacaaactgcagataagtgcaagtgctgcaggtttgcaaataaagatacacaccttaccaaggaaaaagaggtaaatatctcaccaagccatctggaaagtgttttacacaataccatctccataaactctaaaattttgcaagacaaacacgactctattgatgagacactagaagattcaattggcattcatgcttcattctctaaatctaacattcatctttcagatgtagattttactcctaccagcagagaaaaagaaactagaaatacattgaagaacactttagaaaattgtgttaatcacccatgccaagcaaatgcttccttcagcccaccaaacatttacaaccatagtgatgccaggatatctgaatgcctggatgagttttcatcactggagccaagtgaacaaaagagtacagtgcatctgaatccaaattccagaatagagaacagagaaaaatctttagataaaacagaaagagttagcaaaaatgttcaaagacttgtaaaagaagcatgtacccataatgtggcatctaaaccactaccttttctccacgttcaaagcaaggatggccacaccactcttcaatggcctacggaacttctgctctttacaaaaacagaaccctgtatctcttatggctgcaacccactgtattttgattttaagctttctcggaacacaaaggaagaccacaatctagaggacttaaaaacagaattgggtaagaagcccttggaattgaagactaaaagagagagccaagtctcaggtttaactgaagaccaacaaaaattgatccaagaagattatcaatatccgaaaccaaagacgatgatagctaatccggattgggaaaaattccagaggaaatataatttggactacagtgattctgagccaaataagagtgaatatactttcagtgcaaatgatttggaaatgaaaaatcctaaagtgcctctttacctcaacacatctctaaaggattgtgctggaaagaataatagtagtgagaacaaacttaaggaagcttcaagggcccattggcaaggctgcagaaaggcagttctaaatgatatagatgaggacctatcttttccttcctacatctctaggtttaaaaagcataaattgattccctgcagtcctcatttggaatttgaagatgaaagacaattcaactgcaagtccagtccttgtacagtagggggtcacagtgaccatgggaaagacttcagtgtaattttgaagagtaaccacatcagcatgaccagcaaggtttccggatgtggaaaccaaagatacaagagatactctccacagtcatgtttgagtagatattcttcctctttggacacatcccctagcagcatgtctagcttgagaagtacttgttcaagtcatagattcaatggtaatagcagaggtaatttgctctgcttccataaaagagaacaccactcagttgaaaggcacaaacggaaatgtctaaagcacaactgcttctacttgtctgatgatataacaaagagcagccaaatgcagtctgaaccacagaaagagaggaactgcaaattgtgggaatcatttaaaaatgaaaaatactcaaaacgtagatattgtcactgcagagaaagacaaaaactgggcaaaaatcaacaacaattttcagggctaaaatctacgagaatcatctattgtgattctaactcacagatttcctgtactggaagcagtaaaaaaccacctaattgccagggaactcagcacgacagattggactcttactcaatagagaaaatgtattacttgaataaaagcaagagaaatcaagagtctttgggcagccctcacatttgtgatctgggaaaagtcaggcccatgaagtgtaactccgggaatatcagctgccttctaaagaactgttccagtggcccttcagaaaccacagaatcaaacactgcagaaggagagaggacccctctaacagcaaaaatccttttagaaagagtacaagccaagaaatgtcaagaacaatcaagtaatgttgagatctcttcaaacagttgtaaaagtgaattagaggctccttcgcaagtcccatgcacaattcaacttgcaccatcaggctgtaacagacaagcattgcctttgtctgaaaaaatacagtatgcaagtgagagcagaaatgatcaagacagtgcaattccaaggactacggagaaagacaaaagcaaaagttcacacacaaataattttacaattttagcagacactgattgtgataaccatctttctaaaggtataattcacctagtaacagagtctcagtcactaaacataaaaagggatgcaacaacaaaagaacaatcaaaacctttaattagtgaaatccaaccttttattcaaagctgtgacccagtaccaaatgaattccctggtgcttttccgtctaataaatatactggtgtgactgattcaacagagacccaagaagaccaaataaatctagacttacaggatgtaagcatgcatataaatcatgtagagggaaatataaactcttactatgacagaactatgcagaaacctgacaaagtcgaagacggattagaaatgtgtcataaatctatctctccccctttaattcaacagcccataacattttctcctgacgaaatagataaatataagatcctacagctacaagcccagcagcatatgcagaagcaactcctatcaaagcatcttcgagttttgcctgctgcagggcctactgccttctctccggcctcaaccgtacagacagttccagttcaccagcacacttctatcaccaccatccaccacacgttcctgcagcattttgctgtttctgcttccttaagttctcatagcagtcacctccctattgctcatctacatcctctttcacaggcacatttcagtcctatttcattttcgactctgactccaaccattatccctgcacaccccactttcttagcaggtcatcccctgcatttagtagctgctacccccttccacccatctcacataacacttcagcctctgccccctacagcatttattcctacattgtttggtcctcacttaaatccagccacaacttctatcatccacttgaatcctttaatccaaccagtattccaaggtcaagatttttgccatcattcttgctctagccagatgcaacagctaaatgaagtgaaagaggccttaaatgtgtccacacacttgaactaa

SEQ ID NO: 23461 - DNA, 3968 bp, Homo sapiens
  misc_feature 1..3968: note = ENST00000611114
  source 1..3968: mol_type = unassigned DNA; mol_type = unassigned DNA
ggattttgcagaaaagaagtccacagcaaaggccctggaagatgtaaaggcaaacttttactgtgaattatgtgacaagcagtatcacaaacaccaggagtttgacaatcatattaattcttatgaccatgctcataagcagagactgaaagaattaaagcaacgggaatttgctcgaaatgtagcttctaagtcatggaaagatgagaaaaaacaagaaaaagcacttaaacgacttcatcagctggctgagttaaggcagcaatctgaatgtgtttctggaaatggaccagcatacaaagcccccagggtagccatagaaaagcaactccagcaaggaattttccccattaagaatggcagaaaggtatcatgcatgaagagtgctcttctccttaaaggaaaaaatctccccagaatcatatccgataaacagcggtccaccatgccaaatcgacaccaattacaatcagacaggcgttgtttgtttggaaatcaggtactgcaaacatcttcagatctcagcaatgcaaatcacagaacaggagtatcatttactttttccaaaaaagtgcacctaaaattagaatcttcagcatcagttttcagtgagaacacagaagaaacccatgattgtaacaagtcacccatttataaaacaaaacaaactgcagataagtgcaagtgctgcaggtttgcaaataaagatacacaccttaccaaggaaaaagaggtaaatatctcaccaagccatctggaaagtgttttacacaataccatctccataaactctaaaattttgcaagacaaacacgactctattgatgagacactagaagattcaattggcattcatgcttcattctctaaatctaacattcatctttcagatgtagattttactcctaccagcagagaaaaagaaactagaaatacattgaagaacactttagaaaattgtgttaatcacccatgccaagcaaatgcttccttcagcccaccaaacatttacaaccatagtgatgccaggatatctgaatgcctggatgagttttcatcactggagccaagtgaacaaaagagtacagtgcatctgaatccaaattccagaatagagaacagagaaaaatctttagataaaacagaaagagttagcaaaaatgttcaaagacttgtaaaagaagcatgtacccataatgtggcatctaaaccactaccttttctccacgttcaaagcaaggatggccacaccactcttcaatggcctacggaacttctgctctttacaaaaacagaaccctgtatctcttatggctgcaacccactgtattttgattttaagctttctcggaacacaaaggaagaccacaatctagaggacttaaaaacagaattgggtaagaagcccttggaattgaagactaaaagagagagccaagtctcaggtttaactgaagaccaacaaaaattgatccaagaagattatcaatatccgaaaccaaagacgatgatagctaatccggattgggaaaaattccagaggaaatataatttggactacagtgattctgagccaaataagagtgaatatactttcagtgcaaatgatttggaaatgaaaaatcctaaagtgcctctttacctcaacacatctctaaaggattgtgctggaaagaataatagtagtgagaacaaacttaaggaagcttcaagggcccattggcaaggctgcagaaaggcagttctaaatgatatagatgaggacctatcttttccttcctacatctctaggtttaaaaagcataaattgattccctgcagtcctcatttggaatttgaagatgaaagacaattcaactgcaagtccagtccttgtacagtagggggtcacagtgaccatgggaaagacttcagtgtaattttgaagagtaaccacatcagcatgaccagcaaggtttccggatgtggaaaccaaagatacaagagatactctccacagtcatgtttgagtagatattcttcctctttggacacatcccctagcagcatgtctagcttgagaagtacttgttcaagtcatagattcaatggtaatagcagaggtaatttgctctgcttccataaaagagaacaccactcagttgaaaggcacaaacggaaatgtctaaagcacaactgcttctacttgtctgatgatataacaaagagcagccaaatgcagtctgaaccacagaaagagaggaactgcaaattgtgggaatcatttaaaaatgaaaaatactcaaaacgtagatattgtcactgcagagaaagacaaaaactgggcaaaaatcaacaacaattttcagggctaaaatctacgagaatcatctattgtgattctaactcacagatttcctgtactggaagcagtaaaaaaccacctaattgccagggaactcagcacgacagattggactcttactcaatagagaaaatgtattacttgaataaaagcaagagaaatcaagagtctttgggcagccctcacatttgtgatctgggaaaagtcaggcccatgaagtgtaactccgggaatatcagctgccttctaaagaactgttccagtggcccttcagaaaccacagaatcaaacactgcagaaggagagaggacccctctaacagcaaaaatccttttagaaagagtacaagccaagaaatgtcaagaacaatcaagtaatgttgagatctcttcaaacagttgtaaaagtgaattagaggctccttcgcaagtcccatgcacaattcaacttgcaccatcaggctgtaacagacaagcattgcctttgtctgaaaaaatacagtatgcaagtgagagcagaaatgatcaagacagtgcaattccaaggactacggagaaagacaaaagcaaaagttcacacacaaataattttacaattttagcagacactgattgtgataaccatctttctaaaggtataattcacctagtaacagagtctcagtcactaaacataaaaagggatgcaacaacaaaagaacaatcaaaacctttaattagtgaaatccaaccttttattcaaagctgtgacccagtaccaaatgaattccctggtgcttttccgtctaataaatatactggtgtgactgattcaacagagacccaagaagaccaaataaatctagacttacaggatgtaagcatgcatataaatcatgtagagggaaatataaactcttactatgacagaactatgcagaaacctgacaaagtcgaagacggattagaaatgtgtcataaatctatctctccccctttaattcaacagcccataacattttctcctgacgaaatagataaatataagatcctacagctacaagcccagcagcatatgcagaagcaactcctatcaaagcatcttcgagttttgcctgctgcagggcctactgccttctctccggcctcaaccgtacagacagttccagttcaccagcacacttctatcaccaccatccaccacacgttcctgcagcattttgctgtttctgcttccttaagttctcatagcagtcacctccctattgctcatctacatcctctttcacaggcacatttcagtcctatttcattttcgactctgactccaaccattatccctgcacaccccactttcttagcaggtcatcccctgcatttagtagctgctacccccttccacccatctcacataacacttcagcctctgccccctacagcatttattcctacattgtttggtcctcacttaaatccagccacaacttctatcatccacttgaatcctttaatccaaccagtattccaaggtcaagatttttgccatcattcttgctctagccagatgcaacagctaaatgaagtgaaagaggccttaaatgtgtccacacacttgaactaataagtgttaaagcccctcctgtgga

SEQ ID NO: 23462 - DNA, 10953 bp, Homo sapiens
  misc_feature 1..10953: note = ENST00000637017
  source 1..10953: mol_type = unassigned DNA; mol_type = unassigned DNA
acatttcagatgtgaacatcctgtctcaccaaaacaaccccagctaagaagttccgtcgggggtggaggactttttccaagcctttgtttctgtggagtctctgtgcatggcctgctgtgatgagcagtcggtttttctctagagaaggcataaagagaagcagaggcagagatgggacgagcagggagaatgctcctgcctcatcggagccaccggttttcgggagagagcggcagcccccacctgcctgtggactgagcacttaaagggctggtgatgatcaacctcttctgacaatggagagagcatgcggtggatgttaggggaaccaaaccccaagagggaaccagcttcagtggaaagcggagtgcgtgcctccccgaggcagggcattgctgagccccagagaggagccctgggttccgctgcctcccccacaggacaaggcatgacagcacctgcattggaatatagactgtgctttggagcctttggcatcagcttccacctggtgcgtaagtctgtggtctctccagcaagttcagggaagtgagggagtcgcagttctctgtcattcagcaggtgtggactgagggctggctctgtgccaggccctgtgctggatgctgggttccattgtgaggccaggcacagccaaggcagagacgaacattcctacagtcgctcacgacaccaagctccacagaccagagaatggacggatccacaggaacgaaagacaggctgtcaggtgcccagccctggggagactccagaagaggagagaggaccacccatcatggctgaccttgggaggacttgggtcttcacaaattgtgttccttggtatatataagagggttaaaatagacacaagaaatatccatctattcccattcatttatttgacacatactcttggggccatgagttcaattcccagaagaggatcatgatggtggggggaggaaggatgtggcgaggggccgtgcaggagcccagggggcttgtctcatggacgctcttgatcgaattcctctgaggccccagaggtgctccttcatccccagcttgcttgtgaggctgcgttggctccccaaggccgagtttcctgctgagacccagccacacacttagccctgagtgtaccaggtggctccactcagagcgctgctccagcccctctccctggggcttcctgccacgtgactgcacatttggggtctggagaagggcccagggactgaactgcaaaggtgaagggtgtccctgctcctcctgaccacagcttctggactggcatgtgtgtctgatggtgcaagaccagaggggcatggccaatgagagagttattctttctacccgtgagtctccctcggacacacaggatttctcatgtctcctcctggttttgctgctttttttttttttttctagctgcatgaggtagttttgtttgaaagaatagtcaatgcagactgcagttttccgaatgaggcttgctcttggcaagttttccagcattgtgggccatccagatgatgcggaatggaggttccagaacccacctgccctgcccctcctgcgagggaccagccagctcccactcctggccctccaggggccccaggtggccaggcctcacctcacctgaccctgggccctgtccttctgccgccagagcagggcctggccccccccactgtgttcctgaaggccctgcccatcccactgtaccacacggtgcctcccgggggcctccagccccgcgccccgctagtgacgggcagcctagatgggggcaacgtgcccttcatactcagccctgtgctgcagcctgaagggcctggccccacccaggtggggaagccggcggcccctacgctgacggtgaacatcgtgggcactctgcctgtcctgtcgccgggcctgggccccacgctgggcagcccaggcaaggtgcggaatgcgggcaagtacctgtgtccgcactgtggtcgcgactgcctgaagcccagtgttctagagaagcacatccggtcccacacgggtgagaggcccttcccgtgtgccacctgcggcatcgcctttaagacccagagcaatctctacaagcacaggcggacgcagacgcacctcaacaactcccggctgtcctcagagtccgagggcgccgggggcggcctcctggaggaaggggacaaggccggagagccccccagaccagagggcaggggcgagagcaggtgccaggggatgcacgaaggcgcctcggagagacccctttctccgggtgcccacgtgcccctacttgccaagaacctggatgtgaggaccgaagctgctccctgtccagggtccgcatttgccgacagagaggctccttgggactctgcccccatggcgtcacctgggctcccagcggccagcacacaaccctggcgtaagttgccagagcagaagtcgccgaccgccgggaagccgtgcgccctgcagcggcagcaggcgacggcagcggagaagccctgggatgccaaggcccccgagggccggctgcggaagtgtgagagcaccgactcggggtacctgtcgcgctccgacagcgcggagcagccgcatgcgccctgcagccccctgcacagcctttcggagcacagcgccgagtccgagggggagggcggcccgggcccggggccaggggtcgcaggggccgagcccggggcgcgagaagccggcctggagctggagaagaagcggctggaggagcgcatcgcccagctcatctcccacaaccaggcggtggtggacgatgcccagctggacaacgtgcggccccggaagaccgggctgtccaaacagggcagcatcgacctgcccacgccctacacctacaaggactccttccactttgacatccgcgcgctggagccaggccgtaggagggccccgggccccgtgcgctccacctggacgcccccagacaagtctcggcccctcttcttccactccgtccccactcagctctccaccaccgtggaatgtgtccccgtcaccaggagcaactcgctgcccttcgtcgagggctccaggacgtggctggagcccagggagccccgggacccctggtccaggacgcagaagcctctgagccccaggcccggcccagcccgcctgggctgccgctcgggactaagctcgactgacgttcccagtgggcatccccgggccctggtcagacaggccgcggtggaggacctgccaggcacccccattggcgatgccctggtgcccgcagaggacacagacgcaaagagaactgctgcgcgggaggccatggccggcaagggcagagcgggcggcaggaagtgcggccagagaaggctgaagatgttctcccaggagaagtggcaggtgtacggggatgagacgttcaaaaggatctaccagaaaatgaaagccagtccccatggaggcaagaaagccagggaggtgggaatgggcagtggggcagaactgggctttcctctgcagaaagaggcagcagggagctcaggcacagtccccacccaagacaggaggacccctgtccatgaggacatatccgcaggggcaacgccagagccttggggaaatccaccagccctggaggcctccttggtgactgaacccactaagcatggggagacggtggccaggagaggagacagtgaccgacccagggtggaagaggctgtgtcatcccctgcactgggtggcagagacagtccctgttcaggcagtaggagccccctggtctctccaaatgggaggctggaactggggtggcagatgcccccagcacctggccccctcaaagggggtgatgtagaggctcccaggccagtttggccggaccccaagctggaaggaggtgcccgaggtgtgggggatgttcaggagacctgcctgtgggcccagactgtcctgagatggcccagcaggggctcaggggaggacaagctcccctcagagaggaagaagctgaaagtggaggacctgcacagctggaagcaaccagagcctgtgagcgcagagaccccaggtgggcccacgcagcctgcctctttgtcatcccagaagcaggatgccgatcccggggaggtgccagggggctcaaaggagagtgccaggcaggtgggcgagcctctggagtcctctggagcctccttggctgctgcttctgttgccctgaagagggtggggccaagggacaaggctaccccactgcatcctgcagccccagcccccgcagagcacccctcgctggccaccccacctcaggctcctagagtgctctctgccctggcagataatgccttttcccccaagtacctcctcaggttacctcaggcagagacccccttaccactgcccattccctggggaccaaggcacagccaggactctctctgcagcagtgggtggcctgaagaacgggcatcatttgttgggtcaggactggggacccctctttctcccagcccagcctcaggcccctccccaggtgaggcggacagcatcctggaggaccccagctgttccaggccacaggatgggagaaaaggggcacagttggggggggacaagggggacaggatggccactagcaggccagcagccagggagttgcccatctcagcaccaggggctcccagggaggctacctcctccccgcccactccaacgtgtgaggcacacttagttcaggacatggagggtgacagccaccgtatccatcgcctctgcatgggcagcactttggcaagggccaggctctctggggatgtcctgaatccctgggtacccaactgggagctgggggagcctcctgggaatgccccagaagatccttcttcagggcccctggtgggccccgacccgtgttcccccctccagcctggctccttcctcactgccctcactcggcctcagggtgtgcccccaggctggccagagctggccttgtcttcccactcagggacgtcccggagccacagcacccgcagtccccacagcacccaaaacccctttccctcactgaaggctgagccgcggctcacgtggtgttgcctgagccgcagtgtccctctgcccgcggagcagaaggcaaaggcggcatctgtgtacttggcggtgcactttcctggtagcagcctccgagatgagggtcccaatggccctcctgggagcaatggaggatggacctggacaagccctggagaaggagggccggcgcagatgtccaagttctcctacccaacagtcccaggggtgatgccccagcaccaggtgtctgagccagaatggaagaaaggcctgccttggagggcaaagatgtctcgtgggaacagcaagcagagaaaactgaagatcaaccctaaaaggtacaaagggaatttcttgcagagctgtgttcagctgagagccagtagacttcgcacaccaacctgggtgcgaagaagaagccgccaccctcccgcacttgagggactgaagccatgcaggacccctgggcagacctcttcagaaatagcaggtctgaatctgcaagaggagccatcttgtgccacctcagaatcacctccttgttgtgggaaggaagagaagaaggaaggtgactgcagacaaaccttaggaaccctctctcttggtacaagttcaagaattgtcagggaaatggacaaacgaactgtgaaggatatttctccatctgctggtgagcatggtgactgtactactcacagcactgctgccacatcaggattatctctgcaatctgacacctgcctggcagtggttaatgacgtgcctctaccccctggcaaaggtcttgaccttgggttgctggagactcagctgctggcctcccaggattcagtctcaacagatcccaaaccatacatcttctcagatgctcaaaggccttcttcctttgggtccaaaggaacttttccccaccatgacattgctacctctgtggctgccgtttgtatttctctgccagtgagaacagatcacatagcccaggaaattcacagtgctgaatcacgagaccacagccagactgcagggaggactctgacatcaagctccccagacagcaaagtcacagaagagggcagagcacagaccctcttgccagggagaccttcatctggacaaagaatttcagattcggttccactggagtcaactgaaaaaactcatcttgaaataccagcttcaggaccaagttcagctagttcacaccacaaggaagggagacacaagacgttttttccttccagaggccagtatgggtgtggggaaatgactgtcccctgcccctctttaggaagtgacggtaggaaacgtcaggtatctggattaatcactcggaaagattctgtggttccttctaagccagagcagcccatagaaattcctgaagccccttctaaatccctcaagaagaggagtctggaaggaatgagaaagcaaactcgagtagagttcagtgacaccagcagcgacgatgaagaccgattagttatagaaatatgaagcttccagagaaacatggtgtctggtcaaaaagactgttgacgcttcacaagtaaatgttgtcaggctggcggaagaactaaactctatctgtgaaacacctacagattaggaaagccattttgagttatttacaagccaactccaaccaacttctgacccccaactcagccgcagcgttccccagctccccttgggagtgctctgctcatcttcaaatggtgccaggcagggcagacatggcaaggaagcaaactctgcaaatggtcaacgtgcacagtgactgggccttgactcccagcctcgtcttctgcacctgtcccccactgcctctctgcaatcaaatggcactaaccaagaaagccaccatcaacacatttctccacaagtggaccccacacagtcgaggcaactggctttctccattagtaaactgaggatttgcttccaaggtggagagcacacttgggataattggagtagcttgacaaagagacgggggtgtgaactgggcacaaagatacttctgttcattttggagacaaaattcagatacattaaaaaactgaagcttgttcagagtaattcacgtccttggtggagttgtaaatacacttcaaaatgcctatgatccggtgacatgctgattacttttaaatgttgcacaaatggtcaatgcttatttatggtcagatgatgcaagcacatgctcttgtgcctggtgcgtttgctgtggagatctctgagactgtcggtttttctagttcttgcaaaggaacggtgttaaaagttaatagaactgtctctctgtaatgagtcattttttgagagggaaaaattcacttattttcctctgattcttcttgtcatattgtgctctgagcaatttcaattagagggttacattttagtaatctgtacagcttcaactgatgcctgctcgtcgtgacgggagccttttagatttccttcagaagcttcaaggatacaaaactaattggagttttgacgctgttttacatctcggtaattttattttcggggcttagtgttactttgctgtcaaattaaatcagcctctgtattgtgcacgtcagaactgcacagagaaaattccccagtattccaagccggtgcgcccctgtgcagaagaaaacagatctacgtcagccagcccggggggcaaagcctcagttccactgccttcctctccctctccttccacgggagaggagaaacttaaagaggtttacattgctgcatttcaataaaattttatacttgcttttggtatgattttgtacaatttgaaatttgtagctgagctcttttggtgtaactttgatgtaatgatgttcatatgacatcttgtacttcagagacacagcagcaatgcagagcatctcacacatgtgaatacacttcagtcagtctgtgcctgtgactaagtatggtcaaatttcaagtatcttcatgtgaattttccaattttggtgtttttcatagaaaacttcaatgccagaccagcttccctggttacttagcatatatttgtgaccatttcatatgcactcataaatatccaaggatttcaggcccagccaagaaaaacataagaagggaggtaaaaaggatgttggacattgacttagtgtactttttaaacccaacaaaagcgatgtggtgattatctcccttttcgaaggattcatgccactgtaatgagagaggcagtgtaggcaaatggtctgagccttggatggagattgaagtcctgactttagctgggaaatcttggttaagagtctttctgtaccttagtttccctaagtgagaataagagagttggacaagacgaatgtatctccaggttccaatttttctgagaatggttgatagagaagctgctctctccttaaaatgcatggactcaatggcttgaagatattccccatggggaaccattgccacggaggccttgcatgcaagaagtttgggtggggacagtgaggaactgaaacacaagcaccttccaccaattattgctgtgaagaacctgagcctgaagaagctccatctaattttttccccagagttccagattttagggtgcaatcatccagcctatacatgtggctcatagttcaaaaaattaaaagcaaaaccagaactctccagtaggaatggagaaaacctatctgtaggctgaactggctcctttgtcttaggaggcactggtcaggggaaaaaagctgtcttccagacccctcctttctgggtggctactgtggaatcaacggggtcactggctgtaaatcagtaagtcatagctccaaacagcaccaacttcaggatgatggtggaagctctgtccctataggagccaccgttgccagctgtcacatcccaacctaggtcaaatatggcggaatattgatttcgtctctaactccctgtatctcttacaaaggtaaagcaggtagcgaagccaccttgcttccctggtctttgcctagtggctggcaatgtttacaagtgtaccttactttatatcaacatgaatttgtgaaaaagctgtatgtcaatggattttttaaaaattaaaaatgtattttgaatgaccctaagggagctggctctttaaaagcatcctaaggtaaagattttttttaaatgaagaatctttttataaagcaatgaacaatctctgattttataaatcttaattttcctatgggttttcttaaagtgaaatacaattataagaatacattttaagggtaacattaacaacctagaacccagtttgggttactaaaaataaaatgtcagtattatcaattgataactaccacagttttatactctgcaagtgtgtactgcatgatggttaaggaaaaacaaatttattttagaacaaagcaaaccagagtttaaagatcagggatttccttctttccccagtgctaattttcccagtgttaattttattatatctttaggtaagggtcttaaccaactgatgcctcagtttcttccacagagaatagttagagggatgctgtcatgaactaagggaagggcactgaatttttttttgccaatatcaaaagtgacatttccccatgatgttcaagactcaccaggtttctctctccacctgtacctacacccagctagatcttgtcgttaaagatgtatggagggaagaggtttcaatccttccctccttggcaacctacattgttaagtgactcaaagtcatgtgatttttggtggacaactggaatcctccttcttgtaaaacacattgaaaaacagctcatctctcctgttaggcttaacccttgagatttgagacaaagctaataatcccctttggttcacatctcacagtaaccaggagaacctatggttcatttgccaagtgattaaaaaaaaagatggaggagggtgtctctgaattttaatggaaacactgccaatagcatggtgggtaacctagggcaagacagactttttcttcctgaaatcactcttctaaagctgagaccggaagaggaaccttgcagaagtgcactgtgaccacagttcttggcatgaaagataaacaatttgcagtctcatgccaaaaagtatttccttgcatttacattcattacttagaatgatcacattattcatttttttccccagcacagaaatttgcattttgcacagaatttgcctggtgcagcagatctttatagttatggaaactgtcatcattatcggaatgtgctgctgctcaactccccagacataatttaatatggtgaggagaatatgacctgcctggctctatgggtgatcatatttctactgctgcagcaagctgggcttgtgtatttttcctcacttcagttgttcttcccatagttcatgtagggaggcactttggcttttgaaacactacatttctcaatatttaagcacaatttattgtccttatttttcagaacccattaaatataagggtcagaacctagaaaatcttatgtgctggatttctaccctgtatgattcttttcatccatgctttgcacttacgtaggaatatacataatttggtctgaagaagtataggaacagttgagcacattacttcaccactggaagaataggaaccagggaaaaacatcagcctctgccacttggagcactagaggatgacggaatgtcttgtatatgcggtcaactgttcaggatttactactcaattggttgttcacaatcagggaaatgattggcttcttggttgtttgttgaactttctttctttatatggttaaattattttgttttgataaaaataaaacttaaaatgcaaa

SEQ ID NO: 23463 - DNA, 898 bp, Homo sapiens
  misc_feature 1..898: note = ENST00000610729
  source 1..898: mol_type = unassigned DNA; mol_type = unassigned DNA
tctcaccaaaacaaccccagctaagaagttccgtcgggggtggaggactttttccaagcctttgtttctgtggagtctctgtgcatggcctgctgtgatgagcagtcggtttttctctagagaaggcataaagagaagcagaggcagagatgggacgagcagggagaatgctcctgcctcatcggagccaccggttttcgggagagagcggcagcccccacctgcctgtggactgagcacttaaaggtgagagaggactttgtgatttctttgtgcacctggagttctgggatgcaaggccagatgaagggatcttaatcattgagcctggtctgttgcctcccgagtgattctatcaggcaagcatgatggatgattccttccaagcacacgcagttatctctgacacgagccccactcaggtccccttgagatctcttgaaccaaggggcttctagcccctcctcctcacctttcagcacagccttgtaaacctcagatgtggatgaaggtgccgtcctgcctttgacttgacctgttgatttccaaccggggctgctggcccttcctctctagagtgagtagtgactcacacttttggggccctatgaaatggtcctccatccaaggggctttgggaagcctgtttccctggtggccccaagcccagtaaccaaaagcaatcagacccagctgtccagctaatttttttaaaataggcttccttcctagtagaaatcaacaaagtctaaaatagaagggactctaataggaaatgaagctgcagagttctgtgtggaatgcaacaggcagggacctcggcatggaaaatactaagtgcagattacatggctgacaaccatgggagcaggagaaggagtaatctccttgcttatcg

SEQ ID NO: 23464 - DNA, 9401 bp, Homo sapiens
  misc_feature 1..9401: note = ENST00000371030
  source 1..9401: mol_type = unassigned DNA; mol_type = unassigned DNA
atggaggttccagaacccacctgccctgcccctcctgcgagggaccagccagctcccactcctggccctccaggggccccaggtggccaggcctcacctcacctgaccctgggccctgtccttctgccgccagagcagggcctggccccccccactgtgttcctgaaggccctgcccatcccactgtaccacacggtgcctcccgggggcctccagccccgcgccccgctagtgacgggcagcctagatgggggcaacgtgcccttcatactcagccctgtgctgcagcctgaagggcctggccccacccaggtggggaagccggcggcccctacgctgacggtgaacatcgtgggcactctgcctgtcctgtcgccgggcctgggccccacgctgggcagcccaggcaaggtgcggaatgcgggcaagtacctgtgtccgcactgtggtcgcgactgcctgaagcccagtgttctagagaagcacatccggtcccacacgggtgagaggcccttcccgtgtgccacctgcggcatcgcctttaagacccagagcaatctctacaagcacaggcggacgcagacgcacctcaacaactcccggctgtcctcagagtccgagggcgccgggggcggcctcctggaggaaggggacaaggccggagagccccccagaccagagggcaggggcgagagcaggtgccaggggatgcacgaaggcgcctcggagagacccctttctccgggtgcccacgtgcccctacttgccaagaacctggatgtgaggaccgaagctgctccctgtccagggtccgcatttgccgacagagaggctccttgggactctgcccccatggcgtcacctgggctcccagcggccagcacacaaccctggcgtaagttgccagagcagaagtcgccgaccgccgggaagccgtgcgccctgcagcggcagcaggcgacggcagcggagaagccctgggatgccaaggcccccgagggccggctgcggaagtgtgagagcaccgactcggggtacctgtcgcgctccgacagcgcggagcagccgcatgcgccctgcagccccctgcacagcctttcggagcacagcgccgagtccgagggggagggcggcccgggcccggggccaggggtcgcaggggccgagcccggggcgcgagaagccggcctggagctggagaagaagcggctggaggagcgcatcgcccagctcatctcccacaaccaggcggtggtggacgatgcccagctggacaacgtgcggccccggaagaccgggctgtccaaacagggcagcatcgacctgcccacgccctacacctacaaggactccttccactttgacatccgcgcgctggagccaggccgtaggagggccccgggccccgtgcgctccacctggacgcccccagacaagtctcggcccctcttcttccactccgtccccactcagctctccaccaccgtggaatgtgtccccgtcaccaggagcaactcgctgcccttcgtcgagggctccaggacgtggctggagcccagggagccccgggacccctggtccaggacgcagaagcctctgagccccaggcccggcccagcccgcctgggctgccgctcgggactaagctcgactgacgttcccagtgggcatccccgggccctggtcagacaggccgcggtggaggacctgccaggcacccccattggcgatgccctggtgcccgcagaggacacagacgcaaagagaactgctgcgcgggaggccatggccggcaagggcagagcgggcggcaggaagtgcggccagagaaggctgaagatgttctcccaggagaagtggcaggtgtacggggatgagacgttcaaaaggatctaccagaaaatgaaagccagtccccatggaggcaagaaagccagggaggtgggaatgggcagtggggcagaactgggctttcctctgcagaaagaggcagcagggagctcaggcacagtccccacccaagacaggaggacccctgtccatgaggacatatccgcaggggcaacgccagagccttggggaaatccaccagccctggaggcctccttggtgactgaacccactaagcatggggagacggtggccaggagaggagacagtgaccgacccagggtggaagaggctgtgtcatcccctgcactgggtggcagagacagtccctgttcaggcagtaggagccccctggtctctccaaatgggaggctggaactggggtggcagatgcccccagcacctggccccctcaaagggggtgatgtagaggctcccaggccagtttggccggaccccaagctggaaggaggtgcccgaggtgtgggggatgttcaggagacctgcctgtgggcccagactgtcctgagatggcccagcaggggctcaggggaggacaagctcccctcagagaggaagaagctgaaagtggaggacctgcacagctggaagcaaccagagcctgtgagcgcagagaccccaggtgggcccacgcagcctgcctctttgtcatcccagaagcaggatgccgatcccggggaggtgccagggggctcaaaggagagtgccaggcaggtgggcgagcctctggagtcctctggagcctccttggctgctgcttctgttgccctgaagagggtggggccaagggacaaggctaccccactgcatcctgcagccccagcccccgcagagcacccctcgctggccaccccacctcaggctcctagagtgctctctgccctggcagataatgccttttcccccaagtacctcctcaggttacctcaggcagagacccccttaccactgcccattccctggggaccaaggcacagccaggactctctctgcagcagtgggtggcctgaagaacgggcatcatttgttgggtcaggactggggacccctctttctcccagcccagcctcaggcccctccccaggtgaggcggacagcatcctggaggaccccagctgttccaggccacaggatgggagaaaaggggcacagttggggggggacaagggggacaggatggccactagcaggccagcagccagggagttgcccatctcagcaccaggggctcccagggaggctacctcctccccgcccactccaacgtgtgaggcacacttagttcaggacatggagggtgacagccaccgtatccatcgcctctgcatgggcagcactttggcaagggccaggctctctggggatgtcctgaatccctgggtacccaactgggagctgggggagcctcctgggaatgccccagaagatccttcttcagggcccctggtgggccccgacccgtgttcccccctccagcctggctccttcctcactgccctcactcggcctcagggtgtgcccccaggctggccagagctggccttgtcttcccactcagggacgtcccggagccacagcacccgcagtccccacagcacccaaaacccctttccctcactgaaggctgagccgcggctcacgtggtgttgcctgagccgcagtgtccctctgcccgcggagcagaaggcaaaggcggcatctgtgtacttggcggtgcactttcctggtagcagcctccgagatgagggtcccaatggccctcctgggagcaatggaggatggacctggacaagccctggagaaggagggccggcgcagatgtccaagttctcctacccaacagtcccaggggtgatgccccagcaccaggtgtctgagccagaatggaagaaaggcctgccttggagggcaaagatgtctcgtgggaacagcaagcagagaaaactgaagatcaaccctaaaaggtacaaagggaatttcttgcagagctgtgttcagctgagagccagtagacttcgcacaccaacctgggtgcgaagaagaagccgccaccctcccgcacttgagggactgaagccatgcaggacccctgggcagacctcttcagaaatagcaggtctgaatctgcaagaggagccatcttgtgccacctcagaatcacctccttgttgtgggaaggaagagaagaaggaaggtgactgcagacaaaccttaggaaccctctctcttggtacaagttcaagaattgtcagggaaatggacaaacgaactgtgaaggatatttctccatctgctggtgagcatggtgactgtactactcacagcactgctgccacatcaggattatctctgcaatctgacacctgcctggcagtggttaatgacgtgcctctaccccctggcaaaggtcttgaccttgggttgctggagactcagctgctggcctcccaggattcagtctcaacagatcccaaaccatacatcttctcagatgctcaaaggccttcttcctttgggtccaaaggaacttttccccaccatgacattgctacctctgtggctgccgtttgtatttctctgccagtgagaacagatcacatagcccaggaaattcacagtgctgaatcacgagaccacagccagactgcagggaggactctgacatcaagctccccagacagcaaagtcacagaagagggcagagcacagaccctcttgccagggagaccttcatctggacaaagaatttcagattcggttccactggagtcaactgaaaaaactcatcttgaaataccagcttcaggaccaagttcagctagttcacaccacaaggaagggagacacaagacgttttttccttccagaggccagtatgggtgtggggaaatgactgtcccctgcccctctttaggaagtgacggtaggaaacgtcaggtatctggattaatcactcggaaagattctgtggttccttctaagccagagcagcccatagaaattcctgaagccccttctaaatccctcaagaagaggagtctggaaggaatgagaaagcaaactcgagtagagttcagtgacaccagcagcgacgatgaagaccgattagttatagaaatatgaagcttccagagaaacatggtgtctggtcaaaaagactgttgacgcttcacaagtaaatgttgtcaggctggcggaagaactaaactctatctgtgaaacacctacagattaggaaagccattttgagttatttacaagccaactccaaccaacttctgacccccaactcagccgcagcgttccccagctccccttgggagtgctctgctcatcttcaaatggtgccaggcagggcagacatggcaaggaagcaaactctgcaaatggtcaacgtgcacagtgactgggccttgactcccagcctcgtcttctgcacctgtcccccactgcctctctgcaatcaaatggcactaaccaagaaagccaccatcaacacatttctccacaagtggaccccacacagtcgaggcaactggctttctccattagtaaactgaggatttgcttccaaggtggagagcacacttgggataattggagtagcttgacaaagagacgggggtgtgaactgggcacaaagatacttctgttcattttggagacaaaattcagatacattaaaaaactgaagcttgttcagagtaattcacgtccttggtggagttgtaaatacacttcaaaatgcctatgatccggtgacatgctgattacttttaaatgttgcacaaatggtcaatgcttatttatggtcagatgatgcaagcacatgctcttgtgcctggtgcgtttgctgtggagatctctgagactgtcggtttttctagttcttgcaaaggaacggtgttaaaagttaatagaactgtctctctgtaatgagtcattttttgagagggaaaaattcacttattttcctctgattcttcttgtcatattgtgctctgagcaatttcaattagagggttacattttagtaatctgtacagcttcaactgatgcctgctcgtcgtgacgggagccttttagatttccttcagaagcttcaaggatacaaaactaattggagttttgacgctgttttacatctcggtaattttattttcggggcttagtgttactttgctgtcaaattaaatcagcctctgtattgtgcacgtcagaactgcacagagaaaattccccagtattccaagccggtgcgcccctgtgcagaagaaaacagatctacgtcagccagcccggggggcaaagcctcagttccactgccttcctctccctctccttccacgggagaggagaaacttaaagaggtttacattgctgcatttcaataaaattttatacttgcttttggtatgattttgtacaatttgaaatttgtagctgagctcttttggtgtaactttgatgtaatgatgttcatatgacatcttgtacttcagagacacagcagcaatgcagagcatctcacacatgtgaatacacttcagtcagtctgtgcctgtgactaagtatggtcaaatttcaagtatcttcatgtgaattttccaattttggtgtttttcatagaaaacttcaatgccagaccagcttccctggttacttagcatatatttgtgaccatttcatatgcactcataaatatccaaggatttcaggcccagccaagaaaaacataagaagggaggtaaaaaggatgttggacattgacttagtgtactttttaaacccaacaaaagcgatgtggtgattatctcccttttcgaaggattcatgccactgtaatgagagaggcagtgtaggcaaatggtctgagccttggatggagattgaagtcctgactttagctgggaaatcttggttaagagtctttctgtaccttagtttccctaagtgagaataagagagttggacaagacgaatgtatctccaggttccaatttttctgagaatggttgatagagaagctgctctctccttaaaatgcatggactcaatggcttgaagatattccccatggggaaccattgccacggaggccttgcatgcaagaagtttgggtggggacagtgaggaactgaaacacaagcaccttccaccaattattgctgtgaagaacctgagcctgaagaagctccatctaattttttccccagagttccagattttagggtgcaatcatccagcctatacatgtggctcatagttcaaaaaattaaaagcaaaaccagaactctccagtaggaatggagaaaacctatctgtaggctgaactggctcctttgtcttaggaggcactggtcaggggaaaaaagctgtcttccagacccctcctttctgggtggctactgtggaatcaacggggtcactggctgtaaatcagtaagtcatagctccaaacagcaccaacttcaggatgatggtggaagctctgtccctataggagccaccgttgccagctgtcacatcccaacctaggtcaaatatggcggaatattgatttcgtctctaactccctgtatctcttacaaaggtaaagcaggtagcgaagccaccttgcttccctggtctttgcctagtggctggcaatgtttacaagtgtaccttactttatatcaacatgaatttgtgaaaaagctgtatgtcaatggattttttaaaaattaaaaatgtattttgaatgaccctaagggagctggctctttaaaagcatcctaaggtaaagattttttttaaatgaagaatctttttataaagcaatgaacaatctctgattttataaatcttaattttcctatgggttttcttaaagtgaaatacaattataagaatacattttaagggtaacattaacaacctagaacccagtttgggttactaaaaataaaatgtcagtattatcaattgataactaccacagttttatactctgcaagtgtgtactgcatgatggttaaggaaaaacaaatttattttagaacaaagcaaaccagagtttaaagatcagggatttccttctttccccagtgctaattttcccagtgttaattttattatatctttaggtaagggtcttaaccaactgatgcctcagtttcttccacagagaatagttagagggatgctgtcatgaactaagggaagggcactgaatttttttttgccaatatcaaaagtgacatttccccatgatgttcaagactcaccaggtttctctctccacctgtacctacacccagctagatcttgtcgttaaagatgtatggagggaagaggtttcaatccttccctccttggcaacctacattgttaagtgactcaaagtcatgtgatttttggtggacaactggaatcctccttcttgtaaaacacattgaaaaacagctcatctctcctgttaggcttaacccttgagatttgagacaaagctaataatcccctttggttcacatctcacagtaaccaggagaacctatggttcatttgccaagtgattaaaaaaaaagatggaggagggtgtctctgaattttaatggaaacactgccaatagcatggtgggtaacctagggcaagacagactttttcttcctgaaatcactcttctaaagctgagaccggaagaggaaccttgcagaagtgcactgtgaccacagttcttggcatgaaagataaacaatttgcagtctcatgccaaaaagtatttccttgcatttacattcattacttagaatgatcacattattcatttttttccccagcacagaaatttgcattttgcacagaatttgcctggtgcagcagatctttatagttatggaaactgtcatcattatcggaatgtgctgctgctcaactccccagacataatttaatatggtgaggagaatatgacctgcctggctctatgggtgatcatatttctactgctgcagcaagctgggcttgtgtatttttcctcacttcagttgttcttcccatagttcatgtagggaggcactttggcttttgaaacactacatttctcaatatttaagcacaatttattgtccttatttttcagaacccattaaatataagggtcagaacctagaaaatcttatgtgctggatttctaccctgtatgattcttttcatccatgctttgcacttacgtaggaatatacataatttggtctgaagaagtataggaacagttgagcacattacttcaccactggaagaataggaaccagggaaaaacatcagcctctgccacttggagcactagaggatgacggaatgtcttgtatatgcggtcaactgttcaggatttactactcaattggttgttcacaatcagggaaatgattggcttcttggttgtttgttgaactttctttctttatatggttaaattattttgttttgataaaaataaaacttaaaatgc

SEQ ID NO: 23465 - DNA, 5380 bp, Homo sapiens
  misc_feature 1..5380: note = ENST00000319555
  source 1..5380: mol_type = unassigned DNA; mol_type = unassigned DNA
cgccgctcgccgcccgcgggttccattgagaaaagccgagcggccgcggcggcggcggcgagtgcgcgggagcggaggagccggcacccgcccgtcgggcagtccgcgcgcccgcaacgcaggaccgtggcctctcgggcctccgcggcagctccagcggctccggggctgggcgcgcgggctgggggcgcgggccggggcggccgcggagaccgggggccgggggcatgagcggccccgcggccccgccgcgcccccgccgcccgccgccgcccgcccggggctagaggcggccgccgggagggcgcgcggcgccggagacatgtccaggcggaaacagagcaacccccggcagatcaagcgttccctcggagacatggaggccagagaggaggtgcagttggtgggtgccagccacatggagcaaaaggccacggcacctgaagccccgagccctcccagcgcagatgttaactcacccccaccgctgccgccccccacatccccaggaggccccaaggagctggaaggacaggaaccagaacccaggcccacggaggaagagccgggcagtccctggagcgggccagacgagctggagccggtggtgcaggatgggcagaggcgcatacgggcccgactcagcctcgccacgggcctgtcctggggcccgttccatgggagtgtccagaccagagcctcatcccccaggcaggcggagccgagcccagccctgaccctgctgctggtggacgaggcctgctggctgaggacgctgccccaggccctgactgaggccgaggccaacacagagatccacaggaaggatgacgcactctggtgcagggtcaccaagccggtgcctgcggggggactcctgagcgtgctcctcacggccgagccccacagcacccccggccaccctgtgaagaaggagccagcagagcccacgtgcccggcccctgcacacgacctccagctcctgccccagcaggccgggatggcctccatccttgccaccgcagtgatcaacaaagacgtcttcccctgcaaggactgtggcatctggtaccgcagcgagcgcaacctgcaggcgcacctgctctactactgcgccagccgccagggcaccggctccccggccgcagccgccacagacgagaagcccaaagagacctaccccaacgagcgcgtctgccccttcccccagtgccgcaagagctgccccagcgccagctccctggagatccacatgcgcagccacagcggagagcggcccttcgtgtgcctgatctgcctgtcggccttcaccaccaaggccaactgcgagcggcacctcaaggtgcacacggacacgctgagcggtgtctgccacagctgtggcttcatctccaccacaagggacatcctctacagccacttggtcaccaaccacatggtctgccagcctggctccaagggtgagatctactcgccaggggccggacacccagcaaccaagctgcccccagacagtctgggcagcttccagcagcagcacacggccctgcaaggccccctggcctccgcggacctgggcctggcgcccaccccatcgccaggactggacagaaaggccctggccgaggccaccaacggagaggccagagcggagcctctggcccagaatggaggcagcagcgagcccccggcggcccccaggagcatcaaggtggaggcggtggaggagccggaggcggcccccatcctgggccccggagagcctgggccccaggccccgtcgcggacgccgtcgccgcgcagccccgccccggccagggtcaaggccgagctgtccagccccacgccgggctccagcccggtgcccggcgagctgggcctggccggggccctgttccttccgcagtacgtgttcgggcccgacgcggcgccccccgcctcggagatcctggccaagatgtccgagctggtgcacagccggctgcagcagggcgcgggcgcgggcgccggcggcgcgcagaccgggctcttccccggggcccccaagggcgctacgtgcttcgagtgcgagatcaccttcagcaacgtcaacaactactacgtgcacaagcgcctctactgttcaggccgccgtgcgcccgaggacgcgcctgccgcgcgcaggcccaaggcgccccccggcccggcccgcgcgccccccggccagcccgccgaacccgacgcgccgcgctcgtccccgggccccggagcgcgcgaggagggggctgggggcgcggccacgcccgaggacggcgcgggcggccggggcagcgagggcagccagagcccgggtagctccgtggacgacgcggaggacgaccccagccgcacgctgtgcgaggcctgcaacatccgcttcagccgccacgagacctacaccgtgcacaagcggtactactgcgcctcgcgccacgacccgccgccgcgccgaccggccgcgcccccgggaccccctgggccggccgcgcccccggccccctctcccgccgcgcctgtgcgcacgcgcagacgccgcaagctctacgagctgcacgcggccggcgccccgccccccccgccgcccggccacgcccccgcgcccgagtcgccgcggcccggaagcggaagcggaagcggccccggcctcgcccctgcgcgctcgcccggccccgcggccgacggccccatcgacctgagcaagaagccgcggcgcccgctccccggagccccggcaccggcgctggccgactaccacgagtgcacggcctgccgcgtgagcttccacagcctcgaggcctacctggcgcacaagaagtactcgtgccccgctgcgccaccgcccggcgcgctcggcctgcccgccgccgcctgcccctactgccccccgaacggcccggtgcgcggggacctgctggagcatttccgcctggcgcacggcctgctgctcggcgcgcccctggccggcccgggggtcgaggcccggacgccggccgaccgcggcccctcgcccgctcccgcccccgccgcctccccgcagcccgggtcccgtggcccccgggacggcctcggcccggagccccaggagccgccgcccggcccgcccccgtccccggccgccgcgcccgaggccgtgccgcccccgccggcgcccccctcctactcggacaagggcgtccagactcccagcaagggcacgccggcgccgctgcccaacggcaaccaccggtactgccgtctttgcaacatcaagttcagcagcctgtccaccttcatcgcccacaagaagtattactgctcctcgcacgccgccgagcacgtgaagtgagcgcccacactacagccgcagacgctttgcacgccccgctgcgatgcggggagggggccgcccccaggccgcacggactgccgctcctgggaaccccgccacgcacaggcctcggcggagggggccgcagggggcagcgcccgcctggacccttggcacttaataaagaagttcagtttgatgagcatggtggtgggccagcctagttctctgagccagcaggcacacgcagccagtgtcacatccagccctgctgtgtacacaggccactgcggcccggagtggctgggcccctgccggagttacaccactgggtgctaagagctagaccgagcgtcaggtcggaggccacagcacacactgaaccactgcagggccagccgctctgggcctaccccaccccagccctgtccatacccccctagggagagcagcctccacactgctgaccctctccacggtctacttggccgccagacacggaagagaggggcactgacctggctggccatcccccaaccctgcatggtcctgggggtccgatgtcccccatccagtcacagaccaccagggatggcaggggtgggggcgccctggggaggatgaagccctgtggtggccaaggctgggggaagaacaggcgagtaggtggacaggagagggagaccgaggccgaagcattccctggcctcgagggggtcctgatgctcactggtgggtgcatctctccctcagagccagggctgaggacaaccgtgtggtggagtcacctgtggtggctgagtcggtgcaagggtcagggcacccccaccccccgtcttccctgccctgctgggctgtatgggccggccacactgagggagtacttggctgaccgcgttcagccacggtgtcaccgtgccgtttgcagctgggtggctgtgggcagcctccagcgtgctttctcactggagaacaaaaacactcttctattcccaacgtcactttatttttttatttttgggtctcactctcttgcccaggctggagtccctgggatactcacggctcattgcagccttgacctcgtgagctcaagtgatcttcccacctcagtttcctcagtagctggggctacaggtgtacaccaccatgcccagctagtttttgtgttttttgtagaaatggtgtctccctatgttgcccaggctgggcaaccctatattttttagagctaaggtcttgttcggttccccaggctgaagttcagtggcacgatcataagtcactgcagcctcaaactcctgagctgaaaccatcttcctgcctcagcctcccaagtagctgggactacaggcttgacccaccacacctggctaacttttaaaacatttttatagagacagggtcttcctgtgttgcccaagatggtctcaaactcctgacctccagtgctcctgcagcctcagcctcccagaacattaggatgacaggcgcgagctaccattcccagcccatttccaactctacttgaactagctgcatttttttcagctttgcccagcagccctggtgagtgcaggcaaagaaggcagcggcctcttgcctcagaagcccgaggcacttcccagccagtccagggctcgctctcctgcccgcagctcgtgggcctgggtctgcagcgctttcagtggtctctgatgtctttgtccacctgcccactagggtctggccagatggggcccgtagccaaggccaatggacagacatggcttccaccccctcccagggacctgagctccagggaaggcaagcagccttttcctcacagacaccccttctgttgaagaccaggtgatagcggggacgggaggcacggacccctcaagtctgctcatcatttgcattgttgtgcatgaatttgcgtggagggttcaggaggctctgcccccaagtcctccccaggtgcgggcgcagggtacaagatgttctaaaaaatagaaacctggtggggggttgtcactgtgtgtacatttaaaagtaaactgtttaaaggtg

SEQ ID NO: 23466 - DNA, 497 bp, Homo sapiens
  misc_feature 1..497: note = ENST00000562417
  source 1..497: mol_type = unassigned DNA; mol_type = unassigned DNA
gcggccgccgggagggcgcgcggcgccggagacatgtccaggcggaaacagagcaacccccggcagatcaagcgttccctcggagacatggaggccagagaggaggtgcagttggtgggtgccagccacatggagcaaaaggccacggcacctgaagccccgagccctcccagcgcagatgttaactcacccccaccgctgccgccccccacatccccaggaggccccaaggagctggaaggacaggaaccagaacccaggcccacggaggaagagccgggcagtccctggagcgggccaggtaaccacgcgggtggtgggggcagcagcatcgcctcccgggcagcctggcccggcccctgggagcagggcgacgtgggtgctggggcaggtgtgcaggttgctggagacccaccaggcccaggcctgtgcctagtccaaagctcagccaacccgtgcagctggtggtatcactggagcttggcaccctcgcgcca

SEQ ID NO: 23467 - DNA, 563 bp, Homo sapiens
  misc_feature 1..563: note = ENST00000569086
  source 1..563: mol_type = unassigned DNA; mol_type = unassigned DNA
gcggcgccggagacatgtccaggcggaaacagagcaacccccggcagatcaagcgttccctcggagacatggaggccagagaggaggtgcagttggtgggtgccagccacatggagcaaaaggccacggcacctgaagccccgagccctcccagcgcagatgttaactcacccccaccgctgccgccccccacatccccaggaggccccaaggagctggaaggacaggaaccagaacccaggcccacggaggaagagccgggcagtccctggagcgggccagacgagctggagccggtggtgcaggatgggcagaggcgcatacgggcccgactcagcctcgccacgggcctgtcctggggcccgttccatgggagtgtccagaccagagcctcatcccccaggcaggcggagccgatgagaaaactgaggctccaagatgttaagtcaattgcccaaatacccaggatcaaacagcagagggagaaatagaacccacatctgcctatccccggagaccctcgcaagctccttaatgaattaaatccttgattaacccttatc

SEQ ID NO: 23468 - DNA, 808 bp, Homo sapiens
  misc_feature 1..808: note = ENST00000563351
  source 1..808: mol_type = unassigned DNA; mol_type = unassigned DNA
ggcgccggagacatgtccaggcggaaacagagcaacccccggcagatcaagcgttccctcggagacatggaggccagagaggaggtgcagttggtgggtgccagccacatggagcaaaaggccacggcacctgaagccccgagccctcccagcgcagacgagctggagccggtggtgcaggatgggcagaggcgcatacgggcccgactcagcctcgccacgggcctgtcctggggcccgttccatgggagtgtccagaccagagcctcatcccccaggcaggcggagccgatgagaaaactgaggctccaagatgttaagtcaattgcccaaatacccaggatcaaacagcagagggagaaatagaacccacatctgcctatccccggagaccctcgcaagctccttaatggtagggctgaggggctggcaccggcccaggagtcatccccacgggctgccctttgccctagctgcagtcacccctccctgtccgcctgcctccgcatttagtcctgctctggcctagggcacaggccatcctggggatacgggcacggggttagaaacgctcccaagtggggagataacgtctgggggcacaaggggagccaaggccagaggagccgctggggctctgtggggagcccggggaggaaggagcccccgctccactcttccctcctctgctttatctcctgcagaattaaatccttgattaacccttatctccccagcgaggcgctatctccgccttggcgccgagtgtccagacacaccgtacaagatgattgatttcttcaagata

SEQ ID NO: 23469 - DNA, 502 bp, Homo sapiens
  misc_feature 1..502: note = ENST00000562437
  source 1..502: mol_type = unassigned DNA; mol_type = unassigned DNA
ggcgccggagacatgtccaggcggaaacagagcaacccccggcagatcaagcgttccctcggagacatggaggccagagaggaggtgcagttggtgggtgccagccacatggagcaaaaggccacggcacctgaagccccgagccctcccagcgcagatgttaactcacccccaccgctgccgccccccacatccccaggaggccccaaggagctggaaggacaggaaccagaacccaggcccacggaggaagagccgggcagtccctggagcgggccagacgagctggagccggtggtgcaggatgggcagaggcgcatacgggcccgactcagcctcgccacgggcctgtcctggggcccgttccatgggagtgtccagaccagagcctcatcccccaggcaggcggagccgcgaggcgctatctccgccttggcgccgagtgtccagacacaccgtacaagatgattgatttcttcaagatatgcacgcctttccgata

SEQ ID NO: 23470 - DNA, 720 bp, Homo sapiens
  misc_feature 1..720: note = ENST00000521923
  source 1..720: mol_type = unassigned DNA; mol_type = unassigned DNA
actggacccaggaagttcagctggcctcacctctcaattcatcaagaaagacatctgagatgtatgaatatcctgtaagactgacccaaatcctgctggcttggtgagctcatctcccagttgcctgattatcttagaacattgaagagctccagtgaagatgaagacagggacttgctatggtacccaggctggacttgaactctggggctcaagcattcctcccacctcagcctcccaagtagctgggcctacaagtcttcttggcttcaagtcttcttcctcagcggtctcactctgtcaccaaggctggagtgcagtggtgctgcgatctcggctcactgcaacttccacctccaaggcccaagcgatcctcccaccacagcctcctgagtggctgggactagaggaaacattcaaatcagttgacaaagaatggctgatgctgaaatgacttgctgtctcggtgtggagtggaaacaatcctgctaaatttcatattgcagtgacaccaaagcaaaggacagatctcaagacaacttttattgaaatggaaaacagttaattttaactaaagaataagagaaatgccaacagaaataaaagacccagaaatcagaggacaatgtgcgaaactctatatactgagacacacaaattgaaacaacccaaataaatgccaaatgcacaagaaaataaatgtaacttatcagaggttaa

SEQ ID NO: 23471 - DNA, 596 bp, Homo sapiens
  misc_feature 1..596: note = ENST00000518180
  source 1..596: mol_type = unassigned DNA; mol_type = unassigned DNA
gtgcttctttcctctctctgcctccttcacatctcccttcaaagatgagactgggaaaagcgggtgattcatcaagaaagacatctgagatgtatgaatatcctgtaagactgacccaaatcctgctggcttggtgagctcatctcccagttgcctgattatcttagaacattgaagagctccagtgaagatgaagatatgtttgtttattcgaacaggatgcagtccagtcttgctgacttctttggactctgatcttatataccagtggaagaacactgtacacaacccaatgcagaaagaccactaaagacttaacgccctctggaaagaggatttcgtcaccctacaaagcaaagagccattatcaactagagtatcatctaaaggcaatgggaacatggaatgcagtggaggaaggatgttaaggctaccaactaagttctcaccttcagctacaagaatgagaactataaaagggccgcttgaagatgccattgaagatgaggaagaagaatgtccatcagaggaaacagacatcatctccaaaggagactttccattggaggaaagcttttccacagaatttgggcctg

SEQ ID NO: 23472 - DNA, 4700 bp, Homo sapiens
  misc_feature 1..4700: note = ENST00000407775
  source 1..4700: mol_type = unassigned DNA; mol_type = unassigned DNA
ctctccccctcccctcctcactgtcacactctctgtgcccccgtctctcttctctcatttgcttgctcatctccgaacgtgaatccgcggctcccggaggagcccagcgcccggagcacctggagtccggccggcggcgggccgagcctggccagcggcggcggcggcggcggcggcggcgggagccgagggagcggcagccgcgaccgcgggcaccgcgggagccccagcggcagcagccgccgccgagatgtcccggcgaaagcaaagcaaaccccggcagatcaaacggccgcttgaagatgccattgaagatgaggaagaagaatgtccatcagaggaaacagacatcatctccaaaggagactttccattggaggaaagcttttccacagaatttgggcctgaaaatctgagctgcgaagaagtggaatacttttgtaacaaaggtgatgatgaaggaatccaggagacagcagaatcagatggggacacacagtcagagaaaccggggcaacctggagttgagacagacgactgggatggaccaggagagctggaggtgtttcagaaagatggggaacgaaaaattcagagtcgacagcaacttccagtgggaacaacctgggggccgtttcctgggaagatggacttgaataataattctttgaagacaaaggctcaggtcccaatggtgctgactgctggtcccaagtggttgctggatgtgacttggcaaggagtggaagacaacaaaaacaactgcattgtgtacagcaaagggggtcagctttggtgtacaactacgaaggccatctctgagggtgaagagctaattgcctttgtggtggattttgactcaaggctacaagctgccagtcagatgactctcacagaagggatgtaccctgcacgcctgctggactcaattcagctgcttcctcagcaagctgccatggcttctattttgcccacagctattgtcaataaggatatattcccttgcaagtcctgtggcatctggtatcggagtgagcggaatctgcaggcccatttgatgtactactgcagtgggaggcaaagagaagctgctccggtgtcagaggaaaatgaagacagtgcccatcagatttccagcctgtgccccttcccacagtgcaccaagagcttttcaaatgctcgagctctagaaatgcacctgaattcacacagtggagtgaaaatggaagaattcctgccccctggtgctagtctaaaatgcaccgtctgtagctacactgctgattccgtgatcaactttcaccaacacctgttctcccatctcactcaagctgccttccgatgtaatcactgccatttcggcttccagactcagagggagttattgcagcaccaggagctccatgtccctagcggcaaacttcccagagaaagtgacatggaacactctccaagtgcaactgaagacagcttacagccagccacagacttattgaccagaagcgaacttccccagagccaaaaggccatgcagactaaagatgcgagctctgacacagagctggacaagtgtgagaaaaagactcagctctttctcacgaaccagagaccagagatacagcctacaacaaataaacaaagcttttcttacacaaaaataaagtctgagccctctagcccaagacttgcctcatctccagttcagcctaatattgggccttctttccctgtgggccctttcctatctcagttttctttcccccaagatatcaccatggtccctcaagcttcagagatcttagctaagatgtctgaactggtgcatcggcgactgaggcatggcagtagtagctaccctcccgtcatttacagccctttgatgcccaagggggctacttgttttgagtgtaacataacattcaataatttggataattatctagtgcacaaaaagcattattgcagcagccgatggcagcagatggctaagtccccagagttccctagtgtgtcagaaaagatgcctgaagctttgagtcccaacactggccaaacctccataaaccttctcaacccagctgctcattctgctgatcctgagaatccacttcttcaaacatcttgcatcaattcttccactgtcttagatttaattgggccaaatgggaagggccatgacaaggacttttccactcaaactaagaagctctccacctccagtaacaatgatgacaaaattaatggaaaacctgttgatgtgaaaaatcccagtgtccccttagtggatggggaaagtgacccaaataagactacctgtgaagcttgcaacattaccttcagccggcacgaaacatacatggtccacaaacagtattactgtgctacacgccacgaccctccactgaagaggtctgcttccaacaaagtgcctgccatgcagagaaccatgcgcacacgcaagcgcagaaagatgtatgagatgtgcctacctgagcaggaacaaaggcctccactggttcagcagagatttcttgacgtagccaacctcaataatccttgtacctccactcaagaacccacagaagggctaggagagtgctaccacccaagatgtgatatctttccaggaattgtctctaaacacttggaaacttctctgacgatcaacaagtgtgttccagtttccaaatgtgatactactcattccagtgtttcctgcctagagatggacgtgcccatagatctcagcaaaaagtgtttatctcagtctgagcggacgaccacgtctcccaaaaggctgctggactatcacgagtgcactgtgtgcaagatcagtttcaataaggtagaaaactatctggcccacaagcagaatttctgcccggttactgcacatcagcgtaatgacctgggtcaactggacggcaaagtgtttccgaatccagaaagcgaacgaaacagccctgatgtcagctacgaaagaagcataataaaatgtgagaaaaatgggaatttgaagcagccttcccccaatggaaacttattttcatcccacctagcaaccctgcaaggcttgaaggtctttagtgaagctgctcagctcattgctacaaaagaagaaaacagacatttgtttcttccacaatgcctttaccctggagcaataaagaaagcaaaaggagccgaccagctttctccatattatggaatcaagccaagtgattatatttctggttctcttgtcatccataacactgacatcgagcaaagcagaaatgcagaaaatgaatctcctaaaggccaggcttcctcaaatgggtgtgctgcgctgaagaaagattctctgccattgttgcccaaaaatcgaggaatggtaatagtgaatggtggactgaaacaagatgagagacctgctgccaacccacagcaagagaacatttcccagaatcctcagcacgaagacgaccacaaatctccctcgtggatctctgagaacccattagctgccaatgagaatgtctcaccaggaattccctcagcagaggaacagttgtctagtatagcaaaaggtgtgaatggttccagccaggctccaaccagtgggaaatattgccggctatgtgatatccagttcaacaacctttcaaactttataactcacaagaagttttattgctcatcacatgcagcagaacatgtcaaatgaactaactaaacatcagtcacctttggtatcagtgtttagtatgttgttctaaccagtccagaaaaaaaaataagctgtttgaattacatctgggcaatcaggagataattcattatggctgagttgaagacttaaggtgtaatttcattacagtccattagtaaagtgtattattggtgccattttcaaaaaaattaatttattttaccagcagtattcatagctgtggttatgttattttttatttaaaaactttatattaaagtcatttgtaatgttattgtatagttattgtgtagcacatatggtttgcactgtatagtagcttttaaagaaaatagtcacaatacagaaaagcattttagaaatagcttcaaaagcacttgtgtatcttgattttttcttatatgctgttgcagatatatgtatatgctaaaatataacttgcaaagatgttctaaatacacatgctataagttcgccttaagatttcaattcttggataatcaggctctgtttgcactttatattttagcagatacagtctcttagtcactaggctttgcatttgtatgtagctgtatgtttccgtccattttcttaatcctgaacctgtatgttaaatgaagatggcaatttttttcttgtatagtacttgtattttctttcgctgatgcagctctgtctcaatttttaaacctttgctgttaaatgcaatactttataaagaatgaacaaaattactggaagcagtattgtaagtaatgaggtagtattaatcagttttatcttttgaaaggcacagtctaaatcgaaaccctaaactcaatgctgcaagtatgaatttaattcatatataagatctatttaaatataagagtagcaatactgcacctggtgatcacaaagataatgttctacttctgatagaaataatttctcaacaaatgttgttactatgcatgtatatggatggaataaaattccagattgt

SEQ ID NO: 23473 - DNA, 3960 bp, Homo sapiens
  misc_feature 1..3960: note = ENST00000520492
  source 1..3960: mol_type = unassigned DNA; mol_type = unassigned DNA
gtaaaagttcgcgcctctgcggcgggcggccgtgcgtctctgccctgcgggcgcgggctggtggctggcaggtcgtgtcctgggacttcgggcgggtccggctcacgccgccaggacgctcagccgagcggggattcgggtggtgtctggccctggtggcgcgcggagtcctccctgggaggggccgccagtcacttcccagcgcggaagctggccgcttgaagatgccattgaagatgaggaagaagaatgtccatcagaggaaacagacatcatctccaaaggagactttccattggaggaaagcttttccacagaatttgggcctgaaaatctgagctgcgaagaagtggaatacttttgtaacaaaggtgatgatgaaggaatccaggagacagcagaatcagatggggacacacagtcagagaaaccggggcaacctggagttgagacagacgactgggatggaccaggagagctggaggtgtttcagaaagatggggaacgaaaaattcagagtcgacagcaacttccagtgggaacaacctgggggccgtttcctgggaagatggacttgaataataattctttgaagacaaaggctcaggtcccaatggtgctgactgctggtcccaagtggttgctggatgtgacttggcaaggagtggaagacaacaaaaacaactgcattgtgtacagcaaagggggtcagctttggtgtacaactacgaaggccatctctgagggtgaagagctaattgcctttgtggtggattttgactcaaggctacaagctgccagtcagatgactctcacagaagggatgtaccctgcacgcctgctggactcaattcagctgcttcctcagcaagctgccatggcttctattttgcccacagctattgtcaataaggatatattcccttgcaagtcctgtggcatctggtatcggagtgagcggaatctgcaggcccatttgatgtactactgcagtgggaggcaaagagaagctgctccggtgtcagaggaaaatgaagacagtgcccatcagatttccagcctgtgccccttcccacagtgcaccaagagcttttcaaatgctcgagctctagaaatgcacctgaattcacacagtggagtgaaaatggaagaattcctgccccctggtgctagtctaaaatgcaccgtctgtagctacactgctgattccgtgatcaactttcaccaacacctgttctcccatctcactcaagctgccttccgatgtaatcactgccatttcggcttccagactcagagggagttattgcagcaccaggagctccatgtccctagcggcaaacttcccagagaaagtgacatggaacactctccaagtgcaactgaagacagcttacagccagccacagacttattgaccagaagcgaacttccccagagccaaaaggccatgcagactaaagatgcgagctctgacacagagctggacaagtgtgagaaaaagactcagctctttctcacgaaccagagaccagagatacagcctacaacaaataaacaaagcttttcttacacaaaaataaagtctgagccctctagcccaagacttgcctcatctccagttcagcctaatattgggccttctttccctgtgggccctttcctatctcagttttctttcccccaagatatcaccatggtccctcaagcttcagagatcttagctaagatgtctgaactggtgcatcggcgactgaggcatggcagtagtagctaccctcccgtcatttacagccctttgatgcccaagggggctacttgttttgagtgtaacataacattcaataatttggataattatctagtgcacaaaaagcattattgcagcagccgatggcagcagatggctaagtccccagagttccctagtgtgtcagaaaagatgcctgaagctttgagtcccaacactggccaaacctccataaaccttctcaacccagctgctcattctgctgatcctgagaatccacttcttcaaacatcttgcatcaattcttccactgtcttagatttaattgggccaaatgggaagggccatgacaaggacttttccactcaaactaagaagctctccacctccagtaacaatgatgacaaaattaatggaaaacctgttgatgtgaaaaatcccagtgtccccttagtggatggggaaagtgacccaaataagactacctgtgaagcttgcaacattaccttcagccggcacgaaacatacatggtccacaaacagtattactgtgctacacgccacgaccctccactgaagaggtctgcttccaacaaagtgcctgccatgcagagaaccatgcgcacacgcaagcgcagaaagatgtatgagatgtgcctacctgagcaggaacaaaggcctccactggttcagcagagatttcttgacgtagccaacctcaataatccttgtacctccactcaagaacccacagaagggctaggagagtgctaccacccaagatgtgatatctttccaggaattgtctctaaacacttggaaacttctctgacgatcaacaagtgtgttccagtttccaaatgtgatactactcattccagtgtttcctgcctagagatggacgtgcccatagatctcagcaaaaagtgtttatctcagtctgagcggacgaccacgtctcccaaaaggctgctggactatcacgagtgcactgtgtgcaagatcagtttcaataaggtagaaaactatctggcccacaagcagaatttctgcccggttactgcacatcagcgtaatgacctgggtcaactggacggcaaagtgtttccgaatccagaaagcgaacgaaacagccctgatgtcagctacgaaagaagcataataaaatgtgagaaaaatgggaatttgaagcagccttcccccaatggaaacttattttcatcccacctagcaaccctgcaaggcttgaaggtctttagtgaagctgctcagctcattgctacaaaagaagaaaacagacatttgtttcttccacaatgcctttaccctggagcaataaagaaagcaaaaggagccgaccagctttctccatattatggaatcaagccaagtgattatatttctggttctcttgtcatccataacactgacatcgagcaaagcagaaatgcagaaaatgaatctcctaaaggccaggcttcctcaaatgggtgtgctgcgctgaagaaagattctctgccattgttgcccaaaaatcgaggaatggtaatagtgaatggtggactgaaacaagatgagagacctgctgccaacccacagcaagagaacatttcccagaatcctcagcacgaagacgaccacaaatctccctcgtggatctctgagaacccattagctgccaatgagaatgtctcaccaggaattccctcagcagaggaacagttgtctagtatagcaaaaggtgtgaatggttccagccaggctccaaccagtgggaaatattgccggctatgtgatatccagttcaacaacctttcaaactttataactcacaagaagttttattgctcatcacatgcagcagaacatgtcaaatgaactaactaaacatcagtcacctttggtatcagtgtttagtatgttgttctaaccagtccagaaaaaaaaataagctgtttgaattacatctgggcaatcaggagataattcattatggctgagttgaagacttaaggtgtaatttcattacagtccattagtaaagtgtattattggtgccattttcaaaaaaattaatttattttaccagcagtattcatagctgtggttatgttattttttatttaaaaactttatattaaagtcatttgtaatgttattgtatagttattgtgtagcacatatggtttgcactgtatagtagcttttaa

SEQ ID NO: 23474 - DNA, 594 bp, Homo sapiens
  misc_feature 1..594: note = ENST00000520027
  source 1..594: mol_type = unassigned DNA; mol_type = unassigned DNA
agtgctaatcaaagtgtggtcagtgcacggaccaaagctatcaacatgacttcgaagctggttagcaaagcagaatggtgggatttgcctcagacccactgacacagaatctctgtgtgtggatcctaggatgctgtggagtaagtaacaggttccccagggccgcttgaagatgccattgaagatgaggaagaagaatgtccatcagaggaaacagacatcatctccaaaggagactttccattggaggaaagcttttccacagaatttgggcctgaaaatctgagctgcgaagaagtggaatacttttgtaacaaaggtgatgatgaaggaatccaggagacagcagaatcagatggggacacacagtcagagaaaccggggcaacctggagttgagacagacgactgggatggaccaggagagctggaggtgtttcagaaagatggggaacgaaaaattcagagtcgacagcaacttccagtgggaacaacctgggggccgtttcctgggaagatggacttgaataataattctttgaagacaaaggctcaggtcccaatggtgctgactgctggtcccaagtggttgctg

SEQ ID NO: 23475 - DNA, 574 bp, Homo sapiens
  misc_feature 1..574: note = ENST00000524235
  source 1..574: mol_type = unassigned DNA; mol_type = unassigned DNA
atcaacatgacttcgaagctggttagcaaagcagaatggtgggatttgcctcagacccactgacacagaatctctgtgtgtggatcctaggatgctgtggagtaagtaacaggttccccagatcattgaaacaaccaccaaatgaaaaatcatccgatatacccaccttaggcccagattgcacagcgcagctgttggtactgactagatgaaaagcttcactgtacattgggctgtccatcagcatcgtcagggccgcttgaagatgccattgaagatgaggaagaagaatgtccatcagaggaaacagacatcatctccaaaggagactttccattggaggaaagcttttccacagaatttgggcctgaaaatctgagctgcgaagaagtggaatacttttgtaacaaaggtgatgatgaaggaatccaggagacagcagaatcagatggggacacacagtcagagaaaccggggcaacctggagttgagacagacgactgggatggaccaggagagctggaggtgtttcagaaagatggggaacgaaaaattcagagtcgacagcaacttc

SEQ ID NO: 23476 - DNA, 1582 bp, Homo sapiens
  misc_feature 1..1582: note = ENST00000511341
  source 1..1582: mol_type = unassigned DNA; mol_type = unassigned DNA
ctgactggtgtgtttacaaaccttgagcaagatacagagtgccaattgctgtatttacaatcccttagctagacataaaggttctccaagtccccaccagactcaggagcccagctggcttcacccagtggatcccgcattggggcgcaggtggagctgcctgccagtctcgtgctgtgcgcccgcactcctcagcccttgggtggtcgatgggactgggcgccgtagagcaggcggcagcgctcgtcggggaggctccggctgcgcaggagcccacagcgtgggggaggctcaggcatggtgggctgcaggtcccaagccctgccccgccgggaggcagctaaggcccggcgagaagtccggcacagcagctgctggcccaggtgctaagcccctcactgcctagggcgggcggggccggctggctggccgctctgagtgcagggcccgtggagcccacgcccacccggaactggcactgacccgcaagcgctgtgcgcagccgcggttcctgcccgcgcctctacttccacacctccccgcaagctgagggagccggctccggcctcggccagcccaggaaggggctccaccgtgcagcggcgggctgaagggctcctcaagtgccgccaaagtgggagcccaggcagaggaggactcgagaacgagcaagggctgcgagcgctgccagcacgctgtcacctctcaatcccactcaaactgtgtttacagagcatcagagaaaaaaagacaacctgtattcgccctggaaaaactaatggccgcttgaagatgccattgaagatgaggaagaagaatgtccatcagaggaaacagacatcatctccaaaggagactttccattggaggaaagcttttccacagaatttgggcctgaaaatctgagctgcgaagaagtggaatacttttgtaacaaaggtgatgatgaaggaatccaggagacagcagaatcagatggggacacacagtcagagaaaccggggcaacctggagttgagacagacgactgggatggaccaggagagctggaggtgtttcagaaagatggggaacgaaaaattcagagtcgacagcaacttccagtgggaacaacctgggggccgtttcctgggaagatggacttgaataataattctttgaagacaaaggctcaggtcccaatggtgctgactgctggtcccaagtggttgctggatgtgacttggcaaggagtggaagacaacaaaaacaactgcattgtgtacagcaaagggggtcagctttggtgtacaactacgaaggccatctctgagggtgaagagctaattgcctttgtggtggattttgactcaaggctacaagctgccagtcagatgactctcacagaagggatgtaccctgcacgcctgctggactcaattcagctgcttcctcagcaagctgccatggcttctattttgcccacagctattgtcaatagtaagtgctcagtgctgtgtagcccagctttagaggtgatgggaatttatgggagaaaaaaatgtctactgacaagaaaccaggaacagacctttttccttca

SEQ ID NO: 23477 - DNA, 468 bp, Homo sapiens
  misc_feature 1..468: note = ENST00000522160
  source 1..468: mol_type = unassigned DNA; mol_type = unassigned DNA
ggccgcttgaagatgccattgaagatgaggaagaagaatgtccatcagaggaaacagacatcatctccaaaggagactttccattggaggaaagcttttccacagaatttgggcctgaaaatctgagctgcgaagaagtggaatacttttgtaacaaaggtgatgatgaaggaatccaggagacagcagaatcagatggggacacacagtcagagaaaccggggcaacctggagttgagacagacgactgggatggaccagacatgcaggagaatgccttgtggagataaaggcagagaccccagtgatacttctacatgccaaggaaagctaaagattgccagtaaaccaccagaagctagaggagagagacatggaaccgatacttcgtcatggccctcggagggaaccattgccgttgacaccttgatcttggacttttaacctccagaactgtgaaacaatgaa

SEQ ID NO: 23478 - DNA, 3300 bp, Homo sapiens
  misc_feature 1..3300: note = ENST00000517361
  source 1..3300: mol_type = unassigned DNA; mol_type = unassigned DNA
agattcttagaagacccttcagagtctgaagtaaagaaagttttgaacctgttttttcattctactgtagggcttctgaaaacaaggagagctggaggtgtttcagaaagatggggaacgaaaaattcagagtcgacagcaacttccagtgggaacaacctgggggccgtttcctgggaagatggacttgaataataattctttgaagacaaaggctcaggtcccaatggtgctgactgctggtcccaagtggttgctggatgtgacttggcaaggagtggaagacaacaaaaacaactgcattgtgtacagcaaagggggtcagctttggtgtacaactacgaaggccatctctgagggtgaagagctaattgcctttgtggtggattttgactcaaggctacaagctgccagtcagatgactctcacagaagggatgtaccctgcacgcctgctggactcaattcagctgcttcctcagcaagctgccatggcttctattttgcccacagctattgtcaataaggatatattcccttgcaagtcctgtggcatctggtatcggagtgagcggaatctgcaggcccatttgatgtactactgcagtgggaggcaaagagaagctgctccggtgtcagaggaaaatgaagacagtgcccatcagatttccagcctgtgccccttcccacagtgcaccaagagcttttcaaatgctcgagctctagaaatgcacctgaattcacacagtggagtgaaaatggaagaattcctgccccctggtgctagtctaaaatgcaccgtctgtagctacactgctgattccgtgatcaactttcaccaacacctgttctcccatctcactcaagctgccttccgatgtaatcactgccatttcggcttccagactcagagggagttattgcagcaccaggagctccatgtccctagcggcaaacttcccagagaaagtgacatggaacactctccaagtgcaactgaagacagcttacagccagccacagacttattgaccagaagcgaacttccccagagccaaaaggccatgcagactaaagatgcgagctctgacacagagctggacaagtgtgagaaaaagactcagctctttctcacgaaccagagaccagagatacagcctacaacaaataaacaaagcttttcttacacaaaaataaagtctgagccctctagcccaagacttgcctcatctccagttcagcctaatattgggccttctttccctgtgggccctttcctatctcagttttctttcccccaagatatcaccatggtccctcaagcttcagagatcttagctaagatgtctgaactggtgcatcggcgactgaggcatggcagtagtagctaccctcccgtcatttacagccctttgatgcccaagggggctacttgttttgagtgtaacataacattcaataatttggataattatctagtgcacaaaaagcattattgcagcagccgatggcagcagatggctaagtccccagagttccctagtgtgtcagaaaagatgcctgaagctttgagtcccaacactggccaaacctccataaaccttctcaacccagctgctcattctgctgatcctgagaatccacttcttcaaacatcttgcatcaattcttccactgtcttagatttaattgggccaaatgggaagggccatgacaaggacttttccactcaaactaagaagctctccacctccagtaacaatgatgacaaaattaatggaaaacctgttgatgtgaaaaatcccagtgtccccttagtggatggggaaagtgacccaaataagactacctgtgaagcttgcaacattaccttcagccggcacgaaacatacatggtccacaaacagtattactgtgctacacgccacgaccctccactgaagaggtctgcttccaacaaagtgcctgccatgcagagaaccatgcgcacacgcaagcgcagaaagatgtatgagatgtgcctacctgagcaggaacaaaggcctccactggttcagcagagatttcttgacgtagccaacctcaataatccttgtacctccactcaagaacccacagaagggctaggagagtgctaccacccaagatgtgatatctttccaggaattgtctctaaacacttggaaacttctctgacgatcaacaagtgtgttccagtttccaaatgtgatactactcattccagtgtttcctgcctagagatggacgtgcccatagatctcagcaaaaagtgtttatctcagtctgagcggacgaccacgtctcccaaaaggctgctggactatcacgagtgcactgtgtgcaagatcagtttcaataaggtagaaaactatctggcccacaagcagaatttctgcccggttactgcacatcagcgtaatgacctgggtcaactggacggcaaagtgtttccgaatccagaaagcgaacgaaacagccctgatgtcagctacgaaagaagcataataaaatgtgagaaaaatgggaatttgaagcagccttcccccaatggaaacttattttcatcccacctagcaaccctgcaaggcttgaaggtctttagtgaagctgctcagctcattgctacaaaagaagaaaacagacatttgtttcttccacaatgcctttaccctggagcaataaagaaagcaaaaggagccgaccagctttctccatattatggaatcaagccaagtgattatatttctggttctcttgtcatccataacactgacatcgagcaaagcagaaatgcagaaaatgaatctcctaaaggccaggcttcctcaaatgggtgtgctgcgctgaagaaagattctctgccattgttgcccaaaaatcgaggaatggtaatagtgaatggtggactgaaacaagatgagagacctgctgccaacccacagcaagagaacatttcccagaatcctcagcacgaagacgaccacaaatctccctcgtggatctctgagaacccattagctgccaatgagaatgtctcaccaggaattccctcagcagaggaacagttgtctagtatagcaaaaggtgtgaatggttccagccaggctccaaccagtgggaaatattgccggctatgtgatatccagttcaacaacctttcaaactttataactcacaagaagttttattgctcatcacatgcagcagaacatgtcaaatgaactaactaaacatcagtcacctttggtatcagtgtttagtatgttgttctaaccagtcc

SEQ ID NO: 23479 - DNA, 3312 bp, Homo sapiens
  misc_feature 1..3312: note = ENST00000522296
  source 1..3312: mol_type = unassigned DNA
gaaactatctagagagttaagctcaagttaatttcacatgcagaagggggtcagctttggtgtacaactacgaaggccatctctgagggtgaagagctaattgcctttgtggtggattttgactcaaggctacaagctgccagtcagatgactctcacagaagggatgtaccctgcacgcctgctggactcaattcagctgcttcctcagcaagctgccatggcttctattttgcccacagctattgtcaataaatgacacttcatatgacacaaaatcagtcgtctggagtcccaagatctgtgttctagccatatctgatttttatctagctctatgaaaacacatgagtagcagacacatcttaagaggagaatagattctgaagttagtagaaatatcagattccacatgtctaacgtgaacatgtgccactgtttgcctggcttagtcccattgtacatttttatctggcatccctctggatggtgactcctttcctctacgaaagtcctgagtttgcacaatacaagaggatatattcccttgcaagtcctgtggcatctggtatcggagtgagcggaatctgcaggcccatttgatgtactactgcagtgggaggcaaagagaagctgctccggtgtcagaggaaaatgaagacagtgcccatcagatttccagcctgtgccccttcccacagtgcaccaagagcttttcaaatgctcgagctctagaaatgcacctgaattcacacagtggagtgaaaatggaagaattcctgccccctggtgctagtctaaaatgcaccgtctgtagctacactgctgattccgtgatcaactttcaccaacacctgttctcccatctcactcaagctgccttccgatgtaatcactgccatttcggcttccagactcagagggagttattgcagcaccaggagctccatgtccctagcggcaaacttcccagagaaagtgacatggaacactctccaagtgcaactgaagacagcttacagccagccacagacttattgaccagaagcgaacttccccagagccaaaaggccatgcagactaaagatgcgagctctgacacagagctggacaagtgtgagaaaaagactcagctctttctcacgaaccagagaccagagatacagcctacaacaaataaacaaagcttttcttacacaaaaataaagtctgagccctctagcccaagacttgcctcatctccagttcagcctaatattgggccttctttccctgtgggccctttcctatctcagttttctttcccccaagatatcaccatggtccctcaagcttcagagatcttagctaagatgtctgaactggtgcatcggcgactgaggcatggcagtagtagctaccctcccgtcatttacagccctttgatgcccaagggggctacttgttttgagtgtaacataacattcaataatttggataattatctagtgcacaaaaagcattattgcagcagccgatggcagcagatggctaagtccccagagttccctagtgtgtcagaaaagatgcctgaagctttgagtcccaacactggccaaacctccataaaccttctcaacccagctgctcattctgctgatcctgagaatccacttcttcaaacatcttgcatcaattcttccactgtcttagatttaattgggccaaatgggaagggccatgacaaggacttttccactcaaactaagaagctctccacctccagtaacaatgatgacaaaattaatggaaaacctgttgatgtgaaaaatcccagtgtccccttagtggatggggaaagtgacccaaataagactacctgtgaagcttgcaacattaccttcagccggcacgaaacatacatggtccacaaacagtattactgtgctacacgccacgaccctccactgaagaggtctgcttccaacaaagtgcctgccatgcagagaaccatgcgcacacgcaagcgcagaaagatgtatgagatgtgcctacctgagcaggaacaaaggcctccactggttcagcagagatttcttgacgtagccaacctcaataatccttgtacctccactcaagaacccacagaagggctaggagagtgctaccacccaagatgtgatatctttccaggaattgtctctaaacacttggaaacttctctgacgatcaacaagtgtgttccagtttccaaatgtgatactactcattccagtgtttcctgcctagagatggacgtgcccatagatctcagcaaaaagtgtttatctcagtctgagcggacgaccacgtctcccaaaaggctgctggactatcacgagtgcactgtgtgcaagatcagtttcaataaggtagaaaactatctggcccacaagcagaatttctgcccggttactgcacatcagcgtaatgacctgggtcaactggacggcaaagtgtttccgaatccagaaagcgaacgaaacagccctgatgtcagctacgaaagaagcataataaaatgtgagaaaaatgggaatttgaagcagccttcccccaatggaaacttattttcatcccacctagcaaccctgcaaggcttgaaggtctttagtgaagctgctcagctcattgctacaaaagaagaaaacagacatttgtttcttccacaatgcctttaccctggagcaataaagaaagcaaaaggagccgaccagctttctccatattatggaatcaagccaagtgattatatttctggttctcttgtcatccataacactgacatcgagcaaagcagaaatgcagaaaatgaatctcctaaaggccaggcttcctcaaatgggtgtgctgcgctgaagaaagattctctgccattgttgcccaaaaatcgaggaatggtaatagtgaatggtggactgaaacaagatgagagacctgctgccaacccacagcaagagaacatttcccagaatcctcagcacgaagacgaccacaaatctccctcgtggatctctgagaacccattagctgccaatgagaatgtctcaccaggaattccctcagcagaggaacagttgtctagtatagcaaaaggtgtgaatggttccagccaggctccaaccagtgggaaatattgccggctatgtgatatccagttcaacaacctttcaaactttataactcacaagaagttttattgctcatcacatgcagcagaacatgtcaaatgaactaactaaacatcagtcacctttggtatcagtgtttagtatgttgttctaaccagtccaga

SEQ ID NO: 23480 - DNA, 475 bp, Homo sapiens
  misc_feature 1..475: note = ENST00000497813
  source 1..475: mol_type = unassigned DNA; mol_type = unassigned DNA
aacacatttactgcgggcgggggtctgagggcctgcaaacaactcgagctggagcctcggccaggaccggcgcgagaggcgccggagcccggcccagtgctccagagaaaggccggcctgcagcacccgccaccgtcgccggccgcccgcacgtccgtccgccccgtgactggctgcagtttccgctgcgtttcagctgagctgccgcaggcggccaccgccgccgcccggacgccgggaccgtttcaccctcagcgcccctggccctgcgccttcccccgcgcctgtagccacccgagggcagtcggggcaggtggcattccggacacctgggcttaccagggcatacgggaccccaggaaatgttatttttgcttaagtcaaatcatatgtggctgctaaggtgctttcgatgcagttgtttttccaacaatctttgccgccccgagtatctgaataaaggaagaaaaataaa

SEQ ID NO: 23481 - DNA, 600 bp, Homo sapiens
  misc_feature 1..600: note = ENST00000428571
  source 1..600: mol_type = unassigned DNA; mol_type = unassigned DNA
gacggcgggcccgtgccggggagctgggccgctttttgtcagctccgagctcggcccctcctccctccctccgcccgccccaccagccggagcccggcccagtgctccagagaaaggccggcctgcagcacccgccaccgtcgccggccgcccgcacgtccgtccggagctgtgactgatgagaattaaaggccatggatgaagatgggcttgaattacaacaagagccaaactcattttttgatgcaacaggagctgatggtacacacatggatggtgatcaaattgttgtggaagtacaagaaactgtttttgtttcagatgttgtggattcagacataactgtgcataactttgttcctgatgacccagattcagttgtaatccaagatgttattgaggacgttgttatagaagatgttcagtgcccagatatcatggaagaagcagatgtgtctgaaacggtcatcattcctgagcaagtgctggactcagatgtaactgaagaagtttctttagcacattgcacagtcccagatgatgttttagcttctgacattacttcagcctcaatgtctatgccagaacacgtcttgacgg

SEQ ID NO: 23482 - DNA, 300 bp, Homo sapiens
  misc_feature 1..300: note = ENST00000419690
  source 1..300: mol_type = unassigned DNA; mol_type = unassigned DNA
agtgctccagagaaaggccggcctgcagcacccgccaccgtcgccggccgcccgcacgtccgtccgctgggaaagacatagaagaactattaagaagatagaattgttttgctgcgcagtacagcaacagtggatgttcaagattaagattagagtcaagttgtgtgattaagacaggagctgtgactgatgagaattaaaggccatggatgaagatgggcttgaattacaacaagagccaaactcattttttgatgcaacaggagctgatggtacacacatggatggtgatcaaattgt

SEQ ID NO: 23483 - DNA, 7558 bp, Homo sapiens
  misc_feature 1..7558: note = ENST00000379177
  source 1..7558: mol_type = unassigned DNA; mol_type = unassigned DNA
gccggcctgcagcacccgccaccgtcgccggccgcccgcacgtccgtccggttcttgctatattgccccaggctggtctcgaactcctgggctcaagccgttctcccgcctcccactgcccgcctgtcactgccgtctgttccctgagctgtgctttacgctgggaaagacatagaagaactattaagaagatagaattgttttgctgcgcagtacagcaacagtggatgttcaagattaagattagagtcaagttgtgtgattaagacagacagtcttcctctgtcatccaggctggaatgcagtgcagtggtgcaaatttggctcactgcagcctctgccttctgtgttcaagtgattcttcttctgcctcagcctctcgagtagctgggattacaggagctgtgactgatgagaattaaaggccatggatgaagatgggcttgaattacaacaagagccaaactcattttttgatgcaacaggagctgatggtacacacatggatggtgatcaaattgttgtggaagtacaagaaactgtttttgtttcagatgttgtggattcagacataactgtgcataactttgttcctgatgacccagattcagttgtaatccaagatgttattgaggacgttgttatagaagatgttcagtgcccagatatcatggaagaagcagatgtgtctgaaacggtcatcattcctgagcaagtgctggactcagatgtaactgaagaagtttctttagcacattgcacagtcccagatgatgttttagcttctgacattacttcagcctcaatgtctatgccagaacacgtcttgacgggtgattctatacatgtgtctgacgttggacatgttggacatgttggacatgttgaacatgtggttcatgatagtgtagtggaagcagaaattgtcactgatcctctgactaccgacgtagtttcagaagaagtattggtagcagactgtgcctctgaagcagtcatagatgccaatgggatccctgtggaccagcaggatgatgacaaaggcaactgtgaggactaccttatgatttccttggatgatgctggcaaaatagaacacgatggttcttctggaatgaccatggacacagagtcggaaattgatccttgtaaagtggatggcacttgccctgaggtcatcaaggtgtacatttttaaagctgaccctggagaagatgacttaggtggaactgtagacattgtggagagtgagcctgagaatgatcatggagttgaactgcttgatcagaacagcagtattcgtgttcccagggaaaagatggtttatatgactgtcaatgactctcagccagaagatgaagatttaaatgttgctgaaatcgctgacgaagtttatatggaagtgatcgtaggagaggaggatgctgcagcagcagcggcagccgccgccgtgcacgagcagcaaatggatgacaatgaaatcaaaaccttcatgccgattgcatgggcagcagcttatggtaataattctgatggaattgaaaaccggaatggcactgcaagtgccctcttgcacatagatgagtctgctggcctcggcagactggctaaacaaaaaccaaagaaaaggagaagacctgattccaggcagtaccaaacagcaataattattggccctgatggacatcctttgactgtctatccttgcatgatttgtgggaagaagtttaagtcgagaggttttttgaaaaggcacatgaaaaaccatcccgaacaccttgccaagaagaaataccgctgtactgactgtgattacactaccaacaagaagataagtttacacaaccacctggagagccacaagctgaccagcaaggcagagaaggccattgaatgcgatgagtgtgggaagcatttctctcatgcaggggctttgtttactcacaaaatggtgcataaggaaaaaggagccaacaaaatgcacaagtgtaaattctgtgaatacgagacagctgaacaagggttattgaatcgccacctcttggcagtccacagcaagaactttcctcatatttgtgtggagtgtggtaagggttttcgtcacccgtcagagctcaaaaagcacatgagaatccatactggggagaagccgtaccaatgccagtactgcgaatataggtctgcagactcttctaacttgaaaacgcatgtcaaaactaagcatagtaaagagatgccattcaagtgtgacatttgtcttctgactttctcggataccaaagaggtgcagcaacatgctcttatccaccaagaaagcaaaacacaccagtgtttgcattgcgaccacaagagttcgaactcaagtgatttgaaacgacacataatttcagttcacacgaaagactacccccataagtgtgacatgtgtgataaaggctttcacaggccttcagaactcaagaaacacgtggctgcccacaagggcaaaaaaatgcaccagtgtagacattgtgactttaagattgcagatccatttgttctaagtcgccatattctctcagttcacacaaaggatcttccatttaggtgcaagagatgtagaaagggatttaggcaacagagtgagcttaaaaagcatatgaagacacacagtggcaggaaagtgtatcagtgtgagtactgtgagtatagcactacagatgcctcaggctttaaacggcacgttatttccattcacacgaaagactatcctcaccggtgtgagtactgcaagaaaggcttccgaagaccttcagaaaagaaccagcacataatgcgacatcataaagaagttggcctgccctaacaatacttctacagaacgtttgtagagatattggccttgaagcagaaaattcattttaaagccaatcagtctcattcacatacaatactgtatattgatttatgctgtgtacaaatagaattattacttctagttgacttttttttaaatatacattttgctcagtagtgtgttctgaattctattcagtttgtttaataaatagggaaaactggcaacatgctagttacttttaataaagtaatccctgattctataccgaagttttatatcttagaattttatatttatttaaatatttaccttgcttaccttgatggtactcttctaagaccattaacttaaggtaactttatattggtaactctgaaagtattcatgttgactcatttttttccccatacatttctcacaataaaattgtcagagacatctactaatataaatgggagattttacagtcaggtctaattatcataacatggaagtcatttacttgtcttgcttaatattttcagaccacttgacagtgaaagtttccatttgagctgttgcgtccctggctttgctgagtaaagagcagtggctgggttcgtgtttacttttcaaatatacttcttttggctttctttggattatttacatcttttgtcagcgtagcaaacttttagaaaaccttattgaaaaactgtgcttgctcatgttgtattttgattattctgtctgtgcggcttcatcttggaatggttgtgtgctacaaatgacacttactgaggactgcattttggaatctcctagaggtaactcatggcttataggatcttttgcaactttatgtatgtaaatgtaccctgaattatatatatacacatatatatcatgtacctgtgtgtattgcttattttacatatttatacacacaaccccaagtagtagttgtttaaaatctataatgaaaagtattaaatttacaataacatgaaagatccagggatgcatgagagagcattttgtaagtcatgctcttcagagagactactcaggtgaagaattagaaggaaaataaggacactagtatttttaaagagtaaagatattttcttttaaatatctttggtaattgaaacatagaggttaagatgtttctaggtagaatgttttcatacaatttcacctccatgtctttatgtttttctgaaaagcaaatgagtatccagacatgactcccacagttctctttgagaagcctgagagggaactctgtcttacctagtgagggggatggaaaagaagtgatggctctgtggaccagagaacgggtgctaattatgacttcacactcggcaagttcaggctgatctgttatttctcagttacagttagcaaactttaaaaacttaacactcaagttggctttgattaaaaggtaaagatgtgttttaagtggataaggaaagtctgaggccttatttggaacatcactaagtcttccacaggttttttgtttgtttgtttttttttgttgtttttttttcttaagacggagtcttgctctgttgcccaggctggactgcagtggtgtgatcactgcaacctctgcagctcactgcaacctctgcttcctgggttcaagcaattatctgcctcagcctctcgagtagctgggattacaggcgcccaccaccacgcccggctaattttttgtatttttaatagagatggggtttcaccatcttggccaggctggtcttgaaccctgacctcgtgatccacctgcctcggccttccatagtgctgggtttacaggcgtgagccaccgtgcccagacaccacataggtctgaatcagtgtcatacattcataaaacaaactcggttaattagaacttggttatgttaagacgaatctgggagaacagaaaacagtttttggggtcccttcagttggctattggtccgtatgcatctagcacattgtaggagatttagaaattgtcttcccacccgatagctgccttgtcacctcattatggtgctccatcccctgtgtgcttaggtttttacctttcatctttctctttgccattgatgtttgtattcaagagttatatttttagggttagaaatcaaaatatttggtgtttggcaaacctctgaagtgctagactgatttagtctagttttaaaccaagtgctttaggcaggtgtgaactccagcccaaatgccagtcaaagtcaaggcatgggttttcctagcctatcttataggaaattcctgtaccttcttggcccccataatgtgttttttttttttttttttttttaaactaacttacaattttgtgatccgtgattcattgccctgcgattcttgaaagctctgtctgtttttttgtgagaacctttaaaatctcccttaatttttattttcccagaaataatgtaaaaacacttaaatgaaagtggaaatgtattaattttaaatcctataaaattaatacagaaaatataaatgattgggtcatttaactatatttttttaaataaactgaaagataaagaacacaacacttcacacattttatatttctcttacatactccggaatcatacacagttctttttaaagcacaacattaaaacctttaaaaggtatttaagggtttggtcaagtgaatatgataaaacatacttgtctgtataaagagaaaatgaaattgtagtcactgttatgtactgacattagttacaacctagttttaattcttaaaacaattttgattagcaaagctaaaaaaaaatggatgtttcagttaaatgttttaaagaggtacagatttttacaaggacataatataagttattgttctgtagaaatatcctattaaatattgtatgtccctccctctgtacactttgtaaagaaagtaaaatacataaaaagaaaatcatatagggatgtgtgacattattgtaattgtgtacttgagaataacgtgcaaaaataaaaatcagaatattttcctgttattgaatgtttagtctatttgataccagtactaagttaatgctttttctcaaggaaaaaaaatgtacagtttttgtaaacctaataaacatcaaaagcagtggattattttcatccccccatttcttaatttctttttcacagcagtggaatgcaaagtgcttgattgctttgaattttgtgactcggatgcaaatactggtaatatttcagttctgtgaatttgcaagtaatatttcagagaagttaagaggtgattggtgagtcctttgatgagcatgtccttggaattcattttttcttttatcttcataaaggatttgttttattagcatctccaattcccctgagataaattactcatgcataaagtggtttttgagagcacttaaagttcatttcagtattaatttacagcatatttaatcagtggggactgttaccacctccacaacagaaatcatgccctcgagttaccccactgcgcccagtttagaggactagtagatgctaacatactagggaatggtcattgccacagttaaaaatcggcagttaagtaaatgtcaggagtcaaaagagatagagttgtgccatctttgattttatagacaagattctgcagttcttccaactgtatgaacaaacgtttgcctaatagttgaaacaataaattaaaattttaggtaaatgacgaagggaatgtggtgaatgtcactgtccagagccataaatcagacaaaaccatacatagcatgctgaaaaacttttgtaatggaacacccaacaaatgacacctaacctgtctgtgatccaacaagtccgataacatgctgctgtatttgtattctctgggaatctcagtattaataatttcatttcccacaaattctagcattcatgtaaggaaaaacatggctaatcaatatcttaaaggggcaatctttcagagcagtggttttcaaagtatggccggacagcattggcagcatcttaatctcctgggactttgttaaaaatgcaaattctcagccccaccctagtcctactgaattgggaaactggcgtgggacccagcagtctttgttttaacatgttctccaagtgattctgatgcctgttcaaacttgggaaacacttttagagcacttgaggaacctaaaagatgactggttcagcattttgtgtggtagataagaaagaaattatcacaaaaaatcagaaatgaacagtgagagaaaaataggaccccagacagtttataccttccatttgctgttttaaaagtgtgagcctgccaagtcaacaagtatgcctttagcgcacatgtaaatagcctgcacttcctaaatctcgtgtggcctcccatggttacattcttcaaaggtaaactgagttgagaggaagattcagcatttaaaagagaagggttgaaaaagattgtgtgtgtgtgtgtgtgtgtttaattggcccagggttacttaaataaatcataaccattttgccacattctgtaactgtttagctaaggtcaaattaagtttaccctatggattttgtttcatcttttgtttcgtgtatatactgtttgcctttttcataaaaatcttggatttgttatatattgttcctgttatttttgacatctttgctattgtaaataaattactattttgttttaagtta

SEQ ID NO: 23484 - DNA, 2996 bp, Homo sapiens
  misc_feature 1..2996: note = ENST00000304543
  source 1..2996: mol_type = unassigned DNA; mol_type = unassigned DNA
gtccggttcttgctatattgccccaggctggtctcgaactcctgggctcaagccgttctcccgcctcccactgcccgcctgtcactgccgtctgttccctgagctgtgctttacgctgggaaagacatagaagaactattaagaagatagaattgttttgctgcgcagtacagcaacagtggatgttcaagattaagattagagtcaagttgtgtgattaagacaggagctgtgactgatgagaattaaaggccatggatgaagatgggcttgaattacaacaagagccaaactcattttttgatgcaacaggagctgatggtacacacatggatggtgatcaaattgttgtggaagtacaagaaactgtttttgtttcagatgttgtggattcagacataactgtgcataactttgttcctgatgacccagattcagttgtaatccaagatgttattgaggacgttgttatagaagatgttcagtgcccagatatcatggaagaagcagatgtgtctgaaacggtcatcattcctgagcaagtgctggactcagatgtaactgaagaagtttctttagcacattgcacagtcccagatgatgttttagcttctgacattacttcagcctcaatgtctatgccagaacacgtcttgacgggtgattctatacatgtgtctgacgttggacatgttggacatgttggacatgttgaacatgtggttcatgatagtgtagtggaagcagaaattgtcactgatcctctgactaccgacgtagtttcagaagaagtattggtagcagactgtgcctctgaagcagtcatagatgccaatgggatccctgtggaccagcaggatgatgacaaaggcaactgtgaggactaccttatgatttccttggatgatgctggcaaaatagaacacgatggttcttctggaatgaccatggacacagagtcggaaattgatccttgtaaagtggatggcacttgccctgaggtcatcaaggtgtacatttttaaagctgaccctggagaagatgacttaggtggaactgtagacattgtggagagtgagcctgagaatgatcatggagttgaactgcttgatcagaacagcagtattcgtgttcccagggaaaagatggtttatatgactgtcaatgactctcagccagaagatgaagatttaaatgttgctgaaatcgctgacgaagtttatatggaagtgatcgtaggagaggaggatgctgcagcagcagcggcagccgccgccgtgcacgagcagcaaatggatgacaatgaaatcaaaaccttcatgccgattgcatgggcagcagcttatggtaataattctgatggaattgaaaaccggaatggcactgcaagtgccctcttgcacatagatgagtctgctggcctcggcagactggctaaacaaaaaccaaagaaaaggagaagacctgattccaggcagtaccaaacagcaataattattggccctgatggacatcctttgactgtctatccttgcatgatttgtgggaagaagtttaagtcgagaggttttttgaaaaggcacatgaaaaaccatcccgaacaccttgccaagaagaaataccgctgtactgactgtgattacactaccaacaagaagataagtttacacaaccacctggagagccacaagctgaccagcaaggcagagaaggccattgaatgcgatgagtgtgggaagcatttctctcatgcaggggctttgtttactcacaaaatggtgcataaggaaaaaggagccaacaaaatgcacaagtgtaaattctgtgaatacgagacagctgaacaagggttattgaatcgccacctcttggcagtccacagcaagaactttcctcatatttgtgtggagtgtggtaagggttttcgtcacccgtcagagctcaaaaagcacatgagaatccatactggggagaagccgtaccaatgccagtactgcgaatataggtctgcagactcttctaacttgaaaacgcatgtcaaaactaagcatagtaaagagatgccattcaagtgtgacatttgtcttctgactttctcggataccaaagaggtgcagcaacatgctcttatccaccaagaaagcaaaacacaccagtgtttgcattgcgaccacaagagttcgaactcaagtgatttgaaacgacacataatttcagttcacacgaaagactacccccataagtgtgacatgtgtgataaaggctttcacaggccttcagaactcaagaaacacgtggctgcccacaagggcaaaaaaatgcaccagtgtagacattgtgactttaagattgcagatccatttgttctaagtcgccatattctctcagttcacacaaaggatcttccatttaggtgcaagagatgtagaaagggatttaggcaacagagtgagcttaaaaagcatatgaagacacacagtggcaggaaagtgtatcagtgtgagtactgtgagtatagcactacagatgcctcaggctttaaacggcacgttatttccattcacacgaaagactatcctcaccggtgtgagtactgcaagaaaggcttccgaagaccttcagaaaagaaccagcacataatgcgacatcataaagaagttggcctgccctaacaatacttctacagaacgtttgtagagatattggccttgaagcagaaaattcattttaaagccaatcagtctcattcacatacaatactgtatattgatttatgctgtgtacaaatagaattattacttctagttgacttttttttaaatatacattttgctcagtagtgtgttctgaattctattcagtttgtttaataaatagggaaaactggcaacatgctagttacttttaataaagtaatccctgattctataccgaagttttatatcttagaattttatatttatttaaatatttaccttgcttaccttgatggtact

SEQ ID NO: 23485 - DNA, 673 bp, Homo sapiens
  misc_feature 1..673: note = ENST00000459724
  source 1..673: mol_type = unassigned DNA; mol_type = unassigned DNA
ggcctggtcggcggcccgcaaggcgccctcccgcgctaggccgggcggcgtggcgcgcggcgccgagcaggccccgaggaggccgcagttaggcccggggaggagcccggctgccccgagcggcggcggaggcgcgctccgtaagcgggcgggggttgggggagggtcgcccggttgtgccggaggcggtcgaggggccccgggtcggctccgcggccgacctggggcaccgcgccggggtgaggcctggcgaggaggcgaaggctgcaggcgtgagtggatgatgctggcaaaatagaacacgatggttcttctggaatgaccatggacacagagtcggaaattgatccttgtaaagtggatggcacttgccctgaggtcatcaaggtgtacatttttaaagctgaccctggagaagatgacttaggtggaactgtagacattgtggagagtgagcctgagaatgatcatggagttgaactgcttgatcagaacagcagtattcgtgttcccagggaaaagatggtttatatgactgtcaatgactctcagccagaagatgaagatttaagtaataattctgatggaattgaaaaccggaatggcactgcaagtgccctcttgcacatagatgagtctgctggcctcggcagactggctaaacaaaaaccaa

SEQ ID NO: 23486 - DNA, 367 bp, Homo sapiens
  misc_feature 1..367: note = ENST00000480195
  source 1..367: mol_type = unassigned DNA; mol_type = unassigned DNA
ggtagaggtggaggtggagaaaggacgtttcaagggtgaagcttcttcagtaaacactgggaaagacatagaagaactattaagaagatagaattgttttgctgcgcagtacagcaacagtggatgttcaagattaagattagagtcaagttgtgtgattaagacaggagctgtgactgatgagaattaaaggccatggatgaagatgggcttgaattacaacaagagccaaactcattttttgatgcaacaggtataactacttgaattgttccacttcccatctaccagatttggagttggttgtcatcaatgaattgctagaactctcacattgatcattcacaggttatcttgttatcctgtc

SEQ ID NO: 23487 - DNA, 2906 bp, Homo sapiens
  misc_feature 1..2906: note = ENST00000338565
  source 1..2906: mol_type = unassigned DNA; mol_type = unassigned DNA
gagctgtgactgatgagaattaaaggccatggatgaagatgggcttgaattacaacaagagccaaactcattttttgatgcaacaggagctgatggtacacacatggatggtgatcaaattgttgtggaagtacaagaaactgtttttgtttcagatgttgtggattcagacataactgtgcataactttgttcctgatgacccagattcagttgtaatccaagatgttattgaggacgttgttatagaagatgttcagtgcccagatatcatggaagaagcagatgtgtctgaaacggtcatcattcctgagcaagtgctggactcagatgtaactgaagaagtttctttagcacattgcacagtcccagatgatgttttagcttctgacattacttcagcctcaatgtctatgccagaacacgtcttgacgggtgattctatacatgtgtctgacgttggacatgttggacatgttggacatgttgaacatgtggttcatgatagtgtagtggaagcagaaattgtcactgatcctctgactaccgacgtagtttcagaagaagtattggtagcagactgtgcctctgaagcagtcatagatgccaatgggatccctgtggaccagcaggatgatgacaaaggcaactgtgaggactaccttatgatttcctgtggaactgtagacattgtggagagtgagcctgagaatgatcatggagttgaactgcttgatcagaacagcagtattcgtgttcccagggaaaagatggtttatatgactgtcaatgactctcagccagaagatgaagatttaaatgttgctgaaatcgctgacgaagtttatatggaagtgatcgtaggagaggaggatgctgcagcagcagcggcagccgccgccgtgcacgagcagcaaatggatgacaatgaaatcaaaaccttcatgccgattgcatgggcagcagcttatggtaataattctgatggaattgaaaaccggaatggcactgcaagtgccctcttgcacatagatgagtctgctggcctcggcagactggctaaacaaaaaccaaagaaaaggagaagacctgattccaggcagtaccaaacagcaataattattggccctgatggacatcctttgactgtctatccttgcatgatttgtgggaagaagtttaagtcgagaggttttttgaaaaggcacatgaaaaaccatcccgaacaccttgccaagaagaaataccgctgtactgactgtgattacactaccaacaagaagataagtttacacaaccacctggagagccacaagctgaccagcaaggcagagaaggccattgaatgcgatgagtgtgggaagcatttctctcatgcaggggctttgtttactcacaaaatggtgcataaggaaaaaggagccaacaaaatgcacaagtgtaaattctgtgaatacgagacagctgaacaagggttattgaatcgccacctcttggcagtccacagcaagaactttcctcatatttgtgtggagtgtggtaagggttttcgtcacccgtcagagctcaaaaagcacatgagaatccatactggggagaagccgtaccaatgccagtactgcgaatataggtctgcagactcttctaacttgaaaacgcatgtcaaaactaagcatagtaaagagatgccattcaagtgtgacatttgtcttctgactttctcggataccaaagaggtgcagcaacatgctcttatccaccaagaaagcaaaacacaccagtgtttgcattgcgaccacaagagttcgaactcaagtgatttgaaacgacacataatttcagttcacacgaaagactacccccataagtgtgacatgtgtgataaaggctttcacaggccttcagaactcaagaaacacgtggctgcccacaagggcaaaaaaatgcaccagtgtagacattgtgactttaagattgcagatccatttgttctaagtcgccatattctctcagttcacacaaaggatcttccatttaggtgcaagagatgtagaaagggatttaggcaacagagtgagcttaaaaagcatatgaagacacacagtggcaggaaagtgtatcagtgtgagtactgtgagtatagcactacagatgcctcaggctttaaacggcacgttatttccattcacacgaaagactatcctcaccggtgtgagtactgcaagaaaggcttccgaagaccttcagaaaagaaccagcacataatgcgacatcataaagaagttggcctgccctaacaatacttctacagaacgtttgtagagatattggccttgaagcagaaaattcattttaaagccaatcagtctcattcacatacaatactgtatattgatttatgctgtgtacaaatagaattattacttctagttgacttttttttaaatatacattttgctcagtagtgtgttctgaattctattcagtttgtttaataaatagggaaaactggcaacatgctagttacttttaataaagtaatccctgattctataccgaagttttatatcttagaattttatatttatttaaatatttaccttgcttaccttgatggtactcttctaagaccattaacttaaggtaactttatattggtaactctgaaagtattcatgttgactcatttttttccccatacatttctcacaataaaattgtcagagacatctactaatataaatgggagattttacagtcaggtctaattatcataacatggaagtcatttacttgtcttgcttaatattttcagaccacttgacagtgaaagtttccatttgagctgttgcgtccctggctttgctgagtaaagagcagtggctgggttcgtgtttacttttcaaa

SEQ ID NO: 23488 - DNA, 651 bp, Homo sapiens
  misc_feature 1..651: note = ENST00000474385
  source 1..651: mol_type = unassigned DNA; mol_type = unassigned DNA
ggcttgaattacaacaagagccaaactcattttttgatgcaacagtttttcagaacacttcccatacattcccatttgatcatcaccacagtcctgtgagattcagaggatgatttctaaatttctatagccatagatggagcatattggtggtatattgcaccagaacaaaaagggaagcgtgtgaagggagaaaggaaaaaaaatagaagtaaaagaaacacatgggagagatggaaagaagaacaaatatgagttgaggagagggaggtggagcaaaaaggagctgatggtacacacatggatggtgatcaaattgttgtggaagtacaagaaactgtttttgtttcagatgttgtggattcagacataactgtgcataactttgttcctgatgacccagattcagttgtaatccaagatgttattgaggacgttgttatagaagatgttcagtgcccagatatcatggaagaagcagatgtgtctgaaacggtcatcattcctgagcaagtgctggactcagatgtaactgaagaagtttctttagcacattgcacagtcccagatgatgttttagcttctgacattacttcagcctcaatgtctatgccagaacacgtcttgacgggtgattctatacatgtgtct

SEQ ID NO: 23489 - DNA, 7513 bp, Homo sapiens
  misc_feature 1..7513: note = ENST00000379188
  source 1..7513: mol_type = unassigned DNA; mol_type = unassigned DNA
ggcccagtgctccagagaaaggccggcctgcagcacccgccaccgtcgccggccgcccgcacgtccgtccggagctgtgactgatgagaattaaaggccatggatgaagatgggcttgaattacaacaagagccaaactcattttttgatgcaacagacagggtctcgttctgtcacccaggctggagcacagtggcgccatctgggtccactgcaacctccgcctcccaggctcaagtgatctgctcagcttcccgagtaactggggctacaggagctgatggtacacacatggatggtgatcaaattgttgtggaagtacaagaaactgtttttgtttcagatgttgtggattcagacataactgtgcataactttgttcctgatgacccagattcagttgtaatccaagatgttattgaggacgttgttatagaagatgttcagtgcccagatatcatggaagaagcagatgtgtctgaaacggtcatcattcctgagcaagtgctggactcagatgtaactgaagaagtttctttagcacattgcacagtcccagatgatgttttagcttctgacattacttcagcctcaatgtctatgccagaacacgtcttgacgggtgattctatacatgtgtctgacgttggacatgttggacatgttggacatgttgaacatgtggttcatgatagtgtagtggaagcagaaattgtcactgatcctctgactaccgacgtagtttcagaagaagtattggtagcagactgtgcctctgaagcagtcatagatgccaatgggatccctgtggaccagcaggatgatgacaaaggcaactgtgaggactaccttatgatttccttggatgatgctggcaaaatagaacacgatggttcttctggaatgaccatggacacagagtcggaaattgatccttgtaaagtggatggcacttgccctgaggtcatcaaggtgtacatttttaaagctgaccctggagaagatgacttaggtggaactgtagacattgtggagagtgagcctgagaatgatcatggagttgaactgcttgatcagaacagcagtattcgtgttcccagggaaaagatggtttatatgactgtcaatgactctcagccagaagatgaagatttaaatgttgctgaaatcgctgacgaagtttatatggaagtgatcgtaggagaggaggatgctgcagcagcagcggcagccgccgccgtgcacgagcagcaaatggatgacaatgaaatcaaaaccttcatgccgattgcatgggcagcagcttatggtaataattctgatggaattgaaaaccggaatggcactgcaagtgccctcttgcacatagatgagtctgctggcctcggcagactggctaaacaaaaaccaaagaaaaggagaagacctgattccaggcagtaccaaacagcaataattattggccctgatggacatcctttgactgtctatccttgcatgatttgtgggaagaagtttaagtcgagaggttttttgaaaaggcacatgaaaaaccatcccgaacaccttgccaagaagaaataccgctgtactgactgtgattacactaccaacaagaagataagtttacacaaccacctggagagccacaagctgaccagcaaggcagagaaggccattgaatgcgatgagtgtgggaagcatttctctcatgcaggggctttgtttactcacaaaatggtgcataaggaaaaaggagccaacaaaatgcacaagtgtaaattctgtgaatacgagacagctgaacaagggttattgaatcgccacctcttggcagtccacagcaagaactttcctcatatttgtgtggagtgtggtaagggttttcgtcacccgtcagagctcaaaaagcacatgagaatccatactggggagaagccgtaccaatgccagtactgcgaatataggtctgcagactcttctaacttgaaaacgcatgtcaaaactaagcatagtaaagagatgccattcaagtgtgacatttgtcttctgactttctcggataccaaagaggtgcagcaacatgctcttatccaccaagaaagcaaaacacaccagtgtttgcattgcgaccacaagagttcgaactcaagtgatttgaaacgacacataatttcagttcacacgaaagactacccccataagtgtgacatgtgtgataaaggctttcacaggccttcagaactcaagaaacacgtggctgcccacaagggcaaaaaaatgcaccagtgtagacattgtgactttaagattgcagatccatttgttctaagtcgccatattctctcagttcacacaaaggatcttccatttaggtgcaagagatgtagaaagggatttaggcaacagagtgagcttaaaaagcatatgaagacacacagtggcaggaaagtgtatcagtgtgagtactgtgagtatagcactacagatgcctcaggctttaaacggcacgttatttccattcacacgaaagactatcctcaccggtgtgagtactgcaagaaaggcttccgaagaccttcagaaaagaaccagcacataatgcgacatcataaagaagttggcctgccctaacaatacttctacagaacgtttgtagagatattggccttgaagcagaaaattcattttaaagccaatcagtctcattcacatacaatactgtatattgatttatgctgtgtacaaatagaattattacttctagttgacttttttttaaatatacattttgctcagtagtgtgttctgaattctattcagtttgtttaataaatagggaaaactggcaacatgctagttacttttaataaagtaatccctgattctataccgaagttttatatcttagaattttatatttatttaaatatttaccttgcttaccttgatggtactcttctaagaccattaacttaaggtaactttatattggtaactctgaaagtattcatgttgactcatttttttccccatacatttctcacaataaaattgtcagagacatctactaatataaatgggagattttacagtcaggtctaattatcataacatggaagtcatttacttgtcttgcttaatattttcagaccacttgacagtgaaagtttccatttgagctgttgcgtccctggctttgctgagtaaagagcagtggctgggttcgtgtttacttttcaaatatacttcttttggctttctttggattatttacatcttttgtcagcgtagcaaacttttagaaaaccttattgaaaaactgtgcttgctcatgttgtattttgattattctgtctgtgcggcttcatcttggaatggttgtgtgctacaaatgacacttactgaggactgcattttggaatctcctagaggtaactcatggcttataggatcttttgcaactttatgtatgtaaatgtaccctgaattatatatatacacatatatatcatgtacctgtgtgtattgcttattttacatatttatacacacaaccccaagtagtagttgtttaaaatctataatgaaaagtattaaatttacaataacatgaaagatccagggatgcatgagagagcattttgtaagtcatgctcttcagagagactactcaggtgaagaattagaaggaaaataaggacactagtatttttaaagagtaaagatattttcttttaaatatctttggtaattgaaacatagaggttaagatgtttctaggtagaatgttttcatacaatttcacctccatgtctttatgtttttctgaaaagcaaatgagtatccagacatgactcccacagttctctttgagaagcctgagagggaactctgtcttacctagtgagggggatggaaaagaagtgatggctctgtggaccagagaacgggtgctaattatgacttcacactcggcaagttcaggctgatctgttatttctcagttacagttagcaaactttaaaaacttaacactcaagttggctttgattaaaaggtaaagatgtgttttaagtggataaggaaagtctgaggccttatttggaacatcactaagtcttccacaggttttttgtttgtttgtttttttttgttgtttttttttcttaagacggagtcttgctctgttgcccaggctggactgcagtggtgtgatcactgcaacctctgcagctcactgcaacctctgcttcctgggttcaagcaattatctgcctcagcctctcgagtagctgggattacaggcgcccaccaccacgcccggctaattttttgtatttttaatagagatggggtttcaccatcttggccaggctggtcttgaaccctgacctcgtgatccacctgcctcggccttccatagtgctgggtttacaggcgtgagccaccgtgcccagacaccacataggtctgaatcagtgtcatacattcataaaacaaactcggttaattagaacttggttatgttaagacgaatctgggagaacagaaaacagtttttggggtcccttcagttggctattggtccgtatgcatctagcacattgtaggagatttagaaattgtcttcccacccgatagctgccttgtcacctcattatggtgctccatcccctgtgtgcttaggtttttacctttcatctttctctttgccattgatgtttgtattcaagagttatatttttagggttagaaatcaaaatatttggtgtttggcaaacctctgaagtgctagactgatttagtctagttttaaaccaagtgctttaggcaggtgtgaactccagcccaaatgccagtcaaagtcaaggcatgggttttcctagcctatcttataggaaattcctgtaccttcttggcccccataatgtgttttttttttttttttttttttaaactaacttacaattttgtgatccgtgattcattgccctgcgattcttgaaagctctgtctgtttttttgtgagaacctttaaaatctcccttaatttttattttcccagaaataatgtaaaaacacttaaatgaaagtggaaatgtattaattttaaatcctataaaattaatacagaaaatataaatgattgggtcatttaactatatttttttaaataaactgaaagataaagaacacaacacttcacacattttatatttctcttacatactccggaatcatacacagttctttttaaagcacaacattaaaacctttaaaaggtatttaagggtttggtcaagtgaatatgataaaacatacttgtctgtataaagagaaaatgaaattgtagtcactgttatgtactgacattagttacaacctagttttaattcttaaaacaattttgattagcaaagctaaaaaaaaatggatgtttcagttaaatgttttaaagaggtacagatttttacaaggacataatataagttattgttctgtagaaatatcctattaaatattgtatgtccctccctctgtacactttgtaaagaaagtaaaatacataaaaagaaaatcatatagggatgtgtgacattattgtaattgtgtacttgagaataacgtgcaaaaataaaaatcagaatattttcctgttattgaatgtttagtctatttgataccagtactaagttaatgctttttctcaaggaaaaaaaatgtacagtttttgtaaacctaataaacatcaaaagcagtggattattttcatccccccatttcttaatttctttttcacagcagtggaatgcaaagtgcttgattgctttgaattttgtgactcggatgcaaatactggtaatatttcagttctgtgaatttgcaagtaatatttcagagaagttaagaggtgattggtgagtcctttgatgagcatgtccttggaattcattttttcttttatcttcataaaggatttgttttattagcatctccaattcccctgagataaattactcatgcataaagtggtttttgagagcacttaaagttcatttcagtattaatttacagcatatttaatcagtggggactgttaccacctccacaacagaaatcatgccctcgagttaccccactgcgcccagtttagaggactagtagatgctaacatactagggaatggtcattgccacagttaaaaatcggcagttaagtaaatgtcaggagtcaaaagagatagagttgtgccatctttgattttatagacaagattctgcagttcttccaactgtatgaacaaacgtttgcctaatagttgaaacaataaattaaaattttaggtaaatgacgaagggaatgtggtgaatgtcactgtccagagccataaatcagacaaaaccatacatagcatgctgaaaaacttttgtaatggaacacccaacaaatgacacctaacctgtctgtgatccaacaagtccgataacatgctgctgtatttgtattctctgggaatctcagtattaataatttcatttcccacaaattctagcattcatgtaaggaaaaacatggctaatcaatatcttaaaggggcaatctttcagagcagtggttttcaaagtatggccggacagcattggcagcatcttaatctcctgggactttgttaaaaatgcaaattctcagccccaccctagtcctactgaattgggaaactggcgtgggacccagcagtctttgttttaacatgttctccaagtgattctgatgcctgttcaaacttgggaaacacttttagagcacttgaggaacctaaaagatgactggttcagcattttgtgtggtagataagaaagaaattatcacaaaaaatcagaaatgaacagtgagagaaaaataggaccccagacagtttataccttccatttgctgttttaaaagtgtgagcctgccaagtcaacaagtatgcctttagcgcacatgtaaatagcctgcacttcctaaatctcgtgtggcctcccatggttacattcttcaaaggtaaactgagttgagaggaagattcagcatttaaaagagaagggttgaaaaagattgtgtgtgtgtgtgtgtgtgtttaattggcccagggttacttaaataaatcataaccattttgccacattctgtaactgtttagctaaggtcaaattaagtttaccctatggattttgtttcatcttttgtttcgtgtatatactgtttgcctttttcataaaaatcttggatttgttatatattgttcctgttatttttgacatctttgctattgtaaataaattactattttgttttaagttaccctagtggagtgttggctatagacaaggtatatactcgaaacgaggagacttaaatcacacagttaatgaattcccaacttgtttgaagctggaggtgattcgactcccttcagtggttcaacactaataatagcaccaaggaacatgtcactggtgcatatagg

SEQ ID NO: 23490 - DNA, 6801 bp, Homo sapiens
  misc_feature 1..6801: note = ENST00000539115
  source 1..6801: mol_type = unassigned DNA; mol_type = unassigned DNA
cggggagctgggccgctttttgtcagctccgagctcggcccctcctccctccctccgcccgccccaccagccggagcccggcccagtgctccagagaaaggccggcctgcagcacccgccaccgtcgccggccgcccgcacgtccgtccgtggatgatgctggcaaaatagaacacgatggttcttctggaatgaccatggacacagagtcggaaattgatccttgtaaagtggatggcacttgccctgaggtcatcaaggtgtacatttttaaagctgaccctggagaagatgacttaggtggaactgtagacattgtggagagtgagcctgagaatgatcatggagttgaactgcttgatcagaacagcagtattcgtgttcccagggaaaagatggtttatatgactgtcaatgactctcagccagaagatgaagatttaaatgttgctgaaatcgctgacgaagtttatatggaagtgatcgtaggagaggaggatgctgcagcagcagcggcagccgccgccgtgcacgagcagcaaatggatgacaatgaaatcaaaaccttcatgccgattgcatgggcagcagcttatggtaataattctgatggaattgaaaaccggaatggcactgcaagtgccctcttgcacatagatgagtctgctggcctcggcagactggctaaacaaaaaccaaagaaaaggagaagacctgattccaggcagtaccaaacagcaataattattggccctgatggacatcctttgactgtctatccttgcatgatttgtgggaagaagtttaagtcgagaggttttttgaaaaggcacatgaaaaaccatcccgaacaccttgccaagaagaaataccgctgtactgactgtgattacactaccaacaagaagataagtttacacaaccacctggagagccacaagctgaccagcaaggcagagaaggccattgaatgcgatgagtgtgggaagcatttctctcatgcaggggctttgtttactcacaaaatggtgcataaggaaaaaggagccaacaaaatgcacaagtgtaaattctgtgaatacgagacagctgaacaagggttattgaatcgccacctcttggcagtccacagcaagaactttcctcatatttgtgtggagtgtggtaagggttttcgtcacccgtcagagctcaaaaagcacatgagaatccatactggggagaagccgtaccaatgccagtactgcgaatataggtctgcagactcttctaacttgaaaacgcatgtcaaaactaagcatagtaaagagatgccattcaagtgtgacatttgtcttctgactttctcggataccaaagaggtgcagcaacatgctcttatccaccaagaaagcaaaacacaccagtgtttgcattgcgaccacaagagttcgaactcaagtgatttgaaacgacacataatttcagttcacacgaaagactacccccataagtgtgacatgtgtgataaaggctttcacaggccttcagaactcaagaaacacgtggctgcccacaagggcaaaaaaatgcaccagtgtagacattgtgactttaagattgcagatccatttgttctaagtcgccatattctctcagttcacacaaaggatcttccatttaggtgcaagagatgtagaaagggatttaggcaacagagtgagcttaaaaagcatatgaagacacacagtggcaggaaagtgtatcagtgtgagtactgtgagtatagcactacagatgcctcaggctttaaacggcacgttatttccattcacacgaaagactatcctcaccggtgtgagtactgcaagaaaggcttccgaagaccttcagaaaagaaccagcacataatgcgacatcataaagaagttggcctgccctaacaatacttctacagaacgtttgtagagatattggccttgaagcagaaaattcattttaaagccaatcagtctcattcacatacaatactgtatattgatttatgctgtgtacaaatagaattattacttctagttgacttttttttaaatatacattttgctcagtagtgtgttctgaattctattcagtttgtttaataaatagggaaaactggcaacatgctagttacttttaataaagtaatccctgattctataccgaagttttatatcttagaattttatatttatttaaatatttaccttgcttaccttgatggtactcttctaagaccattaacttaaggtaactttatattggtaactctgaaagtattcatgttgactcatttttttccccatacatttctcacaataaaattgtcagagacatctactaatataaatgggagattttacagtcaggtctaattatcataacatggaagtcatttacttgtcttgcttaatattttcagaccacttgacagtgaaagtttccatttgagctgttgcgtccctggctttgctgagtaaagagcagtggctgggttcgtgtttacttttcaaatatacttcttttggctttctttggattatttacatcttttgtcagcgtagcaaacttttagaaaaccttattgaaaaactgtgcttgctcatgttgtattttgattattctgtctgtgcggcttcatcttggaatggttgtgtgctacaaatgacacttactgaggactgcattttggaatctcctagaggtaactcatggcttataggatcttttgcaactttatgtatgtaaatgtaccctgaattatatatatacacatatatatcatgtacctgtgtgtattgcttattttacatatttatacacacaaccccaagtagtagttgtttaaaatctataatgaaaagtattaaatttacaataacatgaaagatccagggatgcatgagagagcattttgtaagtcatgctcttcagagagactactcaggtgaagaattagaaggaaaataaggacactagtatttttaaagagtaaagatattttcttttaaatatctttggtaattgaaacatagaggttaagatgtttctaggtagaatgttttcatacaatttcacctccatgtctttatgtttttctgaaaagcaaatgagtatccagacatgactcccacagttctctttgagaagcctgagagggaactctgtcttacctagtgagggggatggaaaagaagtgatggctctgtggaccagagaacgggtgctaattatgacttcacactcggcaagttcaggctgatctgttatttctcagttacagttagcaaactttaaaaacttaacactcaagttggctttgattaaaaggtaaagatgtgttttaagtggataaggaaagtctgaggccttatttggaacatcactaagtcttccacaggttttttgtttgtttgtttttttttgttgtttttttttcttaagacggagtcttgctctgttgcccaggctggactgcagtggtgtgatcactgcaacctctgcagctcactgcaacctctgcttcctgggttcaagcaattatctgcctcagcctctcgagtagctgggattacaggcgcccaccaccacgcccggctaattttttgtatttttaatagagatggggtttcaccatcttggccaggctggtcttgaaccctgacctcgtgatccacctgcctcggccttccatagtgctgggtttacaggcgtgagccaccgtgcccagacaccacataggtctgaatcagtgtcatacattcataaaacaaactcggttaattagaacttggttatgttaagacgaatctgggagaacagaaaacagtttttggggtcccttcagttggctattggtccgtatgcatctagcacattgtaggagatttagaaattgtcttcccacccgatagctgccttgtcacctcattatggtgctccatcccctgtgtgcttaggtttttacctttcatctttctctttgccattgatgtttgtattcaagagttatatttttagggttagaaatcaaaatatttggtgtttggcaaacctctgaagtgctagactgatttagtctagttttaaaccaagtgctttaggcaggtgtgaactccagcccaaatgccagtcaaagtcaaggcatgggttttcctagcctatcttataggaaattcctgtaccttcttggcccccataatgtgttttttttttttttttttttttaaactaacttacaattttgtgatccgtgattcattgccctgcgattcttgaaagctctgtctgtttttttgtgagaacctttaaaatctcccttaatttttattttcccagaaataatgtaaaaacacttaaatgaaagtggaaatgtattaattttaaatcctataaaattaatacagaaaatataaatgattgggtcatttaactatatttttttaaataaactgaaagataaagaacacaacacttcacacattttatatttctcttacatactccggaatcatacacagttctttttaaagcacaacattaaaacctttaaaaggtatttaagggtttggtcaagtgaatatgataaaacatacttgtctgtataaagagaaaatgaaattgtagtcactgttatgtactgacattagttacaacctagttttaattcttaaaacaattttgattagcaaagctaaaaaaaaatggatgtttcagttaaatgttttaaagaggtacagatttttacaaggacataatataagttattgttctgtagaaatatcctattaaatattgtatgtccctccctctgtacactttgtaaagaaagtaaaatacataaaaagaaaatcatatagggatgtgtgacattattgtaattgtgtacttgagaataacgtgcaaaaataaaaatcagaatattttcctgttattgaatgtttagtctatttgataccagtactaagttaatgctttttctcaaggaaaaaaaatgtacagtttttgtaaacctaataaacatcaaaagcagtggattattttcatccccccatttcttaatttctttttcacagcagtggaatgcaaagtgcttgattgctttgaattttgtgactcggatgcaaatactggtaatatttcagttctgtgaatttgcaagtaatatttcagagaagttaagaggtgattggtgagtcctttgatgagcatgtccttggaattcattttttcttttatcttcataaaggatttgttttattagcatctccaattcccctgagataaattactcatgcataaagtggtttttgagagcacttaaagttcatttcagtattaatttacagcatatttaatcagtggggactgttaccacctccacaacagaaatcatgccctcgagttaccccactgcgcccagtttagaggactagtagatgctaacatactagggaatggtcattgccacagttaaaaatcggcagttaagtaaatgtcaggagtcaaaagagatagagttgtgccatctttgattttatagacaagattctgcagttcttccaactgtatgaacaaacgtttgcctaatagttgaaacaataaattaaaattttaggtaaatgacgaagggaatgtggtgaatgtcactgtccagagccataaatcagacaaaaccatacatagcatgctgaaaaacttttgtaatggaacacccaacaaatgacacctaacctgtctgtgatccaacaagtccgataacatgctgctgtatttgtattctctgggaatctcagtattaataatttcatttcccacaaattctagcattcatgtaaggaaaaacatggctaatcaatatcttaaaggggcaatctttcagagcagtggttttcaaagtatggccggacagcattggcagcatcttaatctcctgggactttgttaaaaatgcaaattctcagccccaccctagtcctactgaattgggaaactggcgtgggacccagcagtctttgttttaacatgttctccaagtgattctgatgcctgttcaaacttgggaaacacttttagagcacttgaggaacctaaaagatgactggttcagcattttgtgtggtagataagaaagaaattatcacaaaaaatcagaaatgaacagtgagagaaaaataggaccccagacagtttataccttccatttgctgttttaaaagtgtgagcctgccaagtcaacaagtatgcctttagcgcacatgtaaatagcctgcacttcctaaatctcgtgtggcctcccatggttacattcttcaaaggtaaactgagttgagaggaagattcagcatttaaaagagaagggttgaaaaagattgtgtgtgtgtgtgtgtgtgtttaattggcccagggttacttaaataaatcataaccattttgccacattctgtaactgtttagctaaggtcaaattaagtttaccctatggattttgtttcatcttttgtttcgtgtatatactgtttgcctttttcataaaaatcttggatttgttatatattgttcctgttatttttgacatctttgctattgtaaataaattactattttgttttaagttaccctagtggagtgttggctatagacaaggtatatactcgaaacgaggagacttaaatcacacagttaatgaattcccaacttgtttgaagctggaggtgattcgactcccttcagtggttcaacactaataatagcaccaaggaacatgtcactggtgcatatagg

SEQ ID NO: 23491 - DNA, 5113 bp, Homo sapiens
  misc_feature 1..5113: note = ENST00000383052
  source 1..5113: mol_type = unassigned DNA; mol_type = unassigned DNA
gacggcgggcccgtgccggggagctgggccgctttttgtcagctccgaactcggcccctcctccctccctccgcccgccctaccagccggagcccggcccagtgctccagagaaaggccgtcctgcagcacccgccgctgtcgccgaccgcccgcacatccgtcgggagctgtgactaatgagaattaaaggccatggatgaagatgaatttgaattgcagccacaagagccaaactcattttttgatggaataggagctgatgctacacacatggatggtgatcagattgttgtggaaatacaagaagcagtttttgtttctaatattgtggattctgacataactgtgcataactttgttcctgatgacccagactcagttgtaatccaagatgttgttgaagatgttgtcatagaggaggatgttcagtgctcagatatcttagaagaggcagatgtatctgaaaatgtcatcattcctgagcaagtgctggactcagatgtaactgaagaagtttctttaccacactgcacagtcccagatgatgttttagcttctgacattacttcaacctcaatgtctatgccagaacatgttttaacgagtgaatccatgcatgtgtgtgacattggacatgttgaacatatggtgcatgatagtgtagtggaagcagaaatcattactgatcctctgacgagtgacatagtttcagaagaagtattggtagcagactgtgcccctgaagcagtcatagatgccagcgggatctcagtggaccagcaagataatgacaaagccagctgtgaggactacctaatgatttcgttggatgatgctggcaaaatagaacatgatggttccactggagtgaccatcgatgcagaatcagaaatggatccttgtaaagtggatagcacttgtcctgaagtcatcaaggtgtacatttttaaagctgaccctggagaagatgacttaggtggaactgtagacattgtggagagtgaacctgaaaatgatcatggagttgaactacttgatcagaacagcagtattcgtgttcccagggaaaagatggtttatatgactgtcaatgactctcaacaagaagatgaagatttaaatgttgctgaaattgctgatgaagtttatatggaagtgatcgtaggagaggaggatgctgctgttgcagcagcagcagctgctgtgcatgagcagcaaattgatgaggatgaaatgaaaaccttcgtaccaattgcatgggcagcagcttatggtaataattctgatggaattgaaaaccggaatggcactgcaagtgccctcttgcacatagatgagtctgctggccttggcagactggctaaacagaaaccaaagaaaaagagaagacctgattccaggcagtaccaaacagcaataattattggccctgatggtcatcctttgactgtctatccttgcatgatttgtgggaagaagtttaagtcgaggggttttttgaaaagacacatgaaaaaccatcctgaacaccttgccaagaagaagtaccactgtactgactgtgattacactaccaataagaagataagtttacataaccacctggagagccacaagctgaccagcaaggcagagaaggccattgaatgtgatgagtgtgggaagcatttttctcatgcaggggctttgtttactcacaaaatggtgcataaggaaaaaggggccaacaaaatgcacaagtgtaaattctgtgaatatgagacagctgaacaggggttattgaatcgccacctcttggcagtccacagcaagaactttcctcatatttgtgtggagtgtggtaaaggtttccgacacccgtcggaactgagaaagcacatgcgaatccataccggcgagaagccataccaatgccagtactgtgaatataggtctgcagactcttctaacttgaaaacacatataaaaacaaagcatagtaaagagatgccattcaagtgtgacatttgtcttctgactttctcagataccaaagaagtgcagcaacatactcttgtccaccaagaaagcaaaacacatcagtgtttgcattgcgaccacaagagttcaaactcaagtgatttgaaacgacatgtaatttcagttcatacgaaagactatcctcataagtgtgagatgtgcgagaaaggctttcacaggccttcagaacttaagaaacatgtggctgtccacaaaggtaaaaaaatgcaccaatgtagacattgtgactttaagattgcagacccatttgttctaagtcgccatattctctcagttcacacaaaggatcttccatttaggtgtaagagatgtagaaagggatttaggcaacaaaatgagcttaaaaagcatatgaagacacacagtggcaggaaagtatatcagtgtgagtactgtgagtatagcactacagatgcctcaggctttaaacggcacgttatttccattcatacaaaagactatcctcatcggtgtgagtactgcaagaaaggcttccgaagaccttcagaaaagaaccagcacataatgagacaccataaagaagttggtctgccctaacagtgtgtctacaagcttgtaaagatgttggccttgaagcagaaaattcattttttaaagccagtcttgttcacatccattactatacattgaattatgctgtgtaaaaatagaattattgcttctagtccacttttctttacattttattcaatacgctgtcctgaatcctattcagtttctttaatagatgaggaaaaatagcaacaagcaagttgcttataataaaataatttgtgattctatactgaattttcagtcataaaagctttactatttatttacatatttattcatgttcatggtactcttctaagacaaaatcagattgataactatgaaagtaacatttttgacccatttcctcctacacaagtgtttcacattggagacatctgctaatataaatgggaggttttactgtcaagtccaattagcaaaacgtggtaataatttttttgtcagtattttcagattacatgataaaattttacatttgagcttctagcattgattaatataggatattgaccacgtttatgtttaaatttcattttgttcagcagacaaaatgtacttcccttaactttcattaatagtgtttacatcttttgtcagcacagcaaacttttagaaagtaatagttttacttatttttatcttctgttttctctttgtactgctttgtcttgcattgtgttccaacacatgagacttactgctcactgaattttggagtcttttagaggtaaattgtggactcaggattttttgaaacttggtgtgtaactctaaatcttgtatatgcatctttgttgcttattacatatttacacacacaaccacaaattttaaacttatgatgaaaatttacaataacctgaaagatccagagatgtatgagagcattttgtaacttgttattcagttactaaatttgaggtgaataattaaaaagaaaaggacattaggagagtgaaaatcttctcttcaaataatctttgatagataaaaatggaaggtaagatgtttctagatagaatgttttcatacaatttcagcttcatatcataaatttttctggaaagctatttcagacatagatttcatagtatttttctgagaatcctgtgaaggaacgctgtctctttgcaaagtaaggaggactaagggaaaatgatggtaccatgtaacagaatgagagctaattccaaattagcaacttcatcctgctttctattttacattgagtaaagttttaaaaagacaacagtcaagttgattttgattagaagataaaagtacataatgaaaatccatggccttatttggaatatatatcactttccaaattttattatttatttgagagttaataagttaatgttattaagcagttaataatttatatgtatggatataatataaaatgaattcatataattaaaaagaatttggttaataagaatttggagaatggaaaatacatttttaggttccttaatttggctgttggtacctgtgtatttggaatattttaggggattcgaattttttttaacccacattacagctaccttctagctttagtatggtagtgcttcattcaacttttgctgtcaggtttttattttcacctttttctgtgccaccaattcaaaagttataggattaggaaatataaatttatatttggtgattggcagcctctgaaatgttagattaatttgatctagttctaaagtgctttagtcatatatgaatttaaacctagtaccatccaaaaccatgtaatggattttaagaatctgttaggccttcttagcctttatacatgtccctacctgatttttactgtccttcatgatcctgttcttgaaaacttcagtttgtatttgagaatcctttaaatctccttccaatttgttttctccctgaagtaatataaaaggaagtatttaagtgaaagtttaagagttttaaaacattctttaaaattaatacagatagttagctatttatcttttaaaaataaactaaggtaaaaaacgtgacactttacatatttcatatttttcatatagtctggaggtatacacagttgttttgtttttaaccacggtattgaaacctttaaaaggtaattaagcatttggtcaagtaaatatagaacatttgtataaagaaagaaatgaaattgtgcttaatgttatatactgttattatttgcaggctggttttaattcttaatttgattagcaaagctaaaaaagtggatgttgaagttgaaagttttaaagaggtacaaaatcttacaaggacataaattattatttggttgaaaaatagcctattagatattgtatgtcccttcctctgtacaaattgtaaaatacttaaaataactatgaagaattcatataggaagtgtgatactattgtaaatgtgtatttgagaatatgcaaaaataaaaataatattttactgttaataaatgtttacttgtatatga

SEQ ID NO: 23492 - DNA, 2273 bp, Homo sapiens
  misc_feature 1..2273: note = ENST00000625061
  source 1..2273: mol_type = unassigned DNA; mol_type = unassigned DNA
agagaaaggccgtcctgcagcacccgccgctgtcgccgaccgcccgcacatccgtcgggagctgtgactaatgagaattaaaggccatggatgaagatgaatttgaattgcagccacaagagccaaactcattttttgatggaatagtggatgatgctggcaaaatagaacatgatggttccactggagtgaccatcgatgcagaatcagaaatggatccttgtaaagtggatagcacttgtcctgaagtcatcaaggtgtacatttttaaagctgaccctggagaagatgacttaggtggaactgtagacattgtggagagtgaacctgaaaatgatcatggagttgaactacttgatcagaacagcagtattcgtgttcccagggaaaagatggtttatatgactgtcaatgactctcaacaagaagatgaagatttaaatgttgctgaaattgctgatgaagtttatatggaagtgatcgtaggagaggaggatgctgctgttgcagcagcagcagctgctgtgcatgagcagcaaattgatgaggatgaaatgaaaaccttcgtaccaattgcatgggcagcagcttatggtaataattctgatggaattgaaaaccggaatggcactgcaagtgccctcttgcacatagatgagtctgctggccttggcagactggctaaacagaaaccaaagaaaaagagaagacctgattccaggcagtaccaaacagcaataattattggccctgatggtcatcctttgactgtctatccttgcatgatttgtgggaagaagtttaagtcgaggggttttttgaaaagacacatgaaaaaccatcctgaacaccttgccaagaagaagtaccactgtactgactgtgattacactaccaataagaagataagtttacataaccacctggagagccacaagctgaccagcaaggcagagaaggccattgaatgtgatgagtgtgggaagcatttttctcatgcaggggctttgtttactcacaaaatggtgcataaggaaaaaggggccaacaaaatgcacaagtgtaaattctgtgaatatgagacagctgaacaggggttattgaatcgccacctcttggcagtccacagcaagaactttcctcatatttgtgtggagtgtggtaaaggtttccgacacccgtcggaactgagaaagcacatgcgaatccataccggcgagaagccataccaatgccagtactgtgaatataggtctgcagactcttctaacttgaaaacacatataaaaacaaagcatagtaaagagatgccattcaagtgtgacatttgtcttctgactttctcagataccaaagaagtgcagcaacatactcttgtccaccaagaaagcaaaacacatcagtgtttgcattgcgaccacaagagttcaaactcaagtgatttgaaacgacatgtaatttcagttcatacgaaagactatcctcataagtgtgagatgtgcgagaaaggctttcacaggccttcagaacttaagaaacatgtggctgtccacaaaggtaaaaaaatgcaccaatgtagacattgtgactttaagattgcagacccatttgttctaagtcgccatattctctcagttcacacaaaggatcttccatttaggtgtaagagatgtagaaagggatttaggcaacaaaatgagcttaaaaagcatatgaagacacacagtggcaggaaagtatatcagtgtgagtactgtgagtatagcactacagatgcctcaggctttaaacggcacgttatttccattcatacaaaagactatcctcatcggtgtgagtactgcaagaaaggcttccgaagaccttcagaaaagaaccagcacataatgagacaccataaagaagttggtctgccctaacagtgtgtctacaagcttgtaaagatgttggccttgaagcagaaaattcattttttaaagccagtcttgttcacatccattactatacattgaattatgctgtgtaaaaatagaattattgcttctagtccacttttctttacattttattcaatacgctgtcctgaatcctattcagtttctttaatagatgaggaaaaatagcaacaagcaagttgcttataataaaataatttgtgattctatactgaattttcagtcataaaagctttactatttatttacatatttattcatgttcatggtactcttctaagacaaaatcagattgataactatgaaagtaacattttt

SEQ ID NO: 23493 - DNA, 678 bp, Homo sapiens
  misc_feature 1..678: note = ENST00000469869
  source 1..678: mol_type = unassigned DNA; mol_type = unassigned DNA
gtttgtggcctggtcggcgtcccgtagggcgccctcccgcgctaggccggccggcgtggcgctcggcgccgaacaggccccgaggaggccgcagttaggcctagtgattatccagttgccctgagcggctgcggaggtgcgctccataagcgggcagggtgggaaaagttcgcccgtttgtccggaaggcagttgatggacctggggtcgacaccactgcggacgcagggcacggcacgggggcgagaaggcgaaggctgcaggcgtgagtggatgatgctggcaaaatagaacatgatggttccactggagtgaccatcgatgcagaatcagaaatggatccttgtaaagtggatagcacttgtcctgaagtcatcaaggtgtacatttttaaagctgaccctggagaagatgacttaggtggaactgtagacattgtggagagtgaacctgaaaatgatcatggagttgaactacttgatcagaacagcagtattcgtgttcccagggaaaagatggtttatatgactgtcaatgactctcaacaagaagatgaagatttaagtaataattctgatggaattgaaaaccggaatggcactgcaagtgccctcttgcacatagatgagtctgctggccttggcagactggctaaacagaaaccaaagaaaaagagaa

SEQ ID NO: 23494 - DNA, 567 bp, Homo sapiens
  misc_feature 1..567: note = ENST00000443793
  source 1..567: mol_type = unassigned DNA; mol_type = unassigned DNA
tggcctggtcggcgtcccgtagggcgccctcccgcgctaggccggccggcgtggcgctcggcgccgaacaggccccgaggaggccgcagttaggcctagtgattatccagttgccctgagcggctgcggaggtgcgctccataagcgggcagggtgggaaaagttcgcccgtttgtccggaaggcagttgatggacctggggtcgacaccactgcggacgcagggcacggcacgggggcgagaaggcgaaggctgcaggcgtgaggagctgtgactaatgagaattaaaggccatggatgaagatgaatttgaattgcagccacaagagccaaactcattttttgatggaataggagctgatgctacacacatggatggtgatcagattgttgtggaaatacaagaagcagtttttgtttctaatattgtggattctgacataactgtgcataactttgttcctgatgacccagactcagttgtaatccaagatgttgttgaagatgttgtcatagaggaggatgttcagtgctcagatatcttagaagaggcagatgtatctgaaa

SEQ ID NO: 23495 - DNA, 3464 bp, Homo sapiens
  misc_feature 1..3464: note = ENST00000449237
  source 1..3464: mol_type = unassigned DNA; mol_type = unassigned DNA
gggcagggtgggaaaagttcgcccgtttgtccggaaggcagttgatggacctggggtcgacaccactgcggacgcagggcacggcacgggggcgagaaggcgaaggctgcaggcgtgaggagctgatgctacacacatggatggtgatcagattgttgtggaaatacaagaagcagtttttgtttctaatattgtggattctgacataactgtgcataactttgttcctgatgacccagactcagttgtaatccaagatgttgttgaagatgttgtcatagaggaggatgttcagtgctcagatatcttagaagaggcagatgtatctgaaaatgtcatcattcctgagcaagtgctggactcagatgtaactgaagaagtttctttaccacactgcacagtcccagatgatgttttagcttctgacattacttcaacctcaatgtctatgccagaacatgttttaacgagtgaatccatgcatgtgtgtgacattggacatgttgaacatatggtgcatgatagtgtagtggaagcagaaatcattactgatcctctgacgagtgacatagtttcagaagaagtattggtagcagactgtgcccctgaagcagtcatagatgccagcgggatctcagtggaccagcaagataatgacaaagccagctgtgaggactacctaatgatttcgttggatgatgctggcaaaatagaacatgatggttccactggagtgaccatcgatgcagaatcagaaatggatccttgtaaagtggatagcacttgtcctgaagtcatcaaggtgtacatttttaaagctgaccctggagaagatgacttaggtggaactgtagacattgtggagagtgaacctgaaaatgatcatggagttgaactacttgatcagaacagcagtattcgtgttcccagggaaaagatggtttatatgactgtcaatgactctcaacaagaagatgaagatttaagtaataattctgatggaattgaaaaccggaatggcactgcaagtgccctcttgcacatagatgagtctgctggccttggcagactggctaaacagaaaccaaagaaaaagagaagacctgattccaggcagtaccaaacagcaataattattggccctgatggtcatcctttgactgtctatccttgcatgatttgtgggaagaagtttaagtcgaggggttttttgaaaagacacatgaaaaaccatcctgaacaccttgccaagaagaagtaccactgtactgactgtgattacactaccaataagaagataagtttacataaccacctggagagccacaagctgaccagcaaggcagagaaggccattgaatgtgatgagtgtgggaagcatttttctcatgcaggggctttgtttactcacaaaatggtgcataaggaaaaaggggccaacaaaatgcacaagtgtaaattctgtgaatatgagacagctgaacaggggttattgaatcgccacctcttggcagtccacagcaagaactttcctcatatttgtgtggagtgtggtaaaggtttccgacacccgtcggaactgagaaagcacatgcgaatccataccggcgagaagccataccaatgccagtactgtgaatataggtctgcagactcttctaacttgaaaacacatataaaaacaaagcatagtaaagagatgccattcaagtgtgacatttgtcttctgactttctcagataccaaagaagtgcagcaacatactcttgtccaccaagaaagcaaaacacatcagtgtttgcattgcgaccacaagagttcaaactcaagtgatttgaaacgacatgtaatttcagttcatacgaaagactatcctcataagtgtgagatgtgcgagaaaggctttcacaggccttcagaacttaagaaacatgtggctgtccacaaaggtaaaaaaatgcaccaatgtagacattgtgactttaagattgcagacccatttgttctaagtcgccatattctctcagttcacacaaaggatcttccatttaggtgtaagagatgtagaaagggatttaggcaacaaaatgagcttaaaaagcatatgaagacacacagtggcaggaaagtatatcagtgtgagtactgtgagtatagcactacagatgcctcaggctttaaacggcacgttatttccattcatacaaaagactatcctcatcggtgtgagtactgcaagaaaggcttccgaagaccttcagaaaagaaccagcacataatgagacaccataaagaagttggtctgccctaacagtgtgtctacaagcttgtaaagatgttggccttgaagcagaaaattcattttttaaagccagtcttgttcacatccattactatacattgaattatgctgtgtaaaaatagaattattgcttctagtccacttttctttacattttattcaatacgctgtcctgaatcctattcagtttctttaatagatgaggaaaaatagcaacaagcaagttgcttataataaaataatttgtgattctatactgaattttcagtcataaaagctttactatttatttacatatttattcatgttcatggtactcttctaagacaaaatcagattgataactatgaaagtaacatttttgacccatttcctcctacacaagtgtttcacattggagacatctgctaatataaatgggaggttttactgtcaagtccaattagcaaaacgtggtaataatttttttgtcagtattttcagattacatgataaaattttacatttgagcttctagcattgattaatataggatattgaccacgtttatgtttaaatttcattttgttcagcagacaaaatgtacttcccttaactttcattaatagtgtttacatcttttgtcagcacagcaaacttttagaaagtaatagttttacttatttttatcttctgttttctctttgtactgctttgtcttgcattgtgttccaacacatgagacttactgctcactgaattttggagtcttttagaggtaaattgtggactcaggattttttgaaacttggtgtgtaactctaaatcttgtatatgcatctttgttgcttattacatatttacacacacaaccacaaattttaaacttatgatgaaaatttacaataacctgaaagatccagagatgtatgagagcattttgtaacttgttattcagttactaaatttgaggtgaataattaaaaagaaaaggacattaggagagtgaaaatcttctcttcaaataatctttgatagataaaaatggaaggtaagatgtttctagatagaatgttttcatacaatttcagcttcatatcataaatttttctggaaagctatttcagacatagatttcatagtatttttctgagaatcctgtgaaggaacgctgtctctttgc

SEQ ID NO: 23496 - DNA, 803 bp, Homo sapiens
  misc_feature 1..803: note = ENST00000478783
  source 1..803: mol_type = unassigned DNA; mol_type = unassigned DNA
aaataaagtaaggactttctgtcattcatgagtgtcaggacttcttgttgttaataaagaattcgtaattctttagaatttataatgttgtgtaattctgtgttttaatgcacattgttaggtaataattctgatggaattgaaaaccggaatggcactgcaagtgccctcttgcacatagatgagtctgctggccttggcagactggctaaacagaaaccaaagaaaaagagaagacctgattccaggcagtaccaaacagcaataattattggccctgatggtcatcctttgactgtctatccttgcatgatttgtgggaagaagtttaagtcgaggggttttttgaaaagacacatgaaaaaccatcctgaacaccttgccaagaagaagtaccactgtactgactgtgattacactaccaataagaagataagtttacataaccacctggagagccacaagctgaccagcaaggcagagaaggccattgaatgtgatgagtgtgggaagcatttttctcatgcaggggctttgtttactcacaaaatggtgcataaggaaaaaggggccaacaaaatgcacaagtgtaaattctgtgaatatgagacagctgaacaggggttattgaatcgccacctcttggcagtccacagcaagaactttcctcatatttgtgtggagtgtggtaaaggtttccgacacccgtcggaactgagaaagcacatgcgaatccataccggcgagaagccataccaatgccagtactgtgaatataggtctgcagactcttctaacttgaa

SEQ ID NO: 23497 - DNA, 5239 bp, Homo sapiens
  misc_feature 1..5239: note = ENST00000155093
  source 1..5239: mol_type = unassigned DNA; mol_type = unassigned DNA
gcctagtgcgcgcgcagtaacctgtttgtggcctggtcggcgtcccgtagggcgccctcccgcgctaggccggccggcgtggcgctcggcgccgaacaggccccgaggaggccgcagttaggcctagtgattatccagttgccctgagcggctgcggaggtgcgctccataagcgggcagggtgggaaaagttcgcccgtttgtccggaaggcagttgatggacctggggtcgacaccactgcggacgcagggcacggcacgggggcgagaaggcgaaggctgcaggcgtgaggagctgtgactaatgagaattaaaggccatggatgaagatgaatttgaattgcagccacaagagccaaactcattttttgatggaataggagctgatgctacacacatggatggtgatcagattgttgtggaaatacaagaagcagtttttgtttctaatattgtggattctgacataactgtgcataactttgttcctgatgacccagactcagttgtaatccaagatgttgttgaagatgttgtcatagaggaggatgttcagtgctcagatatcttagaagaggcagatgtatctgaaaatgtcatcattcctgagcaagtgctggactcagatgtaactgaagaagtttctttaccacactgcacagtcccagatgatgttttagcttctgacattacttcaacctcaatgtctatgccagaacatgttttaacgagtgaatccatgcatgtgtgtgacattggacatgttgaacatatggtgcatgatagtgtagtggaagcagaaatcattactgatcctctgacgagtgacatagtttcagaagaagtattggtagcagactgtgcccctgaagcagtcatagatgccagcgggatctcagtggaccagcaagataatgacaaagccagctgtgaggactacctaatgatttcgttggatgatgctggcaaaatagaacatgatggttccactggagtgaccatcgatgcagaatcagaaatggatccttgtaaagtggatagcacttgtcctgaagtcatcaaggtgtacatttttaaagctgaccctggagaagatgacttaggtggaactgtagacattgtggagagtgaacctgaaaatgatcatggagttgaactacttgatcagaacagcagtattcgtgttcccagggaaaagatggtttatatgactgtcaatgactctcaacaagaagatgaagatttaaatgttgctgaaattgctgatgaagtttatatggaagtgatcgtaggagaggaggatgctgctgttgcagcagcagcagctgctgtgcatgagcagcaaattgatgaggatgaaatgaaaaccttcgtaccaattgcatgggcagcagcttatggtaataattctgatggaattgaaaaccggaatggcactgcaagtgccctcttgcacatagatgagtctgctggccttggcagactggctaaacagaaaccaaagaaaaagagaagacctgattccaggcagtaccaaacagcaataattattggccctgatggtcatcctttgactgtctatccttgcatgatttgtgggaagaagtttaagtcgaggggttttttgaaaagacacatgaaaaaccatcctgaacaccttgccaagaagaagtaccactgtactgactgtgattacactaccaataagaagataagtttacataaccacctggagagccacaagctgaccagcaaggcagagaaggccattgaatgtgatgagtgtgggaagcatttttctcatgcaggggctttgtttactcacaaaatggtgcataaggaaaaaggggccaacaaaatgcacaagtgtaaattctgtgaatatgagacagctgaacaggggttattgaatcgccacctcttggcagtccacagcaagaactttcctcatatttgtgtggagtgtggtaaaggtttccgacacccgtcggaactgagaaagcacatgcgaatccataccggcgagaagccataccaatgccagtactgtgaatataggtctgcagactcttctaacttgaaaacacatataaaaacaaagcatagtaaagagatgccattcaagtgtgacatttgtcttctgactttctcagataccaaagaagtgcagcaacatactcttgtccaccaagaaagcaaaacacatcagtgtttgcattgcgaccacaagagttcaaactcaagtgatttgaaacgacatgtaatttcagttcatacgaaagactatcctcataagtgtgagatgtgcgagaaaggctttcacaggccttcagaacttaagaaacatgtggctgtccacaaaggtaaaaaaatgcaccaatgtagacattgtgactttaagattgcagacccatttgttctaagtcgccatattctctcagttcacacaaaggatcttccatttaggtgtaagagatgtagaaagggatttaggcaacaaaatgagcttaaaaagcatatgaagacacacagtggcaggaaagtatatcagtgtgagtactgtgagtatagcactacagatgcctcaggctttaaacggcacgttatttccattcatacaaaagactatcctcatcggtgtgagtactgcaagaaaggcttccgaagaccttcagaaaagaaccagcacataatgagacaccataaagaagttggtctgccctaacagtgtgtctacaagcttgtaaagatgttggccttgaagcagaaaattcattttttaaagccagtcttgttcacatccattactatacattgaattatgctgtgtaaaaatagaattattgcttctagtccacttttctttacattttattcaatacgctgtcctgaatcctattcagtttctttaatagatgaggaaaaatagcaacaagcaagttgcttataataaaataatttgtgattctatactgaattttcagtcataaaagctttactatttatttacatatttattcatgttcatggtactcttctaagacaaaatcagattgataactatgaaagtaacatttttgacccatttcctcctacacaagtgtttcacattggagacatctgctaatataaatgggaggttttactgtcaagtccaattagcaaaacgtggtaataatttttttgtcagtattttcagattacatgataaaattttacatttgagcttctagcattgattaatataggatattgaccacgtttatgtttaaatttcattttgttcagcagacaaaatgtacttcccttaactttcattaatagtgtttacatcttttgtcagcacagcaaacttttagaaagtaatagttttacttatttttatcttctgttttctctttgtactgctttgtcttgcattgtgttccaacacatgagacttactgctcactgaattttggagtcttttagaggtaaattgtggactcaggattttttgaaacttggtgtgtaactctaaatcttgtatatgcatctttgttgcttattacatatttacacacacaaccacaaattttaaacttatgatgaaaatttacaataacctgaaagatccagagatgtatgagagcattttgtaacttgttattcagttactaaatttgaggtgaataattaaaaagaaaaggacattaggagagtgaaaatcttctcttcaaataatctttgatagataaaaatggaaggtaagatgtttctagatagaatgttttcatacaatttcagcttcatatcataaatttttctggaaagctatttcagacatagatttcatagtatttttctgagaatcctgtgaaggaacgctgtctctttgcaaagtaaggaggactaagggaaaatgatggtaccatgtaacagaatgagagctaattccaaattagcaacttcatcctgctttctattttacattgagtaaagttttaaaaagacaacagtcaagttgattttgattagaagataaaagtacataatgaaaatccatggccttatttggaatatatatcactttccaaattttattatttatttgagagttaataagttaatgttattaagcagttaataatttatatgtatggatataatataaaatgaattcatataattaaaaagaatttggttaataagaatttggagaatggaaaatacatttttaggttccttaatttggctgttggtacctgtgtatttggaatattttaggggattcgaattttttttaacccacattacagctaccttctagctttagtatggtagtgcttcattcaacttttgctgtcaggtttttattttcacctttttctgtgccaccaattcaaaagttataggattaggaaatataaatttatatttggtgattggcagcctctgaaatgttagattaatttgatctagttctaaagtgctttagtcatatatgaatttaaacctagtaccatccaaaaccatgtaatggattttaagaatctgttaggccttcttagcctttatacatgtccctacctgatttttactgtccttcatgatcctgttcttgaaaacttcagtttgtatttgagaatcctttaaatctccttccaatttgttttctccctgaagtaatataaaaggaagtatttaagtgaaagtttaagagttttaaaacattctttaaaattaatacagatagttagctatttatcttttaaaaataaactaaggtaaaaaacgtgacactttacatatttcatatttttcatatagtctggaggtatacacagttgttttgtttttaaccacggtattgaaacctttaaaaggtaattaagcatttggtcaagtaaatatagaacatttgtataaagaaagaaatgaaattgtgcttaatgttatatactgttattatttgcaggctggttttaattcttaatttgattagcaaagctaaaaaagtggatgttgaagttgaaagttttaaagaggtacaaaatcttacaaggacataaattattatttggttgaaaaatagcctattagatattgtatgtcccttcctctgtacaaattgtaaaatacttaaaataactatgaagaattcatataggaagtgtgatactattgtaaatgtgtatttgagaatatgcaaaaataaaaataatattttactgttaataaatgtttacttgtatatg

SEQ ID NO: 23498 - DNA, 567 bp, Homo sapiens
  misc_feature 1..567: note = ENST00000472523
  source 1..567: mol_type = unassigned DNA; mol_type = unassigned DNA
agctccctgcactgcgccctgggtgggtgggtgaatgtgaagaggcggcgttgggctaggcccctgcagcccgctcggagcgtcctaggcccggggctgcgctgtgaaagacccagattctcatcccagaggcccagcagtcctgaaaggcctcctctccgaccctgagccgggtccgccgaacaaagttcggaagctcgggctagctgggccagcgccattttctcgcacttgtggctggatctggttgtcccggcgactgcgccccggcgcggtctcttttcctctacctcggatccccagcactgactcgccctcagacgccggggaaggtgtggtgagctcccggccccggccgaggggtccctggagaggagctgggtggcggtggccaggccgagcgcggttgctggcccgcgcctccctccccgaggcaccattgttccgggatcgctgtgaccgccacaaagtgaatcctttcggtgcggacagtcgccttcaaagccaggccccggattcagctcctgggaagctctaggatgtgactttaagctggaaagactctca

SEQ ID NO: 23499 - DNA, 539 bp, Homo sapiens
  misc_feature 1..539: note = ENST00000488404
  source 1..539: mol_type = unassigned DNA; mol_type = unassigned DNA
atcctttcggtgcggacagtcgccttcaaagccaggccccggattcaggggagaagcccttcaagtgcgagtttgagggctgtgaccggcgcttcgctaacagcagcgaccgcaagaagcacatgcacgtgcacacgagcgacaagccctatctttgcaagatgtgcgacaagtcctacacgcatcccagttcgctgcgcaaacacatgaaggtccacgaatcctcctcgcagggctcgcagccttcgccggccgccagctctggctacgaatcctccacgcctcccaccatcgtgtctccctccacagacaacccgaccacaagctccttatcgccctcctcctccgcagtccaccacacagccggccacagtgcgctctcttccaattttaacgaatggtacgtttaaaatcagaaacaaaacatcgaacaaaaccctatttaagagactgatcacacacgtatacacaacattactgaaagaaccctgcgaatcaaaacaacccccacacagaccccgcaatccttttttaaaaaa

SEQ ID NO: 23500 - DNA, 5241 bp, Homo sapiens
  misc_feature 1..5241: note = ENST00000282928
  source 1..5241: mol_type = unassigned DNA; mol_type = unassigned DNA
atgattgctgctatcagtctcgcgctcaccgcccggctgaggaggtgaaagtttctccccaggaagataaaccgcaaaagacaatattgtgcatgatttgcgccttttctttggctttttctttctttcttcacccccccacccacttttttttttttttttttcaaaaagcagagagggaaaaacggagagtgaaggagcgaggaggcgagcgtgagagaaaggagagagagagaaaagaaagggcgaggggctagtggagaagtaaggaggggcgcgctgcgcgaggcggagagagggcgaagcagtcgcggcactggcgctcacattcctctatgctacaaatccaggaggaagtttttttttagggggctgagatgctccatgcctttccccgggcagccttgacgcgcggccctctcggcagagactgagcggcgagaaagtgcgagccgggccggcagaatctgcctggcgggcgctggagcctgcgttactcgcggcccgcagccgtccggctactttgcgtttggcccggccagcgcccgggcgcgccgcgccattgcctgcaggctaggacttcgcgaggtgggtcgactccccctccctcctcctcttcttcctcctcttcctcctcctcttgttcctcctcctcctcccgattttccctcctcggctggcgagggtggggggggcgggggaggccggggctcgccccgagcagccacgatgctcctggacgccggcccccagtacccagcgatcggcgtgaccacctttggcgcgtcccgccaccactccgcgggcgacgtggccgaacgagacgtgggcctgggcatcaacccgttcgccgacggcatgggcgccttcaagctcaaccccagttcgcacgagctggcttcggccggccagacggccttcacgtcgcaggcgccaggctacgcggctgctgcggccctgggccatcaccatcacccgggccacgtcggctcctattccagcgcagccttcaactccacgcgggactttctgttccgcaaccggggttttggcgacgcggcggcggcagccagcgcacagcacagcctctttgctgcatcggccgggggcttcgggggcccacacggccacacggacgccgcgggccacctcctcttccccgggcttcacgagcaggctgccggccacgcgtcgcctaacgtggtcaacgggcagatgaggctcggcttctcgggggacatgtacccgcgaccggagcagtacggccaggtgaccagcccgcgttcggagcactatgctgcgccgcagctgcacggctacgggcccatgaacgtgaacatggccgcgcatcacggcgccggcgccttcttccgctacatgcgccaacccatcaagcaagagctcatctgcaagtggatcgagcccgagcagctggccaaccccaaaaagtcgtgcaacaaaactttcagcaccatgcacgagctagttacgcacgtcaccgtggagcacgtaggtggcccggagcagagtaatcacatctgcttctgggaggagtgtccgcgcgagggcaagcccttcaaagccaaatacaaactggttaaccacatccgcgtgcacacgggcgagaagccctttccctgccccttccctggctgtggcaaggtcttcgcgcgctccgagaatttaaagatccacaaaaggacgcacacaggggagaagcccttcaagtgcgagtttgagggctgtgaccggcgcttcgctaacagcagcgaccgcaagaagcacatgcacgtgcacacgagcgacaagccctatctttgcaagatgtgcgacaagtcctacacgcatcccagttcgctgcgcaaacacatgaaggtccacgaatcctcctcgcagggctcgcagccttcgccggccgccagctctggctacgaatcctccacgcctcccaccatcgtgtctccctccacagacaacccgaccacaagctccttatcgccctcctcctccgcagtccaccacacagccggccacagtgcgctctcttccaattttaacgaatggtacgtttaaaatcagaaacaaaacatcgaacaaaaccctatttaagagactgatcacacacgtatacacaacattactgaaagaaccctgcgaatcaaaacaacccccacacagaccccgcaatccttttttaaaaaatctgccaatagacccaggacgagtaagagaggaagcatcaaccttttaaaaatttcctttcgctttcattatttttctttttttggcaaaggcttggtacccaaggtgcggtagggggtcgagggggaggaggccacctgaccaaatgccgccaaccccgagggccagtttcttgtcgaattggtacgggctctctggggcttcggcttctttttttctttgttttcttgtaaatacagaattattagcttaaaactgtactgttgaattctgtaaatagttatatctcggttggagcgggtgggtgggattgtggcgttgtggtctttgcattgggggaggggggagggaccggatgggcggggggagggggagggggaggggtgggcggccgaaagccaactgtttgtactgaatggcaagaatgttctagtaaatgtgtaccaaaatgtgaattactttgtacgattacagtctccacgtcgacctaacccaatattattggtattaatgtgctttttttgtataaagtgcaaacatttcgtcccaaagtctaagtactttagtgcagtaaaatgttgtttcatgtcctgtcaagaattcgtatagtacgagcctggatctgcgtgtcaaactgttccatttgtttatgtaaagtgatattaaaaaagatataaactataactgtccgttacttttggcaaaagatacaaccacataatgtatataattcctagtttccatatttatccgcatgtaaagggccggtttatccatgttacagctcttcaatatttatggctagaagaactcgtatgtacactttagtttccagaactgtttggtaacctttcgtaccttattaaagattcttaaatctccgtgattgtggtaggaatttcttcttcacccaccagcaacctgctgcctcttctgccagtcttaaagggtctccagaaaagctctccagtctcccttgccttccctttctgtcactgcaggtcgtataaacgtgataaatgaatgctaccctgctggctctccgagagagtgtaattagtatttatatcaaaatttatgaaacaaattttcggccgcagtataatttaaatgacctttgcagatgtagaataacaaccataaaaataacaggaatagattgcacaggcgacatcaatattaatgtagacgaattgtcagaagctcaggggctcgctctgcaacattgcaaatgaacttgcagccgagggttccgctgccccctagattaaattccccgggctgaaactgagttgcagatttacaatatcatattttaaattgctgtcttcaattaaaccatttatgaccataactaattttcaggatgtcgatgcatgcttttccaggccttccttctttgtacaaaagtaaatgtccataaagcgtttcacttatattcttcaaacatgatgctaatttaaattaattacttcctatgatatgttattattcctatgattttgccactgttattagttctctcaaaaatacatctagggaagaggattattttaagtaatttgattatctttctatctcttttatttatttctcatttacttaagaaattcgttccattggttggcattgatacagtaaatttgtaaatgaggagacaatataaaaaatctaaattacttgtgcttaatgactgtagcagaatgccttttctctaaatcagattgtctttcttgcagtttagtttgatagatttgcaagctatgctgcttccatgaagttagctgcgctggtaggaacgcaggcttctttgtctctggttgtagcttgcatgatcgccccattaggcagacaacgtagccggagatcacaaatcaggcccttggctgtagttgctagtgtgtggaggtgcagagcaggtggcagaaactgacctcactgggcaagggtggccatggacctgattctttaatgcactctatgtgttcaggaagccacaggccatatttgactctgagaaagaaaacaagaggaaaaaccccacaaagtataacaaccccttaagatacatctattttaaagtgaaattaatttttcagtttataccattggccaattacaagataaaaatgttcaatttctttaagaatcctttgttgacttgtcttttcatctcttgctatttatatttgtcactgtttcaacaaagtcttatttgctgaggaaggactttgctgcacttactgtaccacatcaaacactggggagggtggtgtttaactttttaaaaaatgttattctgattataacaataatattggcttttttcatgaaaagagcgccaccttgcaaggtttagtgagatttatggaagttgaatacctaagcaggaattgctgctagctccaaaaatttgcgaagcaaaagctagccccaattggtttggaagtttgaaactgattaacagatttgcatttgaagtgactccagacattaggtccagacattagttaaaaatagaaagaggaataaagacatctcttctctctagaaaagataacaccacaattaataatccttcccactttcattgagatcagcttgtctgataacctgatatgagtgtgataatgataaacatgataatagtggtacttttgtaattttgctggtgcatttaagaagatagtaaatgatgagttcatcttttcttcgaacattcctattcctagatgtagtttacctcaaattgggaattataactgtctaatttttgttgtgtacctgatgccccttttgctttaataccacagtgtaacaattaaatatcacactatgacatatgatttaagtaggatattttaaagataaattttaggggtaaatgtttacttcaaaatgactccatatttcaaatatctgtttagactgtgaaggccaaataatttttaagaaaacatttgaagagtagtgtgtttgcatttgtgaataatcttactcacagcaagtaaacgtaataaaagccaacatttaagccaa

SEQ ID NO: 23501 - DNA, 1044 bp, Homo sapiens
  misc_feature 1..1044: note = ENST00000474034
  source 1..1044: mol_type = unassigned DNA; mol_type = unassigned DNA
gcggcgaggagggctctgagtcctctcccggccaggccgagcttagtatgtggaggcggcggcgggagtgcgggcatggaccaagggaagggggacacccaaaccgcattggtgccttcctttccctccactcgcgccgtagacctccccaaattgcccgtctccggtatgactgaatctgtctgctggcctctcagctaccaactctgcccgaaatctagatcccagacctgctcctgggaagctctaggatgtgactttaagctggaaagactctcaggagctaggtttgatatggcacaatctcaaggcatcgctaagtctgaagttcttccagcaggtctgtaaaccacaaaggacaagcagctcagagattagcgaatgcgtctcagctgtcctagaaaagtgctgtcagcaagtctgaagagtttcccagaagccctgaaaggacgcaatagcatcatttagcagaaagaaacagccctggattaatgttcttttgggattcatcttctggctttgtgattttgggcaagttacttatcttcctccatttattcacatatataatgagaggagtagtacctaccttacaaacttttctgtgagaagcaaaaaaaataaaaataaaaaataaaaaataaaattgttaaatatttgctatgtgtaaaatgcttattcctttaaagttttcatgtcagttaaaacatgttattggcttgaatcctgactcaagaacggaaatagtaattgtgtctgccattcagggtgacacagttatttccactggttcagggtggtggggtgggagctactagatagaacaggtggggcaattcttgatacattttcgtgttttttgttactactaatccaccaactcttgttttcactcagaagcagataaaatggacatatttattatagactgaaaaatgataaatgagattaattttaaaaataaaatgaaaaggagaataattgtttataaatgtatgatttataagttctgaatgtataatttataagttctgcatgtatgca

SEQ ID NO: 23502 - DNA, 418 bp, Homo sapiens
  misc_feature 1..418: note = ENST00000481840
  source 1..418: mol_type = unassigned DNA; mol_type = unassigned DNA
ctcctgggaagctctaggatgtgactttaagctggaaagactctcaggagctaggtttgatatggcacaatctcaaggcatcgctaagtctgaagttcttccagcagtaaaccacaaaggacaagcagctcagagattagcgaatgcgtctcagctgtcctagaaaagtgctgtcagcaagtctgaagagtttcccagaagccctgaaaggacgcaatagcatcatttagcagaaagaaacagccctggattaatgttcttttgggattcatcttctggctttgtgattttgggcaagttacttatcttcctccatttattcacatatataatgagaggagtagtacctaccttacaaacttttctgtgagaagcaaaaaaaataaaaataaaaaataaaaaataaaattgttaaata

SEQ ID NO: 23503 - DNA, 2983 bp, Homo sapiens
  misc_feature 1..2983: note = ENST00000376335
  source 1..2983: mol_type = unassigned DNA; mol_type = unassigned DNA
ccgcctggctttggactcttctcctcctccacctcctcctcctcctcccgcgccgccgcctcctcctcctcttcctctccgcgccttcgctacgcgcccggccgcccgaggcagatccaggcggcggcggaggcggcgggcgcaggagagcggctcccagggctgaagtggccgccaccaccgccgcctgcgcctggagcccggtggccgccggacgcaccgcgcggatcgggagcgggagtcgaggcggcgcggaggcgcagggctcgcaggggcgggcgggcgcgctggccatgctcctggacgcgggtccgcagttcccggccatcggggtgggcagcttcgcgcgccaccatcaccactccgccgcggcggcggcggcggctgccgccgagatgcaggaccgtgaactgagcctggcggcggcgcagaacggcttcgttgactccgccgccgcgcacatgggagccttcaagctcaacccgggcgcgcacgagctgtccccgggccagagctcggcgttcacgtcgcagggccccggcgcctaccccggctccgctgcggctgccgctgcggccgcagcgctcgggccccacgccgcgcacgttggctcctactctgggccgcccttcaactccacccgggacttcctgttccgcagccgcggcttcggggactcggcgccgggcggcgggcagcacgggctgttcgggccgggcgcgggcggcctgcaccacgcgcactcggacgcgcagggccacctcctcttcccgggcctgccagagcagcacgggccgcacggctcgcagaatgtgctcaacgggcagatgcgcctcgggctgcccggcgaggtgttcgggcgctcggagcaataccgccaggtggccagcccgcggaccgacccctactcggcggcgcaactccacaaccagtacggccccatgaatatgaacatgggtatgaacatggcagcagccgcggcccaccaccaccaccaccaccaccaccaccccggtgcctttttccgctatatgcggcagcagtgcatcaagcaggagctaatctgcaagtggatcgaccccgagcaactgagcaatcccaagaagagctgcaacaaaactttcagcaccatgcacgagctggtgacacacgtctcggtggagcacgtcggcggcccggagcagagcaaccacgtctgcttctgggaggagtgtccgcgcgagggcaagcccttcaaggccaaatacaaactggtcaaccacatccgcgtgcacacaggcgagaaacccttcccctgccccttcccgggctgtggcaaagtcttcgcgcgctccgagaacctcaagatccacaaaaggacccacacaggggagaagccgttccagtgtgagtttgagggctgcgaccggcgcttcgccaacagcagcgacaggaagaagcacatgcacgtccacacctccgataagccctatctctgcaagatgtgcgacaagtcctacacgcaccccagctcgctgcggaagcacatgaaggtccatgagtcctccccgcagggctctgaatcctccccggccgccagctccggctatgagtcgtccacgcccccggggctggtgtcccccagcgccgagccccagagcagctccaacctgtccccagcggcggcggcagcggcggcggcggctgcggcggcggcggccgcggtgtccgcggtgcaccggggcggaggctcgggcagtggcggcgcgggaggcggctcaggcggcggcagcggcagtggcgggggcggcggcggggcgggcggcgggggcggcggcagctctggcgggggcagcgggacagccgggggtcacagcggcctctcctccaacttcaatgaatggtacgtgtgacgggtcggggcctctctccctctccctgtccccaccccagcgcagcagccctccccgcagctagcagcgagggcaccttgtgatcatgttgttaaaattatgaatctgatttttatgatgatgaaaattttaccagcagaaggattttttaaagttttttttttttttttaataataatctaggcatgaagagcaaaaatatcccttccggagtctttgaagctgaaaatataaaacaaataaaaaataaaaaaataaaaacccacaaaaatgttgaaccaaacctccctgctaatctccatgcccacgttctttcccaccctgttcccagtcttctgacaaactgtgtacatagcggactcctcctttctcctccgaggtggttttaaaggctttttggtgtatagaagtttgtccatttgtaaaactccggattgcgttcctccccgccttccgccccttcccttccctaaagtgatgggctttctcttttctctttttagtttacccggtttctttttaagtaatgtggaagaaaatggtttattttgtattgtggtattgaatattgtgttcctttttatgaggcaacctgattgtaaacttcatgtaactatagactggaaaaaatgagccgtgccaaagtctcccttctgtttcttcagcacattgacccatagcacacacatacacaccaccaccaacaacgcttgtgaatgtatttttctgttagctgggtttacatgtgatgttttagtgcttttgcaagttcaatttgttagttcctgtatgaaagattgtgggggaaaaataaacgtcgtgccgttagctttttccgtaataacacccttccttctgtaaatacccgttaccatatttatccatttgtaattaaattatggtattaacttgctacagaggaaacaatatttataaagaatgtttcttaactataaatatgtacaattgtgggcataaactgtttcagattttttatttgaaggttttaagtggtttgatcatttcttgtgatgttttgagagtaatgcatacagaaatataataaaatgtgttgaaactgcatgaacata

SEQ ID NO: 23504 - DNA, 455 bp, Homo sapiens
  misc_feature 1..455: note = ENST00000490085
  source 1..455: mol_type = unassigned DNA; mol_type = unassigned DNA
tgaaaggctttgctgactcccccaaccctcgcccaccagcttgtgcctctccgcagtcactagatgctgccttatctctaatatttaccttttcttcaacttatttttttaaagacgggaggggagaagccgttccagtgtgagtttgagggctgcgaccggcgcttcgccaacagcagcgacaggaagaagcacatgcacgtccacacctccgataagccctatctctgcaagatgtgcgacaagtcctacacgcaccccagctcgctgcggaagcacatgaaggtccatgagtcctccccgcagggctctgaatcctccccggccgccagctccggctatgagtcgtccacgcccccggggctggtgtcccccagcgccgagccccagagcagctccaacctgtccccagcggcggcggcagcggcggcggcggctgcggcggcggcggccgc

SEQ ID NO: 23505 - DNA, 383 bp, Homo sapiens
  misc_feature 1..383: note = ENST00000468291
  source 1..383: mol_type = unassigned DNA; mol_type = unassigned DNA
ccccacattcctgagaaatttgaggagatggacgtcagcctggaagaaagggagaagccgttccagtgtgagtttgagggctgcgaccggcgcttcgccaacagcagcgacaggaagaagcacatgcacgtccacacctccgataagccctatctctgcaagatgtgcgacaagtcctacacgcaccccagctcgctgcggaagcacatgaaggtccatgagtcctccccgcagggctctgaatcctccccggccgccagctccggctatgagtcgtccacgcccccggggctggtgtcccccagcgccgagccccagagcagctccaacctgtccccagcggcggcggcagcggcggcggcggctgcggcggcggcggccgc

SEQ ID NO: 23506 - DNA, 473 bp, Homo sapiens
  misc_feature 1..473: note = ENST00000477213
  source 1..473: mol_type = unassigned DNA; mol_type = unassigned DNA
tgatcttagttctgccgcagaggggatcggactggtttgagggacccagccccctcaggtccttctccctcgccgcggcccagccccctcgcagcctgagtgggggctctgcaggctctgggtgtctgcagccagcgccgatgtttgccgtccacaggggagaagccgttccagtgtgagtttgagggctgcgaccggcgcttcgccaacagcagcgacaggaagaagcacatgcacgtccacacctccgataagccctatctctgcaagatgtgcgacaagtcctacacgcaccccagctcgctgcggaagcacatgaaggtccatgagtcctccccgcagggctctgaatcctccccggccgccagctccggctatgagtcgtccacgcccccggggctggtgtcccccagcgccgagccccagagcagctccaacctgtccccagcggcggcggcagcggcggcggcggc

SEQ ID NO: 23507 - DNA, 218 bp, Homo sapiens
  misc_feature 1..218: note = ENST00000481565
  source 1..218: mol_type = unassigned DNA; mol_type = unassigned DNA
gtgtccgcggtgcaccggggcggaggctcgggcagtggcggcgcgggaggcggctcaggcggcggcagcggcagtggcgggggcggcggcggggcgggcggcgggggcggcggcagctctggcgggggcagcgggacagccgggggtcacagcggcctctcctccaacttcaatgaatggcatgaagagcaaaaatatcccttccggagtctttgaag

SEQ ID NO: 23508 - DNA, 3469 bp, Homo sapiens
  misc_feature 1..3469: note = ENST00000287538
  source 1..3469: mol_type = unassigned DNA; mol_type = unassigned DNA
ttactctggaggcgaagaggctgggactcgcgcggcgagcggcaagcggcgagtaacgagcctgcctactgcccgctgcccgcctgcccggccgctagccggctccgccacttggcgcagcccagcccggaggccggtacccagggagcctcctggccccgcggttctgtgcactcggggagaggaggggtgcccgggacaggattggcaaactccgccctccacttactattttgcttatttttctttgtgcgcgcctgttagtttgttaaaccagatctagtccgagtcttttctcctcccttctcctccctcctcctccccccgccaacaccccctccctgctctttcttcccctcctccctcctatccctctgcaggagactcttgcagtgacggaaagttgcagcccctggtagcgccttgggggtctccccgcagtgtccaaccgccgccacccctttccgactacggcacttcggagatctcctccttcgccggtaccctctctcacttcggccggatcgcctgtgcccagaacgtcccacccatgacgatgctcctggacggaggcccgcagttccctgggctgggagtgggcagcttcggcgcgccgcgccaccacgagatgcccaaccgtgagccggcaggcatggggctgaatcccttcggggactcaacccacgccgccgccgccgccgccgccgccgctgccttcaagctgagccctgccgcggcgcacgatctatcttcaggccagagctcggctttcacgccgcagggttcgggctacgccaacgccctgggccaccatcaccaccaccatcaccatcatcaccacaccagccaggtgcccagctacggtggcgctgcctctgccgccttcaactcaacgcgcgagtttctgttccgccagcgcagctccgggctcagtgaggcggcctcgggtggcgggcagcacgggctcttcgccggctcggcgagcagcctgcatgctccagctggcatccccgagccccctagctacttgctgtttcccgggctgcatgagcagggcgctgggcacccgtcgcccacagggcacgtggacaacaaccaggtccacctggggctgcgtggggagctgttcggccgtgctgacccataccgcccagtggccagcccgcgcacggacccctacgcggccggcgctcagtttcctaactacagccccatgaacatgaacatgggagtgaacgtggcggcccaccacgggcccggcgccttcttccgttatatgcggcagcctatcaagcaggagctgtcgtgcaagtggatcgacgaggctcagctgagccggcccaagaagagctgcgaccggaccttcagcaccatgcatgagctggtgacacatgtcaccatggagcatgtggggggcccggagcagaacaaccacgtctgctactgggaggagtgcccccgggagggcaagtctttcaaggcgaagtacaaactggtcaaccacatccgagtgcacacgggcgagaagcccttcccatgccccttcccgggctgcgggaagatctttgcccgttctgagaacctcaagatccacaagaggacccacacaggtgagaaacctttcaaatgtgaatttgaaggctgtgacagacgctttgccaacagcagcgaccgtaagaagcacatgcatgtgcatacctcggacaagccctatatctgcaaagtgtgcgacaagtcctacacgcacccgagctccctgcgcaaacacatgaaggttcatgaatctcaagggtcagattcctcccctgctgccagttcaggctatgaatcttccactccacccgctatagcttctgcaaacagtaaagataccactaaaaccccttctgcagttcaaactagcaccagccacaaccctggacttcctcctaattttaacgaatggtacgtctgaggacaaacacaaaccctgttaattatagaatggaccaaatacatttttaaaagaaaactgagaccaatcagatggaaatggagttttaaggcaagaggccatatatagggctacatcttgttaattgcaattgtccaggaaggttttgggcaagatccaaaagtagccatgcccttttctcaggatagaaaatatgttttggcatttgaagcattttttacaaaatctttacactactttttcttccccttcctcttgctctctgcacaccccattcttaaactcctccaattcattttaacacttgtcctgtttcttgagaggaagttatagaaggcttgttggtggtggtgatgttaaactgatggaaattctttttcgccttagtggtgattgtttaaactctcacagtcttaaaccgtgccaaagtcctgttatgtcttgaacttttcctcaaagcattacacttgtgaatgtatttttgtctaatagggtcgaaactgttgttcagtattttttcaggctgaggatgtgatgttactctacacattgtgacgtttagtatacagttgccttttgtaataactttttttttgtaaatacatatccattgatgccatatttatcgtttgtaatttaattattgctacaagtgccgggaactgaacaatatttatggataaatgttttctaacaaattctgtacagcttttgattataactgctttagcattaaaaattgttttgaaagaagaacacaatttacaattttggaaccactgactcctttctcttgttttgtaacagccttcttctacaaagaggagatgtgagcaaattaaatcttgtttgttggtatttataactcactcagatcccttttttaattgttaaattatttttctattacagtataaattccttacagtgtcagtttccatctgggaagactctcctttctttatctctatctcagatggttgtttaactgcgagtttaaatgtgtttgtcctggattttcggcatgcaaatcaaatattactgatcaattcagttagtggccatgacatctcaatcttgtacttcaaagactgagaagctggatttaatcatccctgccctacatatataaacataaggtaacctactgaattttatgtcccttagttctttattaccttacataaaaatgaaaattgcggcaggatgcatgtctgtctgttctatctagagatcacccatatacctatatatgtttgtatctatgacttatctaatctgcctatcaatctatctagtagctatctatatattttcaaaagatagcttatgtctaaaacagtggtgatgagtaaggccagttgagcattgcttacttatggttaaagtgcttcttaaaagaaccatagtccatttacaattttggaaggcaaaggctgatttgtttgctgtatatagttcaattcataattatcgcaattatccataacatttatatagcggtgtaataactgc

SEQ ID NO: 23509 - DNA, 1968 bp, Homo sapiens
  misc_feature 1..1968: note = ENST00000370606
  source 1..1968: mol_type = unassigned DNA; mol_type = unassigned DNA
gcaggagactcttgcagtgacggaaagttgcagcccctggtagcgccttgggggtctccccgcagtgtccaaccgccgccacccctttccgactacggcacttcggagatctcctccttcgccggtaccctctctcacttcggccggatcgcctgtgcccagaacgtcccacccatgacgatgctcctggacggaggcccgcagttccctgggctgggagtgggcagcttcggcgcgccgcgccaccacgagatgcccaaccgtgagccggcaggcatggggctgaatcccttcggggactcaacccacgccgccgccgccgccgccgccgccgctgccttcaagctgagccctgccgcggcgcacgatctatcttcaggccagagctcggctttcacgccgcagggttcgggctacgccaacgccctgggccaccatcaccaccaccatcaccatcatcaccacaccagccaggtgcccagctacggtggcgctgcctctgccgccttcaactcaacgcgcgagtttctgttccgccagcgcagctccgggctcagtgaggcggcctcgggtggcgggcagcacgggctcttcgccggctcggcgagcagcctgcatgctccagctggcatccccgagccccctagctacttgctgtttcccgggctgcatgagcagggcgctgggcacccgtcgcccacagggcacgtggacaacaaccaggtccacctggggctgcgtggggagctgttcggccgtgctgacccataccgcccagtggccagcccgcgcacggacccctacgcggccggcgctcagtttcctaactacagccccatgaacatgaacatgggagtgaacgtggcggcccaccacgggcccggcgccttcttccgttatatgcggcagcctatcaagcaggagctgtcgtgcaagtggatcgacgaggctcagctgagccggcccaagaagagctgcgaccggaccttcagcaccatgcatgagctggtgacacatgtcaccatggagcatgtggggggcccggagcagaacaaccacgtctgctactgggaggagtgcccccgggagggcaagtctttcaaggcgaagtacaaactggtcaaccacatccgagtgcacacgggcgagaagcccttcccatgccccttcccgggctgcgggaagatctttgcccgttctgagaacctcaagatccacaagaggacccacacaggtgagaaacctttcaaatgtgaatttgaaggctgtgacagacgctttgccaacagcagcgaccgtaagaagcacatgcatgtgcatacctcggacaagccctatatctgcaaagtgtgcgacaagtcctacacgcacccgagctccctgcgcaaacacatgaagtgttgtcctgcttggtatccgggacagtctctaattcctgacgaagaacttgatactgacgttggtatgcagcagccagccctccataacactacctatcctaaatgcagggttaatgccgaacctactgtgcaagaaatgatttactgatgaggtttcaaagaaaaccacatcaatttggatgtctgttaccttgaagtgatcattttaagagtagtagcttcttccctaggtataaaaagactattttcttcttttggtgtatttcatcctgtgttgagcaatcatttgtgaaatgaaaaagcaaaaaaactccccccactttaggatttataaatgggaagatggaggtgaagactggcctaattcataacccagtatgcattatctcatgcattgtgttgaccttggtgaaaatctttttcaaataccagcattctatatgtagaactaaagtgtttaaaactagaaacatgaattgttgttttgttaattttatgtttgtgttcagaaagcaatacccaggatccctttaatttttgtttgacttaaataaaaccatttaaatta

SEQ ID NO: 23510 - DNA, 366 bp, Homo sapiens
  misc_feature 1..366: note = ENST00000478471
  source 1..366: mol_type = unassigned DNA; mol_type = unassigned DNA
cgggaagaccgccgggagctcagtctcctgctgcttgcctctgagaaactccggcgctgaccgtattttaccccccttgggtttttgccttttgcaggtgagaaacctttcaaatgtgaatttgaaggctgtgacagacgctttgccaacagcagcgaccgtaagaagcacatgcatgtgcatacctcggacaagccctatatctgcaaagtgtgcgacaagtcctacacgcacccgagctccctgcgcaaacacatgaaggttcatgaatctcaagggtcagattcctcccctgctgccagttcaggctatgaatcttccactccacccgctatagcttctgcaaacagtaaagataccactaaa

SEQ ID NO: 23511 - DNA, 4331 bp, Homo sapiens
  misc_feature 1..4331: note = ENST00000383075
  source 1..4331: mol_type = unassigned DNA; mol_type = unassigned DNA
acacaacaagggaggggacctaaggggggaagggtagctgttgggagggggagagggaaaataattcttcaaaaaagaaaagtcagtcttctcctctccagtccgtggaaaatccaacggggacgttgacaagagggtatttttaggaaacacatccaaatatacagggtaagagtgaatgtgagaaaaaaaaaagttgtgggttgtagaagttatcaagtgggatttgcggcgctctctgcaggaaacgcgaacggctccagttcaaagccacatgcaccaacgtgacatataagccattaaaatatcatcctgacggctcatttctgcttcatcatacattccctaactgcttcctgaaagctggaaaaggagaagtgaaggatgaccgcctcgctggaaccacaaaagagaggcttggaggggtttgtggtcccctctcagccaccccgaaatgatgtgcagaaatgaggcgatcctggcaacaggtggagtggggctcaaagtcagaaaatgagatacaagacatccttggtgatgaggaaacgattacggctttaccgaaacactcttaaagagtcaagtagcagctctggacaccatggcccccagctcaccgccgcctccagcccctcggtgttcccgggcctccacgaggagcctccccaggcctcccccagccgtcctttgaatggactcctgcgtctggggctccctggagacatgtacgcgcggccggagcccttcccgccagggcctgcggcccgcagcgacgccctggcagctgccgcagccctgcatggctacgggggcatgaacctgacggtgaacctcgctgcgccccacggtcctggcgctttcttccgctacatgcgccagcccatcaaacaggagctcatctgcaagtggctggcggccgacggcaccgcgaccccgagcctctgctccaaaactttcagcaccatgcacgagctggtcacgcacgtcaccgtggagcacgtcggcggcccggaacaggccaaccacatttgcttctgggaggagtgtccgcgccagggaaagcccttcaaagccaaatacaaacttgtaaatcacatccgcgtgcacacgggcgagaagcccttcccttgtcctttcccggggtgtgggaaggtctttgctagatcagaaaatctcaaaatacacaaacgaactcacacaggcgagaagcccttcagatgcgagttcgagggctgcgagcggcgcttcgccaacagcagcgaccgtaagaagcattcgcacgtgcacactagcgacaagccatacacgtgcaaggtgcggggctgcgacaagtgctacacgcaccccagctcgctgcgtaagcacatgaaggtgcacgggcgctcgccgccgcccagctctggctacgattcggctacaccgtctgccctcgtgtcgccctcgtcggactgcggccacaagtcccaggtggcctcctcggcggcggtggcggcgcgtaccgccgacttgagcgaatgatgtccaccgcgttgctcgcaaggtaatctcgctccgcgcagctgagcgccccgcatctcgcgcctgctacatcaaagggcccgcgcacaaagcagtgtttcttcgccacggtgcatcttcatggtaagttaggatttctatggcaatgtgcaagtcgcactgaaatcctgaaaggccaagcctggagcccgtccaggcttttcattaaggacataatatttacgtctaacagaccttttttcttgtgtatacaagtatatatttttgtttgacgcggactaaatcattttcatttaatttccggtaaacaaaacccacgcgaatgggcacttgtacccgatcataataaaaatggataataatgtgaaggaagaaaagagccgcttgaatcgccgctcagccccctttgtttctgctttctgcggtgatcagagggcgcgtttgggtttgatggcgagtttctaaaggcgaggaaatggtttgtaagaggggaaagaaaaggagaaaggtctaatcaagctcgggttgttcaaagagtcgggttttggggttgaaagtgtgagtttgacggtgcatcagcatgccgcgttaggctcgccatggaaatacgcgcggggagcggccgcttcaaaggcggcacacttcactacagacactctattaagatacatttgcgctgacctttgctttcacgccatttaatactgtcactgcgctctccagtatatacttcctttctagaacccgacttgcccacgtttaggggttcactctgcaccctgatgtgggaggctttggcgcaggggacactttcaggaaagggaggagcacaaggactctgtgcatcttgactgcaccccaaagaggctccaggatcaggagtgaaagattttaaagcagcctccgaagcttaacaaatgagcattccaagctcagttttgtgcaaatcgcctttctgactcttgagtaggatggaggcttaaatttaatggcgacttggggggaagggagccaccctgggggagtctgaggagttcagactgtgcccttgggaatttccactctggctttccgtgccactcttcttcctttccatcccaaaagtctcttgcggcccctgaaacttgtttctttctaaggcagggtgtgtggtacccttaggcctggactagtcctagatgcaaactcaagagcccaaggccaaggggatgtggggaagatggcaggaaagttagaagtccatgttcccttaattgtcttgttgtttattttatccaagtaccccagtgaataggggaaaaataaacacagtgaaaaaaaaaatcaaacagtggagtcttctttagtgccagtccttgtggttgaataaaaaggatggtccgctttctattgagctgagaaatctttgaagtgggagttattatctgagacattcctgcttgtcgtcctaacaacgctgatgaaacgtaaaaggttctttgtcagcgatttgttctcctctctgtcaaactccctctgccccgttagtttcaaaccgtttctaaagagataaaaatcaaacttcttttaaaacaatatccacacactgcatcaatacataactttaggtctaagtcttgctaagggataaacaaaagcaatgcctagacatcagggtcagggcctggtctggtgaagtatgcagaagttggggggccctcgggacaagctttgggacatgaggaaaagaatgcagagagggtgcaagcagaatacataccctaagtccataattgtgtttctgcttctttctgctctggtttgcattcaatcagcccaagttgggtcacatagatgggtttcctttgggtacccctcaggctcctaatattcttgcccaggatccttggaacttaagaatgcagccaagcaattgttaatatctcctgctccttcaaagccacctctgctaaaaatagacccattgtgtgtttcttctcactagcagcaatcaacaagccctttctgccgttaataagaaggagaatagctgaaggagagagatattttattaatttcctgtttccttcagaatcttggcaattgaagtttagaaggtttggtctacaacacagtgatcgaaaatgcatgtaaatgcccatccttcccttcattcacgtgtgaagttgttcattttatattgtgcccagcaaagaaactttcacccagttcaggtttccccaaaactcctgtggtggttttaaaggtggtttaaataaataaggatgtgctggtccccctactctgtgtgtgctgaataaatggcttgtaaagaagtttttccaagctgtaacccatgctgttattatagttgctgcaaaatgttcttcctgatattgattttatttgttaactgaaggtctccatatgtttgtttatattgctaatttatgagaaaatgtaataattgcaatgaatgtgaattatacagacaggcaaacattttgtaatcataattcacatatacacaaaagcctggctgaaatctttagactatttgtaccctctctacccacactgtttgtgatttatcatctgtctctttagtgtcagttaaattatgaactaacttgaaaataaaagttgtttgactgaaagtgattgttgaatgaacaacaaagttgaaagccatggcttgatcttgtaaatatataaatgtaaatgatattaaatctgtgattccttttccctccaaaggcttttgtgtacatggcgctgcatttggctattttctttggaaataaataatgtgatgtttctcttcctcttttgaa

SEQ ID NO: 23512 - DNA, 3550 bp, Homo sapiens
  misc_feature 1..3550: note = ENST00000472749
  source 1..3550: mol_type = unassigned DNA; mol_type = unassigned DNA
aatattgtcactctaacgtgcactcgcgccttccctcggctctacagggcatcgcagccaccgatcccagcccctccccggcctatgccagccgcctggtggccctccgggctgcggagccaggcctggcctgacagcagcagctgttttcttcccgaagccgcagcgctcaagggcgtggttgcggtagacacctcggatcccatttggcctgtgcggaccctaccgcgccaacccctcgtcttaggaccgagaggcccgacagccaggtgggggtggtctgggcagaccggtcgacatcgcaagtcagtgcggactgggagggccagctgcccacagcacggtctccaggaagcctctggagcagcgtaatgaaatattattactggcgagcgtatctggagggatcccggaaggtttaggcgagaagcccttcagatgcgagttcgagggctgcgagcggcgcttcgccaacagcagcgaccgtaagaagcattcgcacgtgcacactagcgacaagccatacacgtgcaaggtgcggggctgcgacaagtgctacacgcaccccagctcgctgcgtaagcacatgaaggtgcacgggcgctcgccgccgcccagctctggctacgattcggctacaccgtctgccctcgtgtcgccctcgtcggactgcggccacaagtcccaggtggcctcctcggcggcggtggcggcgcgtaccgccgacttgagcgaatgatgtccaccgcgttgctcgcaaggtaatctcgctccgcgcagctgagcgccccgcatctcgcgcctgctacatcaaagggcccgcgcacaaagcagtgtttcttcgccacggtgcatcttcatggtaagttaggatttctatggcaatgtgcaagtcgcactgaaatcctgaaaggccaagcctggagcccgtccaggcttttcattaaggacataatatttacgtctaacagaccttttttcttgtgtatacaagtatatatttttgtttgacgcggactaaatcattttcatttaatttccggtaaacaaaacccacgcgaatgggcacttgtacccgatcataataaaaatggataataatgtgaaggaagaaaagagccgcttgaatcgccgctcagccccctttgtttctgctttctgcggtgatcagagggcgcgtttgggtttgatggcgagtttctaaaggcgaggaaatggtttgtaagaggggaaagaaaaggagaaaggtctaatcaagctcgggttgttcaaagagtcgggttttggggttgaaagtgtgagtttgacggtgcatcagcatgccgcgttaggctcgccatggaaatacgcgcggggagcggccgcttcaaaggcggcacacttcactacagacactctattaagatacatttgcgctgacctttgctttcacgccatttaatactgtcactgcgctctccagtatatacttcctttctagaacccgacttgcccacgtttaggggttcactctgcaccctgatgtgggaggctttggcgcaggggacactttcaggaaagggaggagcacaaggactctgtgcatcttgactgcaccccaaagaggctccaggatcaggagtgaaagattttaaagcagcctccgaagcttaacaaatgagcattccaagctcagttttgtgcaaatcgcctttctgactcttgagtaggatggaggcttaaatttaatggcgacttggggggaagggagccaccctgggggagtctgaggagttcagactgtgcccttgggaatttccactctggctttccgtgccactcttcttcctttccatcccaaaagtctcttgcggcccctgaaacttgtttctttctaaggcagggtgtgtggtacccttaggcctggactagtcctagatgcaaactcaagagcccaaggccaaggggatgtggggaagatggcaggaaagttagaagtccatgttcccttaattgtcttgttgtttattttatccaagtaccccagtgaataggggaaaaataaacacagtgaaaaaaaaaatcaaacagtggagtcttctttagtgccagtccttgtggttgaataaaaaggatggtccgctttctattgagctgagaaatctttgaagtgggagttattatctgagacattcctgcttgtcgtcctaacaacgctgatgaaacgtaaaaggttctttgtcagcgatttgttctcctctctgtcaaactccctctgccccgttagtttcaaaccgtttctaaagagataaaaatcaaacttcttttaaaacaatatccacacactgcatcaatacataactttaggtctaagtcttgctaagggataaacaaaagcaatgcctagacatcagggtcagggcctggtctggtgaagtatgcagaagttggggggccctcgggacaagctttgggacatgaggaaaagaatgcagagagggtgcaagcagaatacataccctaagtccataattgtgtttctgcttctttctgctctggtttgcattcaatcagcccaagttgggtcacatagatgggtttcctttgggtacccctcaggctcctaatattcttgcccaggatccttggaacttaagaatgcagccaagcaattgttaatatctcctgctccttcaaagccacctctgctaaaaatagacccattgtgtgtttcttctcactagcagcaatcaacaagccctttctgccgttaataagaaggagaatagctgaaggagagagatattttattaatttcctgtttccttcagaatcttggcaattgaagtttagaaggtttggtctacaacacagtgatcgaaaatgcatgtaaatgcccatccttcccttcattcacgtgtgaagttgttcattttatattgtgcccagcaaagaaactttcacccagttcaggtttccccaaaactcctgtggtggttttaaaggtggtttaaataaataaggatgtgctggtccccctactctgtgtgtgctgaataaatggcttgtaaagaagtttttccaagctgtaacccatgctgttattatagttgctgcaaaatgttcttcctgatattgattttatttgttaactgaaggtctccatatgtttgtttatattgctaatttatgagaaaatgtaataattgcaatgaatgtgaattatacagacaggcaaacattttgtaatcataattcacatatacacaaaagcctggctgaaatctttagactatttgtaccctctctacccacactgtttgtgatttatcatctgtctctttagtgtcagttaaattatgaactaacttgaaaataaaagttgtttgactgaaagtgattgttgaatgaacaacaaagttgaaagccatggcttgatcttgtaaatatataaatgtaaatgatattaaatctgtgattccttttccctccaaaggcttttgtgtacatggcgctgcatttggctattttctttggaaataaataatgtgatgtttctcttcctcttttg

SEQ ID NO: 23513 - DNA, 3317 bp, Homo sapiens
  misc_feature 1..3317: note = ENST00000494569
  source 1..3317: mol_type = unassigned DNA; mol_type = unassigned DNA
atttattccgcatctttctatcactgttttataaaatggtgccagtgtcccgcgaaatggcaggtgccaacaccttccagactgttcagtgtactagctgtgctcctgtagggtgggaatccagcgaccaggtggtgccggagacccgggctcaggagccgctgattgcgcagaagcgcaggttgtgcgcaaacctctctgtccgagcctcaacagggctcgggaattggggctttgtttgttctaaccagccccaaagcgcctgtttttcctggatgcggcgggagaagcaactacaaaggcaacagttctccagctgcgcgtcttcctcctcagctagacgctaggtagccggtcccttaactcagagcgctgggaggcagccatttgtttaaagcgcccagaaaccttcttcccccatttccgcagcacttgcagctccggcaggaatctaggcttccgggttctcggggtcctttcctctcctacacgtcagcgaattcagctggccgtgagctccccgattggggctcggtccggccaatattgtcactctaacgtgcactcgcgccttccctcggctctacagggcatcgcagccaccgatcccagcccctccccggcctatgccagccgcctggtggccctccgggctgcggagccaggcctggcctgacagcagcagctgttttcttcccgaagccgcagcgctcaagggcgtggttgcggtagacacctcggatcccatttggcctgtgcggaccctaccgcgccaacccctcgtcttaggaccgagaggcccgacagccaggtgggggtggtctgggcagaccggtcgacatcgcaagtcagtgcggactgggagggccagctgcccacagcacggtctccaggaagcctctggagcagcgtaatgaaatattattactggcgagcgtatctggagggatcccggaaggtttaggcaagatttgaagaatgctgctaaatgtttgccctcagggggtagaaggaaagagggagggggctccattcctgtaaaaatctcttctgaagtgaatcattgctcagaatacctctccctgcagcacgaatccactttatgcacacacaatgtgcatcggctgcgcatccttaaattatttcatcgctttggcgtttgcgcaaaacctactttaggaaacaatttgggccaggatgggggtgggtgggggggatgaacggctgggcggggtagcggcagagaagttagtctgaaacagcaactttaaatcgagcagatgtgagcttccccgttaactatattgtgagctcctccgttaatgtatttccgagcagaggtgcttctggttccaagtggagaaaatttggaggaaacaacccgagtggatcaggattttcgaggatggaaactcgactaagatggagtcactgtcgctcctcctccataccctccccatgagcccagaggaggaaggcgggagggatggaggcgttcaagagagggcaccgggggcgctctctgcacgagggaaaggggtgctcgacctgaggcgccgtggaaagggatttctgaaaatattttgtagttcttttccagaaaatgagagacgaatgggggagggtggcaagcacctgacgggaacacgacccacaagcactaatgtctctgcgttgcctccgccaggcgagaagcccttcagatgcgagttcgagggctgcgagcggcgcttcgccaacagcagcgaccgtaagaagcattcgcacgtgcacactagcgacaagccatacacgtgcaaggtgcggggctgcgacaagtgctacacgcaccccagctcgctgcgtaagcacatgaaggtgcacgggcgctcgccgccgcccagctctggctacgattcggctacaccgtctgccctcgtgtcgccctcgtcggactgcggccacaagtcccaggtggcctcctcggcggcggtggcggcgcgtaccgccgacttgagcgaatgatgtccaccgcgttgctcgcaaggtaatctcgctccgcgcagctgagcgccccgcatctcgcgcctgctacatcaaagggcccgcgcacaaagcagtgtttcttcgccacggtgcatcttcatggtaagttaggatttctatggcaatgtgcaagtcgcactgaaatcctgaaaggccaagcctggagcccgtccaggcttttcattaaggacataatatttacgtctaacagaccttttttcttgtgtatacaagtatatatttttgtttgacgcggactaaatcattttcatttaatttccggtaaacaaaacccacgcgaatgggcacttgtacccgatcataataaaaatggataataatgtgaaggaagaaaagagccgcttgaatcgccgctcagccccctttgtttctgctttctgcggtgatcagagggcgcgtttgggtttgatggcgagtttctaaaggcgaggaaatggtttgtaagaggggaaagaaaaggagaaaggtctaatcaagctcgggttgttcaaagagtcgggttttggggttgaaagtgtgagtttgacggtgcatcagcatgccgcgttaggctcgccatggaaatacgcgcggggagcggccgcttcaaaggcggcacacttcactacagacactctattaagatacatttgcgctgacctttgctttcacgccatttaatactgtcactgcgctctccagtatatacttcctttctagaacccgacttgcccacgtttaggggttcactctgcaccctgatgtgggaggctttggcgcaggggacactttcaggaaagggaggagcacaaggactctgtgcatcttgactgcaccccaaagaggctccaggatcaggagtgaaagattttaaagcagcctccgaagcttaacaaatgagcattccaagctcagttttgtgcaaatcgcctttctgactcttgagtaggatggaggcttaaatttaatggcgacttggggggaagggagccaccctgggggagtctgaggagttcagactgtgcccttgggaatttccactctggctttccgtgccactcttcttcctttccatcccaaaagtctcttgcggcccctgaaacttgtttctttctaaggcagggtgtgtggtacccttaggcctggactagtcctagatgcaaactcaagagcccaaggccaaggggatgtggggaagatggcaggaaagttagaagtccatgttcccttaattgtcttgttgtttattttatccaagtaccccagtgaataggggaaaaataaacacagtg

SEQ ID NO: 23514 - DNA, 2965 bp, Homo sapiens
  misc_feature 1..2965: note = ENST00000493664
  source 1..2965: mol_type = unassigned DNA; mol_type = unassigned DNA
acttctgtagtgtgcaggatttcgcgtaggcattaatagccaagggggtgggcgcgcccaaatccaaaccttgggaagaagaagagaaagaaagaaagaaaaaaaaaactttacagaagtttttttgtgtggttttcctttcccctccccactgtcaggtggcagtggtgttagcggcccggtacagggagctccggggagcgtgggtcggcaagcagccggccgccctctcctagccaagcggggcactgaaaatatatatggctggggcgcttcagaaccaccaccacctccaacatcatcatttctgtcacctccactccccgcagggcatcgtgccccggagagccccggggtgttagccgccaaagtgcgcttggggctcagctcctacccctctggagcagaacccccagcaacccacagactcagccctgcgccttccattaccccttacatctactctgccgctaccatccctctctagctcatggcgcggcgggggacttggcccaacagcaattcggcccaatggcggcggaggtgtttggccttgctctgtccaccgggttcactgctggcgctgtctggctctgagttccacggctgactgcagaggccgtagtgcggcagggctgggcctgccccccggggcccagggaagagcgcgcagcccacgccacccgttctcatgcgcgctatttgtttcgacaacaggtagcagctctggacaccatggcccccagctcaccgccgcctccagcccctcggtgttcccgggcctccacgaggagcctccccaggcctcccccagccgtcctttgaatggactcctgcgtctggggctccctggagacatgtacgcgcggccggagcccttcccgccagggcctgcggcccgcagcgacgccctggcagctgccgcagccctgcatggctacgggggcatgaacctgacggtgaacctcgctgcgccccacggtcctggcgctttcttccgctacatgcgccagcccatcaaacaggagctcatctgcaagtggctggcggccgacggcaccgcgaccccgagcctctgctccaaaactttcagcaccatgcacgagctggtcacgcacgtcaccgtggagcacgtcggcggcccggaacaggccaaccacatttgcttctgggaggagtgtccgcgccagggaaagcccttcaaagccaaatacaaacttgtaaatcacatccgcgtgcacacgggcgagaagcccttcccttgtcctttcccggggtgtgggaaggtctttgctagatcagaaaatctcaaaatacacaaacgaactcacacaggcgagaagcccttcagatgcgagttcgagggctgcgagcggcgcttcgccaacagcagcgaccgtaagaagcattcgcacgtgcacactagcgacaagccatacacgtgcaaggtgcggggctgcgacaagtgctacacgcaccccagctcgctgcgtaagcacatgaaggtgcacgggcgctcgccgccgcccagctctggctacgattcggctacaccgtctgccctcgtgtcgccctcgtcggactgcggccacaagtcccaggtggcctcctcggcggcggtggcggcgcgtaccgccgacttgagcgaatgatgtccaccgcgttgctcgcaaggtaatctcgctccgcgcagctgagcgccccgcatctcgcgcctgctacatcaaagggcccgcgcacaaagcagtgtttcttcgccacggtgcatcttcatggtaagttaggatttctatggcaatgtgcaagtcgcactgaaatcctgaaaggccaagcctggagcccgtccaggcttttcattaaggacataatatttacgtctaacagaccttttttcttgtgtatacaagtatatatttttgtttgacgcggactaaatcattttcatttaatttccggtaaacaaaacccacgcgaatgggcacttgtacccgatcataataaaaatggataataatgtgaaggaagaaaagagccgcttgaatcgccgctcagccccctttgtttctgctttctgcggtgatcagagggcgcgtttgggtttgatggcgagtttctaaaggcgaggaaatggtttgtaagaggggaaagaaaaggagaaaggtctaatcaagctcgggttgttcaaagagtcgggttttggggttgaaagtgtgagtttgacggtgcatcagcatgccgcgttaggctcgccatggaaatacgcgcggggagcggccgcttcaaaggcggcacacttcactacagacactctattaagatacatttgcgctgacctttgctttcacgccatttaatactgtcactgcgctctccagtatatacttcctttctagaacccgacttgcccacgtttaggggttcactctgcaccctgatgtgggaggctttggcgcaggggacactttcaggaaagggaggagcacaaggactctgtgcatcttgactgcaccccaaagaggctccaggatcaggagtgaaagattttaaagcagcctccgaagcttaacaaatgagcattccaagctcagttttgtgcaaatcgcctttctgactcttgagtaggatggaggcttaaatttaatggcgacttggggggaagggagccaccctgggggagtctgaggagttcagactgtgcccttgggaatttccactctggctttccgtgccactcttcttcctttccatcccaaaagtctcttgcggcccctgaaacttgtttctttctaaggcagggtgtgtggtacccttaggcctggactagtcctagatgcaaactcaagagcccaaggccaaggggatgtggggaagatggcaggaaagttagaagtccatgttcccttaattgtcttgttgtttattttatccaagtaccccagtgaataggggaaaaataaacacagtg

SEQ ID NO: 23515 - DNA, 1774 bp, Homo sapiens
  misc_feature 1..1774: note = ENST00000484399
  source 1..1774: mol_type = unassigned DNA; mol_type = unassigned DNA
gagaagtgatccagacctcttagaagttgggttggggctgccttatgggtggacagggatctctagggaacctcacacccatttcccccagaagcaaaagagtaaattctattattgccaaccaaccaggacttttccatgccagacatcctgccatgaggaaatttcagagcgaggacgcccagcatgccgcccttctgtaggaatgcaaagttaggcctcctttctttcctgatttgtgctggaaggagcttattacctttggggaagaatgccttttggttagaaagaattgaaaataataataccctctgggaaaaggctcaaagtcagaaaatgagatacaagacatccttggtgatgaggaaacgattacggctttaccgaaacactcttaaagagtcaagtagcagctctggacaccatggcccccagctcaccgccgcctccagcccctcggtgttcccgggcctccacgaggagcctccccaggcctcccccagccgtcctttgaatggactcctgcgtctggggctccctggagacatgtacgcgcggccggagcccttcccgccagggcctgcggcccgcagcgacgccctggcagctgccgcagccctgcatggctacgggggcatgaacctgacggtgaacctcgctgcgccccacggtcctggcgctttcttccgctacatgcgccagcccatcaaacaggagctcatctgcaagtggctggcggccgacggcaccgcgaccccgagcctctgctccaaaactttcagcaccatgcacgagctggtcacgcacgtcaccgtggagcacgtcggcggcccggaacaggccaaccacatttgcttctgggaggagtgtccgcgccagggaaagcccttcaaagccaaatacaaacttgtaaatcacatccgcgtgcacacgggcgagaagcccttcccttgtcctttcccggggtgtgggaaggtctttgctagatcagaaaatctcaaaatacacaaacgaactcacacaggcgagaagcccttcagatgcgagttcgagggctgcgagcggcgcttcgccaacagcagcgaccgtaagaagcattcgcacgtgcacactagcgacaagccatacacgtgcaaggtgcggggctgcgacaagtgctacacgcaccccagctcgctgcgtaagcacatgaaggtgcacgggcgctcgccgccgcccagctctggctacgattcggctacaccgtctgccctcgtgtcgccctcgtcggactgcggccacaagtcccaggtggcctcctcggcggcggtggcggcgcgtaccgccgacttgagcgaatgatgtccaccgcgttgctcgcaaggtaatctcgctccgcgcagctgagcgccccgcatctcgcgcctgctacatcaaagggcccgcgcacaaagcagtgtttcttcgccacggtgcatcttcatggtaagttaggatttctatggcaatgtgcaagtcgcactgaaatcctgaaaggccaagcctggagcccgtccaggcttttcattaaggacataatatttacgtctaacagaccttttttcttgtgtatacaagtatatatttttgtttgacgcggactaaatcattttcatttaatttccggtaaacaaaacccacgcgaatgggcacttgtacccgatcataataaaaatggataataatgtgaaggaagaaaagagccgcttgaatcgccgctcagccccctttgtttctgctttctgcggtgatcaga

SEQ ID NO: 23516 - DNA, 1481 bp, Homo sapiens
  misc_feature 1..1481: note = ENST00000473123
  source 1..1481: mol_type = unassigned DNA; mol_type = unassigned DNA
gaaagaaagctaggactggctcaaaggttggatctgaaagttggggttgatgaatggcccatgtcaaagtcttaggaaagcggaggggcttttggagggttgcacttcggccgtcaccgtcttcaggaaactccctttggattccaaggctcaaagtcagaaaatgagatacaagacatccttggtgatgaggaaacgattacggctttaccgaaacactcttaaagagtcaagtagcagctctggacaccatggcccccagctcaccgccgcctccagcccctcggtgttcccgggcctccacgaggagcctccccaggcctcccccagccgtcctttgaatggactcctgcgtctggggctccctggagacatgtacgcgcggccggagcccttcccgccagggcctgcggcccgcagcgacgccctggcagctgccgcagccctgcatggctacgggggcatgaacctgacggtgaacctcgctgcgccccacggtcctggcgctttcttccgctacatgcgccagcccatcaaacaggagctcatctgcaagtggctggcggccgacggcaccgcgaccccgagcctctgctccaaaactttcagcaccatgcacgagctggtcacgcacgtcaccgtggagcacgtcggcggcccggaacaggccaaccacatttgcttctgggaggagtgtccgcgccagggaaagcccttcaaagccaaatacaaacttgtaaatcacatccgcgtgcacacgggcgagaagcccttcccttgtcctttcccggggtgtgggaaggtctttgctagatcagaaaatctcaaaatacacaaacgaactcacacaggcgagaagcccttcagatgcgagttcgagggctgcgagcggcgcttcgccaacagcagcgaccgtaagaagcattcgcacgtgcacactagcgacaagccatacacgtgcaaggtgcggggctgcgacaagtgctacacgcaccccagctcgctgcgtaagcacatgaaggtgcacgggcgctcgccgccgcccagctctggctacgattcggctacaccgtctgccctcgtgtcgccctcgtcggactgcggccacaagtcccaggtggcctcctcggcggcggtggcggcgcgtaccgccgacttgagcgaatgatgtccaccgcgttgctcgcaaggtaatctcgctccgcgcagctgagcgccccgcatctcgcgcctgctacatcaaagggcccgcgcacaaagcagtgtttcttcgccacggtgcatcttcatggtaagttaggatttctatggcaatgtgcaagtcgcactgaaatcctgaaaggccaagcctggagcccgtccaggcttttcattaaggacataatatttacgtctaacagaccttttttcttgtgtatacaagtatatatttttgtttgacgcggactaaatcattttcatttaatttccggtaaacaaaa

SEQ ID NO: 23517 - DNA, 834 bp, Homo sapiens
  misc_feature 1..834: note = ENST00000463850
  source 1..834: mol_type = unassigned DNA; mol_type = unassigned DNA
agctggccgtgagctccccgattggggctcggtccggccaatattgtcactctaacgtgcactcgcgccttccctcggctctacagggcatcgcagccaccgatcccagcccctccccggcctatgccagccgcctggtggccctccgggctgcggagccaggcctggcctgacagcagcagctgttttcttcccgaagccgcagcgctcaagggcgtggttgcggtagacacctcggatcccatttggcctgtgcggaccctaccgcgccaacccctcgtcttaggaccgagaggcccgacagccaggcgagaagcccttcagatgcgagttcgagggctgcgagcggcgcttcgccaacagcagcgaccgtaagaagcattcgcacgtgcacactagcgacaagccatacacgtgcaaggtgcggggctgcgacaagtgctacacgcaccccagctcgctgcgtaagcacatgaaggtgcacgggcgctcgccgccgcccagctctggctacgattcggctacaccgtctgccctcgtgtcgccctcgtcggactgcggccacaagtcccaggtggcctcctcggcggcggtggcggcgcgtaccgccgacttgagcgaatgatgtccaccgcgttgctcgcaaggtaatctcgctccgcgcagctgagcgccccgcatctcgcgcctgctacatcaaagggcccgcgcacaaagcagtgtttcttcgccacggtgcatcttcatggtaagttaggatttctatggcaatgtgcaagtcgcactgaaatcctgaaaggccaagcctggagcccgtccaggcttttcattaag

SEQ ID NO: 23518 - DNA, 534 bp, Homo sapiens
  misc_feature 1..534: note = ENST00000480015
  source 1..534: mol_type = unassigned DNA; mol_type = unassigned DNA
ttcctggccctgccactgatgaattttcttctgctctatcctcttcagacgcaattagacaattagcactcctgcccgcagcccccacaactttcatcagatgaaataacatcctaactggagtggaactattttcatgactccaaataaaaaatgcagtcttccaaatacacctttagtgaatccgtccttgagaaagggggactgaaattcctgcctacacctaatacaatagggcccagaggctgcctgacccagcgcgggcagtcggcaacaaacaactccttcccatagtgaaacaccaaccccaccactaaggtgcagagggcatttgcggaacttgctgcttctgccaatgtttaaaaagtcccccttcctgaaatgtccaccgcgttgctcgcaaggtaatctcgctccgcgcagctgagcgccccgcatctcgcgcctgctacatcaaagggcccgcgcacaaagcagtgtttcttcgccacggtgcatcttcatggtaagttaggatttctatggcaatgtgca

SEQ ID NO: 23519 - DNA, 610 bp, Homo sapiens
  misc_feature 1..610: note = ENST00000464502
  source 1..610: mol_type = unassigned DNA; mol_type = unassigned DNA
gtggcggtcacagcgatcccggaacaatggtgcctcggggagggaggcgcgggccagcaaccgcgctcggcctggccaccgccacccagctcctctccagggacccctcggccggggccgggagctcaccacaccttccccggcgtctgagggcgagtcagtgctggggatccgaggcgagaagcccttcagatgcgagttcgagggctgcgagcggcgcttcgccaacagcagcgaccgtaagaagcattcgcacgtgcacactagcgacaagccatacacgtgcaaggtgcggggctgcgacaagtgctacacgcaccccagctcgctgcgtaagcacatgaaggtgcacgggcgctcgccgccgcccagctctggctacgattcggctacaccgtctgccctcgtgtcgccctcgtcggactgcggccacaagtcccaggtggcctcctcggcggcggtggcggcgcgtaccgccgacttgagcgaatgatgtccaccgcgttgctcgcaaggtaatctcgctccgcgcagctgagcgccccgcatctcgcgcctgctacatcaaagggcccgcgcacaaagcagtgtttcttcgccacggtgcatc

SEQ ID NO: 23520 - DNA, 925 bp, Homo sapiens
  misc_feature 1..925: note = ENST00000491672
  source 1..925: mol_type = unassigned DNA; mol_type = unassigned DNA
aaaaaagaaaagtcagtcttctcctctccagtccgtggaaaatccaacggggacgttgacaagagggtatttttaggaaacacatccaaatatacagggtaagagtgaatgtgagaaaaaaaaaagttgtgggttgtagaagttatcaagtgggatttgcggcgctctctgcaggaaacgcgaacggctccagttcaaagccacatgcaccaacgtgacatataagccattaaaatatcatcctgacggctcatttctgcttcatcatacattccctaactgcttcctgaaagctggaaaaggagaagtgaaggatgaccgcctcgctggaaccacaaaagagaggcttggaggggtttgtggtcccctctcagccaccccgaaatgatgtgcagaaatgaggcgatcctggcaacaggtggagtggggctcaaagtcagaaaatgagatacaagacatccttggtgatgaggaaacgattacggctttaccgaaacactcttaaagagtcaagcgagaagcccttcagatgcgagttcgagggctgcgagcggcgcttcgccaacagcagcgaccgtaagaagcattcgcacgtgcacactagcgacaagccatacacgtgcaaggtgcggggctgcgacaagtgctacacgcaccccagctcgctgcgtaagcacatgaaggtgcacgggcgctcgccgccgcccagctctggctacgattcggctacaccgtctgccctcgtgtcgccctcgtcggactgcggccacaagtcccaggtggcctcctcggcggcggtggcggcgcgtaccgccgacttgagcgaatgatgtccaccgcgttgctcgcaaggtaatctcgctccgcgcagctgagcgccccgcatctcgcgcctgctacatcaaagggcccgcgcacaaagcag

SEQ ID NO: 23521 - DNA, 708 bp, Homo sapiens
  misc_feature 1..708: note = ENST00000475502
  source 1..708: mol_type = unassigned DNA; mol_type = unassigned DNA
ccggccaatattgtcactctaacgtgcactcgcgccttccctcggctctacagggcatcgcagccaccgatcccagcccctccccggcctatgccagccgcctggtggccctccgggctgcggagccaggcctggcctgacagcagcagctgttttcttcccgaagccgcagcgctcaagggcgtggttgcggtagacacctcggatcccatttggcctgtgcggaccctaccgcgccaacccctcgtcttaggaccgagaggcccgacagccaggtgggggtggtctgggcagaccggtcgacatcgcaagtcagtgcggactgggagggccagctgcccacagcacggtctccaggaagcctctggagcagcgcgagaagcccttcagatgcgagttcgagggctgcgagcggcgcttcgccaacagcagcgaccgtaagaagcattcgcacgtgcacactagcgacaagccatacacgtgcaaggtgcggggctgcgacaagtgctacacgcaccccagctcgctgcgtaagcacatgaaggtgcacgggcgctcgccgccgcccagctctggctacgattcggctacaccgtctgccctcgtgtcgccctcgtcggactgcggccacaagtcccaggtggcctcctcggcggcggtggcggcgcgtaccgccgacttgagcgaatgatgtccaccgcgttgctc

SEQ ID NO: 23522 - DNA, 929 bp, Homo sapiens
  misc_feature 1..929: note = ENST00000462748
  source 1..929: mol_type = unassigned DNA; mol_type = unassigned DNA
gcagaggatgagtccatcccttcttcccaggaggagggaaaaggggtacaaatggggctcccactggcacaggaaccaggagcagtttgttgcctgcctgccttcccttctctccttgtgaattgcctgggtgccccaccgtgggcacaagaatggaagtcgtggcccagagcttccctcgcgaaaaatgagcaaggcgggtgccgggagggggcctttacaggaggctcaaagtcagaaaatgagatacaagacatccttggtgatgaggaaacgattacggctttaccgaaacactcttaaagagtcaagtagcagctctggacaccatggcccccagctcaccgccgcctccagcccctcggtgttcccgggcctccacgaggagcctccccaggcctcccccagccgtcctttgaatggactcctgcgtctggggctccctggagacatgtacgcgcggccggagcccttcccgccagggcctgcggcccgcagcgacgccctggcagctgccgcagccctgcatggctacgggggcatgaacctgacggtgaacctcgctgcgccccacggtcctggcgctttcttccgctacatgcgccagcccatcaaacaggagctcatctgcaagtggctggcggccgacggcaccgcgaccccgagcctctgctccaaaactttcagcaccatgcacgagctggtcacgcacgtcaccgtggagcacgtcggcggcccggaacaggccaaccacatttgcttctgggaggagtgtccgcgccagggaaagcccttcaaagccaaatacaaacttgtaaatcacatccgcgtgcacacgggcgagaagcccttcccttgtcctttcccggggtgtgggaaggtctttgctagatcagaaaatctcaaaatacacaaacgaactcacacag

SEQ ID NO: 23523 - DNA, 500 bp, Homo sapiens
  misc_feature 1..500: note = ENST00000484586
  source 1..500: mol_type = unassigned DNA; mol_type = unassigned DNA
ccacttggatttggcctgtggttcaacaagttaaacaactgcttgttctgtgggcagacatccccattgacagaggacttgctgtgtttgtccagcctgagaccttttcaatgactgtttttctttctaggccaaattgagggtgggggccggatagatgcttctgtctggctgctcaactgcctcagccttgcctgacagatgcagaggtcctcaggatggctttaagtatttaaggcggccaatggcttggctcaaagtcagaaaatgagatacaagacatccttggtgatgaggaaacgattacggctttaccgaaacactcttaaagagtcaagtagcagctctggacaccatggcccccagctcaccgccgcctccagcccctcggtgttcccgggcctccacgaggagcctccccaggcctcccccagccgtcctttgaatggactcctgcgtctggggctccctggagacatgtacgcgcggccggagccctt

SEQ ID NO: 23524 - DNA, 565 bp, Homo sapiens
  misc_feature 1..565: note = ENST00000463250
  source 1..565: mol_type = unassigned DNA; mol_type = unassigned DNA
gcttcatcatacattccctaactgcttcctgaaagctggaaaaggagaagtgaaggatgaccgcctcgctggaaccacaaaagagaggcttggaggggtttgtggtcccctctcagccaccccgaaatgatgtgcagaaatgaggcgatcctggcaacaggtggagtgggggtcaaagcgccaagttagcccagatggcagcaagacgatggaacttctccgccccaacctgacggcagatgccgcctgagtccacctcagggcggctccttgccctccctcaccctggtcctgcctcaggaagctgactgctgggatctgctctctgcgcgcggccagcagtgggctcaaagtcagaaaatgagatacaagacatccttggtgatgaggaaacgattacggctttaccgaaacactcttaaagagtcaagtagcagctctggacaccatggcccccagctcaccgccgcctccagcccctcggtgttcccgggcctccacgaggagcctccccaggcctcccccagccgtcctttgaatggactcctgcgtctggggctccctg

SEQ ID NO: 23525 - DNA, 845 bp, Homo sapiens
  misc_feature 1..845: note = ENST00000464144
  source 1..845: mol_type = unassigned DNA; mol_type = unassigned DNA
agagggaaaataattcttcaaaaaagaaaagtcagtcttctcctctccagtccgtggaaaatccaacggggacgttgacaagagggtatttttaggaaacacatccaaatatacagggtaagagtgaatgtgagaaaaaaaaaagttgtgggttgtagaagttatcaagtgggatttgcggcgctctctgcaggaaacgcgaacggctccagttcaaagccacatgcaccaacgtgacatataagccattaaaatatcatcctgacggctcatttctgcttcatcatacattccctaactgcttcctgaaagctggaaaaggagaagtgaaggatgaccgcctcgctggaaccacaaaagagaggcttggaggggtttgtggtcccctctcagccaccccgaaatgatgtgcagaaatgaggcgatcctggcaacaggtggagtgggggtcaaagcgccaagttagcccagatggcagcaagacgatggaacttctccgccccaacctgacggcagatgccgcctgagtccacctcagggcggctccttgccctccctcaccctggtcctgcctcaggaagctgactgctgggatctgctctctgcgcgcggccagcagtgggttcgggacttggctttctttatctccaatgcgaacaagagcagcaactagctctctggggagcaggccgcagctcctaggattctggcccctagcctagacccaggggcattggaaattaggggccaatgaggagggaatagagctgagctgtgaaagaaagctaggactggctcaaaggttggatctgaaagttggggttgatgaatggcccatgtcaaag

SEQ ID NO: 23526 - DNA, 3979 bp, Homo sapiens
  misc_feature 1..3979: note = ENST00000425731
  source 1..3979: mol_type = unassigned DNA; mol_type = unassigned DNA
gaaagaaagctaggactggctcaaaggttggatctgaaagttggggttgatgaatggcccatgtcaaagtcttaggaaagcggaggggcttttggagggttgcacttcggccgtcaccgtcttcaggaaactccctttggattccaaggctcaaagtcagaaaatgagatacaagacatccttggtgatgaggaaacgattacggctttaccgaaacactcttaaagagtcaagtagcagctctggacaccatggcccccagctcaccgccgcctccagcccctcggtgttcccgggcctccacgaggagcctccccaggcctcccccagccgtcctttgaatggactcctgcgtctggggctccctggagacatgtacgcgcggccggagcccttcccgccagggcctgcggcccgcagcgacgccctggcagctgccgcagccctgcatggctacgggggcatgaacctgacggtgaacctcgctgcgccccacggtcctggcgctttcttccgctacatgcgccagcccatcaaacaggagctcatctgcaagtggctggcggccgacggcaccgcgaccccgagcctctgctccaaaactttcagcaccatgcacgagctggtcacgcacgtcaccgtggagcacgtcggcggcccggaacaggccaaccacatttgcttctgggaggagtgtccgcgccagggaaagcccttcaaagccaaatacaaacttgtaaatcacatccgcgtgcacacgggcgagaagcccttcccttgtcctttcccggggtgtgggaaggtctttgctagatcagaaaatctcaaaatacacaaacgaactcacacaggcgagaagcccttcagatgcgagttcgagggctgcgagcggcgcttcgccaacagcagcgaccgtaagaagcattcgcacgtgcacactagcgacaagccatacacgtgcaaggtgcggggctgcgacaagtgctacacgcaccccagctcgctgcgtaagcacatgaaggtgcacgggcgctcgccgccgcccagctctggctacgattcggctacaccgtctgccctcgtgtcgccctcgtcggactgcggccacaagtcccaggtggcctcctcggcggcggtggcggcgcgtaccgccgacttgagcgaatgatgtccaccgcgttgctcgcaaggtaatctcgctccgcgcagctgagcgccccgcatctcgcgcctgctacatcaaagggcccgcgcacaaagcagtgtttcttcgccacggtgcatcttcatggtaagttaggatttctatggcaatgtgcaagtcgcactgaaatcctgaaaggccaagcctggagcccgtccaggcttttcattaaggacataatatttacgtctaacagaccttttttcttgtgtatacaagtatatatttttgtttgacgcggactaaatcattttcatttaatttccggtaaacaaaacccacgcgaatgggcacttgtacccgatcataataaaaatggataataatgtgaaggaagaaaagagccgcttgaatcgccgctcagccccctttgtttctgctttctgcggtgatcagagggcgcgtttgggtttgatggcgagtttctaaaggcgaggaaatggtttgtaagaggggaaagaaaaggagaaaggtctaatcaagctcgggttgttcaaagagtcgggttttggggttgaaagtgtgagtttgacggtgcatcagcatgccgcgttaggctcgccatggaaatacgcgcggggagcggccgcttcaaaggcggcacacttcactacagacactctattaagatacatttgcgctgacctttgctttcacgccatttaatactgtcactgcgctctccagtatatacttcctttctagaacccgacttgcccacgtttaggggttcactctgcaccctgatgtgggaggctttggcgcaggggacactttcaggaaagggaggagcacaaggactctgtgcatcttgactgcaccccaaagaggctccaggatcaggagtgaaagattttaaagcagcctccgaagcttaacaaatgagcattccaagctcagttttgtgcaaatcgcctttctgactcttgagtaggatggaggcttaaatttaatggcgacttggggggaagggagccaccctgggggagtctgaggagttcagactgtgcccttgggaatttccactctggctttccgtgccactcttcttcctttccatcccaaaagtctcttgcggcccctgaaacttgtttctttctaaggcagggtgtgtggtacccttaggcctggactagtcctagatgcaaactcaagagcccaaggccaaggggatgtggggaagatggcaggaaagttagaagtccatgttcccttaattgtcttgttgtttattttatccaagtaccccagtgaataggggaaaaataaacacagtgaaaaaaaaaatcaaacagtggagtcttctttagtgccagtccttgtggttgaataaaaaggatggtccgctttctattgagctgagaaatctttgaagtgggagttattatctgagacattcctgcttgtcgtcctaacaacgctgatgaaacgtaaaaggttctttgtcagcgatttgttctcctctctgtcaaactccctctgccccgttagtttcaaaccgtttctaaagagataaaaatcaaacttcttttaaaacaatatccacacactgcatcaatacataactttaggtctaagtcttgctaagggataaacaaaagcaatgcctagacatcagggtcagggcctggtctggtgaagtatgcagaagttggggggccctcgggacaagctttgggacatgaggaaaagaatgcagagagggtgcaagcagaatacataccctaagtccataattgtgtttctgcttctttctgctctggtttgcattcaatcagcccaagttgggtcacatagatgggtttcctttgggtacccctcaggctcctaatattcttgcccaggatccttggaacttaagaatgcagccaagcaattgttaatatctcctgctccttcaaagccacctctgctaaaaatagacccattgtgtgtttcttctcactagcagcaatcaacaagccctttctgccgttaataagaaggagaatagctgaaggagagagatattttattaatttcctgtttccttcagaatcttggcaattgaagtttagaaggtttggtctacaacacagtgatcgaaaatgcatgtaaatgcccatccttcccttcattcacgtgtgaagttgttcattttatattgtgcccagcaaagaaactttcacccagttcaggtttccccaaaactcctgtggtggttttaaaggtggtttaaataaataaggatgtgctggtccccctactctgtgtgtgctgaataaatggcttgtaaagaagtttttccaagctgtaacccatgctgttattatagttgctgcaaaatgttcttcctgatattgattttatttgttaactgaaggtctccatatgtttgtttatattgctaatttatgagaaaatgtaataattgcaatgaatgtgaattatacagacaggcaaacattttgtaatcataattcacatatacacaaaagcctggctgaaatctttagactatttgtaccctctctacccacactgtttgtgatttatcatctgtctctttagtgtcagttaaattatgaactaacttgaaaataaaagttgtttgactgaaagtgattgttgaatgaacaacaaagttgaaagccatggcttgatcttgtaaatatataaatgtaaatgatattaaatctgtgattccttttccctccaaaggcttttgtgtacatggcgctgcatttggctattttctttggaaataaataatgtgatgtttctcttcctcttttg

SEQ ID NO: 23527 - DNA, 4152 bp, Homo sapiens
  misc_feature 1..4152: note = ENST00000525172
  source 1..4152: mol_type = unassigned DNA; mol_type = unassigned DNA
gagaagtgatccagacctcttagaagttgggttggggctgccttatgggtggacagggatctctagggaacctcacacccatttcccccagaagcaaaagagtaaattctattattgccaaccaaccaggacttttccatgccagacatcctgccatgaggaaatttcagagcgaggacgcccagcatgccgcccttctgtaggaatgcaaagttaggcctcctttctttcctgatttgtgctggaaggagcttattacctttggggaagaatgccttttggttagaaagaattgaaaataataataccctctgggaaaaggctcaaagtcagaaaatgagatacaagacatccttggtgatgaggaaacgattacggctttaccgaaacactcttaaagagtcaagtagcagctctggacaccatggcccccagctcaccgccgcctccagcccctcggtgttcccgggcctccacgaggagcctccccaggcctcccccagccgtcctttgaatggactcctgcgtctggggctccctggagacatgtacgcgcggccggagcccttcccgccagggcctgcggcccgcagcgacgccctggcagctgccgcagccctgcatggctacgggggcatgaacctgacggtgaacctcgctgcgccccacggtcctggcgctttcttccgctacatgcgccagcccatcaaacaggagctcatctgcaagtggctggcggccgacggcaccgcgaccccgagcctctgctccaaaactttcagcaccatgcacgagctggtcacgcacgtcaccgtggagcacgtcggcggcccggaacaggccaaccacatttgcttctgggaggagtgtccgcgccagggaaagcccttcaaagccaaatacaaacttgtaaatcacatccgcgtgcacacgggcgagaagcccttcccttgtcctttcccggggtgtgggaaggtctttgctagatcagaaaatctcaaaatacacaaacgaactcacacaggcgagaagcccttcagatgcgagttcgagggctgcgagcggcgcttcgccaacagcagcgaccgtaagaagcattcgcacgtgcacactagcgacaagccatacacgtgcaaggtgcggggctgcgacaagtgctacacgcaccccagctcgctgcgtaagcacatgaaggtgcacgggcgctcgccgccgcccagctctggctacgattcggctacaccgtctgccctcgtgtcgccctcgtcggactgcggccacaagtcccaggtggcctcctcggcggcggtggcggcgcgtaccgccgacttgagcgaatgatgtccaccgcgttgctcgcaaggtaatctcgctccgcgcagctgagcgccccgcatctcgcgcctgctacatcaaagggcccgcgcacaaagcagtgtttcttcgccacggtgcatcttcatggtaagttaggatttctatggcaatgtgcaagtcgcactgaaatcctgaaaggccaagcctggagcccgtccaggcttttcattaaggacataatatttacgtctaacagaccttttttcttgtgtatacaagtatatatttttgtttgacgcggactaaatcattttcatttaatttccggtaaacaaaacccacgcgaatgggcacttgtacccgatcataataaaaatggataataatgtgaaggaagaaaagagccgcttgaatcgccgctcagccccctttgtttctgctttctgcggtgatcagagggcgcgtttgggtttgatggcgagtttctaaaggcgaggaaatggtttgtaagaggggaaagaaaaggagaaaggtctaatcaagctcgggttgttcaaagagtcgggttttggggttgaaagtgtgagtttgacggtgcatcagcatgccgcgttaggctcgccatggaaatacgcgcggggagcggccgcttcaaaggcggcacacttcactacagacactctattaagatacatttgcgctgacctttgctttcacgccatttaatactgtcactgcgctctccagtatatacttcctttctagaacccgacttgcccacgtttaggggttcactctgcaccctgatgtgggaggctttggcgcaggggacactttcaggaaagggaggagcacaaggactctgtgcatcttgactgcaccccaaagaggctccaggatcaggagtgaaagattttaaagcagcctccgaagcttaacaaatgagcattccaagctcagttttgtgcaaatcgcctttctgactcttgagtaggatggaggcttaaatttaatggcgacttggggggaagggagccaccctgggggagtctgaggagttcagactgtgcccttgggaatttccactctggctttccgtgccactcttcttcctttccatcccaaaagtctcttgcggcccctgaaacttgtttctttctaaggcagggtgtgtggtacccttaggcctggactagtcctagatgcaaactcaagagcccaaggccaaggggatgtggggaagatggcaggaaagttagaagtccatgttcccttaattgtcttgttgtttattttatccaagtaccccagtgaataggggaaaaataaacacagtgaaaaaaaaaatcaaacagtggagtcttctttagtgccagtccttgtggttgaataaaaaggatggtccgctttctattgagctgagaaatctttgaagtgggagttattatctgagacattcctgcttgtcgtcctaacaacgctgatgaaacgtaaaaggttctttgtcagcgatttgttctcctctctgtcaaactccctctgccccgttagtttcaaaccgtttctaaagagataaaaatcaaacttcttttaaaacaatatccacacactgcatcaatacataactttaggtctaagtcttgctaagggataaacaaaagcaatgcctagacatcagggtcagggcctggtctggtgaagtatgcagaagttggggggccctcgggacaagctttgggacatgaggaaaagaatgcagagagggtgcaagcagaatacataccctaagtccataattgtgtttctgcttctttctgctctggtttgcattcaatcagcccaagttgggtcacatagatgggtttcctttgggtacccctcaggctcctaatattcttgcccaggatccttggaacttaagaatgcagccaagcaattgttaatatctcctgctccttcaaagccacctctgctaaaaatagacccattgtgtgtttcttctcactagcagcaatcaacaagccctttctgccgttaataagaaggagaatagctgaaggagagagatattttattaatttcctgtttccttcagaatcttggcaattgaagtttagaaggtttggtctacaacacagtgatcgaaaatgcatgtaaatgcccatccttcccttcattcacgtgtgaagttgttcattttatattgtgcccagcaaagaaactttcacccagttcaggtttccccaaaactcctgtggtggttttaaaggtggtttaaataaataaggatgtgctggtccccctactctgtgtgtgctgaataaatggcttgtaaagaagtttttccaagctgtaacccatgctgttattatagttgctgcaaaatgttcttcctgatattgattttatttgttaactgaaggtctccatatgtttgtttatattgctaatttatgagaaaatgtaataattgcaatgaatgtgaattatacagacaggcaaacattttgtaatcataattcacatatacacaaaagcctggctgaaatctttagactatttgtaccctctctacccacactgtttgtgatttatcatctgtctctttagtgtcagttaaattatgaactaacttgaaaataaaagttgtttgactgaaagtgattgttgaatgaacaacaaagttgaaagccatggcttgatcttgtaaatatataaatgtaaatgatattaaatctgtgattccttttccctccaaaggcttttgtgtacatggcgctgcatttggctattttctttggaaataaataatgtgatgtttctcttcctcttttg

SEQ ID NO: 23528 - DNA, 4639 bp, Homo sapiens
  misc_feature 1..4639: note = ENST00000267294
  source 1..4639: mol_type = unassigned DNA; mol_type = unassigned DNA
ggggcgaatccccgctgggtcgagggcctgaacgggagccaatcgagcagccgaggctactgccaatcacgcggctccctccaatcccacccgtgccatttccaaaatctcggtcccactgtgcagctcaaatgtggtgttcactctgccaatcgctggaggatagagtgggaacaggaataagcagagttaagaggccaggacaaaagaagttaaagagcgcccaatacatacatgtttttgaaggcgggcagagggaataaagtccccccagtgagggtctatgggcctgattgtgtagttctgatggagccccctttgagcaagaggaacccgccagcgctgagattagcggatttggcaacggctcaggtccagccgcttcagaatatgacaggcttcccggcgctggccggcccgcccgcccactcccaactccgggccgccgtcgcgcacctccgcctgcgggacctgggcgctgaccccggcgtggccaccactccgctcggacccgagcacatggcccaggcgagcacgctgggcctcagccctccctcccaggcgttcccggcacacccggaggctccggcagccgccgcccgtgctgcagccttggtcgcgcaccccggcgcgggcagctacccctgcggcgggggcagcagtggcgcgcagccctccgcgcccccgcccccagcccctcctcttcctcccaccccttcaccccctccccctcccccgcctcctcctcctcctgccctctcgggctacaccaccaccaacagtggcggcggcggcagcagcggcaaaggccacagcagggacttcgtcctccggagggacctttccgccacggcccccgcggcggccatgcacggggccccgctcggaggggagcagcggtccggcaccggctccccccagcacccggccccgcctccccactcggccggcatgttcatctccgccagcggcacctacgcgggcccggacggcagcggcggcccggcgctcttccccgcgctgcacgacacgccgggggccccaggcggccacccgcacccgctcaacggccagatgcgcctggggctggcggcggcagcggcagccgcggcggctgagctgtacggccgcgccgaaccgcccttcgcgccgcgctctggggacgcgcactacggggcggttgcggccgcagcggcggccgccctgcacggctacggagccgtgaacttaaacctgaacctggcggctgcggcggccgcagcagcggccgggcccgggccccacctgcagcaccacgcgccgcccccggcgccgccgccgccgccggcgcccgcgcagcacccgcaccagcaccacccccacctcccaggggcggctggggccttcctgcgctacatgcggcagccaatcaagcaggagctcatctgcaagtggatcgaccccgacgagctggccgggctgccgccgccgccgccgccgccgccgccgccgccgccaccgcccccggccggcggcgccaagccctgctccaaaactttcggcaccatgcacgagctggtgaatcacgtcacggtggagcacgtgggaggccccgagcagagcagccacgtctgcttctgggaggactgtccgcgcgagggcaagcccttcaaggccaaatacaagctcatcaaccacatccgcgtgcacaccggcgagaagccctttccctgccctttccccggctgcggcaaggtcttcgcgcgctccgagaacctcaagatccacaagcgtactcatacaggggaaaagcctttcaaatgtgaatttgatggctgtgacaggaagtttgccaatagcagtgatcggaagaaacattcccatgtccacaccagtgacaagccctactactgcaagattcgaggctgtgacaaatcctacactcacccaagctccctgaggaagcacatgaagattcactgcaagtccccgccaccttctccaggaccccttggttactcatcagtggggactccagtgggcgcccccttgtcccctgtgctggacccagccaggagtcactccagcactctgtcccctcaggtgaccaacctcaatgagtggtacgtttgccaggccagtggggcccccagccacctccacaccccttccagcaacggaaccacctctgagactgaagatgaggaaatttacgggaaccctgaagttgtgcggacgatacattagaatttattattaataataataagtgaaataataagtgggagtccttggaccacatcctaacctgagacaatgccgagcctgagacaaacccgtgactcagacttgccaccgggtctaattagccctatttattcagtatgaaaccctatggtgtttgtacatttaattaatttaattaagatatttgggcttttttttttttttttcttaaaaaacaaacaaaaaacaaccaagctggacttgtacattgcaggaggatggggctgggggcaaattgtaccaaggaaaatgaatggagagattagttaatggcgatacacactgccgatgcaatatatatatatatatatatatacatatatatatatattattttttttaaaagggggagaaaaagagcattaagtcagaacttaacacagcaccaaggccctctgcatttcccagagtgcctctcaaatgcctttgacaccataccatgggctgcttttgagcctccttgttggaccctaattctgccaaggcctcttgattgtaaaccacacacctgctgcattgccaacagatcctgttccgtacctgtgtccaaaaacatttgtaaaaaccctttgagtttaatatttgtaatttttaatttccactcttttattactgatcttagcttaatacaatatttttatacaggattatttcttcagtatcctactgtgtgattttaaaaaaagatgcagcaaccttaatatatctccatatcttgtgctactgtgattgttcaagcaaaagtggagagaagaaaagctgctgcaaaagacaactgtgaaactgtgatattttataaaatagaagaaattcaagtgctttctttttcctatatgtttttttttttttatctgaattctcagatactgcctcctaactgtgtccaaacttcttgtgtaataaagagattctgttttcgatcctaagttctttgggatgccaacattcacagtcaagtcttgaggaggtgtgatgatggcatcatgcctatttttttggaaagctgttgtttttaaaacaggccaacacctcttttatactgttgtatcagccttttaaaaagtctatttttcaatgcctgaaactgcattttaatgcattttcttccacctgagcactgagcacaccaaactggaatccatttgaaaatgacagtgtgtgaagtgtatgatttacattaaaagaggggagggagttgccatacatattaaaaatttttaaaaggtttatagttaccaccaaacactgatgaatgtgtgacctttgccagagctgtcaagctaggataaaaaaggtcaaggacctaggacaataactcttagtcgatttattttcggttggtacaacacatctcctgtgcaaaatgtagtccatcagaaacatcctacagatacactaaagagcactaatttatccttagagaccccgaagacaccccctccccagggtttgtagaaatttgttttgtgtgctgtgagtggttgatgtagtcttgtcattgttaataacttgtatgtgaacactattatttgtacagttgaattaatttattttcagacatcatcctttttttttttctttcctggaagagttcaaagcacaccaaagaattatattatacattttggtgaaagattgtcatttatgatccatggtttatttaaaaaaaaaaggaaagaaaatggaaaaatatatttttaagcttacttgaatgaacaacgtaatgtgaaaaccaagactcttcctgcatgtcttttttgcattgtgttgataagattatatatagtttatagatatattatattactagtacagtgcatggtgctgtcacttggaaagcctttcaatgttgtcttcagattgttgtgatgaatatgaaacatgcagaccctcctttataaagaaaaagaccttaaaacttgaatatgagataattttacattttaaaagtttatttgattttcatattattcactttcaaagccctttcaaatagaaaaggtatgaacttttggggggataatttatgtatcgtaaacttattagaacaaaatattcctgatgtataatgagttgttttatttatacaactttttcaatggtagtttgcactattctttattatgctacaggtttatttattatgaaacaaaggaatatgtattttatgtattttaccatgcataggttaactctttgccacagatttattggttcttgatacacctaaaataaaaaaaaatgtgtacctccaatagagagcaagcaagaatgattatgaagtaacaaatttaataaaggtattcttgttattattgcttatgttttacataatggcatatctctcatacaaatagaacaggttgctaatgga

SEQ ID NO: 23529 - DNA, 9418 bp, Homo sapiens
  misc_feature 1..9418: note = ENST00000324306
  source 1..9418: mol_type = unassigned DNA; mol_type = unassigned DNA
acgcttccggcctttgtgactcattgtgtctgtgtcgaggcgtcgggagggcctaagtccgtgtgcggtgcccttcggccggcctgagccccagagtcagctcccctttctcgcccagcgcccccaggccgctcccggggctcacggaatagtaaagaaacacatcataaaacctcccaggacataaaggtgagcacagaccctgtttggatcaagtcagttcctggagcctgaatgatgactgctgaatcacgggaagccacgggtctgtccccacaggctgcacaggagaaggatggtatcgtaatagtgaaggtggaagaggaagatgaggaagaccacatgtgggggcaggattccaccctacaggacacgcctcctccagacccagagatattccgccaacgcttcaggcgcttctgttaccagaacacttttgggccccgagaggctctcagtcggctgaaggaactttgtcatcagtggctgcggccagaaataaacaccaaggaacagatcctggagcttctggtgctagagcagtttctttccatcctgcccaaggagctccaggtctggctgcaggaataccgccccgatagtggagaggaggccgtgacccttctagaagacttggagcttgatttatcaggacaacaggtcccaggtcaagttcatggacctgagatgctcgcaagggggatggtgcctctggatccagttcaggagtcctcgagctttgaccttcatcacgaggccacccagtcccacttcaaacattcgtctcggaaaccccgcctcttacagtcacgagctcttcctgctgcccacattcctgcaccccctcatgagggtagtcccagagaccaggcgatggcatctgcactattcacagcggattcccaggcaatggtgaagatcgaggacatggctgtgtccctcattctggaggaatggggatgtcagaatctggctcggaggaatctcagtagggacaacaggcaggagaattatgggagcgcatttccccagggtggtgaaaacaggaatgagaacgaggagtcaacctcaaaggctgaaacctcggaagattcagcatcacgcggggagacaacaggaagatcccagaaagagtttggagagaaacgtgaccaggagggcaaaacaggagaaagacagcagaaaaaccctgaggagaaaaccaggaaagagaaaagagattcagggccagctataggaaaggacaaaaaaaccatcacaggagagagaggtccaagggagaaggggaaaggattgggaagaagcttcagtctgagctccaacttcaccacccctgaagaagttcccacgggaacaaagtctcacagatgtgatgaatgtggtaaatgcttcacgagaagttcaagccttatccgccataaaataatccacactggagaaaagccctatgaatgtagtgagtgtgggaaagccttcagtcttaactccaaccttgtcctgcatcagaggatccacacaggagagaaacctcatgaatgtaacgagtgtggcaaggccttcagccacagttccaatctcatcctccatcagcgcatccactctggagagaaaccttatgaatgtaatgagtgcgggaaggccttcagccagagctcggacctcaccaagcatcagagaattcacacgggggagaaaccctatgaatgtagtgaatgtggaaaagctttcaaccgaaactcatacctgattttgcatcggagaattcacactcgagaaaagccctacaagtgcactaagtgtggcaaggccttcacccgcagctccaccctcactctgcatcacagaatccatgccagagagagagcctctgagtacagcccagcctcccttgatgcatttggcgcgttcctgaaaagttgtgtgtaaaggaagaatttgccatcaagccatttcccccttttgtttctaaaattatttcagagatgtgtgctcctggagggaaaaagaaatacagcctcaacagattaaaaaacaaaagtcacacttaaggatccttctagtcacatcagcagtgttctgcctttatgtagtagttgggcatataatccttccacacagcccctgcagggaaaggctaatcttacggataatccacgtgagatttccacacaagagaaaagcacacgcatagtgaaatgtcagtcttttcagtaatgaggatacctttaaggcactcttggactctcggcaaccacaacataatagttgaaagatcaagattggctccacgaaagtgatacggaggttaggatgctacttgctgcaaacaagccctactttggccaacatcctgcttatttctcaaaaaagagggacagtgaaaacaaaaacgacattgggacatgctgctcaaggtagttatatatacgataagttgtatatatgatcactggtagcctaccaaagctgtagaaatctaggactgtgctaatcagtatcaaaccaaagatttctatctcttcccgaaagagagggtatgtgcaccagtctacagttccaaaggactgcaacaaatgtagatggttctgtcctcatccctgagatcagttctactgaaatggcaacaacaactccaaatacatctctcccttcttgaaatccctaaagcactatcgcactcctaaatgcatttctccacaagttagcacttgattgtatactgtcttttaatccttcattgtttcatgtatgaagtttttaatcaccccctaacccccaaaaaagattcggttgtcaagggatatatttctatccctgccagcacagtgctggacatagtgagtactgaacacctaagaggcactcattcagactgacttctacaggacttctacgtgtgtgataaaagcctgtgaatcgtgagtccctgaaatatggtagcctggcccagcttctaaagaggaccttcgtagccacaaggcatgctaaacctctagggtctgatgctgtttttgttccaaatataaacgaaaggcactagtcagccgcctgcatagactttctaaacagtgagtaaataccatggaatgtcagaaatgactttatcatcgtcatcttgaagaaaaatatgaacactgatgaaggtcattttttttttttgacatctttctgtggcaaagctcttagaattctttgcagttagctgctgaacagtatgatgatttggggattttctgaatcatttgtacttagatactggagttcagaagatgtgatttttgttgcttttcagaaaaaggaacgtggtagggagtgttttttcccacgcttttccagtaactttgcaaaagcattaattgttcactggcaattactaaatgtattttgttgctctgagaaactcagcagtgtactgagatgtggctggctgtgccatcgtcatagtgcacagtgacttttctgtttcttatcactaaagactgaggtgaggttatgaaactttcattggtcccatcgttgtgcgcagggtgcaactggctacctagaagctgatggcaggagactgtttcacacacaggagattgtgagctgtgtaagtagtcatcgccactcaagtaggacaagggtcctacccaaggctaggaccgccctgcggaaacagaaacatagactgagaacaaacctcaagactatcagtgtgacctccccataacaagagaaccccatatatagtttgagactttcccttgagaaacttatactaaaactattactcatcagtcattcactgatcagcagctaaagtccatgagaccaaatggttttatatggaaccaacgaagtgggagctaaaactgcacagtggtcattctttggcctctccttggctttatgacttaaaccaactacaacttccctatagcttctaagcagtttcatcagcattacttgggaaaacgtgttgcaagtcaaccagtcactaggatatttctacccatgcaacggaagaaaaacccattactccagaagagtatatctaagtaactaaaatggaggcagaaaatgttttaaggattttcttcaaagaataagccacagcaatggttttgtagaaaactcctgtgcttttgagcaaggacttttgccctctagaaagcaactgaggccaggtgcggtggctcacgcctgtaatcccagcactttgggaggccgaggtgagcggatcacctgaggtcaggagttttgagaccagcctggccaacatggtaaaatcccgtctctactaaaattataaaaattagccgggcatgatggtgggcacctgtaatcccagctacttgggaggctgaggcaggagaatcacttgaacccaggaggcagaggttgcagtgagccaagattgcacactgcactccagcctgggtgactagcaaaactccatctcaaaaaaaaaaaaaagaaagaaagaaactgaaaagtgaggtgtggaactccaggcaacgacccaagcacttattttttaagagggaaaggactttggtcatgtttacattggcctttggtttttttttttctttcagccacaactatatgctgatataactcagccatcacttttgagttttgtttttaaatgaaggttaaatgtgacctgtgccctcacatttaattccgtttcatggagacatcttcctgactttgttggatagctgccactagggttgcttcgatcttcagccacatgctgtccttgaagcagctatttgaagatgtgttttctgaggaaaacaggctacaactgtttattaaaaccacttgcagtgcattcgtttatcagatgctcagtgcaaagtgtaattgggtcatggtcaaaaacgcttgcaacatctaattggcgttcaagatagtcattcaaaagttcttggcccgctgaagtctgttaacagttgaaacattctacagttaaccattagcatgctagttgtcctaatggaaatttttgaagagtttttcaatatataccctacccttgccaggaagagaagtaaaatcctcaggttgtggggtatttgtttctactccagcctggcaggcaaggctaaaacctgagattatcgatctatgagacatcttgatatgtaaagcacttaatattaaaggcataaaagtgaaactgctaaatatgtatagagaggttgacgtgtgatacgtgggacagttcacatagacatcagagaatttattccagaaaggagcctcctgaatgtgatgaatacggcaaagcctttaatcacatctcagcccttagcatcggaaagcttatactgtaaataaacttgatgaatattatatgtgaggaaaactttcatgtatagcactcattgcttcagacagaaaatgaattccgtcggtatgttccaatcgtgatgaatttgagaaacattgcaagagggagctcaatcttggccgggcgccgtggctcacgcctgtaatcgcagcactttgggaggccgaggcaggcggatcacgaggtcagtagttcgagaccagcctggccaacatggtgaaaccttgtctctactaaaaatacaaaaaaaaattagctgggcacagtggcgcacgcctgtagtcccagctactcgggaggctgaggcaggagaatggcttgaacctgcgaggcggaggttgcagtgagctaagatcatgccactggcactccagccttgagtgacagagcgaggctctgtatcaaaaaaaaaagttgcgggggggtgctcaatcttaactgcagaggatctacagatgaaaaaaaatgtggggaaatgctttaaaaaaatagcaaaatgtgcaacttcttacaaaaattgttaacgttaggtacttctatatattttatatgaccataatgtccgtgtgtgttttgtaccttcagtcccttgttattgttccgtatattacctgtaagcagatactgtattttattttagcctatttgacagaacacatcactcagaaaaagtgaagtttcagagcaaacagtgaagaaatcagtgtgattgtagacaaaaagtcggttcacagaacggagcagcggggagaggaagggaaaagcttcatagtttggtgcttatcacatcaagagattggtaaatttctgaggaaagacaggctaatggggcactgaaatggaacaactcctttaaacgtgcagccttttgaatttttcctcaaaaccaagaagttgacctctgagctgtcaggtgaccactgtgtgcaaaggggatggattctcttgtcagtagacggtcttctccatgaagcgagagtaggaagtgtactggaatggccaagtgggactgcttcagctgaccaggttcttttaaaccgtagtcatgctttcccactaactcttaaatccttatgcttagaaaattgaggataaggctgggcacagtggctcaggcctgtaatcccagcactttgggagaccaaggcgggtggatcacaaggtcaggagatcgagaccatcctggctaacatggcgaaaccccgtctctactaaaaatacaaaaaaatagctgggcgtggtggcgggcgcctgtagtcccagctactcaggaggctgaggcaggaggatcacttgaacatgggaggcggaggttgcagtgagccaagatggcgccactgcactccagcctgggtgatggcgtgagactccatgtcaaaaaaaaaaaaaaggttggggggaggataggactggccaggcacggtggctcactcctgtaatctcagcactttgggaggcagaggtgggcggatcacttgaggtcaggagtttgagaccagcctggccaacgtggtgaaagcctgtctctactaaaaatacaaaaattagccgggcgtggtggtgggcgcctgtagtcccagctactcaggaggctgaggcaggagaatcacctaaatctgggaggcagaggttgcagtgagccgagattgcaccactgcactccagcctgggtaacagagactctgtctcaaaaaaagaaaaaaaaaaaagaaagaaagaaagaaaattggggataggagaacagcaaggtgggcatttcccggaattgtgtgcagatgcatccagtcgtggcattgcaagaagtctgtctgatgaagctcgggaagcattttgcaatattccctttggctgtgttcctgtgttccctgctcccacttttcttcccctggtttgtgattattaggagagaggttttgcaaagactcgttgctgtgaaagaatctttttttaatttttatcctagagtcagtcacttttattccaggtagtcatgctgatctgcttatccaaagccagctaaccaggttcatcctaccatcctcatggaagactgtgtgtatgaattggagtaacagaactgaaatacacttaaacagtgacagcagtacttcccagggtgggggccatatttctctgtgtcctactctgagcaacttctcagagatacgagggggctagggttttcccatctgggaaatggggtgaaagtctgcagattgttaaatgaaatatagaatcagagaaaaagaaaagtcagtgatataaatagatcatttcatagaaattagggtagatttttatttcaactactactggagaatttaataaaaggcattatttgaaaagtttttctaacatagatttagggtttttttttttagagtggacacactacatttaaaagcaattattttgctattcagattttttattatctgaaaatgaaattatctgttttacttttcaaagctttgtgaaacaaacttgaagttatagggaggtaagccatctccaactctgcaggtcaaacgaaagtttgggaaatacttttgacatcccacaatacagaatgtcttaacatgagaattgaatttcatgatgtgtggttccatttaatagcggacaccaccccaatctcatgttttcctgttaccctaaaacagtggaaggaaactgggtgtttggtagacttctaaatcatggtctctgacaatttgaatctgagattctcacctccatttactaaagaatcgtgacttaattcaaattgcacagtaatcagtaaagtgaatacgtttttaaaatggaattttctcccttcagcaagcactcattaaggagtgaggctgagtattttaagatagagtgagatctgtgagtgattgaaaggtgatatttaaaaacttggatttcattccagtgtcaggtttgggttttaagttcctttggtccagggaagggtccaagcagccacagttgccctaaatctccatcattaagtcttccagcaaggttaagtgcagtatggaaggagaagggggaagaggacggtaacggccccacactccaggctgagaaagagtaattaggaggcctgaggaggggccgaggaaaggctgttggggtgtgctggggttggtacccgagcgccttcccctcacctcaaccagagaagagcatccggttgctttttaaagcttttagcctgccctagcaaggacaaagcatgttagattagagatgcttctgctgatcgcaggggttcttatttgaaaacatctatgatgggggtggggtgggaggagacaggttgtggttatgcaggaaaatcttgtcctaaaaatatatgagtttgggggtaaggggtgggatagccaagcaaaatcagtaattattttaaaatgaacatatgtatttttattaacttttagttaaatacagattttacaacgaggtcagcataagcctaaatctatatagagggctaactcaggcattgtcttgtttatttgtagactggattaaaaacaacctgtcctgttttgtcagttcccagcttcttcgtttagaataaattagaccaaaagaagaaacgtgcttgtctctgtatacccgcagaatgaagttactgttgttaaaactggattttttcattttactaggttccgaagagtccagatgcttggtagatgttcaatacgtgattttttttttaattgaatgtgttcatttaaaatcctccttaacatttctagaaagacttctttcaataaataatggaatcttagaggaaaagtggttttttaaaagctagggaactcctccactaaaagtaaccattggaaacctcgaatgagggctaaagttttaatcataagagaaaaggcagcataatgaaatgtgtacacatacatagtcagtggtccattttaggaagccagtggcgtctgataaagaaatgttaagagtagtgaggttgaggaaggaaattgtggggatttgaaatattctctttatgttgtttctcttctgagtcatggtaaaacaataaattatcatctctaggtggca

SEQ ID NO: 23530 - DNA, 1449 bp, Homo sapiens
  misc_feature 1..1449: note = ENST00000482979
  source 1..1449: mol_type = unassigned DNA; mol_type = unassigned DNA
actcattgtgtctgtgtcgaggcgtcgggagggcctaagtccgtgtgcggtgcccttcggccggcctgagccccagagtcagctcccctttctcgcccagcgcccccaggccgctcccggggctcacggaatagtaaagaaacacatcataaaacctcccaggacataaaggtgagcacagaccctgtttggatcaagtcagttcctggagcctgaatgatgactgctgaatcacgggaagccacgggtctgtccccacaggctgcacaggagaaggatggtatcgtaatagtgaaggtggaagaggaagatgaggaagaccacatgtgggggcaggattccaccctacaggacacgcctcctccagacccagagatattccgccaacgcttcaggcgcttctgttaccagaacacttttgggccccgagaggctctcagtcggctgaaggaactttgtcatcagtggctgcggccagaaataaacaccaaggaacagatcctggagcttctggtgctagagcagtttctttccatcctgcccaaggagctccaggtctggctgcaggaataccgccccgatagtggagaggaggccgtgacccttctagaagacttggagcttgatttatcaggacaacaggtcccaggtcaagttcatggacctgagatgctcgcaagggggatggtgcctctggatccagttcaggagtcctcgagctttgaccttcatcacgaggccacccagtcccacttcaaacattcgtctcggaaaccccgcctcttacagtcacgaggtaagaagcaaggtttcatttaggggaagggaaatgattcaggacgagagtctttgtgctgctgagtgcctgtgatgaagaagcatgttagtcctgggcaacgtagcgagaccccatctctacaaaaaatagaaaaattagccaggtatagtggcgcacacctgtgattccagctacgcaggaggctgaggtgggaggattgcttgagcccaggaggttgaggctgcagtgagctgtaatcatgccactactccaacctgggcaacacagcaaggaccctgtctcaaaagctacttacagaaaagaattaggctcggcacggtagctcacacctgtaatcccagcactttgggaggctgaggcgggcagatcacttgaggtcaggagtttgagaccagcctggccaacatggtgaaaccttgtctctactaaaaatatgaaaattagccaggcatggtggcacattcctgtaatcccagctactcgggaggctgaggcaggagaatcacttgaacccaggaggtggaggttgcagtaagccgagatcgtaccactgtgctctagccttggtgacagagcgagactgtcttaaaaaaaaaaaaaaaaaaaaaagaattaattaaaaatttaaaaaaaaatgaaaaaaagctgca

SEQ ID NO: 23531 - DNA, 2011 bp, Homo sapiens
  misc_feature 1..2011: note = ENST00000426572
  source 1..2011: mol_type = unassigned DNA; mol_type = unassigned DNA
actcattgtgtctgtgtcgaggcgtcgggagggcctaagtccgtgtgcggtgcccttcggccggcctgagccccagagtcagctcccctttctcgcccagcgcccccaggccgctcccggggctcacggagtctctctctgtcacccaggctggagtgcagtggcgcgttctcagctcactgcaccctccacctcccaggttcaagtgattctcctgcctcagcctcccgagtagctgagattacaggaatagtaaagaaacacatcataaaacctcccaggacataaaggctgcacaggagaaggatggtatcgtaatagtgaaggtggaagaggaagatgaggaagaccacatgtgggggcaggattccaccctacaggacacgcctcctccagacccagagatattccgccaacgcttcaggcgcttctgttaccagaacacttttgggccccgagaggctctcagtcggctgaaggaactttgtcatcagtggctgcggccagaaataaacaccaaggaacagatcctggagcttctggtgctagagcagtttctttccatcctgcccaaggagctccaggtctggctgcaggaataccgccccgatagtggagaggaggccgtgacccttctagaagacttggagcttgatttatcaggacaacaggtcccaggtcaagttcatggacctgagatgctcgcaagggggatggtgcctctggatccagttcaggagtcctcgagctttgaccttcatcacgaggccacccagtcccacttcaaacattcgtctcggaaaccccgcctcttacagtcacgagctcttcctgctgcccacattcctgcaccccctcatgagggtagtcccagagaccaggcgatggcatctgcactattcacagcggattcccaggcaatggtgaagatcgaggacatggctgtgtccctcattctggaggaatggggatgtcagaatctggctcggaggaatctcagtagggacaacaggcaggagaattatgggagcgcatttccccagggtggtgaaaacaggaatgagaacgaggagtcaacctcaaaggctgaaacctcggaagattcagcatcacgcggggagacaacaggaagatcccagaaagagtttggagagaaacgtgaccaggagggcaaaacaggagaaagacagcagaaaaaccctgaggagaaaaccaggaaagagaaaagagattcagggccagctataggaaaggacaaaaaaaccatcacaggagagagaggtccaagggagaaggggaaaggattgggaagaagcttcagtctgagctccaacttcaccacccctgaagaagttcccacgggaacaaagtctcacagatgtgatgaatgtggtaaatgcttcacgagaagttcaagccttatccgccataaaataatccacactggagaaaagccctatgaatgtagtgagtgtgggaaagccttcagtcttaactccaaccttgtcctgcatcagaggatccacacaggagagaaacctcatgaatgtaacgagtgtggcaaggccttcagccacagttccaatctcatcctccatcagcgcatccactctggagagaaaccttatgaatgtaatgagtgcgggaaggccttcagccagagctcggacctcaccaagcatcagagaattcacacgggggagaaaccctatgaatgtagtgaatgtggaaaagctttcaaccgaaactcatacctgattttgcatcggagaattcacactcgagaaaagccctacaagtgcactaagtgtggcaaggccttcacccgcagctccaccctcactctgcatcacagaatccatgccagagagagagcctctgagtacagcccagcctcccttgatgcatttggcgcgttcctgaaaagttgtgtgtaaaggaagaatttgccatcaagccatttcccccttttgtttctaaaattatttcagagatgtgtgctcctggaggg

SEQ ID NO: 23532 - DNA, 573 bp, Homo sapiens
  misc_feature 1..573: note = ENST00000432317
  source 1..573: mol_type = unassigned DNA; mol_type = unassigned DNA
attgtaaccacatcagcaaagcactgttagtatatatgctgaacaaatgtggagaaatcgctgttttacataggaaaccatggtgatttgccccagaatgtgtatccaggaatagtaaagaaacacatcataaaacctcccaggacataaaggtgagcacagaccctgtttggatcaagtcagttcctggagcctgaatgatgactgctgaatcacgggaagccacgggtctgtccccacaggctgcacaggagaaggatggtatcgtaatagtgaaggtggaagaggaagatgaggaagaccacatgtgggggcaggattccaccctacaggacacgcctcctccagacccagagatattccgccaacgcttcaggcgcttctgttaccagaacacttttgggccccgagaggctctcagtcggctgaaggaactttgtcatcagtggctgcggccagaaataaacaccaaggaacagatcctggagcttctggtgctagagcagtttctttccatcctgcccaaggagctccaggtctggctgcaggaataccgccccgatagtggagagg

SEQ ID NO: 23533 - DNA, 9192 bp, Homo sapiens
  misc_feature 1..9192: note = ENST00000620510
  source 1..9192: mol_type = unassigned DNA; mol_type = unassigned DNA
ttatacttcaggaatagtaaagaaacacatcataaaacctcccaggacataaaggctgcacaggagaaggatggtatcgtaatagtgaaggtggaagaggaagatgaggaagaccacatgtgggggcaggattccaccctacaggacacgcctcctccagacccagagatattccgccaacgcttcaggcgcttctgttaccagaacacttttgggccccgagaggctctcagtcggctgaaggaactttgtcatcagtggctgcggccagaaataaacaccaaggaacagatcctggagcttctggtgctagagcagtttctttccatcctgcccaaggagctccaggtctggctgcaggaataccgccccgatagtggagaggaggccgtgacccttctagaagacttggagcttgatttatcaggacaacaggtcccaggtcaagttcatggacctgagatgctcgcaagggggatggtgcctctggatccagttcaggagtcctcgagctttgaccttcatcacgaggccacccagtcccacttcaaacattcgtctcggaaaccccgcctcttacagtcacgagctcttcctgctgcccacattcctgcaccccctcatgagggtagtcccagagaccaggcgatggcatctgcactattcacagcggattcccaggcaatggtgaagatcgaggacatggctgtgtccctcattctggaggaatggggatgtcagaatctggctcggaggaatctcagtagggacaacaggcaggagaattatgggagcgcatttccccagggtggtgaaaacaggaatgagaacgaggagtcaacctcaaaggctgaaacctcggaagattcagcatcacgcggggagacaacaggaagatcccagaaagagtttggagagaaacgtgaccaggagggcaaaacaggagaaagacagcagaaaaaccctgaggagaaaaccaggaaagagaaaagagattcagggccagctataggaaaggacaaaaaaaccatcacaggagagagaggtccaagggagaaggggaaaggattgggaagaagcttcagtctgagctccaacttcaccacccctgaagaagttcccacgggaacaaagtctcacagatgtgatgaatgtggtaaatgcttcacgagaagttcaagccttatccgccataaaataatccacactggagaaaagccctatgaatgtagtgagtgtgggaaagccttcagtcttaactccaaccttgtcctgcatcagaggatccacacaggagagaaacctcatgaatgtaacgagtgtggcaaggccttcagccacagttccaatctcatcctccatcagcgcatccactctggagagaaaccttatgaatgtaatgagtgcgggaaggccttcagccagagctcggacctcaccaagcatcagagaattcacacgggggagaaaccctatgaatgtagtgaatgtggaaaagctttcaaccgaaactcatacctgattttgcatcggagaattcacactcgagaaaagccctacaagtgcactaagtgtggcaaggccttcacccgcagctccaccctcactctgcatcacagaatccatgccagagagagagcctctgagtacagcccagcctcccttgatgcatttggcgcgttcctgaaaagttgtgtgtaaaggaagaatttgccatcaagccatttcccccttttgtttctaaaattatttcagagatgtgtgctcctggagggaaaaagaaatacagcctcaacagattaaaaaacaaaagtcacacttaaggatccttctagtcacatcagcagtgttctgcctttatgtagtagttgggcatataatccttccacacagcccctgcagggaaaggctaatcttacggataatccacgtgagatttccacacaagagaaaagcacacgcatagtgaaatgtcagtcttttcagtaatgaggatacctttaaggcactcttggactctcggcaaccacaacataatagttgaaagatcaagattggctccacgaaagtgatacggaggttaggatgctacttgctgcaaacaagccctactttggccaacatcctgcttatttctcaaaaaagagggacagtgaaaacaaaaacgacattgggacatgctgctcaaggtagttatatatacgataagttgtatatatgatcactggtagcctaccaaagctgtagaaatctaggactgtgctaatcagtatcaaaccaaagatttctatctcttcccgaaagagagggtatgtgcaccagtctacagttccaaaggactgcaacaaatgtagatggttctgtcctcatccctgagatcagttctactgaaatggcaacaacaactccaaatacatctctcccttcttgaaatccctaaagcactatcgcactcctaaatgcatttctccacaagttagcacttgattgtatactgtcttttaatccttcattgtttcatgtatgaagtttttaatcaccccctaacccccaaaaaagattcggttgtcaagggatatatttctatccctgccagcacagtgctggacatagtgagtactgaacacctaagaggcactcattcagactgacttctacaggacttctacgtgtgtgataaaagcctgtgaatcgtgagtccctgaaatatggtagcctggcccagcttctaaagaggaccttcgtagccacaaggcatgctaaacctctagggtctgatgctgtttttgttccaaatataaacgaaaggcactagtcagccgcctgcatagactttctaaacagtgagtaaataccatggaatgtcagaaatgactttatcatcgtcatcttgaagaaaaatatgaacactgatgaaggtcattttttttttttgacatctttctgtggcaaagctcttagaattctttgcagttagctgctgaacagtatgatgatttggggattttctgaatcatttgtacttagatactggagttcagaagatgtgatttttgttgcttttcagaaaaaggaacgtggtagggagtgttttttcccacgcttttccagtaactttgcaaaagcattaattgttcactggcaattactaaatgtattttgttgctctgagaaactcagcagtgtactgagatgtggctggctgtgccatcgtcatagtgcacagtgacttttctgtttcttatcactaaagactgaggtgaggttatgaaactttcattggtcccatcgttgtgcgcagggtgcaactggctacctagaagctgatggcaggagactgtttcacacacaggagattgtgagctgtgtaagtagtcatcgccactcaagtaggacaagggtcctacccaaggctaggaccgccctgcggaaacagaaacatagactgagaacaaacctcaagactatcagtgtgacctccccataacaagagaaccccatatatagtttgagactttcccttgagaaacttatactaaaactattactcatcagtcattcactgatcagcagctaaagtccatgagaccaaatggttttatatggaaccaacgaagtgggagctaaaactgcacagtggtcattctttggcctctccttggctttatgacttaaaccaactacaacttccctatagcttctaagcagtttcatcagcattacttgggaaaacgtgttgcaagtcaaccagtcactaggatatttctacccatgcaacggaagaaaaacccattactccagaagagtatatctaagtaactaaaatggaggcagaaaatgttttaaggattttcttcaaagaataagccacagcaatggttttgtagaaaactcctgtgcttttgagcaaggacttttgccctctagaaagcaactgaggccaggtgcggtggctcacgcctgtaatcccagcactttgggaggccgaggtgagcggatcacctgaggtcaggagttttgagaccagcctggccaacatggtaaaatcccgtctctactaaaattataaaaattagccgggcatgatggtgggcacctgtaatcccagctacttgggaggctgaggcaggagaatcacttgaacccaggaggcagaggttgcagtgagccaagattgcacactgcactccagcctgggtgactagcaaaactccatctcaaaaaaaaaaaaaagaaagaaagaaactgaaaagtgaggtgtggaactccaggcaacgacccaagcacttattttttaagagggaaaggactttggtcatgtttacattggcctttggtttttttttttctttcagccacaactatatgctgatataactcagccatcacttttgagttttgtttttaaatgaaggttaaatgtgacctgtgccctcacatttaattccgtttcatggagacatcttcctgactttgttggatagctgccactagggttgcttcgatcttcagccacatgctgtccttgaagcagctatttgaagatgtgttttctgaggaaaacaggctacaactgtttattaaaaccacttgcagtgcattcgtttatcagatgctcagtgcaaagtgtaattgggtcatggtcaaaaacgcttgcaacatctaattggcgttcaagatagtcattcaaaagttcttggcccgctgaagtctgttaacagttgaaacattctacagttaaccattagcatgctagttgtcctaatggaaatttttgaagagtttttcaatatataccctacccttgccaggaagagaagtaaaatcctcaggttgtggggtatttgtttctactccagcctggcaggcaaggctaaaacctgagattatcgatctatgagacatcttgatatgtaaagcacttaatattaaaggcataaaagtgaaactgctaaatatgtatagagaggttgacgtgtgatacgtgggacagttcacatagacatcagagaatttattccagaaaggagcctcctgaatgtgatgaatacggcaaagcctttaatcacatctcagcccttagcatcggaaagcttatactgtaaataaacttgatgaatattatatgtgaggaaaactttcatgtatagcactcattgcttcagacagaaaatgaattccgtcggtatgttccaatcgtgatgaatttgagaaacattgcaagagggagctcaatcttggccgggcgccgtggctcacgcctgtaatcgcagcactttgggaggccgaggcaggcggatcacgaggtcagtagttcgagaccagcctggccaacatggtgaaaccttgtctctactaaaaatacaaaaaaaaattagctgggcacagtggcgcacgcctgtagtcccagctactcgggaggctgaggcaggagaatggcttgaacctgcgaggcggaggttgcagtgagctaagatcatgccactggcactccagccttgagtgacagagcgaggctctgtatcaaaaaaaaaagttgcgggggggtgctcaatcttaactgcagaggatctacagatgaaaaaaaatgtggggaaatgctttaaaaaaatagcaaaatgtgcaacttcttacaaaaattgttaacgttaggtacttctatatattttatatgaccataatgtccgtgtgtgttttgtaccttcagtcccttgttattgttccgtatattacctgtaagcagatactgtattttattttagcctatttgacagaacacatcactcagaaaaagtgaagtttcagagcaaacagtgaagaaatcagtgtgattgtagacaaaaagtcggttcacagaacggagcagcggggagaggaagggaaaagcttcatagtttggtgcttatcacatcaagagattggtaaatttctgaggaaagacaggctaatggggcactgaaatggaacaactcctttaaacgtgcagccttttgaatttttcctcaaaaccaagaagttgacctctgagctgtcaggtgaccactgtgtgcaaaggggatggattctcttgtcagtagacggtcttctccatgaagcgagagtaggaagtgtactggaatggccaagtgggactgcttcagctgaccaggttcttttaaaccgtagtcatgctttcccactaactcttaaatccttatgcttagaaaattgaggataaggctgggcacagtggctcaggcctgtaatcccagcactttgggagaccaaggcgggtggatcacaaggtcaggagatcgagaccatcctggctaacatggcgaaaccccgtctctactaaaaatacaaaaaaatagctgggcgtggtggcgggcgcctgtagtcccagctactcaggaggctgaggcaggaggatcacttgaacatgggaggcggaggttgcagtgagccaagatggcgccactgcactccagcctgggtgatggcgtgagactccatgtcaaaaaaaaaaaaaaggttggggggaggataggactggccaggcacggtggctcactcctgtaatctcagcactttgggaggcagaggtgggcggatcacttgaggtcaggagtttgagaccagcctggccaacgtggtgaaagcctgtctctactaaaaatacaaaaattagccgggcgtggtggtgggcgcctgtagtcccagctactcaggaggctgaggcaggagaatcacctaaatctgggaggcagaggttgcagtgagccgagattgcaccactgcactccagcctgggtaacagagactctgtctcaaaaaaagaaaaaaaaaaaagaaagaaagaaagaaaattggggataggagaacagcaaggtgggcatttcccggaattgtgtgcagatgcatccagtcgtggcattgcaagaagtctgtctgatgaagctcgggaagcattttgcaatattccctttggctgtgttcctgtgttccctgctcccacttttcttcccctggtttgtgattattaggagagaggttttgcaaagactcgttgctgtgaaagaatctttttttaatttttatcctagagtcagtcacttttattccaggtagtcatgctgatctgcttatccaaagccagctaaccaggttcatcctaccatcctcatggaagactgtgtgtatgaattggagtaacagaactgaaatacacttaaacagtgacagcagtacttcccagggtgggggccatatttctctgtgtcctactctgagcaacttctcagagatacgagggggctagggttttcccatctgggaaatggggtgaaagtctgcagattgttaaatgaaatatagaatcagagaaaaagaaaagtcagtgatataaatagatcatttcatagaaattagggtagatttttatttcaactactactggagaatttaataaaaggcattatttgaaaagtttttctaacatagatttagggtttttttttttagagtggacacactacatttaaaagcaattattttgctattcagattttttattatctgaaaatgaaattatctgttttacttttcaaagctttgtgaaacaaacttgaagttatagggaggtaagccatctccaactctgcaggtcaaacgaaagtttgggaaatacttttgacatcccacaatacagaatgtcttaacatgagaattgaatttcatgatgtgtggttccatttaatagcggacaccaccccaatctcatgttttcctgttaccctaaaacagtggaaggaaactgggtgtttggtagacttctaaatcatggtctctgacaatttgaatctgagattctcacctccatttactaaagaatcgtgacttaattcaaattgcacagtaatcagtaaagtgaatacgtttttaaaatggaattttctcccttcagcaagcactcattaaggagtgaggctgagtattttaagatagagtgagatctgtgagtgattgaaaggtgatatttaaaaacttggatttcattccagtgtcaggtttgggttttaagttcctttggtccagggaagggtccaagcagccacagttgccctaaatctccatcattaagtcttccagcaaggttaagtgcagtatggaaggagaagggggaagaggacggtaacggccccacactccaggctgagaaagagtaattaggaggcctgaggaggggccgaggaaaggctgttggggtgtgctggggttggtacccgagcgccttcccctcacctcaaccagagaagagcatccggttgctttttaaagcttttagcctgccctagcaaggacaaagcatgttagattagagatgcttctgctgatcgcaggggttcttatttgaaaacatctatgatgggggtggggtgggaggagacaggttgtggttatgcaggaaaatcttgtcctaaaaatatatgagtttgggggtaaggggtgggatagccaagcaaaatcagtaattattttaaaatgaacatatgtatttttattaacttttagttaaatacagattttacaacgaggtcagcataagcctaaatctatatagagggctaactcaggcattgtcttgtttatttgtagactggattaaaaacaacctgtcctgttttgtcagttcccagcttcttcgtttagaataaattagaccaaaagaagaaacgtgcttgtctctgtatacccgcagaatgaagttactgttgttaaaactggattttttcattttactaggttccgaagagtccagatgcttggtagatgttcaatacgtgattttttttttaattgaatgtgttcatttaaaatcctccttaacatttctagaaagacttctttcaataaataatggaatcttagaggaaaagtggttttttaaaagctagggaactcctccactaaaagtaaccattggaaacctcgaatgagggctaaagttttaatcataagagaaaaggcagcataatgaaatgtgtacacatacatagtcagtggtccattttaggaagccagtggcgtctgataaagaaatgttaagagtagtgaggttgaggaaggaaattgtggggatttgaaatattctctttatgttgtttctcttctgagtcatggtaaaacaataaattatcatctctaggtggc

SEQ ID NO: 23534 - DNA, 8758 bp, Homo sapiens
  misc_feature 1..8758: note = ENST00000535170
  source 1..8758: mol_type = unassigned DNA; mol_type = unassigned DNA
ggtggtgacacgcttccggcctttgtgactcattgtgtctgtgtcgaggcgtcgggagggcctaagtccgtgtgcggtgcccttcggccggcctgagccccagagtcagctcccctttctcgcccagcgcccccaggccgctcccggggctcacgctcttcctgctgcccacattcctgcaccccctcatgagggtagtcccagagaccaggcgatggcatctgcactattcacagcggattcccaggcaatggtgaagatcgaggacatggctgtgtccctcattctggaggaatggggatgtcagaatctggctcggaggaatctcagtagggacaacaggcaggagaattatgggagcgcatttccccagggtggtgaaaacaggaatgagaacgaggagtcaacctcaaaggctgaaacctcggaagattcagcatcacgcggggagacaacaggaagatcccagaaagagtttggagagaaacgtgaccaggagggcaaaacaggagaaagacagcagaaaaaccctgaggagaaaaccaggaaagagaaaagagattcagggccagctataggaaaggacaaaaaaaccatcacaggagagagaggtccaagggagaaggggaaaggattgggaagaagcttcagtctgagctccaacttcaccacccctgaagaagttcccacgggaacaaagtctcacagatgtgatgaatgtggtaaatgcttcacgagaagttcaagccttatccgccataaaataatccacactggagaaaagccctatgaatgtagtgagtgtgggaaagccttcagtcttaactccaaccttgtcctgcatcagaggatccacacaggagagaaacctcatgaatgtaacgagtgtggcaaggccttcagccacagttccaatctcatcctccatcagcgcatccactctggagagaaaccttatgaatgtaatgagtgcgggaaggccttcagccagagctcggacctcaccaagcatcagagaattcacacgggggagaaaccctatgaatgtagtgaatgtggaaaagctttcaaccgaaactcatacctgattttgcatcggagaattcacactcgagaaaagccctacaagtgcactaagtgtggcaaggccttcacccgcagctccaccctcactctgcatcacagaatccatgccagagagagagcctctgagtacagcccagcctcccttgatgcatttggcgcgttcctgaaaagttgtgtgtaaaggaagaatttgccatcaagccatttcccccttttgtttctaaaattatttcagagatgtgtgctcctggagggaaaaagaaatacagcctcaacagattaaaaaacaaaagtcacacttaaggatccttctagtcacatcagcagtgttctgcctttatgtagtagttgggcatataatccttccacacagcccctgcagggaaaggctaatcttacggataatccacgtgagatttccacacaagagaaaagcacacgcatagtgaaatgtcagtcttttcagtaatgaggatacctttaaggcactcttggactctcggcaaccacaacataatagttgaaagatcaagattggctccacgaaagtgatacggaggttaggatgctacttgctgcaaacaagccctactttggccaacatcctgcttatttctcaaaaaagagggacagtgaaaacaaaaacgacattgggacatgctgctcaaggtagttatatatacgataagttgtatatatgatcactggtagcctaccaaagctgtagaaatctaggactgtgctaatcagtatcaaaccaaagatttctatctcttcccgaaagagagggtatgtgcaccagtctacagttccaaaggactgcaacaaatgtagatggttctgtcctcatccctgagatcagttctactgaaatggcaacaacaactccaaatacatctctcccttcttgaaatccctaaagcactatcgcactcctaaatgcatttctccacaagttagcacttgattgtatactgtcttttaatccttcattgtttcatgtatgaagtttttaatcaccccctaacccccaaaaaagattcggttgtcaagggatatatttctatccctgccagcacagtgctggacatagtgagtactgaacacctaagaggcactcattcagactgacttctacaggacttctacgtgtgtgataaaagcctgtgaatcgtgagtccctgaaatatggtagcctggcccagcttctaaagaggaccttcgtagccacaaggcatgctaaacctctagggtctgatgctgtttttgttccaaatataaacgaaaggcactagtcagccgcctgcatagactttctaaacagtgagtaaataccatggaatgtcagaaatgactttatcatcgtcatcttgaagaaaaatatgaacactgatgaaggtcattttttttttttgacatctttctgtggcaaagctcttagaattctttgcagttagctgctgaacagtatgatgatttggggattttctgaatcatttgtacttagatactggagttcagaagatgtgatttttgttgcttttcagaaaaaggaacgtggtagggagtgttttttcccacgcttttccagtaactttgcaaaagcattaattgttcactggcaattactaaatgtattttgttgctctgagaaactcagcagtgtactgagatgtggctggctgtgccatcgtcatagtgcacagtgacttttctgtttcttatcactaaagactgaggtgaggttatgaaactttcattggtcccatcgttgtgcgcagggtgcaactggctacctagaagctgatggcaggagactgtttcacacacaggagattgtgagctgtgtaagtagtcatcgccactcaagtaggacaagggtcctacccaaggctaggaccgccctgcggaaacagaaacatagactgagaacaaacctcaagactatcagtgtgacctccccataacaagagaaccccatatatagtttgagactttcccttgagaaacttatactaaaactattactcatcagtcattcactgatcagcagctaaagtccatgagaccaaatggttttatatggaaccaacgaagtgggagctaaaactgcacagtggtcattctttggcctctccttggctttatgacttaaaccaactacaacttccctatagcttctaagcagtttcatcagcattacttgggaaaacgtgttgcaagtcaaccagtcactaggatatttctacccatgcaacggaagaaaaacccattactccagaagagtatatctaagtaactaaaatggaggcagaaaatgttttaaggattttcttcaaagaataagccacagcaatggttttgtagaaaactcctgtgcttttgagcaaggacttttgccctctagaaagcaactgaggccaggtgcggtggctcacgcctgtaatcccagcactttgggaggccgaggtgagcggatcacctgaggtcaggagttttgagaccagcctggccaacatggtaaaatcccgtctctactaaaattataaaaattagccgggcatgatggtgggcacctgtaatcccagctacttgggaggctgaggcaggagaatcacttgaacccaggaggcagaggttgcagtgagccaagattgcacactgcactccagcctgggtgactagcaaaactccatctcaaaaaaaaaaaaaagaaagaaagaaactgaaaagtgaggtgtggaactccaggcaacgacccaagcacttattttttaagagggaaaggactttggtcatgtttacattggcctttggtttttttttttctttcagccacaactatatgctgatataactcagccatcacttttgagttttgtttttaaatgaaggttaaatgtgacctgtgccctcacatttaattccgtttcatggagacatcttcctgactttgttggatagctgccactagggttgcttcgatcttcagccacatgctgtccttgaagcagctatttgaagatgtgttttctgaggaaaacaggctacaactgtttattaaaaccacttgcagtgcattcgtttatcagatgctcagtgcaaagtgtaattgggtcatggtcaaaaacgcttgcaacatctaattggcgttcaagatagtcattcaaaagttcttggcccgctgaagtctgttaacagttgaaacattctacagttaaccattagcatgctagttgtcctaatggaaatttttgaagagtttttcaatatataccctacccttgccaggaagagaagtaaaatcctcaggttgtggggtatttgtttctactccagcctggcaggcaaggctaaaacctgagattatcgatctatgagacatcttgatatgtaaagcacttaatattaaaggcataaaagtgaaactgctaaatatgtatagagaggttgacgtgtgatacgtgggacagttcacatagacatcagagaatttattccagaaaggagcctcctgaatgtgatgaatacggcaaagcctttaatcacatctcagcccttagcatcggaaagcttatactgtaaataaacttgatgaatattatatgtgaggaaaactttcatgtatagcactcattgcttcagacagaaaatgaattccgtcggtatgttccaatcgtgatgaatttgagaaacattgcaagagggagctcaatcttggccgggcgccgtggctcacgcctgtaatcgcagcactttgggaggccgaggcaggcggatcacgaggtcagtagttcgagaccagcctggccaacatggtgaaaccttgtctctactaaaaatacaaaaaaaaattagctgggcacagtggcgcacgcctgtagtcccagctactcgggaggctgaggcaggagaatggcttgaacctgcgaggcggaggttgcagtgagctaagatcatgccactggcactccagccttgagtgacagagcgaggctctgtatcaaaaaaaaaagttgcgggggggtgctcaatcttaactgcagaggatctacagatgaaaaaaaatgtggggaaatgctttaaaaaaatagcaaaatgtgcaacttcttacaaaaattgttaacgttaggtacttctatatattttatatgaccataatgtccgtgtgtgttttgtaccttcagtcccttgttattgttccgtatattacctgtaagcagatactgtattttattttagcctatttgacagaacacatcactcagaaaaagtgaagtttcagagcaaacagtgaagaaatcagtgtgattgtagacaaaaagtcggttcacagaacggagcagcggggagaggaagggaaaagcttcatagtttggtgcttatcacatcaagagattggtaaatttctgaggaaagacaggctaatggggcactgaaatggaacaactcctttaaacgtgcagccttttgaatttttcctcaaaaccaagaagttgacctctgagctgtcaggtgaccactgtgtgcaaaggggatggattctcttgtcagtagacggtcttctccatgaagcgagagtaggaagtgtactggaatggccaagtgggactgcttcagctgaccaggttcttttaaaccgtagtcatgctttcccactaactcttaaatccttatgcttagaaaattgaggataaggctgggcacagtggctcaggcctgtaatcccagcactttgggagaccaaggcgggtggatcacaaggtcaggagatcgagaccatcctggctaacatggcgaaaccccgtctctactaaaaatacaaaaaaatagctgggcgtggtggcgggcgcctgtagtcccagctactcaggaggctgaggcaggaggatcacttgaacatgggaggcggaggttgcagtgagccaagatggcgccactgcactccagcctgggtgatggcgtgagactccatgtcaaaaaaaaaaaaaaggttggggggaggataggactggccaggcacggtggctcactcctgtaatctcagcactttgggaggcagaggtgggcggatcacttgaggtcaggagtttgagaccagcctggccaacgtggtgaaagcctgtctctactaaaaatacaaaaattagccgggcgtggtggtgggcgcctgtagtcccagctactcaggaggctgaggcaggagaatcacctaaatctgggaggcagaggttgcagtgagccgagattgcaccactgcactccagcctgggtaacagagactctgtctcaaaaaaagaaaaaaaaaaaagaaagaaagaaagaaaattggggataggagaacagcaaggtgggcatttcccggaattgtgtgcagatgcatccagtcgtggcattgcaagaagtctgtctgatgaagctcgggaagcattttgcaatattccctttggctgtgttcctgtgttccctgctcccacttttcttcccctggtttgtgattattaggagagaggttttgcaaagactcgttgctgtgaaagaatctttttttaatttttatcctagagtcagtcacttttattccaggtagtcatgctgatctgcttatccaaagccagctaaccaggttcatcctaccatcctcatggaagactgtgtgtatgaattggagtaacagaactgaaatacacttaaacagtgacagcagtacttcccagggtgggggccatatttctctgtgtcctactctgagcaacttctcagagatacgagggggctagggttttcccatctgggaaatggggtgaaagtctgcagattgttaaatgaaatatagaatcagagaaaaagaaaagtcagtgatataaatagatcatttcatagaaattagggtagatttttatttcaactactactggagaatttaataaaaggcattatttgaaaagtttttctaacatagatttagggtttttttttttagagtggacacactacatttaaaagcaattattttgctattcagattttttattatctgaaaatgaaattatctgttttacttttcaaagctttgtgaaacaaacttgaagttatagggaggtaagccatctccaactctgcaggtcaaacgaaagtttgggaaatacttttgacatcccacaatacagaatgtcttaacatgagaattgaatttcatgatgtgtggttccatttaatagcggacaccaccccaatctcatgttttcctgttaccctaaaacagtggaaggaaactgggtgtttggtagacttctaaatcatggtctctgacaatttgaatctgagattctcacctccatttactaaagaatcgtgacttaattcaaattgcacagtaatcagtaaagtgaatacgtttttaaaatggaattttctcccttcagcaagcactcattaaggagtgaggctgagtattttaagatagagtgagatctgtgagtgattgaaaggtgatatttaaaaacttggatttcattccagtgtcaggtttgggttttaagttcctttggtccagggaagggtccaagcagccacagttgccctaaatctccatcattaagtcttccagcaaggttaagtgcagtatggaaggagaagggggaagaggacggtaacggccccacactccaggctgagaaagagtaattaggaggcctgaggaggggccgaggaaaggctgttggggtgtgctggggttggtacccgagcgccttcccctcacctcaaccagagaagagcatccggttgctttttaaagcttttagcctgccctagcaaggacaaagcatgttagattagagatgcttctgctgatcgcaggggttcttatttgaaaacatctatgatgggggtggggtgggaggagacaggttgtggttatgcaggaaaatcttgtcctaaaaatatatgagtttgggggtaaggggtgggatagccaagcaaaatcagtaattattttaaaatgaacatatgtatttttattaacttttagttaaatacagattttacaacgaggtcagcataagcctaaatctatatagagggctaactcaggcattgtcttgtttatttgtagactggattaaaaacaacctgtcctgttttgtcagttcccagcttcttcgtttagaataaattagaccaaaagaagaaacgtgcttgtctctgtatacccgcagaatgaagttactgttgttaaaactggattttttcattttactaggttccgaagagtccagatgcttggtagatgttcaatacgtgattttttttttaattgaatgtgttcatttaaaatcctccttaacatttctagaaagacttctttcaataaataatggaatcttagaggaaaagtggttttttaaaagctagggaactcctccactaaaagtaaccattggaaacctcgaatgagggctaaagttttaatcataagagaaaaggcagcataatgaaatgtgtacacatacatagtcagtggtccattttaggaagccagtggcgtctgataaagaaatgttaagagtagtgaggttgaggaaggaaattgtggggatttgaaatattctctttatgttgtttctcttctgagtcatggtaaaacaataaattatcatctctaggtggc

SEQ ID NO: 23535 - DNA, 2250 bp, Homo sapiens
  misc_feature 1..2250: note = ENST00000315769
  source 1..2250: mol_type = unassigned DNA; mol_type = unassigned DNA
cgctagcacagttggtccgagctgccgaaaggtctggtcgcagagacaggaacgtgtaatcctcagcgtgctccagcccacagcttcgctctactgctcggcagggcagctggcctctgggcaccggcggcccctctgcctcgcggaaaagcctgatgaagtcctccgatattgatcaggatttattcacagacagttactgcaaggtgtgcagtgcacagctgatctccgaatcgcagcgtgtggcccactacgagagtcgaaaacatgcaagcaaagtccgactgtattacatgcttcaccccagggatggagggtgtcctgccaagaggctccggtcagaaaatggaagtgatgccgacatggtggataagaacaagtgctgcacactctgcaacatgtcattcacttcagcggtggtggccgattcccattatcaaggcaaaatccacgccaagaggttaaaactcttgctaggagagaagaccccattaaagaccacaggtctgaggcgcaattacagatgtaccatctgcagtgtctccctaaactcaatagaacagtatcatgcccatctgaaaggatctaaacaccagaccaacctgaagaataagtagtgaaagcatcaatcaagacataagaacaaaacattagcatttctctgccgtggagaattgcttatcaaccaccagaggaggcttctttcttgaacaataaacatttcttataaggattcacagattcacatacgactgatcttgatttttggaaatgaatgaggtttcttttttctttttcctttttttaattttggggtaagttatgatatttggatggatttttaaattctttcctgataacatatttagcacatgttctaaattataatcctatagcaaacagttggagcattattcaaactgaaagtggaaaaatttaaatttccaatttattctagatttcctcagagcataattattctgttaaatcctcaatgagtgtgatgtaaaccacctctatccagaaatatacattcttttctcatcatgttggacacagttgagggtgacatgcacagaactggaacagatcactattagtggaaaataccaaatggacaaataaataccagtcgttttctccgttctccaagcacaggagccaggtttaccatctgaacaatgaagacgaagggagtaaataaaggaagaattctcatcttttttcctgatcattcaaagaacagtttctcaaggttaagccaagtcctccttgcaagttgccaaataatagcttaggaaaagaattagtctgcctgcatgatgatcttcttaggcaaaaacgtcttcacagcccttgaccttggtgaatttttttccccaaaagcatccaaaagaagaattataaaccccagaatgagatggaaataaacaagtatttttttttatgatgtttggcctgaactgtgggctttaattgggggatactgatcgtttggaaagaagtgagaaaattctgaagaaatggcggccttgggctaggcggggtcccctatttcttctgtttctcactgaagtcctactgctgagccaagactcagtcactctggaaagagcatgaccgataaagaaaacagttcctttctgatggggagcgtctgagtgcagatcatgaggctctttctctaggtttaattcttttccatggtgaccggacttggtgtcttgtagcctggttacgaagtgggacgttgagcttctactgacgatgccctgcatggaccagctgggatctggctggggctgccctgtgtccctaacgaccataggcaatccatcttcttgtgtcagcaatttctggacacccactgttttccaccaagagctgaggtggcaacaactcagtgagcaataaacaaaatgacacagaaatgcacagtgttgttatgaaggagcctgtttacctgtgttcaaaatctggcaccattcccttgagcagggcccgctcaggagggaccaggtctgccagtttctgtgcctgcagagagacgaagccccacgagccacaccctactctacaagaggaaagggggttggatgggaagaatctattttgctgttttggaaagcacacagccgacctacaaacctcctgtgatggtgtttcttcggatgtgtaaaataaggctttatttgtcaattccgctgtaaaataagcattgtccgagtaaaaacagcagcaacaacaaaa

SEQ ID NO: 23536 - DNA, 2466 bp, Homo sapiens
  misc_feature 1..2466: note = ENST00000297737
  source 1..2466: mol_type = unassigned DNA; mol_type = unassigned DNA
cagttggtccgagctgccgaaaggtctggtcgcagagacaggaacgtgtaatcctcagcgtgctccagcccacagcttcgctctactgctcggcagggcagctggcctctgggcaccggcggcccctctgcctcgcggaaaagcctgatgaagtcctccgatattgatcaggatttattcacagacagttactgcaaggtgtgcagtgcacagctgatctccgaatcgcagcgtgtggcccactacgagagtcgaaaacatgcaagcaaagtccgactgtattacatgcttcaccccagggatggagggtgtcctgccaagaggctccggtcagaaaatggaagtgatgccgacatggtggataagaacaagtgctgcacactctgcaacatgtcattcacttcagcggtggtggccgattcccattatcaaggcaaaatccacgccaagaggttaaaactcttgctaggagagaagaccccattaaagaccacagcaacacccctgagcccacttaagcccccacggatggacactgctccggtggtcgcatctccctatcaaagaagagattcagacagatactgtgggctctgtgcagcctggtttaataaccctctgatggcccagcaacattatgatggcaagaaacacaaaaagaatgcggcaagagttgctttgttagaacaactggggacaaccctggatatgggggaactgagaggtctgaggcgcaattacagatgtaccatctgcagtgtctccctaaactcaatagaacagtatcatgcccatctgaaaggatctaaacaccagaccaacctgaagaataagtagtgaaagcatcaatcaagacataagaacaaaacattagcatttctctgccgtggagaattgcttatcaaccaccagaggaggcttctttcttgaacaataaacatttcttataaggattcacagattcacatacgactgatcttgatttttggaaatgaatgaggtttcttttttctttttcctttttttaattttggggtaagttatgatatttggatggatttttaaattctttcctgataacatatttagcacatgttctaaattataatcctatagcaaacagttggagcattattcaaactgaaagtggaaaaatttaaatttccaatttattctagatttcctcagagcataattattctgttaaatcctcaatgagtgtgatgtaaaccacctctatccagaaatatacattcttttctcatcatgttggacacagttgagggtgacatgcacagaactggaacagatcactattagtggaaaataccaaatggacaaataaataccagtcgttttctccgttctccaagcacaggagccaggtttaccatctgaacaatgaagacgaagggagtaaataaaggaagaattctcatcttttttcctgatcattcaaagaacagtttctcaaggttaagccaagtcctccttgcaagttgccaaataatagcttaggaaaagaattagtctgcctgcatgatgatcttcttaggcaaaaacgtcttcacagcccttgaccttggtgaatttttttccccaaaagcatccaaaagaagaattataaaccccagaatgagatggaaataaacaagtatttttttttatgatgtttggcctgaactgtgggctttaattgggggatactgatcgtttggaaagaagtgagaaaattctgaagaaatggcggccttgggctaggcggggtcccctatttcttctgtttctcactgaagtcctactgctgagccaagactcagtcactctggaaagagcatgaccgataaagaaaacagttcctttctgatggggagcgtctgagtgcagatcatgaggctctttctctaggtttaattcttttccatggtgaccggacttggtgtcttgtagcctggttacgaagtgggacgttgagcttctactgacgatgccctgcatggaccagctgggatctggctggggctgccctgtgtccctaacgaccataggcaatccatcttcttgtgtcagcaatttctggacacccactgttttccaccaagagctgaggtggcaacaactcagtgagcaataaacaaaatgacacagaaatgcacagtgttgttatgaaggagcctgtttacctgtgttcaaaatctggcaccattcccttgagcagggcccgctcaggagggaccaggtctgccagtttctgtgcctgcagagagacgaagccccacgagccacaccctactctacaagaggaaagggggttggatgggaagaatctattttgctgttttggaaagcacacagccgacctacaaacctcctgtgatggtgtttcttcggatgtgtaaaataaggctttatttgtcaattccgctgtaaaataagcattgtccgagtaaaaacagcagcaacaac

SEQ ID NO: 23537 - DNA, 690 bp, Homo sapiens
  misc_feature 1..690: note = ENST00000519406
  source 1..690: mol_type = unassigned DNA; mol_type = unassigned DNA
ctttggaccgttcacaggctaattgggaaaagtggacaggcctgcctgaagcctgatgaagtcctccgatattgatcaggatttattcacagacagttactgcaaggtgtgcagtgcacagctgatctccgaatcgcagcgtgtggcccactacgagagtcgaaaacatgcaagcaaagtccgactgtattacatgcttcaccccagggatggagggtgtcctgccaagaggctccggtcagaaaatggaagtgatgccgacatggtggataagaacaagtgctgcacactctgcaacatgtcattcacttcagcggtggtggccgattcccattatcaaggcaaaatccacgccaagaggttaaaactcttgctaggagagaagaccccattaaagaccacagcaacacccctgagcccacttaagcccccacggatggacactgctccggtggtcgcatctccctatcaaagaagagattcagacagatactgtgggctctgtgcagcctggtttaataaccctctgatggcccagcaacattatgatggcaagaaacacaaaaagaatgcggcaagagttgctttgttagaacaactggggacaaccctggatatgggggaactgagaggtctgaggcgcaattacagatgtaccatctgcagtgtctccctaaactcaatagaaca

SEQ ID NO: 23538 - DNA, 661 bp, Homo sapiens
  misc_feature 1..661: note = ENST00000519806
  source 1..661: mol_type = unassigned DNA; mol_type = unassigned DNA
cagcggtggtggccgattcccattatcaaggcaaaatccacgccaagaggttaaaactcttgctaggagagaagaccccattaaagaccacagcaacacccctgagcccacttaagcccccacggatggacactgctccggtggtcgcatctccctatcaaagaagagattcagacagatactgtgggctctgtgcagcctggtttaataaccctctgatggcccagcaacattatgatggcaagaaacacaaaaagaatgcggcaagagttgctttgttagaacaactggggacaaccctggatatgggggaactgagaggtaagggcagctcttctcacttctgccacaaaactgggctttcagagaaaagatgcggctttcacaaatcggaatgattcttcttcttgctttaattattaaggaaaaagtgaggctcacccaaaagaaatggacaagaaaggaaatgagcagaaggcttgctttagtttaatttttataatctcctttgtttcaaagtgtttattttcatatttttattgactgcttttcagaccaaaggcacattcatgaaccagattgttttccttctgctttatctttaactgccttctttaccaaatgcttttgtagagtagcagtgtttaaaaaagaaaaaaaa

SEQ ID NO: 23539 - DNA, 590 bp, Homo sapiens
  misc_feature 1..590: note = ENST00000518242
  source 1..590: mol_type = unassigned DNA; mol_type = unassigned DNA
ggtccagaattcttgaggaaggggaatttcattagacatactaagccaaaagaagatgtcacactgaagaaggtggctgtgtgaattctgacccagtcgaaaacatgcaagcaaagtccgactgtattacatgcttcaccccagggatggagggtgtcctgccaagaggctccggtcagaaaatggaagtgatgccgacatggtggataagaacaagtgctgcacactctgcaacatgtcattcacttcagcggtggtggccgattcccattatcaaggcaaaatccacgccaagaggttaaaactcttgctaggagagaagaccccattaaagaccacaggtacgtgcaggaacagtgatcgtggggagaccctgaaaaccaagtgctggcctgtcttgcagatcatgctcctccttcagacgcagttgccagaaccagagcctaatggtagacgtcattcaaagcctaaagggatgagtggctgacctcagcagacctggctgtcctaagacccctaaataccatttcaggtgctcattctatcaccctagttcctttcgatgaagtaatgcagcagcttgcatctgc

SEQ ID NO: 23540 - DNA, 564 bp, Homo sapiens
  misc_feature 1..564: note = ENST00000523188
  source 1..564: mol_type = unassigned DNA; mol_type = unassigned DNA
agttggtccgagctgccgaaaggtctggtcgcagagacaggaacgtgtaatcctcagcgtgctccagcccacagcttcgctctactgctcggcagggcagctggcctctgggcaccggcggcccctctgcctcgcggaaaagcctgatgaagtcctccgatattgatcaggatttattcacagacagttactgcaaggtgtgcagtgcacagctgatctccgaatcgcagcgtgtggcccactacgagggtccagaattcttgaggaaggggaatttcattagacatactaagccaaaagaagatgtcacactgaagaaggtggctgtgtgaattctgacccagtcgaaaacatgcaagcaaagtccgactgtattacatgcttcaccccagggatggagggtgtcctgccaagaggctccggtcagaaaatggaagtgatgccgacatggtggataagaacaagtgctgcacactctgcaacatgtcattcacttcagcggtggtggccgattcccattatcaaggcaaaatccacgccaagaggttaaaactcttgctagga

SEQ ID NO: 23541 - DNA, 515 bp, Homo sapiens
  misc_feature 1..515: note = ENST00000523542
  source 1..515: mol_type = unassigned DNA; mol_type = unassigned DNA
gccgaaaggtctggtcgcagagacaggaacgtgtaatcctcagcgtgctccagcccacagcttcgctctactgctcggcagggcagctggcctctgggcaccggcggcccctctgcctcgcggaaaagcctgatgaagtcctccgatattgatcaggatttattcacagacagttactgcaaggtgtgcagtgcacagctgatctccgaatcgcagcgtgtggcccactacgagtgtggtgcagttcctctgggaatgagcaatgtaacttaaaactagctgtgtcaataagtcaagagtcgaaaacatgcaagcaaagtccgactgtattacatgcttcaccccagggatggagggtgtcctgccaagaggctccggtcagaaaatggaagtgatgccgacatggtggataagaacaagtgctgcacactctgcaacatgtcattcacttcagcggtggtggccgattcccattatcaaggcaaaatccacgccaagaggttaaaactcttgct

SEQ ID NO: 23542 - DNA, 473 bp, Homo sapiens
  misc_feature 1..473: note = ENST00000522623
  source 1..473: mol_type = unassigned DNA; mol_type = unassigned DNA
gaaaggtctggtcgcagagacaggaacgtgtaatcctcagcgtgctccagcccacagcttcgctctactgctcggcagggcagctggcctctgggcaccggcggcccctctgcctcgcggaaaagcctgatgaagtcctccgatattgatcaggatttattcacagacagttactgcaaggtgtgcagtgcacagctgatctccgaatcgcagcgtgtggcccactacgagtgtggtgcagttcctctgggaatgagcaatgtaacttaaaactagctgtgtcaataagtcaagggtccagaattcttgaggaaggggaatttcattagacatactaagccaaaagaagatgtcacactgaagaaggtggctgtgtgaattctgacccagtcgaaaacatgcaagcaaagtccgactgtattacatgcttcaccccagggatggagggtgtcctgccaagaggctccggtcag

SEQ ID NO: 23543 - DNA, 571 bp, Homo sapiens
  misc_feature 1..571: note = ENST00000523823
  source 1..571: mol_type = unassigned DNA; mol_type = unassigned DNA
agtagatattttaggctttgcagactgcacagtgtttactgcagctactcagcattgctgctgcagcacggaagcagccatagaggacatataaatgaaggagcatggctgtattccaataaaactttatttacaaagccggaaacccacccataggccataggtttgctgaccttggatccagaacactggagaggaaccagcaatggggactgaagcaggagcagcctggagattggggtggaccaggagaggaggttgcttcagaaactaagcaaagcatttttgcagaagaaagtagtgatctgctgggtcaaatcctgctggcataagaagtaagatgaggactgaaaattgcacgtgagcagtgtagaggccgtggatgagctgatgaaagcactttggttgaggatgagcctgatgaagtcctccgatattgatcaggatttattcacagacagttactgcaaggtgtgcagtgcacagctgatctccgaatcgcagcgtgtggcccactacgagtgtggtgcagttcctctgggaatgagcaatgtaacttaaaactagctgt

SEQ ID NO: 23544 - DNA, 546 bp, Homo sapiens
  misc_feature 1..546: note = ENST00000538918
  source 1..546: mol_type = unassigned DNA; mol_type = unassigned DNA
gtgcgtgacgtcaggccacggggaggtggcgccgccgtgccgagccggcctcagactcacctctgacgccgctcttcgcgctccgctggtgaatggagtcgcgttctctgttttgctgttgctgctgcctttgtgacgggatcgctttctcccatcgaaccttctagttgcttattgcagcttcgtatttctaggtagacggtaatttcgtcaatgaaaaaatttaacggtgatcgtcaccccttgcctcagtcactttctgtccctcgcgcggccccggcgttcacggcggacgttcttgttctgtggagaataacggctgcacctggagattgacgcagagtgggcggcggtggtgctttgtctcctcagcactctgctgtcactcaaggaagtatcatcaagaacaaggagggcatggatgctaagtcactaactgcctggtcccggacactggtgaccttcaaggatgtatttgtggacttcaccagggaggagtggaagctgctggacactgctcagcagatcgtgtacagaaatgtgatg

SEQ ID NO: 23545 - DNA, 648 bp, Homo sapiens
  misc_feature 1..648: note = ENST00000540609
  source 1..648: mol_type = unassigned DNA; mol_type = unassigned DNA
ggccacggggaggtggcgccgccgtgccgagccggcctcagactcacctctgacgccgctcttcgcgctccgctggtgaatggagtcgcgttctctgttttgctgttgctgctgcctttgtgacgggatcgctttctcccatcgaaccttctagttgcttattgcagcttcgtatttctaggtagacggtaatttcgtcaatgaaaaaatttaacggtgatcgtcaccccttgcctcagtcactttctgtccctcgcgcggccccggcgttcacggcggacgttcttgttctgtggagaataacggctgcacctggagattgacgcagagtgggcggcggtggtggaaacattaaagaatgtgcttcagagagaaaggaaatgaaaccaaatggaaatctggatctacacaaacgagtaaacagcactggcgaatggtaactacctagctttgtctcctcagcactctgctgtcactcaaggaagtatcatcaagaacaaggagggcatggatgctaagtcactaactgcctggtcccggacactggtgaccttcaaggatgtatttgtggacttcaccagggaggagtggaagctgctggacactgctcagcagatcgtgtacagaaatgtgatgctggagaactat

SEQ ID NO: 23546 - DNA, 4441 bp, Homo sapiens
  misc_feature 1..4441: note = ENST00000248211
  source 1..4441: mol_type = unassigned DNA; mol_type = unassigned DNA
acggggaggtggcgccgccgtgccgagccggcctcagactcacctctgacgccgctcttcgcgctccgctggtgaatggagtcgcgttctctgttttgctgttgctgctgcctttgtgacgggatcgctttctcccatcgaaccttctagttgcttattgcagctttgtctcctcagcactctgctgtcactcaaggaagtatcatcaagaacaaggagggcatggatgctaagtcactaactgcctggtcccggacactggtgaccttcaaggatgtatttgtggacttcaccagggaggagtggaagctgctggacactgctcagcagatcgtgtacagaaatgtgatgctggagaactataagaacctggtttccttgggttatcagcttactaagccagatgtgatcctccggttggagaagggagaagagccctggctggtggagagagaaattcaccaagagacccatcctgattcagagactgcatttgaaatcaaatcatcagtttccagcaggagcatttttaaagataagcaatcctgtgacattaaaatggaaggaatggcaaggaatgatctctggtatttgtcattagaagaagtctggaaatgtagagaccagttagacaagtatcaggaaaacccagagagacatttgaggcaagtggcattcacccaaaagaaagtacttactcaggagagagtctctgaaagtggtaaatatgggggaaactgtcttcttcctgctcagctagtactgagagagtatttccataaacgtgactcacatactaaaagtttaaaacatgatttagttcttaatggtcatcaggacagttgtgcaagtaacagtaatgaatgtggtcaaactttctgtcaaaacattcaccttattcagtttgcaagaactcacacaggtgataaatcctacaaatgccctgataatgacaactctcttactcatggttcatctcttggtatatcaaagggcatacatagagagaaaccctatgaatgtaaggaatgtggaaaattcttcagctggcgctctaatcttactaggcatcagcttattcatactggagaaaaaccctatgagtgtaaagaatgtggaaagtctttcagccggagttctcacctcattggacatcaaaagacccatactggtgaggaaccctatgaatgtaaagaatgtggaaaatccttcagctggttctctcaccttgttactcatcagagaactcatacaggagacaaactgtacacatgtaatcagtgtgggaaatcttttgttcatagctctaggcttattagacaccagaggacacatactggagagaaaccctatgaatgtcctgaatgtgggaaatctttcagacagagcacacatctcattctgcatcagagaacccatgtgagagtgaggccctatgaatgcaatgaatgtggaaagtcttacagccagagatctcaccttgttgtgcatcatagaattcacactggactaaaaccttttgagtgtaaggattgtggaaaatgttttagtcgaagctctcacctttattcacatcaaagaacccacactggagagaaaccatatgagtgtcatgattgtggaaaatctttcagccagagttctgcccttattgtgcatcagaggatacacactggagagaaaccatatgaatgctgtcagtgtgggaaagccttcatccggaagaatgacctcattaagcaccagagaattcatgttggagaagagacctataaatgtaatcaatgtggcattatcttcagccagaactctccatttatagttcatcaaatagctcacactggagagcagttcttaacatgcaatcaatgtgggacagcgcttgttaatacctctaaccttattggataccagacaaatcatattagagaaaatgcttactaataaatatgggaatttttcacaaagagcaatgactttattttgcattggagaactcctggagataagctgtacaaattgaatctatgtggaaatgctttcagtcttgttactatcctattgcacattagagaattggtcctggaagggaaagaaaccacagattttatttcagtacacaaatccatcagattttcttcttttcatgaattcctacagaagtaattggcctgagagcattcttgaccaagtcttaaatgctagaatctgagaaggaattattaaataggtgagttgttgagcgagaaccccttcatttgaaaagaaatgagtatgctactatagggagagttgttgctgagaattaagaaatgatacagttaatgcaacaaaagatggaaaataatatttcagtcaatatgtcattgttttcttgactatgtctctcttctgggacatttagtagtgtttggtatgttttatgtgtctggtagaaaccatattttggttaacagcaagaaaaatgcttataatgtagtacaattaaaaacaacacatctccactaccagtgctaacccatttttaagtacatttgcatgtgggcaagaattgaaagtatacagataattgaacagaattgatttgttagataaggagattttgactgagttttatagtctgtttaatgttgctgtaataattattttaagaaacttttaaatattgtaagaggatatctagtttctctattctaccatcaaagaagcttttgagtaccacctgttaatgagctttcctattctaaattgttttgggtcacagagttccactttttccactcttattagcactgcaaaagctcctgagaatttaaaaacacagtaattctctggatgttaggacctaggggaacattgggcatttgaacatatcagggagggtccccattttagtgggaacaagtatttaaacaatatttagagcaagtgtcctcatgtgataaacagagcacagtccaaagataccctctttctcaaggtagtcttttatctttataaagaaagattagtgtttaagagcgtagacttgagctagactacccaggttgaaaccccactagctgggtgatcttgaacatgctgcttagcttctctgtgccaaacttactgatatcctcatctgtaaattagcgataataatagtacttacctggtaggattatggtgagtattaaatgagtaaatggaaacagcttagaatagtgcctgacatatattatgttctctgtagttactggctgtgattattaataatattgccgcaccctaatatctgttatttaattgaaatctgcttgtgtgcttataagaatttactgagttctcacttcccttacagtcatacatggtttttcccttttgcctaaatcagaactcaacagcctgggaaaatcactgacaaatagtggatataggtttcatttctgaggatcaataaacagcttgtaatgttgtatacacatttattctgtttgtacaaaggttttccattctatggagaggatcccagtcttcagattctctggtaagttaataacccacaaaagattcaggaagaggatctattttaattttctctttcattctataaatcagtctgttgtatatagggactgaccatgattctccattttctggcataaatattagctgctcaatgattgattgttgaatgatagatgaagtattgctgaagccaaccagagatcttgatctctctctgaggaaaaaacctagaaatgatggttagaatcaggagacttgagaactacgaggaacatggcagcctctagctcatacttgtcgttgtacaattgagatcaagtgaattggccccggtctcacattttcagtgaagtcagactcagaactaggtcctgggtttcatgtttcctgctgctcttctcactgtgtacacaccatgcccacatacaacatacctatcagaaatggttttcattaagggagtagaatagtcacttaactggggctcttaacattgctaataacctgtggctcaatttcctcaactgtataatgaggttactactagtatctacctcaaagcgttgtcatgtggattgagatgatatgtatgaatcacataaaagagtgcctggcacatagtaggtgccattaataatattactattgttaacaccttaagggtctaacttgtaatgaagacagaaatatgtatgaggatgatcactgaaatatttatgacagtgcataatttgcaaaataaaaaatgtacactagcataatatttgtggcatatccgtgtaatggaagattatgcaggcattaaaatatgtacacaaaaagtttggtaaaggaaaaatgctgtcatgtgttacaaaagcatgataaataattgttaatatggaataagctcaaatatgtcaaaataaatgtaaaaaatgagtgttgcccaaaa

SEQ ID NO: 23547 - DNA, 559 bp, Homo sapiens
  misc_feature 1..559: note = ENST00000543271
  source 1..559: mol_type = unassigned DNA; mol_type = unassigned DNA
gtgccgagccggcctcagactcacctctgacgccgctcttcgcgctccgctggtgaatggagtcgcgttctctgttttgctgttgctgctgcctttgtgacgggatcgctttctcccatcgaaccttctagttgcttattgcaggtatatacgaaagtgctgaattttgtgtttgcatcgtcatcaggcgcgtgttgagccctttagtaatgtagcagtgtattagcttcgtatttctaggtagacggtaatttcgtcaatgaaaaaatttaacggtgatcgtcaccccttgcctcagtcactttctgtccctcgcgcggccccggcgttcacggcggacgttcttgttctgtggagaataacggctgcacctggagattgacgcagagtgggcggcggtggtgctttgtctcctcagcactctgctgtcactcaaggaagtatcatcaagaacaaggagggcatggatgctaagtcactaactgcctggtcccggacggagtcttgctctgtcacccaggctagagtccagtggcgcgatctcagctcactgcaacct

SEQ ID NO: 23548 - DNA, 590 bp, Homo sapiens
  misc_feature 1..590: note = ENST00000540927
  source 1..590: mol_type = unassigned DNA; mol_type = unassigned DNA
gtgccgagccggcctcagactcacctctgacgccgctcttcgcgctccgctggtgaatggagtcgcgttctctgttttgctgttgctgctgcctttgtgacgggatcgctttctcccatcgaaccttctagttgcttattgcagcttcgtatttctaggtagacggtaatttcgtcaatgaaaaaatttaacggtgatcgtcaccccttgcctcagtcactttctgtccctcgcgcggccccggcgttcacggcggacgttcttgttctgtggagaataacggctgcacctggagattgacgcagagtgggcggcggtggtggaaacattaaagaatgtgcttcagagagaaaggaaatgaaaccaaatggaaatctggatctacacaaacgagtaaacagcactggcgaatggtaactacctagctttgtctcctcagcactctgctgtcactcaaggaagtatcatcaagaacaaggagggcatggatgctaagtcactaactgcctggtcccggggaggagtggaagctgctggacactgctcagcagatcgtgtacagaaatgtgatgctggagaactataagaac

SEQ ID NO: 23549 - DNA, 531 bp, Homo sapiens
  misc_feature 1..531: note = ENST00000536704
  source 1..531: mol_type = unassigned DNA; mol_type = unassigned DNA
gtgccgagccggcctcagactcacctctgacgccgctcttcgcgctccgctggtgaatggagtcgcgttctctgttttgctgttgctgctgcctttgtgacgggatcgctttctcccatcgaaccttctagttgcttattgcaggtatatacgaaagtgctgaattttgtgtttgcatcgtcatcaggcgcgtgttgagccctttagtaatgtagcagtgtattagcttcgtatttctaggtagacggtaatttcgtcaatgaaaaaatttaacggtgatcgtcaccccttgcctcagtcactttctgtccctcgcgcggccccggcgttcacggcggacgttcttgttctgtggagaataacggctgcacctggagattgacgcagagtgggcggcggtggtgacactggtgaccttcaaggatgtatttgtggacttcaccagggaggagtggaagctgctggacactgctcagcagatcgtgtacagaaatgtgatgctggagaactataagaacctggtttccttgg

SEQ ID NO: 23550 - DNA, 472 bp, Homo sapiens
  misc_feature 1..472: note = ENST00000536877
  source 1..472: mol_type = unassigned DNA; mol_type = unassigned DNA
gtgccgagccggcctcagactcacctctgacgccgctcttcgcgctccgctggtgaatggagtcgcgttctctgttttgctgttgctgctgcctttgtgacgggatcgctttctcccatcgaaccttctagttgcttattgcagtggctgtgggagcaaagagtaagaaacactaaaacttcctggagaaattagctttgtctcctcagcactctgctgtcactcaaggaagtatcatcaagaacaaggagggcatggatgctaagtcactaactgcctggtcccggacactggtgaccttcaaggatgtatttgtggacttcaccagggaggagtggaagctgctggacactgctcagcagatcgtgtacagaaatgtgatgctggagaactataagaacctggtttccttgggttatcagcttactaagccagatgtgatcctccggttggagaagggagaagagccctg

SEQ ID NO: 23551 - DNA, 2169 bp, Homo sapiens
  misc_feature 1..2169: note = ENST00000426665
  source 1..2169: mol_type = unassigned DNA; mol_type = unassigned DNA
agactcacctctgacgccgctcttcgcgctccgctggtgaatggagtcgcgttctctgttttgctgttgctgctgcctttgtgacgggatcgctttctcccatcgaaccttctagttgcttattgcaggtatatacgaaagtgctgaattttgtgtttgcatcgtcatcaggcgcgtgttgagccctttagtaatgtagcagtgtattagcttcgtatttctaggtagacggtaatttcgtcaatgaaaaaatttaacggtgatcgtcaccccttgcctcagtcactttctgtccctcgcgcggccccggcgttcacggcggacgttcttgttctgtggagaataacggctgcacctggagattgacgcagagtgggcggcggtggtgctttgtctcctcagcactctgctgtcactcaaggaagtatcatcaagaacaaggagggcatggatgctaagtcactaactgcctggtcccggacactggtgaccttcaaggatgtatttgtggacttcaccagggaggagtggaagctgctggacactgctcagcagatcgtgtacagaaatgtgatgctggagaactataagaacctggtttccttgggttatcagcttactaagccagatgtgatcctccggttggagaagggagaagagccctggctggtggagagagaaattcaccaagagacccatcctgattcagagactgcatttgaaatcaaatcatcagtttccagcaggagcatttttaaagataagcaatcctgtgacattaaaatggaaggaatggcaaggaatgatctctggtatttgtcattagaagaagtctggaaatgtagagaccagttagacaagtatcaggaaaacccagagagacatttgaggcaagtggcattcacccaaaagaaagtacttactcaggagagagtctctgaaagtggtaaatatgggggaaactgtcttcttcctgctcagctagtactgagagagtatttccataaacgtgactcacatactaaaagtttaaaacatgatttagttcttaatggtcatcaggacagttgtgcaagtaacagtaatgaatgtggtcaaactttctgtcaaaacattcaccttattcagtttgcaagaactcacacaggtgataaatcctacaaatgccctgataatgacaactctcttactcatggttcatctcttggtatatcaaagggcatacatagagagaaaccctatgaatgtaaggaatgtggaaaattcttcagctggcgctctaatcttactaggcatcagcttattcatactggagaaaaaccctatgagtgtaaagaatgtggaaagtctttcagccggagttctcacctcattggacatcaaaagacccatactggtgaggaaccctatgaatgtaaagaatgtggaaaatccttcagctggttctctcaccttgttactcatcagagaactcatacaggagacaaactgtacacatgtaatcagtgtgggaaatcttttgttcatagctctaggcttattagacaccagaggacacatactggagagaaaccctatgaatgtcctgaatgtgggaaatctttcagacagagcacacatctcattctgcatcagagaacccatgtgagagtgaggccctatgaatgcaatgaatgtggaaagtcttacagccagagatctcaccttgttgtgcatcatagaattcacactggactaaaaccttttgagtgtaaggattgtggaaaatgttttagtcgaagctctcacctttattcacatcaaagaacccacactggagagaaaccatatgagtgtcatgattgtggaaaatctttcagccagagttctgcccttattgtgcatcagaggatacacactggagagaaaccatatgaatgctgtcagtgtgggaaagccttcatccggaagaatgacctcattaagcaccagagaattcatgttggagaagagacctataaatgtaatcaatgtggcattatcttcagccagaactctccatttatagttcatcaaatagctcacactggagagcagttcttaacatgcaatcaatgtgggacagcgcttgttaatacctctaaccttattggataccagacaaatcatattagagaaaatgcttactaa

SEQ ID NO: 23552 - DNA, 1967 bp, Homo sapiens
  misc_feature 1..1967: note = ENST00000402932
  source 1..1967: mol_type = unassigned DNA; mol_type = unassigned DNA
cactttcaagctcactcttcttggcagaattcagttccttgtggctgcaggactgaggtccctgcttcctagctggctttcagctggtgctgctctttgctgctggagcctgccatgttcctcacactgcattccatcttcaagccagtaatggtgcgtcacatttttcttgggcttctatctctgacttccgttctgtgaccagctggagacaacacttgtttttttaatctgtaaagtgagactatttgattaggtcaggtttggtatttttttccgcaaaaaaaaaatttgtaatggtaggtaggatcattcagttttaaatcttcaaatgtggtgtggaactccagagattaagggggtaaaaatgcaatttatgtagctcttctcttcctaatcttggggagcttcgggcactgtagatttgcttatagaatatctctgatgttcctctgtatagtgggtgtttgtgtcatacccagctggtatgaagaagtttagactgacaatttagggagcctcccagtcatagcaaacttaacttatgtttctttctttttcccagctttgtctcctcagcactctgctgtcactcaaggaagtatcatcaagaacaaggagggcatggatgctaagtcactaactgcctggtcccggacactggtgaccttcaaggatgtatttgtggacttcaccagggaggagtggaagctgctggacactgctcagcagatcgtgtacagaaatgtgatgctggagaactataagaacctggtttccttgggttatcagcttactaagccagatgtgatcctccggttggagaagggagaagagccctggctggtggagagagaaattcaccaagagacccatcctgattcagagactgcatttgaaatcaaatcatcagtttccagcaggagcatttttaaagataagcaatcctgtgacattaaaatggaaggaatggcaaggaatgatctctggtatttgtcattagaagaagtctggaaatgtagagaccagttagacaagtatcaggaaaacccagagagacatttgaggcatcagcttattcatactggagaaaaaccctatgagtgtaaagaatgtggaaagtctttcagccggagttctcacctcattggacatcaaaagacccatactggtgaggaaccctatgaatgtaaagaatgtggaaaatccttcagctggttctctcaccttgttactcatcagagaactcatacaggagacaaactgtacacatgtaatcagtgtgggaaatcttttgttcatagctctaggcttattagacaccagaggacacatactggagagaaaccctatgaatgtcctgaatgtgggaaatctttcagacagagcacacatctcattctgcatcagagaacccatgtgagagtgaggccctatgaatgcaatgaatgtggaaagtcttacagccagagatctcaccttgttgtgcatcatagaattcacactggactaaaaccttttgagtgtaaggattgtggaaaatgttttagtcgaagctctcacctttattcacatcaaagaacccacactggagagaaaccatatgagtgtcatgattgtggaaaatctttcagccagagttctgcccttattgtgcatcagaggatacacactggagagaaaccatatgaatgctgtcagtgtgggaaagccttcatccggaagaatgacctcattaagcaccagagaattcatgttggagaagagacctataaatgtaatcaatgtggcattatcttcagccagaactctccatttatagttcatcaaatagctcacactggagagcagttcttaacatgcaatcaatgtgggacagcgcttgttaatacctctaaccttattggataccagacaaatcatattagagaaaatgcttactaataaatatgggaatttttcacaaa

SEQ ID NO: 23553 - DNA, 711 bp, Homo sapiens
  misc_feature 1..711: note = ENST00000537119
  source 1..711: mol_type = unassigned DNA; mol_type = unassigned DNA
gatgcatatctggtgcaatgcaaatgtgtttgatgttgtagacactggtgaccttcaaggatgtatttgtggacttcaccagggaggagtggaagctgctggacactgctcagcagatcgtgtacagaaatgtgatgctggagaactataagaacctggtttccttgggttatcagcttactaagccagatgtgatcctccggttggagaagggagaagagccctggctggtggagagagaaattcaccaagagacccatcctgattcagagactgcatttgaaatcaaatcatcagtttccagcaggagcatttttaaagataagcaatcctgtgacattaaaatggaaggaatggcaaggaatgatctctggtatttgtcattagaagaagtctggaaatgtagagaccagttagacaagtatcaggaaaacccagagagacatttgaggcaagtggcattcacccaaaagaaagtacttactcaggagagagtctctgaaagtggtaaatatgggggaaactgtcttcttcctgctcagctagtactgagagagtatttccataaacgtgactcacatactaaaagtttaaaacatgatttagttcttaatggtcatcaggacagttgtgcaagtaacagtaatgaatgtggtcaaactttctgtcaaaacattcaccttattcagtttgcaagaactcacacaggtg

SEQ ID NO: 23554 - DNA, 2243 bp, Homo sapiens
  misc_feature 1..2243: note = ENST00000472531
  source 1..2243: mol_type = unassigned DNA; mol_type = unassigned DNA
ctcgtgcccgcacgtgcgtgtctcggtcagtagccctgcgcttctccttcactctcggcggttcaggaggctctgccgcagccggggccctcctgtgacctgcatgtactgggggattcgcagggaggatgtcgggacaccccggaagctgggaaatgaactcggttgcctttgaggatgtggctgtgaacttcacccaggaggagtgggctttgttggatccttcccagaagaatctctatagagacgtgatgcaggaaaccttcaggaatctggcttccataggaaacaaaggggaagaccagagcattgaagatcagtacaaaaattcttcaagaaatctaagatgaggtttatataactttccaagacaaggaagttgtgcaaagcctcacagctactaagaggctgggctgggactcaggattaacttcgtgactccaaagcccatgcacctctgcaagccacacgaatcaagcagcttctctaaacctttgaagtcctggaaagtaactcttctgcaatagaagcaagaatcctgtgagattgggatccatctagtactcttcaccatttggaacaactgcctccagagaatgcttctgacgcatcttggaagaacttggaataacctgaggaaatggtcgatttgctaatttaggaaaccaatgttcgatacgtgtgtgatcccaataaagctattaacaaaaaacggctcacgtaggccgggcgcagtggctcacgcctgtaatcccagcactttgggaggccgaggcgggcagatcacaaggtcaggagatcgagaccatcctggctaacacggtgaaaccccatctctactaaaaatacaaaaagtagccgggcgtggtggtggatgcctgcggtcccagctactcaggaggctgaggcaggagaatggcatgaacccgggaggcggagattgcagtgagccgagatcgcgccactgtactccagcctgcgtgacagagcgagactccgtctcagaaaaaaaaaaaaagaacataatatgtgtattgtgtctcatgtacactgttgaagaggtagcagcccatgattgatgaaatagtccagtgatcttatgagatacaagtttgttttcatgttctctctctgacattgtctatgcttagttattgtgttcatgcttattccttcatggtccaagttggctgtcccacctccaggcatcaaaccacattccaaacagcaaccaggaggaaatagtaagctgataggtcatggggaattaggttggaagccattgctttttaatttacagaagtccattctccccaggcacttctttctaagtctcattgatcagaactcaaccacgtggccaccatcagcagaaacatctctctgtagcaccgtgaaacacatgagaacataactggggatgaccgttgttacttgaactattttgaaagatctgacataaaggtcatcgccttgtgcacttcaatgggtgttactgcaaaactcccagggctaggcatggcgacatacacccgaaatctcagctatctgggaggctgaggtgggaggattgcttgagcccacgagtttgaggctgaagtgtgcctgtgaatagctactgcactccagtgcctaggacacatagggagacctcacttttttatggctgcatagtattccatggtaaagaaatgtaccacattttctttatccacttcactgttgatgggcatttatccacttcactgttggtgggaatttaggttgaatccatgtctttgctattgaagtcacactttttaatcaagttatttaactttcctgtgttcatttgtgttatataccagaacatttttatttctatggttttaatgccacctaatatgattatcaatgtgtcattctccataaatcattgtgttatacatgttaaacgattaggtattaagtgtataggtataaatcacttagaataatgactaacacattgtatgaactaaataagtactgattcatctgattcatcaaatttccattattcataccattcattatttattaagtggtgtagtatttgttcttatcaacatttgcttttctgtcctatctaaatattaatgaaacagtggatgtgggctcagtgtgctgtcttgaaataatccaaagtcaaatggcatgcttcactggtttcctttagatgcaataactcatttgactcacacaataaaaatgagtattaagta

SEQ ID NO: 23555 - DNA, 504 bp, Homo sapiens
  misc_feature 1..504: note = ENST00000476312
  source 1..504: mol_type = unassigned DNA; mol_type = unassigned DNA
cattcaggatgtcatcttgaaagcagagaccaaggtcttcaccagagacagtctgccaatggcttgattttgcacttcccagcctatataactatgtactggttcatgaagatgtgcttatgggtttctactctaatgaggtttatataactttccaagacaaggaagttgtgcaaagcctcacagctactaagaggctgggctgggactcaggattaacttcgtgactccaaagcccatgcacctctgcaagccacacgaatcaagcagcttctctaaacctttgaagtcctggaaagtaactcttctgcaatagaagcaagaatcctgtgagattgggatccatctagtactcttcaccatttggaacaactgcctccagagaatgcttctgacgcatcttggaagaacttggaataacctgaggaaatggtcgatttgctaatttaggaaaccaatgttcgatacgtgtgtgatcccaataaagctattaacaaaaaacgg

SEQ ID NO: 23556 - DNA, 956 bp, Homo sapiens
  misc_feature 1..956: note = ENST00000491356
  source 1..956: mol_type = unassigned DNA; mol_type = unassigned DNA
gtgcccgcacgtgcgtgtctcggtcagtagccctgcgcttctccttcactctcggcggttcaggaggctctgccgcagccggggccctcctgtgacctgcatgtactgggggattcgcagggaggatgtcgggacaccccggaagctgggaaatgaactcggttgcctttgaggatgtggctgtgaacttcacccaggaggagtgggctttgttggatccttcccagaagaatctctatagagacgtgatgcaggaaaccttcaggaatctggcttccataggaaacaaaggggaagaccagagcattgaagatcagtacaaaaattcttcaagaaatctaagatgtactggttcatgaagatgtgcttatgggtttctactctagtaagttttgggtctatgtatgtacctttctttctctgcactcttggggcaaggaattgccatgtgattgatcggagaattgttcattttaaattagtccagaatttttatgttttatttcttctaaaacaaacgaaaacgggatacgtgtagaacatgtgagtttgttacatgggtatacatgtgccgcggtggtttgctgcacctattgacctgtcctctaagttccctcccctcaccccccaacccccaacagcccctggtgtgtgttgttccccctctgtttccatgtgttctcaatgttcagctctcacttatgagtgagaacgtgcagtgtttagttttctgttcctgtgtttgctgaggatgatgacttccagcttcatccatgtccctgcaaagcacatgatctcattcctttttatgtctacatagtgttctatggtatatatatacacatatatatatacaccacattttctttatccagtctatcattgatgggcatttgggttggttccatgtctttgctgttgtaaataatgttgcaataaacatacgtgtgcacgtg

SEQ ID NO: 23557 - DNA, 1674 bp, Homo sapiens
  misc_feature 1..1674: note = ENST00000340684
  source 1..1674: mol_type = unassigned DNA; mol_type = unassigned DNA
ggcctttgtctctcgtgcccgcacgtgcgtgtctcggtcagtagccctgcgcttctccttcactctcggcggttcaggaggctctgccgcagccggggccctcctgtgacctgcatgtactgggggattcgcagggaggatgtcgggacaccccggaagctgggaaatgaactcggttgcctttgaggatgtggctgtgaacttcacccaggaggagtgggctttgttggatccttcccagaagaatctctatagagacgtgatgcaggaaaccttcaggaatctggcttccataggaaacaaaggggaagaccagagcattgaagatcagtacaaaaattcttcaagaaatctaagttcatttcagatacatcagagaaatcacactggagagaaaccctatgaatgtatggaatgtgggaaagccttaggtttttcccgttctcttaatagacataaaaggattcacactggagaaaaacgctatgaatgtaagcaatgtgggaaagccttcagtcgttccagtcaccttcgtgaccatgaaagaactcatactggagagaaaccctatgaatgtaagcactgtgggaaagccttccgttactccaattgccttcattaccatgaaagaactcacactggagagaaaccttatgtgtgcatggaatgtggcaaagctttcagttgtctcagttccttgcaaggacatataaaggctcatgctggtgaagaaccctatccatgtaagcaatgtgggaaagccttcagatacgccagttcccttcagaaacacgagaaaactcatattgcacagaaaccctatgtatgtaacaattgtggtaaaggcttcagatgttccagttcccttcgtgaccatgaaaggactcatactggagagaaaccctatgaatgtcagaaatgtggcaaagcctttagtcgtgctagtaccctttggaagcataaaaaaactcatactggagaaaagccctataaatgtaaaaaaatgtaaaggctttaatcactacagtttttgtcaaaaacatgaacagtcacatacttgagagaaactgtgaatgtaaggtgtaggaaagtacttaattttcccagatttcctcaaatacatgaaacgaatcaaactggagataaaccctatgactataagcaataaggtaaagcattcaatttttccatttctttttgaaaacttgaaaggactcactgaagaaaatccatatgaatgtttaaaatgtggtaaggcctgcagttgttccagtggtatttgatggtataacataactcattctagagaaaaactttatgaaggtatcgaatgtgagaatgccttcatttatcctataactcactcagagacacatggtaacacatactccagattgaccttataaataaaagaatgcccaccagattgaaatcctagaaatacagaaaattctgaattttaacaattactttaaaggtcatgtgaaaactcccactggaaataaatcctgtaaatgtaaatattatggaaaaccttatggaaaataattatagtacaattctcaagaaaattcactatgtgaatgagatgttttaggagctataaataaattgaatatattggttgctcatttttgaagagagtctctagaatatagattttcacttcttttg

SEQ ID NO: 23558 - DNA, 1292 bp, Homo sapiens
  misc_feature 1..1292: note = ENST00000543802
  source 1..1292: mol_type = unassigned DNA; mol_type = unassigned DNA
cgcttctccttcactctcggcggttcaggaggctctgccgcagccggggccctcctgtgacctgcatgtactgggggattcgcagggaggatgtcgggacaccccggaagctgggaaatgaactcggttgcctttgaggatgtggctgtgaacttcacccaggaggagtgggctttgttggatccttcccagaagaatctctatagagacgtgatgcaggaaaccttcaggaatctggcttccataggaaacaaaggggaagaccagagcattgaagatcagtacaaaaattcttcaagaaatctaaggcacatcatatctcattctggaaacaacccatatgggtgtgaggaatgcggaaagaagccatgtacatgtaaacaatgtcagaaaacttccctttctgtcacaagggttcacagagacacagtaatgcacactggaaatggacattatggttgtacaatatgtgagaaagtttttaatattcccagttcatttcagatacatcagagaaatcacactggagagaaaccctatgaatgtatggaatgtgggaaagccttaggtttttcccgttctcttaatagacataaaaggattcacactggagaaaaacgctatgaatgtaagcaatgtgggaaagccttcagtcgttccagtcaccttcgtgaccatgaaagaactcatactggagagaaaccctatgaatgtaagcactgtgggaaagccttccgttactccaattgccttcattaccatgaaagaactcacactggagagaaaccttatgtgtgcatggaatgtggcaaagctttcagttgtctcagttccttgcaaggacatataaaggctcatgctggtgaagaaccctatccatgtaagcaatgtgggaaagccttcagatacgccagttcccttcagaaacacgagaaaactcatattgcacagaaaccctatgtatgtaacaattgtggtaaaggcttcagatgttccagttcccttcgtgaccatgaaaggactcatactggagagaaaccctatgaatgtcagaaatgtggcaaagcctttagtcgtgctagtaccctttggaagcataaaaaaactcatactggagaaaagccctataaatgtaaaaaaatgtaaaggctttaatcactacagtttttgtcaaaaacatgaacagtcacatacttgagagaaactgtgaatgtaaggtgtaggaaagtacttaattttcccagatttcctcaaatacatgaaacgaatcaaactggagataaaccctatga

SEQ ID NO: 23559 - DNA, 701 bp, Homo sapiens
  misc_feature 1..701: note = ENST00000491848
  source 1..701: mol_type = unassigned DNA; mol_type = unassigned DNA
ctcgtgcccgcacgtgcgtgtctcggtcagtagccctgcgcttctccttcactctcggcggttcaggaggctctgccgcagccggggccctcctgtgacctgcatgtactgggggattcgcagggaggatgtcgggacaccccggaagctgggaaatgatttccagtgctttcagtctcatccatcctctacaaaaatgtggaatattttagaactcggttgcctttgaggatgtggctgtgaacttcacccaggaggagtgggctttgttggatccttcccagaagaatctctatagagacgtgatgcaggaaaccttcaggaatctggcttccataggaaacaaaggggaagaccagagcattgaagatcagtacaaaaattcttcaagaaatctaagttcatttcagatacatcagagaaatcacactggagagaaaccctatgaatgtatggaatgtgggaaagccttaggtttttcccgttctcttaatagacataaaaggattcacactggagaaaaacgctatgaatgtaagcaatgtgggaaagccttcagtcgttccagtcaccttcgtgaccatgaaagaactcatactggagagaaaccctatgaatgtaagcactgtgggaaagccttccgttactccaattgccttcattaccatgaaagaactcacactggagagaaaccttatgtg

SEQ ID NO: 23560 - DNA, 750 bp, Homo sapiens
  misc_feature 1..750: note = ENST00000503599
  source 1..750: mol_type = unassigned DNA; mol_type = unassigned DNA
gacactgaaaatcagtagaagaaatacgccacatttattctaccggggaagacagtgggaaacctgaaactgccattgagcagaaggaaaacatccctttccagaacctttctcgtttttctaaaaatctgcacttttggaagtgatcccccaaagagacctccagactctaccatgagtgtctccagctgaactcatcgtgtctaatcctcaccctagcttatcctgttcaaatcatttccatctttttctggatgaacctgggcggatgtcagaccagagaagagcacagaatgtaccagagagagtcttgctctgtcacccaggctgaagtgcacccaggctgaagttggaggctatggtgagctgcaccactacaccactatgggaggccgaggcgagtggattgcctgagctcaggagttcgagaccagcctgggcaacgttgtgaaaccccgtctctactaaaacacaaaaaattagccaggcctggcggcatgtgcctatagtcccagctactcaggaggctgaggcaggagaattgcttgaacccgggagctggaggttgcagtgagccgagattgcgccactgcactccagcctcggtgacagagtgagactccgtctcaaaaaaaaacaatataaggtgaaggccaagcagggtggcacatacctgttgtctcacctactcaaaaggctgaggccagaggaggattgctggaagtgagttcaaagccagcctagagaata

SEQ ID NO: 23561 - DNA, 990 bp, Homo sapiens
  misc_feature 1..990: note = ENST00000499046
  source 1..990: mol_type = unassigned DNA; mol_type = unassigned DNA
agtgaaagactcaatgcctcctgaccgaggcttcaggcctgccccggcagctaggtacctctccaggggatggaactctgtgggaactgctatttaattctgatggttaactctgtcagatggccttgatatatgggaataatcgttgcaggagggtaggggaaataagaatcgcaagactctagcacaggacgtgtggattgatggaaacctgaaactgccattgagcagaaggaaaacatccctttccagaacctttctcgtttttctaaaaatctgcacttttggaagtgatcccccaaagagacctccagactctaccatgagtgtctccagctgaactcatcgtgtctaatcctcaccctagcttatcctgttcaaatcatttccatctttttctggatgaacctgggcggatgtcagaccagagaagagcacagaatgtaccagagaggaaaccagccctaacaactctgaggcaagaagaggcttcaggactggatatgggacttaggtgacagaaagtctcctacctcttcaaaagcacaaacatactttatttctgttaaagaaaaaatgtaacacagttgttaggatggtaaagcagacttcattcagcattattgccataggtgtactttgcagtagaggattgagattgggatcagctcctaatacaaggaaaataagggatttacagccaaagactgagaggtagggatggaacgtggggcaggacaggggttagtgaatggaaaattactaaaaggatacgttaattttttctaaagtgacctaacagtattcttgctataggcagaccagggtgatcagatatcaattggagaataaggaatgtggtcagatatcgagggcgaatcagatattgaagataggggatgctggctaaaactgggctcttgaggcaatgtccaaggtccaagcataggtgggaaaggggtgaggagactgtgtctagggtttggtcaa

SEQ ID NO: 23562 - DNA, 465 bp, Homo sapiens
  misc_feature 1..465: note = ENST00000508795
  source 1..465: mol_type = unassigned DNA; mol_type = unassigned DNA
gaagtgatcccccaaagagacctccagactctaccatgagtgtctccagctgaactcatcgtgtctaatcctcaccctagcttatcctgttcaaatcatttccatctttttctggatgaacctgggcggatgtcagaccagagaagagcacagaatgtaccagagagagtgagactccgtctcaaaaaaaaacaatataaggtgaaggccaagcagggtggcacatacctgttgtctcacctactcaaaaggctgaggccagaggaggattgctggaagtgagttcaaagccagcctagagaatatattgagactctgtctctaaattttatatatatatggtgaattcacctttaccatatcttttatgtataagcaatgggattgattagcaagtaatgggactctgaaatcaaaggggtaaatttgggtagatctttataaatataataaccttgaacccca

SEQ ID NO: 23563 - DNA, 583 bp, Homo sapiens
  misc_feature 1..583: note = ENST00000507393
  source 1..583: mol_type = unassigned DNA; mol_type = unassigned DNA
atcccccaaagagacctccagactctaccatgagtgtctccagctgaactcatcgtgtctaatcctcaccctagcttatcctgttcaaatcatttccatctttttctggatgaacctgggcggatgtcagaccagagaagagcacagaatgtaccagagagctgccatgtcctgtggagagcctggcatgaacagaggccttgcggagaactgaagccttcagtccaagagccagggaggaactgaattctgtcaagaaccacttgagtgaccttggaagcagatcctttcccattggagccttgagattaaagccaccttacctgacaacttgataggagccttatggggtctcgctatgtgcccaggctggcctcaaactcctgggctgaactcctcctccccaactcggcctcccaaagtgctgggattacaagcgtgagccaccgcgcccgcccacatctcttcttacagagcagcccgacggccatggaggctgaagagacgatggaatgccttcaggagttccctgaacatcataaaatgatcctcgaccgattgaatgaacagcgagagcaggacc

SEQ ID NO: 23564 - DNA, 476 bp, Homo sapiens
  misc_feature 1..476: note = ENST00000514169
  source 1..476: mol_type = unassigned DNA; mol_type = unassigned DNA
taatcctcaccctagcttatcctgttcaaatcatttccatctttttctggatgaacctgggcggatgtcagaccagagaagagcacagaatgtaccagagagagtcttgctctgtcacccaggctgaagtgcacccaggctgaagttggaggctatgatgcggtgatgggagccatatacacaaagatgaaggactggctacagctttcacagaccttacaacctactgagagagcaaagacacagtgaagagatcattcagaatacagtccaactccaagatcattgggagagcttatttgaagaccagaaaggttactgaacatggtgactctcttcaaagccagacctttgtccttgaatttagggcttcaaaaaacaatagtagggccgggcgcagtggctcatgcctgtaatcccaacactttgggaggccaaggtgggcagatcacctgaggtcaggagttcgagaccgg

SEQ ID NO: 23565 - DNA, 1050 bp, Homo sapiens
  misc_feature 1..1050: note = ENST00000515326
  source 1..1050: mol_type = unassigned DNA; mol_type = unassigned DNA
gaacgtgctcgcgcccgtagctgccgctgccggggccgcggccgcccgggtgcccaaccgaacgcacgtgcgccagcggggcccgagcagaaggggagccccggctctcacgaagaaaatggagggcgacccacgggttaggggtcaggaaaggcgtggggcgcattatgccctgggaggggaaagcacggaacaagaggctctgagggacggagaggaaggagggcgacccacgagctagagcagcccgacggccatggaggctgaagagacgatggaatgccttcaggagttccctgaacatcataaaatgatcctcgaccgattgaatgaacagcgagagcaggaccggtttactgacatcaccctaattgtcgacggacaccattttaaggctcacaaggctgttttggctgcttgtagtaagttcttctacaaattctttcaggagtttacccaagaaccattggtggagatagaaggtgttagtaaaatggcctttcgccatttaattgagttcacatatacagcaaaattaatgatacaaggagaagaagaagccaatgatgtatggaaagcagcagagtttctacaaatgctagaagctatcaaagcccttgaagtcaggaacaaagaaaactcagctcccttagaggaaaataccacaggaaaaaatgaggccaaaaaaaggaagattgcagaaacttcaaatgttatcactgagtcattgccatctgcagaatcagaacctgttgaaattgaggtagagattgccgaaggcaccattgaagtggaagatgaaggcatcgaaacattagaggaagtggcttctgccaagcagtccgtaaagtacatacagagcacaggttcctctgatgattctgctctagcactgttggcagatattaccagcaagtaccgtcaaggtgacagaaaagggcagattaaagaagatggctgtccatctgaccccacgagcaaacaggagcacatgaaatcacactccactgagagtttcaagtgtgaaatatgcaataaacgatatcttcg

SEQ ID NO: 23566 - DNA, 2599 bp, Homo sapiens
  misc_feature 1..2599: note = ENST00000510026
  source 1..2599: mol_type = unassigned DNA; mol_type = unassigned DNA
ccgcggccgcccgggtgcccaaccgaacgcacgtgcgccagcggggcccgagcagaaggggagccccggctctcacgaagaaaatggagggcgacccacgggttaggggtcaggaaaggcgtggggcgcattatgccctgggaggggaaagcacggaacaagaggctctgagggacggagaggaaggagggcgacccacgagctagagcagcccgacggccatggaggctgaagagacgatggaatgccttcaggagttccctgaacatcataaaatgatcctcgaccgattgaatgaacagcgagagcaggaccggtttactgacatcaccctaattgtcgacggacaccattttaaggctcacaaggctgttttggctgcttgtagtaagttcttctacaaattctttcaggagtttacccaagaaccattggtggagatagaaggtgttagtaaaatggcctttcgccatttaattgagttcacatatacagcaaaattaatgatacaaggagaagaagaagccaatgatgtatggaaagcagcagagtttctacaaatgctagaagctatcaaagcccttgaagtcaggaacaaagaaaactcagctcccttagaggaaaataccacaggaaaaaatgaggccaaaaaaaggaagattgcagaaacttcaaatgttatcactgagtcattgccatctgcagaatcagaacctgttgaaattgaggtagagattgccgaaggcaccattgaagtggaagatgaaggcatcgaaacattagaggaagtggcttctgccaagcagtccgtaaagtacatacagagcacaggttcctctgatgattctgctctagcactgttggcagatattaccagcaagtaccgtcaaggtgacagaaaagggcagattaaagaagatggctgtccatctgaccccacgagcaaacaggtagaaggagcacatgaaatcacactccactgagagtttcaagtgtgaaatatgcaataaacgatatcttcgagagagcgcatggaaacagcacctaaattgttaccaccttgaagaaggtggagtcagtaagaagcaaagaactgggaaaaaaattcatgtatgtcagtactgtgagaaacagtttgaccattttggacattttaaagaacatcttcgaaaacatacaggtgaaaaaccttttgaatgtccaaattgtcatgaacgatttgctagaaatagcactctgaaatgtcacctcactgcatgccaaactggagtaggggcaaaaaaaggaaggaagaagctctacgaatgccaggtctgcaacagtgtgtttaacagctgggaccagttcaaagatcacttggtaatacacactggagataaacccaaccattgtactttatgtgatttgtggtttatgcaaggaaatgaattaaggaggcatctcagtgatgctcacaatatttcagagcgtctagtaacggaagaagttctttcagtagaaacacgtgtgcaaactgaacctgtaacatcaatgactattatagaacaagttgggaaggtgcatgtgctaccattgcttcaggttcaggtggattcagcacaagtgactgtggaacaagtccatccagatctgctccaggacagccaggtgcacgattcacacatgagtgagcttccagagcaggtccaagtgagttatctagaagtgggccgaattcagactgaagaaggtactgaagtacatgtagaggagctgcatgttgaacgggtcaatcaaatgccagtggaagtacaaactgaacttctagaagcagatttggaccacgtgaccccagaaatcatgaaccaagaggagagagagtctagccaagcagatgctgctgaggctgccagggaagatcacgaagatgctgaggatttagagaccaagccaacagtggattctgaagcagaaaaggcagagaatgaggacagaacagctctgccagttttagaatgaaattacacatgaatatatttttaaatttacttgttgggtttttgaactgattatgggcagtttgactgtccttaattaagcctaacagacaagtggaccaaagttaagctgtttcctgttgtgctgaactgttgtccgttgaaacacattgattcccctccccctacttattgccacagaggagggatcttttccataactgaaggggagttttgagaagtatatttctggaaacttaaatggattatattcttattatatagttgggtacgaatgtatctattttcattgtggtaaaagttcttccttttctctttcccaggtcatgttcttcctcaaattttttccatattgtaaaatcaaacttaaatcattagaatacaagtttatgtattctaatgcatgttagaaaattgaataatataggaaacacaaggctgcatgatgaaaagtgcattgttactgtgcagttaaattttggcttctggctttctttagtttgaacaaacgttcttgtctaccccagtagtcacagatgccatctttgcaacagaaagagtggtggtggcaaaatttctagaatgttaaaaaaaaaaaaaaa

SEQ ID NO: 23567 - DNA, 565 bp, Homo sapiens
  misc_feature 1..565: note = ENST00000504359
  source 1..565: mol_type = unassigned DNA; mol_type = unassigned DNA
gcggccgcccgggtgcccaaccgaacgcacgtgcgccagcggggcccgagcagaaggggagccccggctctcacgaagaaaatggagggcgacccacgggttaggggtcaggaaaggcgtggggcgcattatgccctgggaggggaaagcacggaacaagaggctctgagggacggagaggaaggagggcgacccacgagctagagcagcccgacggccatggaggctgaagagacgatggaatgccttcaggagttccctgaacatcataaaatgatcctcgaccgattgaatgaacagcgagagcaggaccggtttactgacatcaccctaattgtcgacggacaccattttaaggctcacaaggctgttttggctgcttgtagtaagttcttctacaaattctttcaggagtttacccaagaaccattggtggagatagaaggaacaaagaaaactcagctcccttagaggaaaataccacaggaaaaaatgaggccaaaaaaaggaagattgcagaaacttcaaatgttatcactgagtcattgccatctgcagaatcaga

SEQ ID NO: 23568 - DNA, 2063 bp, Homo sapiens
  misc_feature 1..2063: note = ENST00000509156
  source 1..2063: mol_type = unassigned DNA; mol_type = unassigned DNA
gcggtgacggtgtgcgtcgacagcagcccgacggccatggaggctgaagagacgatggaatgccttcaggagttccctgaacatcataaaatgatcctcgaccgattgaatgaacagcgagagcaggaccggtttactgacatcaccctaattgtcgacggacaccattttaaggctcacaaggctgttttggctgcttgtagtaagttcttctacaaattctttcaggagtttacccaagaaccattggtggagatagaaggtgttagtaaaatggcctttcgccatttaattgagttcacatatacagcaaaattaatgatacaaggagaagaagaagccaatgatgtatggaaagcagcagagtttctacaaatgctagaagctatcaaagcccttgaagtcaggaacaaagaaaactcagctcccttagaggaaaataccacaggaaaaaatgaggccaaaaaaaggaagattgcagaaacttcaaatgttatcactgagtcattgccatctgcagaatcagaacctgttgaaattgaggtagagattgccgaaggcaccattgaagtggaagatgaaggcatcgaaacattagaggaagtggcttctgccaagcagtccgtaaagtacatacagagcacaggttcctctgatgattctgctctagcactgttggcagatattaccagcaagtaccgtcaaggtgacagaaaagggcagattaaagaagatggctgtccatctgaccccacgagcaaacaggtagaaggtattgaaattgtggaacttcagctgtcacatgtgaaggacttgttccattgtgagaaatgtaaccgttcatttaaattgttttaccattttaaggagcacatgaaatcacactccactgagagtttcaagtgtgaaatatgcaataaacgatatcttcgagagagcgcatggaaacagcacctaaattgttaccaccttgaagaaggtggagtcagtaagaagcaaagaactgggaaaaaaattcatgtatgtcagtactgtgagaaacagtttgaccattttggacattttaaagaacatcttcgaaaacatacaggtgaaaaaccttttgaatgtccaaattgtcatgaacgatttgctagaaatagcactctgaaatgtcacctcactgcatgccaaactggagtaggggcaaaaaaaggaaggaagaagctctacgaatgccaggtctgcaacagtgtgtttaacagctgggaccagttcaaagatcacttggtaatacacactggagataaacccaaccattgtactttatgtgatttgtggtttatgcaaggaaatgaattaaggaggcatctcagtgatgctcacaatatttcagagcgtctagtaacggaagaagttctttcagtagaaacacgtgtgcaaactgaacctgtaacatcaatgactattatagaacaagttgggaaggtgcatgtgctaccattgcttcaggttcaggtggattcagcacaagtgactgtggaacaagtccatccagatctgctccaggacagccaggtgcacgattcacacatgagtgagcttccagagcaggtccaagtgagttatctagaagtgggccgaattcagactgaagaaggtactgaagtacatgtagaggagctgcatgttgaacgggtcaatcaaatgccagtggaagtacaaactgaacttctagaagcagatttggaccacgtgaccccagaaatcatgaaccaagaggagagagagtctagccaagcagatgctgctgaggctgccagggaagatcacgaagatgctgaggatttagagaccaagccaacagtggattctgaagcagaaaaggcagagaatgaggacagaacagctctgccagttttagaatgaaattacacatgaatatatttttaaatttacttgttgggtttttgaactgattatgggcagtttgactgtccttaattaagcctaacagacaagtggaccaaagttaagctgtttcctgttgtgctgaactgttgtccgttgaaacacattgattc

SEQ ID NO: 23569 - DNA, 501 bp, Homo sapiens
  misc_feature 1..501: note = ENST00000508259
  source 1..501: mol_type = unassigned DNA; mol_type = unassigned DNA
gtgacgcgcaagcctgggccgctcctccttccctcacccgacggccatggaggctgaagagacgatggaatgccttcaggagttccctgaacatcataaaatgatcctcgaccgattgaatgaacagcgagagcaggaccggtttactgacatcaccctaattgtcgacggacaccattttaaggctcacaaggctgttttggctgcttgtagtaagttcttctacaaattctttcaggagtttacccaagaaccattggtggagatagaaggtgttagtaaaatggcctttcgccatttaattgagttcacatatacagcaaaattaatgatacaaggagaagaagaagccaatgatgtatggaaagcagcagagtttctacaaatgctagaagctatcaaagcccttgaagtcaggaacaaagaaaactcagctcccttagaggaaaataccacaggaaaaaatgaggccaaaaaaaggaagattgcagaaacttcaaa

SEQ ID NO: 23570 - DNA, 1352 bp, Homo sapiens
  misc_feature 1..1352: note = ENST00000507218
  source 1..1352: mol_type = unassigned DNA; mol_type = unassigned DNA
acgcgcaagcctgggccgctcctccttccctcacccgacggccatggaggctgaagagacgatggaatgccttcaggagttccctgaacatcataaaatgatcctcgaccgattgaatgaacagcgagagcaggaccggtttactgacatcaccctaattgtcgacggacaccattttaaggctcacaaggctgttttggctgcttgtagtaagttcttctacaaattctttcaggagtttacccaagaaccattggtggagatagaaggaacaaagaaaactcagctcccttagaggaaaataccacaggaaaaaatgaggccaaaaaaaggaagattgcagaaacttcaaatgttatcactgagtcattgccatctgcagaatcagaacctgttgaaattgaggtagagattgccgaaggcaccattgaagtggaagatgaaggcatcgaaacattagaggaagtggcttctgccaagcagtccgtaaagtacatacagagcacaggttcctctgatgattctgctctagcactgttggcagatattaccagcaagtaccgtcaaggtgacagaaaagggcagattaaagaagatggctgtccatctgaccccacgagcaaacaggtagaaggtattgaaattgtggaacttcagctgtcacatgtgaaggacttgttccattgtgagaaatgtaaccgttcatttaaattgttttaccattttaaggagcacatgaaatcacactccactgagagtttcaagtgtgaaatatgcaataaacgatatcttcgagagagcgcatggaaacagcacctaaattgttaccaccttgaagaaggtggagtcagtaagaagcaaagaactgggaaaaaaattcatgtatgtcagtactgtgagaaacagtttgaccattttggacattttaaagaacatcttcgaaaacatacaggtgaaaaaccttttgaatgtccaaattgtcatgaacgatttgctagaaatagcactctgaaatgtcacctcactgcatgccaaactggagtaggggcaaaaaaaggaaggaagaagctctacgaatgccaggtctgcaacagtgtgtttaacagctgggaccagttcaaagatcacttggtaatacacactggagataaacccaaccattgtactttatgtgatttgtggtttatgcaaggaaatgaattaaggaggcatctcagtgatgctcacaatatttcagagcgtctagtaacggaagaagttctttcagtagaaacacgtgtgcaaactgaacctgtaacatcaatgactattatagaacaagttgggaaggtgcatgtgctaccattgcttca

SEQ ID NO: 23571 - DNA, 2400 bp, Homo sapiens
  misc_feature 1..2400: note = ENST00000306938
  source 1..2400: mol_type = unassigned DNA; mol_type = unassigned DNA
gcaagcctgggccgctcctccttccctcaagcagcccgacggccatggaggctgaagagacgatggaatgccttcaggagttccctgaacatcataaaatgatcctcgaccgattgaatgaacagcgagagcaggaccggtttactgacatcaccctaattgtcgacggacaccattttaaggctcacaaggctgttttggctgcttgtagtaagttcttctacaaattctttcaggagtttacccaagaaccattggtggagatagaaggtgttagtaaaatggcctttcgccatttaattgagttcacatatacagcaaaattaatgatacaaggagaagaagaagccaatgatgtatggaaagcagcagagtttctacaaatgctagaagctatcaaagcccttgaagtcaggaacaaagaaaactcagctcccttagaggaaaataccacaggaaaaaatgaggccaaaaaaaggaagattgcagaaacttcaaatgttatcactgagtcattgccatctgcagaatcagaacctgttgaaattgaggtagagattgccgaaggcaccattgaagtggaagatgaaggcatcgaaacattagaggaagtggcttctgccaagcagtccgtaaagtacatacagagcacaggttcctctgatgattctgctctagcactgttggcagatattaccagcaagtaccgtcaaggtgacagaaaagggcagattaaagaagatggctgtccatctgaccccacgagcaaacaggagcacatgaaatcacactccactgagagtttcaagtgtgaaatatgcaataaacgatatcttcgagagagcgcatggaaacagcacctaaattgttaccaccttgaagaaggtggagtcagtaagaagcaaagaactgggaaaaaaattcatgtatgtcagtactgtgagaaacagtttgaccattttggacattttaaagaacatcttcgaaaacatacaggtgaaaaaccttttgaatgtccaaattgtcatgaacgatttgctagaaatagcactctgaaatgtcacctcactgcatgccaaactggagtaggggcaaaaaaaggaaggaagaagctctacgaatgccaggtctgcaacagtgtgtttaacagctgggaccagttcaaagatcacttggtaatacacactggagataaacccaaccattgtactttatgtgatttgtggtttatgcaaggaaatgaattaaggaggcatctcagtgatgctcacaatatttcagagcgtctagtaacggaagaagttctttcagtagaaacacgtgtgcaaactgaacctgtaacatcaatgactattatagaacaagttgggaaggtgcatgtgctaccattgcttcaggttcaggtggattcagcacaagtgactgtggaacaagtccatccagatctgctccaggacagccaggtgcacgattcacacatgagtgagcttccagagcaggtccaagtgagttatctagaagtgggccgaattcagactgaagaaggtactgaagtacatgtagaggagctgcatgttgaacgggtcaatcaaatgccagtggaagtacaaactgaacttctagaagcagatttggaccacgtgaccccagaaatcatgaaccaagaggagagagagtctagccaagcagatgctgctgaggctgccagggaagatcacgaagatgctgaggatttagagaccaagccaacagtggattctgaagcagaaaaggcagagaatgaggacagaacagctctgccagttttagaatgaaattacacatgaatatatttttaaatttacttgttgggtttttgaactgattatgggcagtttgactgtccttaattaagcctaacagacaagtggaccaaagttaagctgtttcctgttgtgctgaactgttgtccgttgaaacacattgattcccctccccctacttattgccacagaggagggatcttttccataactgaaggggagttttgagaagtatatttctggaaacttaaatggattatattcttattatatagttgggtacgaatgtatctattttcattgtggtaaaagttcttccttttctctttcccaggtcatgttcttcctcaaattttttccatattgtaaaatcaaacttaaatcattagaatacaagtttatgtattctaatgcatgttagaaaattgaataatataggaaacacaaggctgcatgatgaaaagtgcattgttactgtgcagttaaattttggcttctggctttctttagtttgaacaaacgttcttgtctaccccagtagtcacagatgccatctttgcaacagaaagagtggtggtggcaaaatttctagaatgtt

SEQ ID NO: 23572 - DNA, 3209 bp, Homo sapiens
  misc_feature 1..3209: note = ENST00000505606
  source 1..3209: mol_type = unassigned DNA
gagaagagggagggcgggggagggagaggcgacccgagagtcgttgtgggtcgcgggccggaccgggtcccggggcggtgggagccccggccgggcagaagggcttggcgggccgttagaggaccgccacggctgtcgagtcccctcccttgttggacttgcgcgccctggcgctcggaacctccggcgctgtgcccaccccgctctagctcgcgtctcccgactccaattagagcagcccgacggccatggaggctgaagagacgatggaatgccttcaggagttccctgaacatcataaaatgatcctcgaccgattgaatgaacagcgagagcaggaccggtttactgacatcaccctaattgtcgacggacaccattttaaggctcacaaggctgttttggctgcttgtagtaagttcttctacaaattctttcaggagtttacccaagaaccattggtggagatagaaggtgttagtaaaatggcctttcgccatttaattgagttcacatatacagcaaaattaatgatacaaggagaagaagaagccaatgatgtatggaaagcagcagagtttctacaaatgctagaagctatcaaagcccttgaagtcaggaacaaagaaaactcagctcccttagaggaaaataccacaggaaaaaatgaggccaaaaaaaggaagattgcagaaacttcaaatgttatcactgagtcattgccatctgcagaatcagaacctgttgaaattgaggtagagattgccgaaggcaccattgaagtggaagatgaaggcatcgaaacattagaggaagtggcttctgccaagcagtccgtaaagtacatacagagcacaggttcctctgatgattctgctctagcactgttggcagatattaccagcaagtaccgtcaaggtgacagaaaagggcagattaaagaagatggctgtccatctgaccccacgagcaaacaggagcacatgaaatcacactccactgagagtttcaagtgtgaaatatgcaataaacgatatcttcgagagagcgcatggaaacagcacctaaattgttaccaccttgaagaaggtggagtcagtaagaagcaaagaactgggaaaaaaattcatgtatgtcagtactgtgagaaacagtttgaccattttggacattttaaagaacatcttcgaaaacatacaggtgaaaaaccttttgaatgtccaaattgtcatgaacgatttgctagaaatagcactctgaaatgtcacctcactgcatgccaaactggagtaggggcaaaaaaaggaaggaagaagctctacgaatgccaggtctgcaacagtgtgtttaacagctgggaccagttcaaagatcacttggtaatacacactggagataaacccaaccattgtactttatgtgatttgtggtttatgcaaggaaatgaattaaggaggcatctcagtgatgctcacaatatttcagagcgtctagtaacggaagaagttctttcagtagaaacacgtgtgcaaactgaacctgtaacatcaatgactattatagaacaagttgggaaggtgcatgtgctaccattgcttcaggttcaggtggattcagcacaagtgactgtggaacaagtccatccagatctgctccaggacagccaggtgcacgattcacacatgagtgagcttccagagcaggtccaagtgagttatctagaagtgggccgaattcagactgaagaaggtactgaagtacatgtagaggagctgcatgttgaacgggtcaatcaaatgccagtggaagtacaaactgaacttctagaagcagatttggaccacgtgaccccagaaatcatgaaccaagaggagagagagtctagccaagcagatgctgctgaggctgccagggaagatcacgaagatgctgaggatttagagaccaagccaacagtggattctgaagcagaaaaggcagagaatgaggacagaacagctctgccagttttagaatgaaattacacatgaatatatttttaaatttacttgttgggtttttgaactgattatgggcagtttgactgtccttaattaagcctaacagacaagtggaccaaagttaagctgtttcctgttgtgctgaactgttgtccgttgaaacacattgattcccctccccctacttattgccacagaggagggatcttttccataactgaaggggagttttgagaagtatatttctggaaacttaaatggattatattcttattatatagttgggtacgaatgtatctattttcattgtggtaaaagttcttccttttctctttcccaggtcatgttcttcctcaaattttttccatattgtaaaatcaaacttaaatcattagaatacaagtttatgtattctaatgcatgttagaaaattgaataatataggaaacacaaggctgcatgatgaaaagtgcattgttactgtgcagttaaattttggcttctggctttctttagtttgaacaaacgttcttgtctaccccagtagtcacagatgccatctttgcaacagaaagagtggtggtggcaaaatttctagaatgttaaaaaaaaaaaaaaatccacacccatgtgccttctcaaaaccaactgaacttctataaagcatctctggttctttcaaagtttgtgttgtaaggagcaatgtagatgatgctataatactttatatttttggttataatgacaaccaccagttctttttcacttaagttaggttgagaaattttatttaatggccactgaagggccattttcaattgggaaaatttatttacatctgtggtaaactttattttgatgaaaagttgcactagtattttaccaccagatgagaaaaagatgagcagcatttaaaaattaatgtatttaaaataaagtacagagaaagacatgtatataattatcaggctttgttttgaatggaatcttttcccccaattcttaatgtaaagatcttgtgctataacttttaaagccatacaaataagagtgctaaactgtggacttaaaagtaggtgtgtaaatatttttaatcagtattacttggaaaataaaatataacaaacccatagaccaatatgctattttttttacctgttaaatattgggagttctttacattttttaagtaaactttaaaattatgtg

SEQ ID NO: 23573 - DNA, 3340 bp, Homo sapiens
  misc_feature 1..3340: note = ENST00000509634
  source 1..3340: mol_type = unassigned DNA
gaagagggagggcgggggagggagaggcgacccgagagtcgttgtgggtcgcgggccggaccgggtcccggggcggtgggagccccggccgggcagaagggcttggcgggccgttagaggaccgccacggctgtcgagtcccctcccttgttggacttgcgcgccctggcgctcggaacctccggcgctgtgcccaccccgctctagctcgcgtctcccgactccaattaggtcaggctcggagtcccgcggccgcggctccggtctcaacgctccggggccgctcggctcgcctttcttccctcgcctttctctcctcttgcttcaccctccccccttcttttcacgttgctggttttttttgttgttgttttatgctttaggggttttgttcctcggctcgagctcatgggtgtacattatcatgctcttcttttgtagagcagcccgacggccatggaggctgaagagacgatggaatgccttcaggagttccctgaacatcataaaatgatcctcgaccgattgaatgaacagcgagagcaggaccggtttactgacatcaccctaattgtcgacggacaccattttaaggctcacaaggctgttttggctgcttgtagtaagttcttctacaaattctttcaggagtttacccaagaaccattggtggagatagaaggtgttagtaaaatggcctttcgccatttaattgagttcacatatacagcaaaattaatgatacaaggagaagaagaagccaatgatgtatggaaagcagcagagtttctacaaatgctagaagctatcaaagcccttgaagtcaggaacaaagaaaactcagctcccttagaggaaaataccacaggaaaaaatgaggccaaaaaaaggaagattgcagaaacttcaaatgttatcactgagtcattgccatctgcagaatcagaacctgttgaaattgaggtagagattgccgaaggcaccattgaagtggaagatgaaggcatcgaaacattagaggaagtggcttctgccaagcagtccgtaaagtacatacagagcacaggttcctctgatgattctgctctagcactgttggcagatattaccagcaagtaccgtcaaggtgacagaaaagggcagattaaagaagatggctgtccatctgaccccacgagcaaacaggagcacatgaaatcacactccactgagagtttcaagtgtgaaatatgcaataaacgatatcttcgagagagcgcatggaaacagcacctaaattgttaccaccttgaagaaggtggagtcagtaagaagcaaagaactgggaaaaaaattcatgtatgtcagtactgtgagaaacagtttgaccattttggacattttaaagaacatcttcgaaaacatacaggtgaaaaaccttttgaatgtccaaattgtcatgaacgatttgctagaaatagcactctgaaatgtcacctcactgcatgccaaactggagtaggggcaaaaaaaggaaggaagaagctctacgaatgccaggtctgcaacagtgtgtttaacagctgggaccagttcaaagatcacttggtaatacacactggagataaacccaaccattgtactttatgtgatttgtggtttatgcaaggaaatgaattaaggaggcatctcagtgatgctcacaatatttcagagcgtctagtaacggaagaagttctttcagtagaaacacgtgtgcaaactgaacctgtaacatcaatgactattatagaacaagttgggaaggtgcatgtgctaccattgcttcaggttcaggtggattcagcacaagtgactgtggaacaagtccatccagatctgctccaggacagccaggtgcacgattcacacatgagtgagcttccagagcaggtccaagtgagttatctagaagtgggccgaattcagactgaagaaggtactgaagtacatgtagaggagctgcatgttgaacgggtcaatcaaatgccagtggaagtacaaactgaacttctagaagcagatttggaccacgtgaccccagaaatcatgaaccaagaggagagagagtctagccaagcagatgctgctgaggctgccagggaagatcacgaagatgctgaggatttagagaccaagccaacagtggattctgaagcagaaaaggcagagaatgaggacagaacagctctgccagttttagaatgaaattacacatgaatatatttttaaatttacttgttgggtttttgaactgattatgggcagtttgactgtccttaattaagcctaacagacaagtggaccaaagttaagctgtttcctgttgtgctgaactgttgtccgttgaaacacattgattcccctccccctacttattgccacagaggagggatcttttccataactgaaggggagttttgagaagtatatttctggaaacttaaatggattatattcttattatatagttgggtacgaatgtatctattttcattgtggtaaaagttcttccttttctctttcccaggtcatgttcttcctcaaattttttccatattgtaaaatcaaacttaaatcattagaatacaagtttatgtattctaatgcatgttagaaaattgaataatataggaaacacaaggctgcatgatgaaaagtgcattgttactgtgcagttaaattttggcttctggctttctttagtttgaacaaacgttcttgtctaccccagtagtcacagatgccatctttgcaacagaaagagtggtggtggcaaaatttctagaatgttaaaaaaaaaaaaaaatccacacccatgtgccttctcaaaaccaactgaacttctataaagcatctctggttctttcaaagtttgtgttgtaaggagcaatgtagatgatgctataatactttatatttttggttataatgacaaccaccagttctttttcacttaagttaggttgagaaattttatttaatggccactgaagggccattttcaattgggaaaatttatttacatctgtggtaaactttattttgatgaaaagttgcactagtattttaccaccagatgagaaaaagatgagcagcatttaaaaattaatgtatttaaaataaagtacagagaaagacatgtatataattatcaggctttgttttgaatggaatcttttcccccaattcttaatgtaaagatcttgtgctataacttttaaagccatacaaataagagtgctaaactgtggacttaaaagtaggtgtgtaaatatttttaatcagtattacttggaaaataaaatataacaaacccata

SEQ ID NO: 23574 - DNA, 572 bp, Homo sapiens
  misc_feature 1..572: note = ENST00000509341
  source 1..572: mol_type = unassigned DNA
ggccgggcagaagggcttggcgggccgttagaggaccgccacggctgtcgagtcccctcccttgttggacttgcgcgccctggcgctcggaacctccggcgctgtgcccaccccgctctagctcgcgtctcccgactccaattagcccgacggccatggaggctgaagagacgatggaatgccttcaggagttccctgaacatcataaaatgatcctcgaccgattgaatgaacagcgagagcaggaccggtttactgacatcaccctaattgtcgacggacaccattttaaggctcacaaggctgttttggctgcttgtagtaagttcttctacaaattctttcaggagtttacccaagaaccattggtggagatagaaggtgttagtaaaatggcctttcgccatttaattgagttcacatatacagcaaaattaatgatacaaggagaagaagaagccaatgatgtatggaaagcagcagagtttctacaaatgctagaagctatcaaagcccttgaagtcaggaacaaagaaaactcagctcccttagaggaaaataccacaggaaaa

SEQ ID NO: 23575 - DNA, 970 bp, Homo sapiens
  misc_feature 1..970: note = ENST00000509931
  source 1..970: mol_type = unassigned DNA
agcagcccgacggccatggaggctgaagagacgatggaatgccttcaggagttccctgaacatcataaaatgatcctcgaccgattgaatgaacagcgagagcaggaccggtttactgacatcaccctaattgtcgacggacaccattttaaggctcacaaggctgttttggctgcttgtagtcatgttcttcctcaaattttttccatattgtaaaatcaaacttaaatcattagaatacaagtttatgtattctaatgcatgttagaaaattgaataatataggaaacacaaggctgcatgatgaaaagtgcattgttactgtgcagttaaattttggcttctggctttctttagtttgaacaaacgttcttgtctaccccagtagtcacagatgccatctttgcaacagaaagagtggtggtggcaaaatttctagaatgttaaaaaaaaaaaaaaatccacacccatgtgccttctcaaaaccaactgaacttctataaagcatctctggttctttcaaagtttgtgttgtaaggagcaatgtagatgatgctataatactttatatttttggttataatgacaaccaccagttctttttcacttaagttaggttgagaaattttatttaatggccactgaagggccattttcaattgggaaaatttatttacatctgtggtaaactttattttgatgaaaagttgcactagtattttaccaccagatgagaaaaagatgagcagcatttaaaaattaatgtatttaaaataaagtacagagaaagacatgtatataattatcaggctttgttttgaatggaatcttttcccccaattcttaatgtaaagatcttgtgctataacttttaaagccatacaaataagagtgctaaactgtggacttaaaagtaggtgtgtaaatatttttaatcagtattacttggaaaataaaatataacaaaccc

SEQ ID NO: 23576 - DNA, 956 bp, Homo sapiens
  misc_feature 1..956: note = ENST00000511736
  source 1..956: mol_type = unassigned DNA
agcagcccgacggccatggaggctgaagagacgatggaatgccttcaggagttccctgaacatcataaaatgatcctcgaccgattgaatgaacagcgagagcaggaccggtttactgacatcaccctaattgtcgacggacaccattttaaggctcacaaggctgttttggctgcttgtagtaagttcttctacaaattctttcaggagtttacccaagaaccattggtggagatagaaggtgttagtaaaatggcctttcgccatttaattgagttcacatatacagcaaaattaatgatacaaggagaagaagaagccaatgatgtatggaaagcagcagagtttctacaaatgctagaagctatcaaagcccttgaagtcaggtgaaaaaccttttgaatgtccaaattgtcatgaacgatttgctagaaatagcactctgaaatgtcacctcactgcatgccaaactggagtaggggcaaaaaaaggaaggaagaagctctacgaatgccaggtctgcaacagtgtgtttaacagctgggaccagttcaaagatcacttgacagggtctcgctgtgtcacccaggctagagtgcagtggcacaatctcggcttactgcaacctttaacttctgggctcaagcaaccctcccacttcagcctcctgagtagctacgactacagaacctaaaccctgcccgactcacccggaggagctgtcacggtggtttgctggaaaccccctttctgttgggaggattactgggtcacggtttcccaaggacatggaaacccttgctgaagcgctggaaccgctcggcacgaggcgtacgtcggtgggagctgtgtcagcccgctttcggccgtgtagctgctcccatccagactctagaaggggtcctctttgcgtcaggcccaatcacccccctccccgagcgactgcactgggtgtc

SEQ ID NO: 23577 - DNA, 1927 bp, Homo sapiens
  misc_feature 1..1927: note = ENST00000510037
  source 1..1927: mol_type = unassigned DNA
gttccctgaacatcataaaatgatcctcgaccgattgaatgaacagcgagagcaggaccggtttactgacatcaccctaattgtcgacggacaccattttaaggctcacaaggctgttttggctgcttgtagtaagttcttctacaaattctttcaggagtttacccaagaaccattggtggagatagaaggtaaatgattcttgttgtttttttatttaataaatcaaagaagccattttatttaaatgcttgttttaaatacaatacttagcaaacaattggtgaagcagttttagacagtttatcaagacaccataggaaataggcatcagtagttcctgtaggtaaaggtagataaattgttcttttgatacctgagaagtcttactttcagtgaagtgcttggttgaatgatctgccaggaaaaacttagatggtagatgttggtcttttccattgtggaaactggtggtcattgttttttgaaaacaagtattaaacgtgaattactatctttgttcagtgggcttatgtttcagactgctggagatgctgcaggttacagtagaagcttttactgtactctatagcagaagtagtgatgtattagcagaggtacagatgacatgcagtgtgaagtgggctgccataatagggagaaagctaggaaaaatgaactgaagtagcatttagaggaaattctggctctacaatgggatggatcaatacctgttaccttgaagcaaaaagtgatttttgtactttctagacatttttctaataataacctgccaagtgccaggcgttgtgatatgtagttttgtgtattgtctaaggctcacagcaatcgtttgatgttgggcaggatggcttgtgcttgtagtcccagctactcgggaggctgaggcaggaggattgcttgagcccaggagttcgaggccagcctggggcaacatagaccctgtcttttcttttcttttcttttcttttcaaaaagggaagtggtgttatttgtaataatttacacttcaggaagcaggctctaaaaggttacttgcccagggttgtccaactagcaaggaattaagtttgtgctattaattaccatgctttttcttctgctactgcagtaactcctcccctaccaccagcatcaaaatctaaaacagcaggaaataaatgtttgcctacgtaattacagaattttagcttcttttagggttcttgggttttggttttatatctatttcattgtgtacgtattctttgttctgaatgggttgcctagaaactccttttttccctttgatgcctaggggagtaaagaaaacaaaaaagagttaagaatattctttaattttggtatattccagtttagcattatagctgatatatttacagctagagtatcttttaatatctataatcaggacagagacataattatgaaaatccacaaaacttaataaagtgagaatctaactgcccagatgatagtggtttctactacaaagcaagcctccatgaattcattcacacctgaggtttattaaatatgtgaccccaggcgggttactttacctcaattgcatacttttctcctcatctgaaaagtgggttcataggattataaagactaattgcgataacatgcagagtgcatggcatgatatttggtgccttgtcaaagcttgataaacagggtccagtctaagaaacattagggagacctcttctctacaaaaaatttaaaaaattattagctgagtctgatggcacatgcctgtggtcccagctattcaggaggctgaggcgggaggattgctggggcccaggaggtcaaagctgcagtgagccatgattttgccactgcattgtagcctgggcgacagagcaaggccctgtctcaaaaaaaaaaaaaaaaa

SEQ ID NO: 23578 - DNA, 760 bp, Homo sapiens
  misc_feature 1..760: note = ENST00000502623
  source 1..760: mol_type = unassigned DNA
taagaagcaaagaactgggaaaaaaattcatgtatgtcagtactgtgagaaacagtttgaccattttggacattttaaagaacatcttcgaaaacatacagttctggatgctaagaagttcactgttatgaggccacatctggtgagagccctgccagtggcgactctgcagagtcctgaggccatgcagggcatcacatggtgaaaaaccttttgaatgtccaaattgtcatgaacgatttgctagaaatagcactctgaaatgtcacctcactgcatgccaaactggagtaggggcaaaaaaaggaaggaagaagctctacgaatgccaggtctgcaacagtgtgtttaacagctgggaccagttcaaagatcacttggtcatgttcttcctcaaattttttccatattgtaaaatcaaacttaaatcattagaatacaagtttatgtattctaatgcatgttagaaaattgaataatataggaaacacaaggctgcatgatgaaaagtgcattgttactgtgcagttaaattttggcttctggctttctttagtttgaacaaacgttcttgtctaccccagtagtcacagatgccatctttgcaacagaaagagtggtggtggcaaaatttctagaatgttaaaaaaaaaaaaaaatccacacccatgtgccttctcaaaaccaactgaacttctataaagcatctctggttctttcaaagtttgtgttgtaaggagcaatgtagatgatgctataa

SEQ ID NO: 23579 - DNA, 538 bp, Homo sapiens
  misc_feature 1..538: note = ENST00000507231
  source 1..538: mol_type = unassigned DNA
ttattatttttgctacctctagaaaagtctttggaatatggtgaaaatatttgaattctgaattgtgatttctccttttaggaatttagtattaaaattacccaaaaagaaaaagtaaacgtttaaaattatttgctcttaggatttttcttaatttgccaacgtatcttttttcccctctaataggtgaaaaaccttttgaatgtccaaattgtcatgaacgatttgctagaaatagcactctgaaatgtcacctcactgcatgccaaactggagtaggggcaaaaaaaggaaggaagaagctctacgaatgccaggtctgcaacagtgtgtttaacagctgggaccagttcaaagatcacttggtaatacacactggagataaacccaaccattgtactttatgtgatttgtggtttatgcaaggaaatgaattaaggaggcatctcagtgatgctcacaatatttcagagcgtctagtaacggaagaagttctttcagtagaaacacgtgtgcaaactgaacctgtaacatcaat

SEQ ID NO: 23580 - DNA, 536 bp, Homo sapiens
  misc_feature 1..536: note = ENST00000366506
  source 1..536: mol_type = unassigned DNA
gtctttgcgtctggctactaccagaccgcgggttaggggcttcatctctctgcgttctcagttgtgggaggccttggtgattcggccacagctcagcctccgtcgctctgtgacctgcgggtattggatgattggtagctaagactcccgaatacttcagaagtggggaaatgctatgtgttctcatttcacccaagaccattggccagtgcagggcatagaagattcattccacaaacttatactgagaagatatgagaaatgtggacatgataatttacaattaagaaaaggctgtaaaagtttgaatgagtgtaagttgcagaaaggaggttataatgaatttaatgaatgcttgtcaactacccagagcaaaatacttcagtgtaaagcaagtgtcaaagttgttagtaaattttcaaattcaaacaaacgtaagacaagacatactggagagaaacactttaaagaatgtggcaaatcatttcagaagttttcacacctaactcaacataaggtaattcatgctggagaga

SEQ ID NO: 23581 - DNA, 1611 bp, Homo sapiens
  misc_feature 1..1611: note = ENST00000512994
  source 1..1611: mol_type = unassigned DNA
gcgtctggctactaccagaccgcgggttaggggcttcatctctctgcgttctcagttgtgggaggccttggtgattcggccacagctcagcctccgtcgctctgtgacctgcgggtattggatgattggtagctaagactcccgaatacttcagaagtggggaaatggaactcttaacattcagggatgtggccatagaattctctccagaagagtggaaatgcctggaccctgaccagcagaatttgtatagagatgtgatgttggagaactacaggaacctggtctccctgggtgttgctatctctaacccagacctggtcacctgtctggagcaaagaaaagagccctacaatgtgaagatacataagatcgtagccagacccccagctatgtgttctcatttcacccaagaccattggccagtgcagggcatagaagattcattccacaaacttatactgagaagatatgagaaatgtggacatgataatttacaattaagaaaaggctgtaaaagtttgaatgagtgtaagttgcagaaaggaggttataatgaatttaatgaatgcttgtcaactacccagagcaaaatacttcagtgtaaagcaagtgtcaaagttgttagtaaattttcaaattcaaacaaacgtaagacaagacatactggagagaaacactttaaagaatgtggcaaatcatttcagaagttttcacacctaactcaacataagaattcttccatctctatgacaacaagcccattttagctttctggagaatagcatctgagaaaagccaaagtgcctcagtttacagacagctcactcacagaagcagagccacctaattcaccagcatctaaccactcacacctgaaggagccaaactgagcccagaagaatggcccggctgagcccagcctaaatttctaaccagctcaatcctgagctagtatgtttcgggattgttatgcagttataagttagtaatatatacacccattaaagacaggatctcaggacagattgatcacaaataacctgcaaatgcttgccaccctgtaagtattgattttcttttttcctttatttaaagttagatttgttgtaagatgatattgagttacacagaagttaggcaggagaatagggtttggaggcagggaacttaaggccaattcgtgctgacttcctacaagaaaaaacaccaaggtctgggagcagggaacctaaagccagttaacgtgaacttcctacatctaaaccaaaaggaaagacctcatctacacccgagtagcaaaggatcgaaggcgactgtcgctacaaccctcccccttgtaccagttctctgatagaaaaggacagtgccttggagtggccgtgggccaagcacaggccatgccttcatctgcatagggtaccaattcgcctcaacctttgattagccaaggaccaaatccttcattcagataaggggtagctgataggaacctcaaaaggagtacttaaaacccagaaaacattgtaaccgggtccttgggcggcttgctggggctcacacccaccctgtagagtgctttctcactttaataaaatcttgcttttgcta

SEQ ID NO: 23582 - DNA, 720 bp, Homo sapiens
  misc_feature 1..720: note = ENST00000503699
  source 1..720: mol_type = unassigned DNA
accagaccgcgggttaggggcttcatctctctgcgttctcagttgtgggaggccttggtgattcggccacagctcagcctccgtcgctctgtgacctgcgggtattggatgattggtagctaagactcccgaatacttcagaagtggggaaatggaactcttaacattcagggatgtggccatagaattctctccagaagagtggaaatgcctggaccctgaccagcagaatttgtatagagatgtgatgttggagaactacaggaacctggtctccctgggtgttgctatctctaacccagacctggtcacctgtctggagcaaagaaaagagccctacaatgtgaagatacataagatcgtagccagacccccagatggagtttcgctcttgtcacccagactggagtgcaatggcacgatcttggctgactgcaacctctacctcccgagttcaagtgattctcctgcctccgcctcccaagtagctgggattagtcatgagccaccacacctggctaatttttatatttttagtagagatggggtttcaccatgttggccaggctggtctcgaactcctgacctcaagtgatccgcctgcctcagcctcctgaagtgctgggattacaggtgtgagccattgtgcccagctctccttcttttttataactcattttgttcatgcattgttgcaaaaaaaaattagtaatctgtgta

SEQ ID NO: 23583 - DNA, 2146 bp, Homo sapiens
  misc_feature 1..2146: note = ENST00000505939
  source 1..2146: mol_type = unassigned DNA
ccagaccgcgggttaggggcttcatctctctgcgttctcagttgtgggaggccttggtgattcggccacagctcagcctccgtcgctctgtgacctgcgggtattggatgattggtagctaagactcccgaatacttcagaagtggggaaatggaactcttaacattcagggatgtggccatagaattctctccagaagagtggaaatgcctggaccctgaccagcagaatttgtatagagatgtgatgttggagaactacaggaacctggtctccctgggtgttgctatctctaacccagacctggtcacctgtctggagcaaagaaaagagccctacaatgtgaagatacataagatcgtagccagacccccagaattcttccatctctatgacaacaagcccattttagctttctggagaatagcatctgagaaaagccaaagtgcctcagtttacagacagctcactcacagaagcagagccacctaattcaccagcatctaaccactcacacctgaaggagccaaactgagcccagaagaatggcccggctgagcccagcctaaatttctaaccagctcaatcctgagctagtatgtttcgggattgttatgcagttataagttagtaatatatacacccattaaagacaggatctcaggacagattgatcacaaataacctgcaaatgcttgccaccctgtaagtattgattttcttttttcctttatttaaagttagatttgttgtaagatgatattgagttacacagaagttaggcaggagaatagggtttggaggcagggaacttaaggccaattcgtgctgacttcctacaagaaaaaacaccaaggtctgggagcagggaacctaaagccagttaacgtgaacttcctacatctaaaccaaaaggaaagacctcatctacacccgagtagcaaaggatcgaaggcgactgtcgctacaaccctcccccttgtaccagttctctgatagaaaaggacagtgccttggagtggccgtgggccaagcacaggccatgccttcatctgcatagggtaccaattcgcctcaacctttgattagccaaggaccaaatccttcattcagataaggggtagctgataggaacctcaaaaggagtacttaaaacccagaaaacattgtaaccgggtccttgggcggcttgctggggctcacacccaccctgtagagtgctttctcactttaataaaatcttgcttttgctattcccttcctgtttttcattcctttgtgtgctttgttcaatttttttgttcgaaatgtcaaggacctggacagttcacactcacggccttccttctggtaacagaagtgcaggtatatgtggatgcatgtgattggtacttaaactcacacagtgccccataccacaggagaaaaacacacagttccagcctggcaattaggtccaaagataaatagcaaaacaagaagtttgcctttaatctattccctccacatctaaactctggagggcaaggctgtgaggagatctgaagacatggtgctctctcttcctgtggacccatcattccttgtttaccatctgatatttgaaaagaagaggaacccctgagaaaggaggcagaggctggttaggaagatagggagggaaggtcttgggagatgaaaaacacccacgggaccacacctgcaccacccatgtagctagcaggaagaaatgtggttaagaacttcctcttatgccagggtgttgatcagaagagactgtcccacttaggcccaggtgtaatgaatcaacctaaatgtcattaacttgacccagctccttataatgttactaacatgacataaatattttggttttagcttcactctttccacctgctgtcggttttgcttgggcactcatgggtaataaccaagatggagtcactgtggtcaactccaggcatgcacagatacaacacccttagcggggaaatttacccctcccatttgggcagaacccacagaagacttcctcgttcttgccacataaaagacccagaactcagccccatttctggcaacctgctttcatgtcccctttctgctgagagctttccttttgcttaataaatcctattctgcttta

SEQ ID NO: 23584 - DNA, 2970 bp, Homo sapiens
  misc_feature 1..2970: note = ENST00000240499
  source 1..2970: mol_type = unassigned DNA
cagaccgcgggttaggggcttcatctctctgcgttctcagttgtgggaggccttggtgattcggccacagctcagcctccgtcgctctgtgacctgcgggtattggatgattggtagctaagactcccgaatacttcagaagtggggaaatggaactcttaacattcagggatgtggccatagaattctctccagaagagtggaaatgcctggaccctgaccagcagaatttgtatagagatgtgatgttggagaactacaggaacctggtctccctgggtgttgctatctctaacccagacctggtcacctgtctggagcaaagaaaagagccctacaatgtgaagatacataagatcgtagccagacccccagctatgtgttctcatttcacccaagaccattggccagtgcagggcatagaagattcattccacaaacttatactgagaagatatgagaaatgtggacatgataatttacaattaagaaaaggctgtaaaagtttgaatgagtgtaagttgcagaaaggaggttataatgaatttaatgaatgcttgtcaactacccagagcaaaatacttcagtgtaaagcaagtgtcaaagttgttagtaaattttcaaattcaaacaaacgtaagacaagacatactggagagaaacactttaaagaatgtggcaaatcatttcagaagttttcacacctaactcaacataaggtaattcatgctggagagaaaccctacacttgtgaagaatgtggcaaagcctttaaatggtctttaatatttaatgaacataagagaattcatactggagagaaaccttttacttgtgaagaatgtggcagcatctttaccacatcctcacactttgctaagcataaaataattcatactggagaaaaaccctataaatgtgaagaatgtggcaaagcctttaataggttcacaacccttactaaacataagagaattcatgctggagagaaacccatcacatgtgaagaatgtaggaaaatctttacctcatcctcaaactttgccaaacataagcgaattcatactggagagaaaccctacaaatgtgaagaatgtggcaaagcctttaataggtccacaacccttactaaacataagagaattcatactggagagaaaccctacacatgtgaagaatgtggcaaagcttttagacagtcctcaaaactgaatgaacataagaaagttcatactggagagcggccctacaaatgtgatgaatgtggcaaagcctttggacggtccagggtcctgaatgaacataaaaaaattcatactggagagaaaccctacaaatgtgaagaatgtggcaaagcctttagacggtccacagatcggagtcaacataagaaaattcatagtgcagataaaccctacaaatgtaaagaatgtgacaaagcctttaaacaattttcgctcctgagtcaacataagaaaattcatactgtagataaaccctacaaatgtaaagattgtgacaaagcctttaaacggttctcacacctgaataaacataagaaaattcatacttgagagaaatcctacaaatgtaaagaatgtggcaaacctttggatgatccacaaaccttaatgaacatgagaaaatttatactgtagagaaaccctggaaatgtgaagaacgtggcaaagttctttacctcattctcaaaccttgataaacataagagaattcataccggagagaaactgtacaaatgtgaagaatatggcaaagcctgtgaatggtccacaaacctgaatgagcagaagaaaattattactggagataaaccctgcaaatgtaaagagtgtaacaaaacctttaaacagccctcaccggtgaataaacataagaaaaatcatgctggagggaagccctacacatgtggcagaatgtggcaaagcatttaattggtcctcaatgcttaataaatataattcatgctggagagaaacttcacatgtgaaccgtgtggcaaagcctttaaatggtcctcaacccttaatgaacgtaagtgaattcatgctggagcaaaatgcttcacatgcgaagaatgtggcacagtctttaccacatcctcaaactttgttaaacataagagaatttataccagagagaaaccctacacatgtaaagaatgtggcaaagccttcaataggttctcaacccttactgtgcacaagataattcattctggggaaaaaaatgctacaaatgtgaaaaacgtggcagagccttcagaccatccacaaacctttatgaaaattcatatttgagagtagaagattcattccacaaacttacattgagaagatatgaaagatgaatataagaattcatcctagatataaaaccatagaaatgtaaaagatgtgacaaaacctttaagccatactccaggcttcttaaacataatgagaactcatactggaggaaagtcttacaaatgtgaagaatgtggcagtctttaaatcttcctcagtcttttctaatcataagataattcacactgaagagaaactgcaaacgtggaaagtgtgacaaagcttgcaaccacactcaatctattctaaatataagagaaatgatattggtgagaagccacaaaaatatgaaaaatgtggcaaagccttcaaatgcttgtcacatcttactgtatatatataattcctactgaagaaatcccctggaaatgcaaaaaatgtggcaggatttttaccaatgctcatctttttgcacatgatatcctttatattcgagaaaagttatagaaatataaaaaatatagaaaagtcatatctcctcacattttactaactagcaatgttcatacttaataaaaacattataaatgtaatttctgttgaaagacttcagaaaatataggcctttaaagtgaagaagagtattcttaagacaaacaataca

SEQ ID NO: 23585 - DNA, 814 bp, Homo sapiens
  misc_feature 1..814: note = ENST00000579770
  source 1..814: mol_type = unassigned DNA
cctgtagtcccagctactcgggaagctgaggcaggagaatcgcttgaacccaggatgcagaggttgcagtgagctgatgttgtgccactgcagtgcagcctgccaacagagtaagacccgtctcaacaacaacaacaaaaaagaagaaaatttttaggagacaatgtttttccaagagacttcagaaccattccctggagtgaattatttccaatggtgaagagtaatggatggatggcatgagattctcaaaaaaatcttgctcctatttcagaagtgtcactccagccccttgaaggtccaggaaacctggctgagtagtgtggtctatggaggtgcatgggcttcagaatcaggccaacgttgatcctgagtcccagccagctgcttagtagctgtgggatagttacacaagacacatctacaagaaaagtcatgataaaattgattgcaaaaacagcaatttgaaaaatttcttattgtattcatgtccttggaaatggcttttatagtcgttcctatcaagagacagattctgtttcccaaaccttgaacttctcttgacttatctgcactggcacagggtgccagtttggggcccaggtttaaaggtcctaaatgcttctgttatctttttcagaattcttccatctctatgacaacaagcccattttagctttctggagaatagcatctgagaaaagccaaagtgcctcagtttacagacagctcactcacagaagcagagccacctaattcaccagcatctaaccactcacacctgaaggagccaaactgagcccagaagaatggc

SEQ ID NO: 23586 - DNA, 2899 bp, Homo sapiens
  misc_feature 1..2899: note = ENST00000377419
  source 1..2899: mol_type = unassigned DNA
tgcacagagggaacacaccagggtagacaacctcagcgtgttgcagattccctgcaaggggagttagacatctgagtcctagaccgagataccagctgaaggaacgctgcctggcgaaccctggtgttcaagttccagaggaacgggatgagctcctgagatggaagatctgtcctctccagactccacccttctccaagggggacataatctactctcatcagccagttttcaggaagcggtgactttcaaggatgtgatagtggactttacccaggaagaatggaaacagctggaccctggccagagagatttgttcagggatgtgacattggaaaattatacacacctggtctctataggactccaagtttctaaacctgatgtgatttcccagttagagcaagggacagagccatggatcatggagccaagcattccagtaggtacctgtgcagactgggagacaagacttgaaaatagtgtgtcagccccagagcctgacatttctgaagaagagctatctccagaggtaatagtggaaaaacacaaaagagatgattcttggagttccaacttgctagaaagttgggaatatgaaggcagtttagagagacagcaggcaaaccaacagacactgccaaaggaaataaaggtaaccgaaaagacaatacccagttgggaaaaaggccctgtaaataatgaatttgggaaaagtgtcaatgtgagttcaaaccttgtaacacaagaaccatctccagaagagacctctactaaaagaagcatcaaacagaattcaaacccagttaaaaaagagaaatcttgtaagtgcaatgaatgtgggaaagcctttagttattgttcagctcttattcgccatcagagaacacatactggagaaaaaccctacaaatgtaatgaatgtgaaaaagccttcagccggagtgaaaaccttataaaccatcaaagaattcatactggagataaaccatataaatgtgatcagtgtggaaaaggcttcattgagggtccatctcttactcaacatcaaagaattcatactggagaaaaaccatataaatgtgatgaatgtgggaaagcctttagtcagaggacccatcttgttcagcatcagagaattcatactggcgagaagccatacacttgtaatgagtgtggaaaagcctttagccagagaggccactttatggaacatcagaaaattcatacgggagaaaaaccttttaaatgtgatgaatgtgataaaaccttcaccaggagcacacaccttactcaacatcaaaaaattcatactggagaaaaaacctataaatgtaatgaatgtggaaaggccttcaacgggccctcaacttttatccgtcatcatatgattcatactggtgaaaaaccgtacgaatgcaatgaatgtgggaaagccttcagccagcactcaaacctcactcagcatcaaaaaactcatactggggagaaaccctatgattgtgcagaatgtggaaaatcttttagttactggtcatcccttgctcaacacctgaaaattcatactggagaaaaaccttacaaatgcaatgaatgtggaaaggccttcagttactgctcatcccttactcaacatcggagaattcacacgagagaaaagccctttgaatgcagtgaatgtggaaaggctttcagttatctctcaaaccttaatcagcatcagaaaactcatactcaagagaaagcttatgaatgtaaagaatgtgggaaagcttttattcggagttcatctcttgctaagcatgaaagaattcatactggagagaaaccctatcagtgtcatgaatgtgggaaaaccttcagttatggttcatcccttattcagcataggaagatccatactggagaacgaccttacaagtgtaatgagtgtgggagagcattcaaccagaacatacaccttacacagcataagagaattcatacaggagccaagccttatgagtgtgctgagtgtggtaaagcctttcgacattgttcatctcttgctcaacatcaaaaaactcacacagaagaaaaaccctaccagtgtaataaatgtgaaaagacctttagccagagctcccatctaactcagcatcaacgaattcacactggggagaagccctataagtgcaatgaatgtgacaaagcctttagccggagcactcatctgactgaacatcagaatactcatactggagagaaaccttataactgtaatgaatgcagaaagacttttagccagagcacatatctcattcagcaccagagaattcattcaggagagaagccttttggatgtaatgattgtggaaaatccttcagatatcgctctgctctcaacaaacatcagagactgcatcctggcatatgacaattctaggaacatcataaatttaggggagatatttactttagtttgtccttttgttaagtactgaagaatcagagtggatttagaaactgccttgaaatcttttaaattttcactatcatgttatggaatggaaagtacattgggctgaactaatccaattgttattaagccactctgtgacattagaaaactctactgttttaagctttagtttcctttatggaatgaaggatttggagtagattatttcaaaggtagtttggagttttataatcagttttgtatatttacaatattttcttgaatgggtttactatacatcagcattttgctgtgttgcatctagaatgtgtatgtttatgcatgttttgccaatagaatttgtgcttcagtaactagatcggggatctagtatgctcctggtctaatgcatttacattgtttaggtaactggttcctaataaaaagaattataaaata

SEQ ID NO: 23587 - DNA, 3101 bp, Homo sapiens
  misc_feature 1..3101: note = ENST00000211936
  source 1..3101: mol_type = unassigned DNA
gttgaagccggttgtaggcgtggaaagaggttggcgcgctggaagtccagttgcttcggctccctgcgttaggtctggtggcggtcaatgcgcttccggacccgggatcagagtgtgtggatcgctatagggggaggggagctcagggtagacaacctcagcgtgttgcagattccctgcaaggggagttagacatctgagtcctagaccgagataccagctgaaggaacgctgcctggcgaaccctggtgttcaagttccagaggaacgggatgagctcctgagatggaagatctgtcctctccagactccacccttctccaagggggacataatctactctcatcagccagttttcaggaagcggtgactttcaaggatgtgatagtggactttacccaggaagaatggaaacagctggaccctggccagagagatttgttcagggatgtgacattggaaaattatacacacctggtctctataggactccaagtttctaaacctgatgtgatttcccagttagagcaagggacagagccatggatcatggagccaagcattccagtaggtacctgtgcagactgggagacaagacttgaaaatagtgtgtcagccccagagcctgacatttctgaagaagagctatctccagaggtaatagtggaaaaacacaaaagagatgattcttggagttccaacttgctagaaagttgggaatatgaaggcagtttagagagacagcaggcaaaccaacagacactgccaaaggaaataaaggtaaccgaaaagacaatacccagttgggaaaaaggccctgtaaataatgaatttgggaaaagtgtcaatgtgagttcaaaccttgtaacacaagaaccatctccagaagagacctctactaaaagaagcatcaaacagaattcaaacccagttaaaaaagagaaatcttgtaagtgcaatgaatgtgggaaagcctttagttattgttcagctcttattcgccatcagagaacacatactggagaaaaaccctacaaatgtaatgaatgtgaaaaagccttcagccggagtgaaaaccttataaaccatcaaagaattcatactggagataaaccatataaatgtgatcagtgtggaaaaggcttcattgagggtccatctcttactcaacatcaaagaattcatactggagaaaaaccatataaatgtgatgaatgtgggaaagcctttagtcagaggacccatcttgttcagcatcagagaattcatactggcgagaagccatacacttgtaatgagtgtggaaaagcctttagccagagaggccactttatggaacatcagaaaattcatacgggagaaaaaccttttaaatgtgatgaatgtgataaaaccttcaccaggagcacacaccttactcaacatcaaaaaattcatactggagaaaaaacctataaatgtaatgaatgtggaaaggccttcaacgggccctcaacttttatccgtcatcatatgattcatactggtgaaaaaccgtacgaatgcaatgaatgtgggaaagccttcagccagcactcaaacctcactcagcatcaaaaaactcatactggggagaaaccctatgattgtgcagaatgtggaaaatcttttagttactggtcatcccttgctcaacacctgaaaattcatactggagaaaaaccttacaaatgcaatgaatgtggaaaggccttcagttactgctcatcccttactcaacatcggagaattcacacgagagaaaagccctttgaatgcagtgaatgtggaaaggctttcagttatctctcaaaccttaatcagcatcagaaaactcatactcaagagaaagcttatgaatgtaaagaatgtgggaaagcttttattcggagttcatctcttgctaagcatgaaagaattcatactggagagaaaccctatcagtgtcatgaatgtgggaaaaccttcagttatggttcatcccttattcagcataggaagatccatactggagaacgaccttacaagtgtaatgagtgtgggagagcattcaaccagaacatacaccttacacagcataagagaattcatacaggagccaagccttatgagtgtgctgagtgtggtaaagcctttcgacattgttcatctcttgctcaacatcaaaaaactcacacagaagaaaaaccctaccagtgtaataaatgtgaaaagacctttagccagagctcccatctaactcagcatcaacgaattcacactggggagaagccctataagtgcaatgaatgtgacaaagcctttagccggagcactcatctgactgaacatcagaatactcatactggagagaaaccttataactgtaatgaatgcagaaagacttttagccagagcacatatctcattcagcaccagagaattcattcaggagagaagccttttggatgtaatgattgtggaaaatccttcagatatcgctctgctctcaacaaacatcagagactgcatcctggcatatgacaattctaggaacatcataaatttaggggagatatttactttagtttgtccttttgttaagtactgaagaatcagagtggatttagaaactgccttgaaatcttttaaattttcactatcatgttatggaatggaaagtacattgggctgaactaatccaattgttattaagccactctgtgacattagaaaactctactgttttaagctttagtttcctttatggaatgaaggatttggagtagattatttcaaaggtagtttggagttttataatcagttttgtatatttacaatattttcttgaatgggtttactatacatcagcattttgctgtgttgcatctagaatgtgtatgtttatgcatgttttgccaatagaatttgtgcttcagtaactagatcggggatctagtatgctcctggtctaatgcatttacattgtttaggtaactggttcctaataaaaagaattataaaataccctcaaattaacaattcaattgcatataatagcctaactcagtaagaatattaaaacttactattattcttcttct

SEQ ID NO: 23588 - DNA, 2810 bp, Homo sapiens
  misc_feature 1..2810: note = ENST00000335870
  source 1..2810: mol_type = unassigned DNA
agaatgcacctggcatcaacacggcggcggcggcggcggcttccaacaggctctggggcgccgagcggacaggaacgcagcacgggggctccgaggcggggtctgggtgttgaggggcgactggagccatggcggagtcggcgcctgctcggcacaggagaaaacgacgctccacacctttaacttcttccacacttccttcacaagcaacagagaaaagctcctattttcagaccaccgagatttcactctggacggtggtggccgctattcaggctgtggagaagaagatggagtcccaggctgcccggctacagagcctggaggggcgcacggggacagccgagaagaagctggctgactgcgagaagatggccgtggagttcgggaaccagctggagggcaagtgggccgtgctggggaccctgctgcaggagtatgggctactgcagaggcggctggagaacgtggagaacctgctgcgcaacaggaacttctggatcctgcggctgcccccgggcagcaagggggaggcccccaaggtgtccaggtcactggagaatgatggcgtctgtttcaccgagcaggaatgggagaatctggaggattggcagaaggagctctacagaaacgtgatggagagtaactatgagacactggtctctctgaaggtccttggccagacagagggagaagcggagttgggtacagagatgctgggtgacttggaagaggaaggtcctggtggtgcccacccagcaggtggggtcatgatcaaacaggagctacagtatacacaggaaggccctgcggatcttcctggagagttctcatgcattgctgaagagcaggctttcctgagcccagagcagaccgaactctggggtggtcagggcagttctgtcctcttggaaacaggtcctggggactctactctagaggagcctgttggtagtagagttcctagcagcagcagaactgtgggctgcccgaagcagaaatctcataggcaggtacagctggaccaggaatgtgggcagggcctgaagctgaaaaaggacacttcccgcccctacgaatgttctgagtgtgagatcaccttccgctataagcagcagctggccacacatctgcgcagccactctgggtgggggtcttgtacacctgaggagccagaggagagccttaggcccaggccacggctgaaaccacagaccaaaaaggccaagctgcatcagtgtgatgtgtgcctgaggagcttcagctgcaaggtgagcctggtgacccatcagcgttgccacctgcaggaggggcccagtgccggccagcatgtccaagagaggttctcacccaacagcctggttgccctgcctggccacatcccttggaggaaaagccggagttccctcatctgtggttactgtggcaagagcttcagtcacccatctgacttggtgcggcaccagcgcatccacacgggtgagcggccctacagctgcactgagtgtgagaagagctttgtccagaagcagcacctcctgcagcaccagaagatccaccagcgggagcggggtgggctggccctggagcccggaaggcccaatggcctgctttaagggtgcagcccctcgcccgtctgggggatggaggggggtggcattggttcccccgaagagacactgcagtcagggactgagttcttcctgagggcagttgtttgtgattgccttcccttgtcccagtaccaagccaagcccaaaggctgtcctgaaaaccctgtggaagaagagtccaggccaggtcttcatcctgctgccaagtttgctgtttcttggcaccttcaggtctctggttttctcattcatgccaatgcttgtgggctggggttggcgttctgaccccacagggactggtggctggttccagggctcgtcccggcatttcatgtcttcccacggggttgagtcgggccataggggtgagcagctgcctggaagagttctgggaagtataaccctccattttttcttgttttataatctctttgtttaataataagtagaagaaataatttaaatgaactgcttagccctgctctgaagaaccttttttggaattagattttagttgattttttaaagaatacagcccaacacttgttttttacattttaagagttgtagaagttgttcctaacttggggactggacctaccctctaggagggagttgttaatggggctcttttagcccactgatgcttacttaggccggagagcaggggacacggtgctaggttccctcgtgcagtgcctggtgctctcaaattgtctcaaaaggaccaagaggaaaagagtcggaggggtagaccctgcagccctgttgagaagaaagattccagtgaagttgctgatggtatggctgtggtctgggacttgcggtgtctcggcatacccctctcctcttcccacctcctcctggctatgttctgcagcctcccagagtagaaaactactttgttacttaaggttgttcaccttgtaccagtggttatttgagtttgttcctattacaccaatccttacttgaggtggttcggattacagtttccaaatgcattctgggattgcctattccagagagggtacagaaaaagcacacagatggcttgtctcaggagtgttgaatgtgtgccccgctgctgtctggggggatgggagtgggctctggggtcatatgtgaacatccccttggatgatttgcggttgcttagaataaaacttgctactagcaaaagaaaaaaaaaaagtt

SEQ ID NO: 23589 - DNA, 637 bp, Homo sapiens
  misc_feature 1..637: note = ENST00000486371
  source 1..637: mol_type = unassigned DNA
ggcatcaacacggcggcggcggcggcggcttccaacaggctctggggcgccgagcggacaggaacgcagcacgggggctccgaggcggggtctgggtgttgaggggcgactggagccatggcggagtcggcgcctgctcgggtaaagaggcaccggcgcgctggctcgagggcgcgttggggatggcggagtcccctgccgggggcggggcttcgcggtttggacgccgccggggtcttggtttcccggggctgccgttggcgcgggtgaacgcggaccctcctcttcgcgaccccagtgctctgcccttttttccctccgcttccttctgcagcggggtcggagcctcggcgccgtgcgcccttgcccagaaacttctctgacgcttgctttagcacaggagaaaacgacgctccacacctttaacttcttccacacttccttcacaagcaacagagaaaagctcctattttcagaccaccgagatttcactctggacggtggtggccgctattcaggctgtggagaagaagatggagtcccaggctgcccggctacagagcctggaggggcgcacggggacagccgagaagaagctggctgactgcgagaagatggccgtggagttcgggaacca

SEQ ID NO: 23590 - DNA, 860 bp, Homo sapiens
  misc_feature 1..860: note = ENST00000462724
  source 1..860: mol_type = unassigned DNA
caacaggctctggggcgccgagcggacaggaacgcagcacgggggctccgaggcggggtctgggtgttgaggggcgactggagccatggcggagtcggcgcctgctcgggtaaagaggcaccggcgcgctggctcgagggcgcgttggggatggcggagtcccctgccgggggcggggcttcgcggtttggacgccgccggggtcttggtttcccggggctgccgttggcgcgggtgaacgcggaccctcctcttcgcgaccccagtgctctgcccttttttccctccgcttccttctgcagcggggtcggagcctcggcgccgtgcgcccttgcccagaaacttctctgacgcttgctttaggagaaaacgacgctccacacctttaacttcttccacacttccttcacaagcaacagagaaaagctcctattttcagaccaccgagatttcactctggacggtggtggccgctattcaggctgtggagaagaagatggagtcccaggctgcccggctacagagcctggaggggcgcacggggacagccgagaagaagctggctgactgcgagaagatggccgtggagttcgggaaccagctggagggcaagtgggccgtgctggggaccctgctgcaggagtatgggctactgcagaggcggctggagaacgtggagaacctgctgcgcaacaggaacttctggatcctgcggctgcccccgggcagcaagggggaggcccccaaggtgtccaggtcactggagaatgatggcgtctgtttcaccgagcaggaatgggagaatctggaggattggcagaaggagctctacagaaacgtgatggagagtaactatgaga

SEQ ID NO: 23591 - DNA, 581 bp, Homo sapiens
  misc_feature 1..581: note = ENST00000481584
  source 1..581: mol_type = unassigned DNA
gtatgggctactgcagaggcggctggagaacgtggagaacctgctgcgcaacaggaacttctggatcctgcggctgcccccgggcagcaagggggaggcccccaaggtgtccaggtcactggagaatgatggcgtctgtttcaccgagcaggaatgggagaatctggaggattggcagaaggagctctacagaaacgtgatggagagtaactatgagacactggtctctctgagttcaagcgattctcctgcctcagcctctcgagtagctgaaattacagaggtccttggccagacagagggagaagcggagttgggtacagagatgctgggtgacttggaagaggaaggtcctggtggtgcccacccagcaggtggggtcatgatcaaacaggagctacagtatacacaggaaggccctgcggatcttcctggagagttctcatgcattgctgaagagcaggctttcctgagcccagagcagaccgaactctggggtggtcagggcagttctgtcctcttggaaacaggtcctggggactctactctagaggagcctgttggtagtagagttcctagca

SEQ ID NO: 23592 - DNA, 559 bp, Homo sapiens
  misc_feature 1..559: note = ENST00000488917
  source 1..559: mol_type = unassigned DNA
ctgtttcaccgagcaggaatgggagaatctggaggattggcagaaggagctctacagaaacgtgatggagagtaactatgagacactggtctctctgaagtcttgctctattgcccaggctggagtgcagtggcacaatcttggctcactgcaacctctgcctcacaggttcaagcgattctcctgcctcagcctctcgagtagctgaaattacagaggtccttggccagacagagggagaagcggagttgggtacagagatgctgggtgacttggaagaggaaggtcctggtggtgcccacccagcaggtggggtcatgatcaaacaggagctacagtatacacaggaaggccctgcggatcttcctggagagttctcatgcattgctgaagagcaggctttcctgagcccagagcagaccgaactctggggtggtcagggcagttctgtcctcttggaaacaggtcctggggactctactctagaggagcctgttggtagtagagttcctagcagcagcagaactgtgggctgcccgaagcagaaatctcataggca

SEQ ID NO: 23593 - DNA, 3071 bp, Homo sapiens
  misc_feature 1..3071: note = ENST00000360947
  source 1..3071: mol_type = unassigned DNA
gcaccccgcccctggcggccgcctctcgcggctcccggggtccccagctccctgtccccggagccagagcccggctcccgcgcggctcccagccccgccgcgccgccccccgcatgctaatggccgggccgcctcccgccgcacacaatgcgggccagggccgggggcgggggaccggggagggggcgggggccgggccgggggcgggggggccggggcccggcgcatctcccccggccccacgtaacgctgacgcccgcgccgccggcccgccgcccgccgccgccgccgccgccgccgcccgctccgccgccgcccgcccggggctcctccacagcacctgttgccttcattagcagcttttcctcctcttccctgcacttcccagaaccaaagaatgtgaagggggtccatggagggctcacgtccccgcgccccgagcggccacttagcgccgtcgccgccggctttcgacggcgagctggatctgcagcgatactccaacgggccagccgtgagcgcagggtcgctcgggatgggagcggtgagctggtctgagagtcgtgcaggcgaacggcgcttcccctgccctgtatgcgggaagcgcttccgcttcaactctatccttgctttgcacctgcgggcgcacccaggagcccaggccttccagtgccctcactgcggccaccgcgcggcgcagcgggctctgctgcgctcgcacctgcgcacacaccagcccgagcgcccacgtagtcctgctgcacgcctgttgctggagttggaagagcgcgcgctactacgcgaggcccgactggggagagcccgaagctcagggggcatgcaggccacccctgccactgagggtctggcgcggccccaggctccttcatcgtccgccttccgttgcccctactgcaaaggcaagtttcgcacctcggcggagcgcgaacgccacctgcacatcctgcataggccctggaagtgcggcctgtgcagtttcggctccagccaggaggaggagctgctgcaccacagcctgacggcccacggggctcccgagcgtcccctggcggccacctccgctgcgcctccgcctcagcctcagcctcagcctccaccccagcccgaacccagatcagtcccccagccggagccggagccggagcccgaacgtgaggcaaccccgaccccagctcctgccgctcccgaggagcccccagcgcctccggagttccgctgccaagtgtgcggccagagctttacacagtcttggtttctcaagggccacatgcgtaagcacaaggcctccttcgatcatgcgtgtccggtgtgcggccgctgcttcaaggagccctggttccttaagaaccacatgaaggtgcacgccagcaagctgggcccactgcgtgccccggggcctgcctccgggcctgcccgcgccccccagcctcctgacctcggcctgctggcctatgagccgttgggcccagcgctcctcttggccccggctcccaccccggccgagcgccgtgagcccccgagcctcttgggctacctgagcctgcgagctggcgagggccggcccaacggcgagggtgctgagcccggtcccggccgcagcttcggaggcttccgcccgctgtcctctgctctcccggcccgggctcgccggcaccgtgcggaggagcctgaggaagaagaggaggtggtggaggccgaggaggaaacctgggcccggggcaggtcgctgggctctctggcttccctgcacccgcgcccgggtgagggaccggggcactctgcctctgctgctggggcccaggcaagatcgaccgccacgcaggaagagaatgggctgttggttggagggacccggcctgaagggggccggggcgccaccggcaaggattgtcctttctgcggaaaatctttccgctcagcacatcacctcaaagtgcatctgcgagtgcacacaggcgagcggccctacaagtgtccgcactgcgactacgcgggcacccagtccggctcgctcaagtatcacctacagcgccaccaccgggagcagaggagcggggccggccccgggccacccccggagccaccgcctccttcccagcggggttcggccccgcaatctggagccaagccgtctccgcagcctgcgacctgggtggagggcgcctcaagtccccggcctccttctagcggtgctgggccggggtcccgtcggaagcccgccagccctgggaggaccctgcgcaacgggcgaggcggtgaggccgaacccctggacctgtccttgcgggcagggccgggaggcgaggccgggcctgggggtgccctccaccgctgcctcttctgcccgttcgccactggagccccagagctcatggccttgcaccttcaagtgcaccacagccgccgggctaggggccgccggccaccccaggctgacgcgtccccgccctatgcccgagtaccatcaggagagacccctcccagtccttcgcaggaaggggaggagggctccgggctgtccagacccggagaggcagggctgggggggcaagaacggtagtgggccctcaggggcgattagcttagtgagcttaccccgccggagcgggggagcgctagaggtagttgggtagagaagccagcagggggcagcgtgggacccatatcccagccccaggcggaccagaggtggaaggcgcggcgggcgtaggagggtgggctggcggtacccacccagcccaagggagtcacagtgccttagaagtggcagaggtgagggtcaaagaacggggtccctgggctggcagagaaggtttgtgtccctgttgaggagccactctgccagtctttgctggtccataggcgtgagagtttatttttgtacaaggggtgagggtggggggcactgtacccttctagccccatcaggggccctgtagacgtcgctatttttggtacgattcctgtcatccctattgcagagtcgtgtccccaataaacaggtgtcttgaggcacagggccctgtgtctgtctgcctacctatgtcctg

SEQ ID NO: 23594 - DNA, 2918 bp, Homo sapiens
  misc_feature 1..2918: note = ENST00000451119
  source 1..2918: mol_type = unassigned DNA
ccactcttccaaggtgtcacaaacagaaaagagctgcagcggacgccactgcaatgtcaaggcaaggcagccaggctgcgctctatcctcactggtgcctggccctggctaggccgggagaagcagcattctctagggaaagaagccttctcaagtgggaacaaaaatgagtgtgaggcgaacagccatcccgggcactatgtgaatttgggctccacagcacctgttgccttcattagcagcttttcctcctcttccctgcacttcccagaaccaaagaatgtgaagggggtccatggagggctcacgtccccgcgccccgagcggccacttagcgccgtcgccgccggctttcgacggcgagctggatctgcagcgatactccaacgggccagccgtgagcgcagggtcgctcgggatgggagcggtgagctggtctgagagtcgtgcaggcgaacggcgcttcccctgccctgtatgcgggaagcgcttccgcttcaactctatccttgctttgcacctgcgggcgcacccaggagcccaggccttccagtgccctcactgcggccaccgcgcggcgcagcgggctctgctgcgctcgcacctgcgcacacaccagcccgagcgcccacgtagtcctgctgcacgcctgttgctggagttggaagagcgcgcgctactacgcgaggcccgactggggagagcccgaagctcagggggcatgcaggccacccctgccactgagggtctggcgcggccccaggctccttcatcgtccgccttccgttgcccctactgcaaaggcaagtttcgcacctcggcggagcgcgaacgccacctgcacatcctgcataggccctggaagtgcggcctgtgcagtttcggctccagccaggaggaggagctgctgcaccacagcctgacggcccacggggctcccgagcgtcccctggcggccacctccgctgcgcctccgcctcagcctcagcctcagcctccaccccagcccgaacccagatcagtcccccagccggagccggagccggagcccgaacgtgaggcaaccccgaccccagctcctgccgctcccgaggagcccccagcgcctccggagttccgctgccaagtgtgcggccagagctttacacagtcttggtttctcaagggccacatgcgtaagcacaaggcctccttcgatcatgcgtgtccggtgtgcggccgctgcttcaaggagccctggttccttaagaaccacatgaaggtgcacgccagcaagctgggcccactgcgtgccccggggcctgcctccgggcctgcccgcgccccccagcctcctgacctcggcctgctggcctatgagccgttgggcccagcgctcctcttggccccggctcccaccccggccgagcgccgtgagcccccgagcctcttgggctacctgagcctgcgagctggcgagggccggcccaacggcgagggtgctgagcccggtcccggccgcagcttcggaggcttccgcccgctgtcctctgctctcccggcccgggctcgccggcaccgtgcggaggagcctgaggaagaagaggaggtggtggaggccgaggaggaaacctgggcccggggcaggtcgctgggctctctggcttccctgcacccgcgcccgggtgagggaccggggcactctgcctctgctgctggggcccaggcaagatcgaccgccacgcaggaagagaatgggctgttggttggagggacccggcctgaagggggccggggcgccaccggcaaggattgtcctttctgcggaaaatctttccgctcagcacatcacctcaaagtgcatctgcgagtgcacacaggcgagcggccctacaagtgtccgcactgcgactacgcgggcacccagtccggctcgctcaagtatcacctacagcgccaccaccgggagcagaggagcggggccggccccgggccacccccggagccaccgcctccttcccagcggggttcggccccgcaatctggagccaagccgtctccgcagcctgcgacctgggtggagggcgcctcaagtccccggcctccttctagcggtgctgggccggggtcccgtcggaagcccgccagccctgggaggaccctgcgcaacgggcgaggcggtgaggccgaacccctggacctgtccttgcgggcagggccgggaggcgaggccgggcctgggggtgccctccaccgctgcctcttctgcccgttcgccactggagccccagagctcatggccttgcaccttcaagtgcaccacagccgccgggctaggggccgccggccaccccaggctgacgcgtccccgccctatgcccgagtaccatcaggagagacccctcccagtccttcgcaggaaggggaggagggctccgggctgtccagacccggagaggcagggctgggggggcaagaacggtagtgggccctcaggggcgattagcttagtgagcttaccccgccggagcgggggagcgctagaggtagttgggtagagaagccagcagggggcagcgtgggacccatatcccagccccaggcggaccagaggtggaaggcgcggcgggcgtaggagggtgggctggcggtacccacccagcccaagggagtcacagtgccttagaagtggcagaggtgagggtcaaagaacggggtccctgggctggcagagaaggtttgtgtccctgttgaggagccactctgccagtctttgctggtccataggcgtgagagtttatttttgtacaaggggtgagggtggggggcactgtacccttctagccccatcaggggccctgtagacgtcgctatttttggtacgattcctgtcatccctattgcagagtcgtgtccccaataaacaggtgtcttgaggc

SEQ ID NO: 23595 - DNA, 2908 bp, Homo sapiens
  misc_feature 1..2908: note = ENST00000421093
  source 1..2908: mol_type = unassigned DNA
atcaagaacggaaaggaccgaagagtaactttaataatgtttcttatacggccgacattaactatctctataatcgcccctcctcctcccccaaaagagagacagaaattgtaagggagaggctttgagataaaaccccaggaagaacttcccgagtctgtgcatgttggggcagaaagagcggcagagccaactccttccctgctccacagcacctgttgccttcattagcagcttttcctcctcttccctgcacttcccagaaccaaagaatgtgaagggggtccatggagggctcacgtccccgcgccccgagcggccacttagcgccgtcgccgccggctttcgacggcgagctggatctgcagcgatactccaacgggccagccgtgagcgcagggtcgctcgggatgggagcggtgagctggtctgagagtcgtgcaggcgaacggcgcttcccctgccctgtatgcgggaagcgcttccgcttcaactctatccttgctttgcacctgcgggcgcacccaggagcccaggccttccagtgccctcactgcggccaccgcgcggcgcagcgggctctgctgcgctcgcacctgcgcacacaccagcccgagcgcccacgtagtcctgctgcacgcctgttgctggagttggaagagcgcgcgctactacgcgaggcccgactggggagagcccgaagctcagggggcatgcaggccacccctgccactgagggtctggcgcggccccaggctccttcatcgtccgccttccgttgcccctactgcaaaggcaagtttcgcacctcggcggagcgcgaacgccacctgcacatcctgcataggccctggaagtgcggcctgtgcagtttcggctccagccaggaggaggagctgctgcaccacagcctgacggcccacggggctcccgagcgtcccctggcggccacctccgctgcgcctccgcctcagcctcagcctcagcctccaccccagcccgaacccagatcagtcccccagccggagccggagccggagcccgaacgtgaggcaaccccgaccccagctcctgccgctcccgaggagcccccagcgcctccggagttccgctgccaagtgtgcggccagagctttacacagtcttggtttctcaagggccacatgcgtaagcacaaggcctccttcgatcatgcgtgtccggtgtgcggccgctgcttcaaggagccctggttccttaagaaccacatgaaggtgcacgccagcaagctgggcccactgcgtgccccggggcctgcctccgggcctgcccgcgccccccagcctcctgacctcggcctgctggcctatgagccgttgggcccagcgctcctcttggccccggctcccaccccggccgagcgccgtgagcccccgagcctcttgggctacctgagcctgcgagctggcgagggccggcccaacggcgagggtgctgagcccggtcccggccgcagcttcggaggcttccgcccgctgtcctctgctctcccggcccgggctcgccggcaccgtgcggaggagcctgaggaagaagaggaggtggtggaggccgaggaggaaacctgggcccggggcaggtcgctgggctctctggcttccctgcacccgcgcccgggtgagggaccggggcactctgcctctgctgctggggcccaggcaagatcgaccgccacgcaggaagagaatgggctgttggttggagggacccggcctgaagggggccggggcgccaccggcaaggattgtcctttctgcggaaaatctttccgctcagcacatcacctcaaagtgcatctgcgagtgcacacaggcgagcggccctacaagtgtccgcactgcgactacgcgggcacccagtccggctcgctcaagtatcacctacagcgccaccaccgggagcagaggagcggggccggccccgggccacccccggagccaccgcctccttcccagcggggttcggccccgcaatctggagccaagccgtctccgcagcctgcgacctgggtggagggcgcctcaagtccccggcctccttctagcggtgctgggccggggtcccgtcggaagcccgccagccctgggaggaccctgcgcaacgggcgaggcggtgaggccgaacccctggacctgtccttgcgggcagggccgggaggcgaggccgggcctgggggtgccctccaccgctgcctcttctgcccgttcgccactggagccccagagctcatggccttgcaccttcaagtgcaccacagccgccgggctaggggccgccggccaccccaggctgacgcgtccccgccctatgcccgagtaccatcaggagagacccctcccagtccttcgcaggaaggggaggagggctccgggctgtccagacccggagaggcagggctgggggggcaagaacggtagtgggccctcaggggcgattagcttagtgagcttaccccgccggagcgggggagcgctagaggtagttgggtagagaagccagcagggggcagcgtgggacccatatcccagccccaggcggaccagaggtggaaggcgcggcgggcgtaggagggtgggctggcggtacccacccagcccaagggagtcacagtgccttagaagtggcagaggtgagggtcaaagaacggggtccctgggctggcagagaaggtttgtgtccctgttgaggagccactctgccagtctttgctggtccataggcgtgagagtttatttttgtacaaggggtgagggtggggggcactgtacccttctagccccatcaggggccctgtagacgtcgctatttttggtacgattcctgtcatccctattgcagagtcgtgtccccaataaacaggtgtcttgag

SEQ ID NO: 23596 - DNA, 798 bp, Homo sapiens
  misc_feature 1..798: note = ENST00000555270
  source 1..798: mol_type = unassigned DNA
cctgcagagaggaggaaagcctgcctcggaacagccctggacaaaggggctcagatgccccatcatactgcaggctccaagctccacagcacctgttgccttcattagcagcttttcctcctcttccctgcacttcccagaaccaaagaatgtgaagggggtccatggagggctcacgtccccgcgccccgagcggccacttagcgccgtcgccgccggctttcgacggcgagctggatctgcagcgatactccaacgggccagccgtgagcgcagggtcgctcgggatgggagcggtgagctggtctgagagtcgtgcaggcgaacggcgcttcccctgccctgtatgcgggaagcgcttccgcttcaactctatccttgctttgcacctgcgggcgcacccaggagcccaggccttccagtgccctcactgcggccaccgcgcggcgcagcgggctctgctgcgctcgcacctgcgcacacaccagcccgagcgcccacgtagtcctgctgcacgcctgttgctggagttggaagagcgcgcgctactacgcgaggcccgactggggagagcccgaagctcagggggcatgcaggccacccctgccactgagggtctggcgcggccccaggctccttcatcgtccgccttccgttgcccctactgcaaaggcaagtttcgcacctcggcggagcgcgaacgccacctgcacatcctgcataggccctggaagtgcggcctgtgcagtttcggctccagccaggaggaggagctgctgcaccacagcctgacggccc

SEQ ID NO: 23597 - DNA, 545 bp, Homo sapiens
  misc_feature 1..545: note = ENST00000554478
  source 1..545: mol_type = unassigned DNA
aaaagagagacagaaattgtaagggagaggctttgagataaaaccccaggaagaacttcccgagtctgtgcatgttggggcagaaagagcggcagagccaactccttccctgctccacagcacctgttgccttcattagcagcttttcctcctcttccctgcacttcccagaaccaaagaatgtgaagggggtccatggagatctttctccacagggctcacgtccccgcgccccgagcggccacttagcgccgtcgccgccggctttcgacggcgagctggatctgcagcgatactccaacgggccagccgtgagcgcagggtcgctcgggatgggagcggtgagctggtctgagagtcgtgcaggcgaacggcgcttcccctgccctgtatgcgggaagcgcttccgcttcaactctatccttgctttgcacctgcgggcgcacccaggagcccaggccttccagtgccctcactgcggccaccgcgcggcgcagcgggctctgctgcgctcgcacctgcgcacacaccagcccgagcgccca

SEQ ID NO: 23598 - DNA, 546 bp, Homo sapiens
  misc_feature 1..546: note = ENST00000556174
  source 1..546: mol_type = unassigned DNA
gtgcatgttggggcagaaagagcggcagagccaactccttccctggtcttccagaactttcaaaatcaaaatcggggttgcgttaggacatgcctctgggataagattccccatggtgggatggcagcagctccacagcacctgttgccttcattagcagcttttcctcctcttccctgcacttcccagaaccaaagaatgtgaagggggtccatggagggctcacgtccccgcgccccgagcggccacttagcgccgtcgccgccggctttcgacggcgagctggatctgcagcgatactccaacgggccagccgtgagcgcagggtcgctcgggatgggagcggtgagctggtctgagagtcgtgcaggcgaacggcgcttcccctgccctgtatgcgggaagcgcttccgcttcaactctatccttgctttgcacctgcgggcgcacccaggagcccaggccttccagtgccctcactgcggccaccgcgcggcgcagcgggctctgctgcgctcgcacctgcgcacacaccagcccgagcgc

SEQ ID NO: 23599 - DNA, 567 bp, Homo sapiens
  misc_feature 1..567: note = ENST00000554923
  source 1..567: mol_type = unassigned DNA
agtgtaatcctcctcttgtgtgagggagcctctcccctgcagagaggaggaaagcctgcctcggaacagccctggacaaaggggctcagatgccccatcatactgcaggctccaaggtttgaaacaaggggatgaatcctatacgctccacagcacctgttgccttcattagcagcttttcctcctcttccctgcacttcccagaaccaaagaatgtgaagggggtccatggagatctttctccacagggctcacgtccccgcgccccgagcggccacttagcgccgtcgccgccggctttcgacggcgagctggatctgcagcgatactccaacgggccagccgtgagcgcagggtcgctcgggatgggagcggtgagctggtctgagagtcgtgcaggcgaacggcgcttcccctgccctgtatgcgggaagcgcttccgcttcaactctatccttgctttgcacctgcgggcgcacccaggagcccaggccttccagtgccctcactgcggccaccgcgcggcgcagcgggctctgctgcgctcgcacctgcgcacacaccagc

SEQ ID NO: 23600 - DNA, 560 bp, Homo sapiens
  misc_feature 1..560: note = ENST00000553296
  source 1..560: mol_type = unassigned DNA
tttgagtatagcagccccttcgtgcctcaagaagcaagtagggagaatggattggttttgggaatacagaatgctgagagtctgggggtagggagtgactttactgctgaaaactagggctcatcttttcctccaaatctgtctcttgctttagctccacagcacctgttgccttcattagcagcttttcctcctcttccctgcacttcccagaaccaaagaatgtgaagggggtccatggagggctcacgtccccgcgccccgagcggccacttagcgccgtcgccgccggctttcgacggcgagctggatctgcagcgatactccaacgggccagccgtgagcgcagggtcgctcgggatgggagcggtgagctggtctgagagtcgtgcaggcgaacggcgcttcccctgccctgtatgcgggaagcgcttccgcttcaactctatccttgctttgcacctgcgggcgcacccaggagcccaggccttccagtgccctcactgcggccaccgcgcggcgcagcgggctctgctgcgctcgcacctgcgcacacacca

SEQ ID NO: 23601 - DNA, 576 bp, Homo sapiens
  misc_feature 1..576: note = ENST00000553980
  source 1..576: mol_type = unassigned DNA
ataatcgcccctcctcctcccccaaaagagagacagaaattgtaagggagaggctttgagataaaaccccaggaagaacttcccgagtctgtgcatgttggggcagaaagagcggcagagccaactccttccctgctccacagcacctgttgccttcattagcagcttttcctcctcttccctgcacttcccagaaccaaagaatgtgaagggggtccatggagaagttaactccttggccctgacatctcgattcccatacacctccccccaccccatcttcccgagggctcacgtccccgcgccccgagcggccacttagcgccgtcgccgccggctttcgacggcgagctggatctgcagcgatactccaacgggccagccgtgagcgcagggtcgctcgggatgggagcggtgagctggtctgagagtcgtgcaggcgaacggcgcttcccctgccctgtatgcgggaagcgcttccgcttcaactctatccttgctttgcacctgcgggcgcacccaggagcccaggccttccagtgccctcactgcggccaccgcgcggcgcagcgggct

SEQ ID NO: 23602 - DNA, 609 bp, Homo sapiens
  misc_feature 1..609: note = ENST00000556944
  source 1..609: mol_type = unassigned DNA
agaaattgtaagggagaggctttgagataaaaccccaggaagaacttcccgagtctgtgcatgttggggcagaaagagcggcagagccaactccttccctgctccacagcacctgttgccttcattagcagcttttcctcctcttccctgcacttcccagaaccaaagaatgtgaagggggtccatggaggtgagtgaagctctggcttcaacctacaagtacctacaactgtatactccctctcctgcctacctctctctctctttgacctcccattattagaagttaactccttggccctgacatctcgattcccatacacctccccccaccccatcttcccgaggtgagtagcaccctgtgttcctagttcaggccccagcccaccttccctcgtgttgtccttctggccctcgaggcgacgcccttgcttcctttacagctctaccttcaccctttgctctacgcagatctttctccacagggctcacgtccccgcgccccgagcggccacttagcgccgtcgccgccggctttcgacggcgagctggatctgcagcgatactccaacgggccagccgtgagcgcagggtcgctcgggatgggag

SEQ ID NO: 23603 - DNA, 654 bp, Homo sapiens
  misc_feature 1..654: note = ENST00000555697
  source 1..654: mol_type = unassigned DNA
tgcagggtccgggatttggagtggatgggattatgaaaggtggacagaaaagaaaagtgcgatgaggcaaatgtgaagctgtatggggaggtgacaggaagagaggatatggatgcaagggagaaagcagcttttcagggtggtgaggtgaggatatattctcgtccaggtgtatcttcccctaacagggaaggaacgaaaaaagggcctgctttgagtgaaaactgaaggcactcccggacttcctattggactcgaaggatcccagcaagcttctgagtttggtggggtgggatgcaggaatgtctggagagcattctctcagggtggaaggagagcagcacgtgtctgttcccgctgtcccaccctctcatttgctcctgtgctggccaccgtgggaccattctccaaaccaggaacctcttccaactcagagaagccctgaaaaccagagacaggtgtgagcaaattgtagagctccacagcacctgttgccttcattagcagcttttcctcctcttccctgcacttcccagaaccaaagaatgtgaagggggtccatggagggctcacgtccccgcgccccgagcggccacttagcgccgtcgccgccggctttcgacggcgagctggatctgcagcgatactccaacg

SEQ ID NO: 23604 - DNA, 475 bp, Homo sapiens
  misc_feature 1..475: note = ENST00000556101
  source 1..475: mol_type = unassigned DNA
agatgccccatcatactgcaggctccaaggtttgaaacaaggggatgaatcctatacgctccacagcacctgttgccttcattagcagcttttcctcctcttccctgcacttcccagaaccaaagaatgtgaagggggtccatggaggtgagtgaagctctggcttcaacctacaagtacctacaactgtatactccctctcctgcctacctctctctctctttgacctcccattattagaagttaactccttggccctgacatctcgattcccatacacctccccccaccccatcttcccgaggtgagtagcaccctgtgttcctagttcaggccccagcccaccttccctcgtgttgtccttctggccctcgaggcgacgcccttgcttcctttacagctctaccttcaccctttgctctacgcagatctttctccacagggctcacgtccccgcgccccgagcggccactta

SEQ ID NO: 23605 - DNA, 2513 bp, Homo sapiens
  misc_feature 1..2513: note = ENST00000624093
  source 1..2513: mol_type = unassigned DNA
acaccggcgtgctcgcaagaggcgggaaagcgttagggagagacgcgggtcgcagggtccctccctctgcctgccctatctacccgcctgcccagcgagcctgtccatcttcagcgcccaggccctaggggaggggacgagaaaggccccgcgcttctgactcatcatctccaacccctttctcgcgcgcgctccaagtctcaggacttcggacctgggccctcctgcgagggggtgcggcgacagcatctgggaagccccagctctgccaagcgtcagctccgagccctcgccagtctctgaagctgccagcgcagggctggggacccagatccagctctctattgcagtggctgggggagcggcacgccagtgcaggaccgcccgcccggctcctccccgaacgcggggccagtggtcgcgtccgagaaagcgccaggctaggccccgacttccccgcctcgcgtcactcagcacatccaacagcgcccctaccgcggagagaaggctctttatttcctagccggtcacgggctagcggggcatcctgggacttgtagtctccgctacagtagaaaggagatggatcgaaaggggaactggggcactcctgaattggattcagggagttggcgtgtgcagggtccgggatttggagtggatgggattatgaaaggtggacagaaaagaaaagtgcgatgaggcaaatgtgaagctgtatggggaggtgacaggaagagaggatatggatgcaagggagaaagcagcttttcagggtggtgaggtgaggatatattctcgtccaggtgtatcttcccctaacagggaaggaacgaaaaaagggcctgctttgagtgaaaactgaaggcactcccggacttcctattggactcgaaggatcccagcaagcttctgagtttggtggggtgggatgcaggaatgtctggagagcattctctcagggtggaaggagagcagcacgtgtctgttcccgctgtcccaccctctcatttgctcctgtgctggccaccgtgggaccattctccaaaccaggaacctcttccaactcagagaagccctgaaaaccagagacaggtgtgagcaaattgtagaggtgagaaaggagaaaccccagacagaaacaactgcttcctcctgcccaattttctatcctgtttcccatagtcctgccaatatttaggcagcttcctaatgctttcccactcttttaacctcaatcatttggattcccagtttcctcttacccaccattaggggagaaatgttcaaagccagagaaagccaatcagtttcattctaggacctcttcttttctctcctgccccattattttcccttaagtgccactgaccaggataggcagtggaaaaattagttggcagctagctattcgtgctttcttccctgcccccatacctcctgcagctcttgatagtgcagactctggctcctgcagcatcctggtttcctctggctcagcaagaatagggcgtgcactgagaccagcactccccctagggtgaaggcctcagcactgagttccagcaccagcaagccagcatgctgcaggtagacagggctgagaatgcagggaccccgcacctgtttgcccctgcccttttcccttcccacctcctcttgcctccttatcctcccaccttctccttcattgaccagtacctgggaggaggcagttggggcaggccccaaggctgtcttcatcacctcgaccaccaccactatgaaacccaagatcaagttgaaggtgttgaatatcatcatggcccgcacctgccagtgagccagctcagccctgcccagcctaggggagtcattccaacctcaatccccacttgcagcctagctgaagacaaaactcagcttctgcttctcagcctccaaacagggccataagccctcttaacttttttgctttcctcctcagtgattgaggccagtcagtggtgacagctgagagaatgagtcaacacttagccacttacttcctaggctgagggttgtaggtgtctgttttagggagtgggaggacagtgctgcgttttcttccctctcaccttccaaaggcggggtgctctgcgaagctccagagtgacagtcccagtgaggagaccctgaatggtgagaagggcaagtgttgagctctggtcccgttaggaaggggccctgggaccttccaccctcccttgtggtgggtcttactgaggctccaggcccaagaggcagcgctgtggccatgtgacaatcagagttcaggcaggcgactgagacagcaaggggcaccacaaccactgccagccatagctggctcacctgggggtaagggtagggtaattggggaggaactgtcagggattccctcccttctcgtaactcctacctctttagagatcaggaaatgggattgaatgcagggtggaggaaagcagtcaacccagagcaaggacgtgatcattaaaaattaagtatcattt

SEQ ID NO: 23606 - DNA, 820 bp, Homo sapiens
  misc_feature 1..820: note = ENST00000592725
  source 1..820: mol_type = unassigned DNA
atcctcagtgttctgtgtcctgtgcttatagaggcccgtcctctgtggccgtgtgacctgcaagtattgggagagccacagctaaaccccgggacccctggaagcctagaaatggtattgttgtctctaagccagacctggttacctgtctggagcaaggaaaaaaacctttaactatggaaagacatgagatgattgccaaacccccagttatgagttctcattttgcccaagacctttggccagagaacatacaaaattctttccaaatagggatgctgagaagatatgaagaatgcagacatgacaatttacagttaaaaaaaggctgtaaaagcgtgggtgagcataaggtgcacaaaggaggttataatggacttaaccaatgtttgacaactacccagaaagaaatatttcaatgtgataaatatggaaaagtctttcataagttttcaaattcaaacacatataagacaagacatactggaataaatcttttcaaatgtataatatgtggcaaagcttttaaacggtcctcaacccttactacacataagaaaattcatactggagagaaaccttacagatgtgaagaatgtggcaaagcttttaaccaatctgcaaaccttactacacataagagaattcataccggagagaaaccctacagatgtgaagaatgtggcaaagcctttaagcagtcctcaaaccttactacacataagaaaattcatactggagagaaaccctacaaatgtgaagaatgtggcaaagccttcaaccgatccacagaccttactacacataagatagttcatac

SEQ ID NO: 23607 - DNA, 3519 bp, Homo sapiens
  misc_feature 1..3519: note = ENST00000589717
  source 1..3519: mol_type = unassigned DNA
ctgtgcttatagaggcccgtcctctgtggccgtgtgacctgcaagtattgggagagccacagctaaaccccgggacccctggaagcctagaaatgggaccattgcaatttagagatgtggccatagaattctctctggaggagtggcattgcctggacactgcacagcggaatttatatagggatgtgatgttagagaactacagaaacttggtcttccttggtattgttgtctctaagccagacctggttacctgtctggagcaaggaaaaaaacctttaactatggaaagacatgagatgattgccaaacccccagttatgagttctcattttgcccaagacctttggccagagaacatacaaaattctttccaaatagggatgctgagaagatatgaagaatgcagacatgacaatttacagttaaaaaaaggctgtaaaagcgtgggtgagcataaggtgcacaaaggaggttataatggacttaaccaatgtttgacaactacccagaaagaaatatttcaatgtgataaatatggaaaagtctttcataagttttcaaattcaaacacatataagacaagacatactggaataaatcttttcaaatgtataatatgtggcaaagcttttaaacggtcctcaacccttactacacataagaaaattcatactggagagaaaccttacagatgtgaagaatgtggcaaagcttttaaccaatctgcaaaccttactacacataagagaattcataccggagagaaaccctacagatgtgaagaatgtggcaaagcctttaagcagtcctcaaaccttactacacataagaaaattcatactggagagaaaccctacaaatgtgaagaatgtggcaaagccttcaaccgatccacagaccttactacacataagatagttcatactggagagaaaccctacaaatgtgaagaatgtggcaaagcctttaagcacccctcacacgttaccacacataagaaaattcatactagagggaaaccctacaactgtgaagaatgtggcaaatcctttaagcactgctctaaccttactatacataagagaattcatacaggagagaaaccctacaaatgtgaagaatgtggcaaagcctttcacctatcctcacaccttactacacataagatacttcatactggagagaaaccctacagatgtagagaatgtggcaaagcttttaaccattccacaacccttttttcacatgagaaaattcatactggagagaaaccctacaaatgtgatgaatgtggcaaaacctttacctggccctcaatcctctccaaacataaaagaactcatactggagagaaaccctacaaatgtgaagaatgtggcaaatcctttactgcatcctcaactctaactacacataagagaattcatactggagagaaaccttacaaatgtgaagaatgtggcaaagcttttaactggtcctcagaccttaataaacataagaaaattcatattgaacgaaaaccctacatagtgaagaatgtgacagatcttttaaatgttcctccacttttaattagcataagataattcatactggagagaaaccctatgaatgtgatgaatgtgggaaagcctttaaccagccctcgactcttagtaaatttgagagtttatatggaacacaaaccctacaaatataaagaatgtgacaaagctttttaaggaagttctcaacccttattacacataattcataccaaacagaagccctacaagtgtgaagaatgtggcaaaacctataaacctataacaagttctcaattcctttttttttgagatggagtttcactcttgtcaccgaggctggagtgcaatgacatgatctccgttcactgcaatctctgcctcctgggtttaagccattcttctgcctcagcctcccaagtagctgggattacaggtgcccaacaccacgcctggctaatttttggatttttagtagagatggggtttcacaatgttggccaggctggtctcgaactcctgacctcaggtgatccacctgccttggccttccaaagtgctggggttacaggcgtgagccaccatgcctggctacaagttcttaattcttaagagacaccatgcctggctacaagttcttaattcttaagagacatggcgataattcatgctgaagaggaaatctggaaacctgaaagatgcgacattgcttttaccaacacctccacatttcctatacataaaaataaattatactagtgtaataccctagaaatgtataaaatgtgacaaagcctttatatgattgtcatacatgattgtaggtgatagaagtcatactgccaaaactcctgtaagtgtgaagaatgtggcaaaatattttattagtgcttataccttatttcacaggaaagctcttatccttgagaaaaattgtgcaaatacaaagaatatggaaaaaccattaatgcctactcacatcttactgaacagaagaaggttcatagttaataaagcattaaaagtgcaattactgtcaaaaaatctttcagaaaatagaagtctttaaagtgaagaatatttattctgaagacagccattacaaatataaagggggttgtagtgcctttacttgtgtcacagatcttagtgcacacatgtagtactagaggaaaaccctgaagcagttgctcaagctttgtttcagggaatcaagggaatttatattgagaatagtactgcaaatgtaatgaatggaaagacttttcttttccaaaaatgacagcttagaaaacaccagagggtttataccaaaatatatttttgcagatgcagtaaatatcaaaaaatatttaattcaaaattgattctatgtaaatatcagagaattttccatagaataattaaggcactgacacttcagacattacactaaatcagaatgttcagtataaaaactaatccacagctacagctgttagataaattatttctatataattttttaaaaagtggatttttgaagcactgtaattacattgaaagtatacttgttttcttgaaaaaatttttttgaaaagtgaataatgatataatacagctttcacattgctttatgctattttattcctattatattcacatgtgaaagcatgtgatcaattgttgctgcattagagatattagagattgttttttattagttgggcattatgtatgaccttttctataaaagagtaaggacattaaaatgtaagatgcatgatgaaaatataagtggagaggctctttgtagttaactgatattaagtaatgtgtaaggtgggggttcatgttctcatttctataatcctagccaatgacttaatgttgatgctttgaatgtcttttggatggtctaacctacattaacatgtatgcggaacatcttaaaactttttttcaaaaatcataatgaattattttattaataagcaaagataaaaaataa

SEQ ID NO: 23608 - DNA, 2268 bp, Homo sapiens
  misc_feature 1..2268: note = ENST00000355650
  source 1..2268: mol_type = unassigned DNA
gtgcttatagaggcccgtcctctgtggccgtgtgacctgcaagtattgggagagccacagctaaaccccgggacccctggaagcctagaaatgttatgagttctcattttgcccaagacctttggccagagaacatacaaaattctttccaaatagggatgctgagaagatatgaagaatgcagacatgacaatttacagttaaaaaaaggctgtaaaagcgtgggtgagcataaggtgcacaaaggaggttataatggacttaaccaatgtttgacaactacccagaaagaaatatttcaatgtgataaatatggaaaagtctttcataagttttcaaattcaaacacatataagacaagacatactggaataaatcttttcaaatgtataatatgtggcaaagcttttaaacggtcctcaacccttactacacataagaaaattcatactggagagaaaccttacagatgtgaagaatgtggcaaagcttttaaccaatctgcaaaccttactacacataagagaattcataccggagagaaaccctacagatgtgaagaatgtggcaaagcctttaagcagtcctcaaaccttactacacataagaaaattcatactggagagaaaccctacaaatgtgaagaatgtggcaaagccttcaaccgatccacagaccttactacacataagatagttcatactggagagaaaccctacaaatgtgaagaatgtggcaaagcctttaagcacccctcacacgttaccacacataagaaaattcatactagagggaaaccctacaactgtgaagaatgtggcaaatcctttaagcactgctctaaccttactatacataagagaattcatacaggagagaaaccctacaaatgtgaagaatgtggcaaagcctttcacctatcctcacaccttactacacataagatacttcatactggagagaaaccctacagatgtagagaatgtggcaaagcttttaaccattccacaacccttttttcacatgagaaaattcatactggagagaaaccctacaaatgtgatgaatgtggcaaaacctttacctggccctcaatcctctccaaacataaaagaactcatactggagagaaaccctacaaatgtgaagaatgtggcaaatcctttactgcatcctcaactctaactacacataagagaattcatactggagagaaaccttacaaatgtgaagaatgtggcaaagcttttaactggtcctcagaccttaataaacataagaaaattcatattgaacgaaaaccctacatagtgaagaatgtgacagatcttttaaatgttcctccacttttaattagcataagataattcatactggagagaaaccctatgaatgtgatgaatgtgggaaagcctttaaccagccctcgactcttagtaaatttgagagtttatatggaacacaaaccctacaaatataaagaatgtgacaaagctttttaaggaagttctcaacccttattacacataattcataccaaacagaagccctacaagtgtgaagaatgtggcaaaacctataaacctataacaagttctcaattcctttttttttgagatggagtttcactcttgtcaccgaggctggagtgcaatgacatgatctccgttcactgcaatctctgcctcctgggtttaagccattcttctgcctcagcctcccaagtagctgggattacaggtgcccaacaccacgcctggctaatttttggatttttagtagagatggggtttcacaatgttggccaggctggtctcgaactcctgacctcaggtgatccacctgccttggccttccaaagtgctggggttacaggcgtgagccaccatgcctggctacaagttcttaattcttaagagacaccatgcctggctacaagttcttaattcttaagagacatggcgataattcatgctgaagaggaaatctggaaacctgaaagatgcgacattgcttttaccaacacctccacatttcctatacataaaaataaattatactagtgtaataccctagaaatgtataaaatgtgacaaagcctttatatgattgtcatacatgattgtaggtgatagaagtcatactgccaaaactcctgtaagtgtgaagaatgtggcaaaatattttattagtgcttataccttatttcacaggaaagctcttatccttgagaaaaattgtgcaaatacaaagaatatggaaaaacca

SEQ ID NO: 23609 - DNA, 297 bp, Homo sapiens
  misc_feature 1..297: note = ENST00000589668
  source 1..297: mol_type = unassigned DNA
ggcccgtcctctgtggccgtgtgacctgcaagtattgggagagccacagctaaaccccgggacccctggaagcctagaaatgggaccattgcaatttagagatgtggccatagaattctctctggaggagtggcattgcctggacactgcacagcggaatttatatagggatgtgatgttagagaactacagaaacttggtcttccttggtgaggacaacttgaatatataattcataatataccctgaagattttatttctcttttttgtagaatgtttgttagtaatttattctt

SEQ ID NO: 23610 - DNA, 1208 bp, Homo sapiens
  misc_feature 1..1208: note = ENST00000640599
  source 1..1208: mol_type = unassigned DNA
ggaccattgcaatttagagatgtggccatagaattctctctggaggagtggcattgcctggacactgcacagcggaatttatatagggatgtgatgttagagaactacagaaacttggtcttccttggtattgttgtctctaagccagacctggttacctgtctggagcaaggaaaaaaacctttaactatggaaagacatgagatgattgccaaacccccagttatgagttctcattttgcccaagacctttggccagagaacatacaaaattctttccaaatagggatgctgagaagatatgaagaatgcagacatgacaatttacagttaaaaaaaggctgtaaaagcgtgggtgagcataaggtgcacaaaggaggttataatggacttaaccaatgtttgacaactacccagaaagaaatatttcaatgtgataaatatggaaaagtctttcataagttttcaaattcaaacacatataagacaagacatactggaataaatcttttcaaatgtataatatgtggcaaagcttttaaacggtcctcaacccttactacacataagaaaattcatactggagagaaaccttacagatgtgaagaatgtggcaaagcttttaaccaatctgcaaaccttactacacataagagaattcataccggagagaaaccttacaaatgtgaagaatgtggcaaagcttttaactggtcctcagaccttaataaacataagaaaattcatattgaacgaaaaccctacatagtgaagaatgtgacagatcttttaaatgttcctccacttttaattagcataagataattcatactggagagaaaccctatgaatgtgatgaatgtgggaaagcctttaaccagccctcgactcttagtaaatttgagagtttatatggaacacaaaccctacaaatataaagaatgtgacaaagctttttaaggaagttctcaacccttattacacataattcataccaaacagaagccctacaagtgtgaagaatgtggcaaaacctataaacctataacaagttctcaattcctttttttttgagatggagtttcactcttgtcaccgaggctggagtgcaatgacatgatctccgttcactgcaatctctgcctcctgggtttaagccattcttctgcctcagcctcccaagtagctgggattacaggtgcccaaca

SEQ ID NO: 23611 - DNA, 3391 bp, Homo sapiens
  misc_feature 1..3391: note = ENST00000443917
  source 1..3391: mol_type = unassigned DNA
atcgggtcggctttctacgcggctctcgtggaacctagcaaagaaagacagtgaagactgcaggaccttccttcgcgcttttgttacaatccatgacccctgtcgtgggacgggcggcctctcgcggaggtgtctgccggggctgggctcttaccgaggcctccacacacgtcctcttgtccttgtctcccccagaagcagccgccttagtcttgtgagcgtttttacaccgggtagattgagacttggagtgctacactcagcccgagggcgtccagcgcggtggaggcgtggggtttcggctgagcccacagggcacagactgttcatccgcttctcatggcagcggcggtgctgatggaccgggttcagagttgtgtgaccttcgaggatgtgttcgtgtacttctctcgggaggagtgggaactccttgaggaggcacagagattcctgtaccgtgatgtgatgctggagaactttgcacttgtggctacactagctttcattttcccagtcccatgcagttgcgcagttggagggggcagaaaaccttgggtgcctgacagggcagacatcactgcagccacagtaaaggagacctacagagggcatggccctgctgaatgggagctggaagagggtttttggtgtgaagcagaacatgaggcaccttctgagcagagcgtttctgtagaaggagtgtcacaggtcaggactgctgagtcaggtcttttccagaaagcacacccatgtgagatgtgtgacccactcttgaaagacattttgcacctggctgaacaccagggatcacaccttacacagaaactgtgcacacgtgggctgtgtaggagaagattctcgttcagtgcaaacttttaccagcaccagaagcaacataatggagagaattgcttcagaggggatgatggaggggcctcatttgtgaagagctgtacagtccacatgttagggagatcctttacgtgcagggaggaagggatggacttaccagatagctctggccttttccagcaccagaccacttacaatagggtgagtccatgcagaaggactgaatgcatggagtctttcccacacagctccagtctcaggcaacaccaaggagactatgatggacagatgcttttcagttgcggtgatgaagggaaagccttcctggacacctttactcttcttgacagccagatgactcatgctgaggtgagacccttcagatgcctaccatgtggaaatgtgttcaaggagaaatcagctcttattaatcacagaaaaatccacagtggagaaatatctcatgtgtgtaaggagtgtggaaaagccttcattcacttgcaccacctaaaaatgcaccagaaatttcacactggaaaaagacactatacatgcagtgaatgtgggaaggccttcagccgcaaggacacacttgttcagcatcagagagttcacactggagaaagatcttatgactgcagtgaatgtggaaaagcctacagcagaagctcccaccttgttcagcaccagagaattcacacaggagaaaggccttataagtgcaacaaatgtgggaaagcctttagccgtaaagacacacttgttcagcaccagagatttcatactggagaaaggccttatgagtgcagtgaatgtggaaaattctttagccaaagctcccaccttattgagcactggagaattcataccggggcaaggccctatgaatgcatagaatgtggaaaattctttagccataactctagcctcattaaacatcggagagtccacacaggagcaagatcctacgtgtgcagcaaatgtgggaaggcctttggctgcaaagacacacttgttcagcaccagataattcacactggagcaaggccttatgagtgcagtgaatgtgggaaggccttcagccgtaaagacacacttgtgcaacaccaaaaaatccacactggagaaaggccttatgagtgtggtgaatgtggtaaattcttcagccatagctccaaccttattgtacaccagagaattcacactggagcaaagccttatgagtgcaatgaatgtgggaaatgctttagccacaactccagcctcattttgcaccagagagttcacacaggagcaaggccttatgtgtgcagtgaatgtgggaaggcttacattagtagctcccaccttgttcaacacaagaaagttcacactggagcaagaccttatgagtgcagtgaatgtgggaaattctttagccgcaactctggcctcattctgcaccagagggttcacactggagaaaagccttacgtatgcagcgaatgtgggaaagcctatagcagaagctcccatcttgttcgtcaccagaaagctcacactggagaaagagctcacgagtgcaacagttttggtggccctttagctgcatctcttaaacttgtttaacaccagaaaattcacacaagagaaaggccttatgaatgcagaaaatatgtcatcttgttcatcctcataggactcacaccagagcaatgctctgtgagtaccctttgtgagggaaccatcagctagcagatgagcaccgtatattcattccaccctggggagattcctgataagcaccacatatgtgggaggctttcatgaggtgtgttgcactttgtaactgtctagagctcttgatggaattatatcactgccagtgcctgtggcggaagccatcttattgctaccagctgtgtgtgtcaatcactccattttgctcagggaaggcagacttctgtgctttctttcctgttccctacaggtaatcatgaatattttcaaggacttccccccccccccacttcaccccctaccattgagggtcctcatcttttccctcatgattaggttctgagcaaacatgatctagctctcaccaaaaggacctgagctagggtctgctgggatttcctgacacgattttccatcttcatggacaatgttaactgtaaacgtgatagctgtgacttacttgtcttactgccaaatcgcccaaatttggaactgcttgtcccatgctgctctgatttatacagtgataagggcctattgtggcagtctttactcttggggattttgttactgtgtagagtggattgagaaaagaattgggttctgtcatgaagggagtagcaccttttgtgggcaccacctttatgtgcctcagaggggaccaaaggatggcagaaaactgttctcagtctagtttgacctaatttacactattgccctaggcttgctaggaaagactgaaaaaatttttgtgcctaactttgtggcctggctgccaggatttcctgtgagcccagtgaggagggcatagttggtgcga

SEQ ID NO: 23612 - DNA, 3331 bp, Homo sapiens
  misc_feature 1..3331: note = ENST00000598744
  source 1..3331: mol_type = unassigned DNA
atcgggtcggctttctacgcggctctcgtggaacctagcaaagaaagacagtgaagactgcaggaccttccttcgcgcttttgttacaatccatgacccctgtcgtgggacgggcggcctctcgcggaggtgtctgccggggctgggctcttaccgaggcctccacacacgtcctcttgtccttgtctcccccagaagcagccgccttagtcttgtgagcgtttttacaccgggtagattgagacttggagtgctacactcagcccgagggcgtccagcgcggtggaggcgtggggtttcggctgagcccacagggcacagactgttcatccgcttctcatggcagcggcggtgctgatggaccgggttcaggttgagaacagactgtgagcatgagggagcagctactgcagtagtgttgatggtgtctggtctagaggtgtggctgtggagagttgtgtgaccttcgaggatgtgttcgtgtacttctctcgggaggagtgggaactccttgaggaggcacagagattcctgtaccgtgatgtgatgctggagaactttgcacttgtggctacactaggtttttggtgtgaagcagaacatgaggcaccttctgagcagagcgtttctgtagaaggagtgtcacaggtcaggactgctgagtcaggtcttttccagaaagcacacccatgtgagatgtgtgacccactcttgaaagacattttgcacctggctgaacaccagggatcacaccttacacagaaactgtgcacacgtgggctgtgtaggagaagattctcgttcagtgcaaacttttaccagcaccagaagcaacataatggagagaattgcttcagaggggatgatggaggggcctcatttgtgaagagctgtacagtccacatgttagggagatcctttacgtgcagggaggaagggatggacttaccagatagctctggccttttccagcaccagaccacttacaatagggtgagtccatgcagaaggactgaatgcatggagtctttcccacacagctccagtctcaggcaacaccaaggagactatgatggacagatgcttttcagttgcggtgatgaagggaaagccttcctggacacctttactcttcttgacagccagatgactcatgctgaggtgagacccttcagatgcctaccatgtggaaatgtgttcaaggagaaatcagctcttattaatcacagaaaaatccacagtggagaaatatctcatgtgtgtaaggagtgtggaaaagccttcattcacttgcaccacctaaaaatgcaccagaaatttcacactggaaaaagacactatacatgcagtgaatgtgggaaggccttcagccgcaaggacacacttgttcagcatcagagagttcacactggagaaagatcttatgactgcagtgaatgtggaaaagcctacagcagaagctcccaccttgttcagcaccagagaattcacacaggagaaaggccttataagtgcaacaaatgtgggaaagcctttagccgtaaagacacacttgttcagcaccagagatttcatactggagaaaggccttatgagtgcagtgaatgtggaaaattctttagccaaagctcccaccttattgagcactggagaattcataccggggcaaggccctatgaatgcatagaatgtggaaaattctttagccataactctagcctcattaaacatcggagagtccacacaggagcaagatcctacgtgtgcagcaaatgtgggaaggcctttggctgcaaagacacacttgttcagcaccagataattcacactggagcaaggccttatgagtgcagtgaatgtgggaaggccttcagccgtaaagacacacttgtgcaacaccaaaaaatccacactggagaaaggccttatgagtgtggtgaatgtggtaaattcttcagccatagctccaaccttattgtacaccagagaattcacactggagcaaagccttatgagtgcaatgaatgtgggaaatgctttagccacaactccagcctcattttgcaccagagagttcacacaggagcaaggccttatgtgtgcagtgaatgtgggaaggcttacattagtagctcccaccttgttcaacacaagaaagttcacactggagcaagaccttatgagtgcagtgaatgtgggaaattctttagccgcaactctggcctcattctgcaccagagggttcacactggagaaaagccttacgtatgcagcgaatgtgggaaagcctatagcagaagctcccatcttgttcgtcaccagaaagctcacactggagaaagagctcacgagtgcaacagttttggtggccctttagctgcatctcttaaacttgtttaacaccagaaaattcacacaagagaaaggccttatgaatgcagaaaatatgtcatcttgttcatcctcataggactcacaccagagcaatgctctgtgagtaccctttgtgagggaaccatcagctagcagatgagcaccgtatattcattccaccctggggagattcctgataagcaccacatatgtgggaggctttcatgaggtgtgttgcactttgtaactgtctagagctcttgatggaattatatcactgccagtgcctgtggcggaagccatcttattgctaccagctgtgtgtgtcaatcactccattttgctcagggaaggcagacttctgtgctttctttcctgttccctacaggtaatcatgaatattttcaaggacttccccccccccccacttcaccccctaccattgagggtcctcatcttttccctcatgattaggttctgagcaaacatgatctagctctcaccaaaaggacctgagctagggtctgctgggatttcctgacacgattttccatcttcatggacaatgttaactgtaaacgtgatagctgtgacttacttgtcttactgccaaatcgcccaaatttggaactgcttgtcccatgctgctctgatttatacagtgataagggcctattgtggcagtctttactcttggggattttgttactgtgtagagtggattgagaaaagaattgggttctgtcatgaagggagtagcaccttttgtgggcaccacctttatgtgcctcagaggggaccaaaggatggcagaaaactgttctcagtctagtttgacctaatttacactattgccctaggcttgctaggaaagactgaaaaaatttttgtgcctaactttgtggcctggctgccaggatttcctgtgagcccagtgaggagggcatagttggtgcga

SEQ ID NO: 23613 - DNA, 4202 bp, Homo sapiens
  misc_feature 1..4202: note = ENST00000282286
  source 1..4202: mol_type = unassigned DNA
acacgtcctcttgtccttgtctcccccagaagcagccgccttagtcttgtgagcgtttttacaccgggtagattgagacttggagtgctacactcagcccgagggcgtccagcgcggtggaggcgtggggtttcggctgagcccacagggcacagactgttcatccgcttctcatggcagcggcggtgctgatggaccgggttcagagttgtgtgaccttcgaggatgtgttcgtgtacttctctcgggaggagtgggaactccttgaggaggcacagagattcctgtaccgtgatgtgatgctggagaactttgcacttgtggctacactaggtttttggtgtgaagcagaacatgaggcaccttctgagcagagcgtttctgtagaaggagtgtcacaggtcaggactgctgagtcaggtcttttccagaaagcacacccatgtgagatgtgtgacccactcttgaaagacattttgcacctggctgaacaccagggatcacaccttacacagaaactgtgcacacgtgggctgtgtaggagaagattctcgttcagtgcaaacttttaccagcaccagaagcaacataatggagagaattgcttcagaggggatgatggaggggcctcatttgtgaagagctgtacagtccacatgttagggagatcctttacgtgcagggaggaagggatggacttaccagatagctctggccttttccagcaccagaccacttacaatagggtgagtccatgcagaaggactgaatgcatggagtctttcccacacagctccagtctcaggcaacaccaaggagactatgatggacagatgcttttcagttgcggtgatgaagggaaagccttcctggacacctttactcttcttgacagccagatgactcatgctgaggtgagacccttcagatgcctaccatgtggaaatgtgttcaaggagaaatcagctcttattaatcacagaaaaatccacagtggagaaatatctcatgtgtgtaaggagtgtggaaaagccttcattcacttgcaccacctaaaaatgcaccagaaatttcacactggaaaaagacactatacatgcagtgaatgtgggaaggccttcagccgcaaggacacacttgttcagcatcagagagttcacactggagaaagatcttatgactgcagtgaatgtggaaaagcctacagcagaagctcccaccttgttcagcaccagagaattcacacaggagaaaggccttataagtgcaacaaatgtgggaaagcctttagccgtaaagacacacttgttcagcaccagagatttcatactggagaaaggccttatgagtgcagtgaatgtggaaaattctttagccaaagctcccaccttattgagcactggagaattcataccggggcaaggccctatgaatgcatagaatgtggaaaattctttagccataactctagcctcattaaacatcggagagtccacacaggagcaagatcctacgtgtgcagcaaatgtgggaaggcctttggctgcaaagacacacttgttcagcaccagataattcacactggagcaaggccttatgagtgcagtgaatgtgggaaggccttcagccgtaaagacacacttgtgcaacaccaaaaaatccacactggagaaaggccttatgagtgtggtgaatgtggtaaattcttcagccatagctccaaccttattgtacaccagagaattcacactggagcaaagccttatgagtgcaatgaatgtgggaaatgctttagccacaactccagcctcattttgcaccagagagttcacacaggagcaaggccttatgtgtgcagtgaatgtgggaaggcttacattagtagctcccaccttgttcaacacaagaaagttcacactggagcaagaccttatgagtgcagtgaatgtgggaaattctttagccgcaactctggcctcattctgcaccagagggttcacactggagaaaagccttacgtatgcagcgaatgtgggaaagcctatagcagaagctcccatcttgttcgtcaccagaaagctcacactggagaaagagctcacgagtgcaacagttttggtggccctttagctgcatctcttaaacttgtttaacaccagaaaattcacacaagagaaaggccttatgaatgcagaaaatatgtcatcttgttcatcctcataggactcacaccagagcaatgctctgtgagtaccctttgtgagggaaccatcagctagcagatgagcaccgtatattcattccaccctggggagattcctgataagcaccacatatgtgggaggctttcatgaggtgtgttgcactttgtaactgtctagagctcttgatggaattatatcactgccagtgcctgtggcggaagccatcttattgctaccagctgtgtgtgtcaatcactccattttgctcagggaaggcagacttctgtgctttctttcctgttccctacaggtaatcatgaatattttcaaggacttccccccccccccacttcaccccctaccattgagggtcctcatcttttccctcatgattaggttctgagcaaacatgatctagctctcaccaaaaggacctgagctagggtctgctgggatttcctgacacgattttccatcttcatggacaatgttaactgtaaacgtgatagctgtgacttacttgtcttactgccaaatcgcccaaatttggaactgcttgtcccatgctgctctgatttatacagtgataagggcctattgtggcagtctttactcttggggattttgttactgtgtagagtggattgagaaaagaattgggttctgtcatgaagggagtagcaccttttgtgggcaccacctttatgtgcctcagaggggaccaaaggatggcagaaaactgttctcagtctagtttgacctaatttacactattgccctaggcttgctaggaaagactgaaaaaatttttgtgcctaactttgtggcctggctgccaggatttcctgtgagcccagtgaggagggcatagttggtgcgaaaatctcctgtgcttgtggaagcaacataagttgggtcccttaactgtcacgtactccccagcactgttgagggattgctgtcttctgtacctgtacaggatcaagtccctgatatccagaaccccataggcaagtaacattgactgtaagacctctgtagggcaatgtgaaaatcatgattgctacagaagcactgagataatggagtggggatgactgtggcaaacaaaaggagattcgaacattctagaggggcatccacaagtctcggtgcagttatgatggtgtgggatgggagtgcatagaaattctcaggaccttcagacatctgtatctcctgtggccaaggccactgtcagaggaaataatctaaatgtttgtggattcctgtgtctccctgggcagttgacctgcacagacaggaacctcagcagtgacagaagagagatccagggatgggtcttctctgacccagccagcattccgagtgactgaggtggatgtggacatcattgcttaccaatttttaccaacattgaggcagggctcactctcctaaattgtagggagaggaatatggtaaagccaaaatagttgacagatctaactttcctagtggaacagtatatatagattttaatgaggaacatttatttaatagctttatggaggtatgattaacatgcaataaactgcaaatatgtaaagtgtaaaatgtgctgtttcagcatgtgtgtacacctatgaaaccaccacagtcaagatatccaacacaacaaaagattgtccctttataatcctcaatttttccttatcttgttttccacaattcacaagcaacagcaagcattttctataattttataaatgaaaccatatggtgtgtactttttagggggtggggctctggctttttcagtaaacataactattttaaggttaatccattatcttgttgcatgaatcaattgtttgctcatttgtattgctgcgtagtatttcagtatttcattgtataccacaatttttcttctttgtcaacttaattgttatggatgtttgggtaactttcagtttttggctattacaaataaacctctgaagatttgtgtgcaaa

SEQ ID NO: 23614 - DNA, 4313 bp, Homo sapiens
  misc_feature 1..4313: note = ENST00000391705
  source 1..4313: mol_type = unassigned DNA
tgaaggctgagttctagagatcgggtcggctttctacgcggctctcgtggaacctagcaaagaaagacagtgaagactgcaggaccttccttcgcgcttttgttacaatccacacgtcctcttgtccttgtctcccccagaagcagccgccttagtcttgtgagcgtttttacaccgggtagattgagacttggagtgctacactcagcccgagggcgtccagcgcggtggaggcgtggggtttcggctgagcccacagggcacagactgttcatccgcttctcatggcagcggcggtgctgatggaccgggttcagagttgtgtgaccttcgaggatgtgttcgtgtacttctctcgggaggagtgggaactccttgaggaggcacagagattcctgtaccgtgatgtgatgctggagaactttgcacttgtggctacactaggtttttggtgtgaagcagaacatgaggcaccttctgagcagagcgtttctgtagaaggagtgtcacaggtcaggactgctgagtcaggtcttttccagaaagcacacccatgtgagatgtgtgacccactcttgaaagacattttgcacctggctgaacaccagggatcacaccttacacagaaactgtgcacacgtgggctgtgtaggagaagattctcgttcagtgcaaacttttaccagcaccagaagcaacataatggagagaattgcttcagaggggatgatggaggggcctcatttgtgaagagctgtacagtccacatgttagggagatcctttacgtgcagggaggaagggatggacttaccagatagctctggccttttccagcaccagaccacttacaatagggtgagtccatgcagaaggactgaatgcatggagtctttcccacacagctccagtctcaggcaacaccaaggagactatgatggacagatgcttttcagttgcggtgatgaagggaaagccttcctggacacctttactcttcttgacagccagatgactcatgctgaggtgagacccttcagatgcctaccatgtggaaatgtgttcaaggagaaatcagctcttattaatcacagaaaaatccacagtggagaaatatctcatgtgtgtaaggagtgtggaaaagccttcattcacttgcaccacctaaaaatgcaccagaaatttcacactggaaaaagacactatacatgcagtgaatgtgggaaggccttcagccgcaaggacacacttgttcagcatcagagagttcacactggagaaagatcttatgactgcagtgaatgtggaaaagcctacagcagaagctcccaccttgttcagcaccagagaattcacacaggagaaaggccttataagtgcaacaaatgtgggaaagcctttagccgtaaagacacacttgttcagcaccagagatttcatactggagaaaggccttatgagtgcagtgaatgtggaaaattctttagccaaagctcccaccttattgagcactggagaattcataccggggcaaggccctatgaatgcatagaatgtggaaaattctttagccataactctagcctcattaaacatcggagagtccacacaggagcaagatcctacgtgtgcagcaaatgtgggaaggcctttggctgcaaagacacacttgttcagcaccagataattcacactggagcaaggccttatgagtgcagtgaatgtgggaaggccttcagccgtaaagacacacttgtgcaacaccaaaaaatccacactggagaaaggccttatgagtgtggtgaatgtggtaaattcttcagccatagctccaaccttattgtacaccagagaattcacactggagcaaagccttatgagtgcaatgaatgtgggaaatgctttagccacaactccagcctcattttgcaccagagagttcacacaggagcaaggccttatgtgtgcagtgaatgtgggaaggcttacattagtagctcccaccttgttcaacacaagaaagttcacactggagcaagaccttatgagtgcagtgaatgtgggaaattctttagccgcaactctggcctcattctgcaccagagggttcacactggagaaaagccttacgtatgcagcgaatgtgggaaagcctatagcagaagctcccatcttgttcgtcaccagaaagctcacactggagaaagagctcacgagtgcaacagttttggtggccctttagctgcatctcttaaacttgtttaacaccagaaaattcacacaagagaaaggccttatgaatgcagaaaatatgtcatcttgttcatcctcataggactcacaccagagcaatgctctgtgagtaccctttgtgagggaaccatcagctagcagatgagcaccgtatattcattccaccctggggagattcctgataagcaccacatatgtgggaggctttcatgaggtgtgttgcactttgtaactgtctagagctcttgatggaattatatcactgccagtgcctgtggcggaagccatcttattgctaccagctgtgtgtgtcaatcactccattttgctcagggaaggcagacttctgtgctttctttcctgttccctacaggtaatcatgaatattttcaaggacttccccccccccccacttcaccccctaccattgagggtcctcatcttttccctcatgattaggttctgagcaaacatgatctagctctcaccaaaaggacctgagctagggtctgctgggatttcctgacacgattttccatcttcatggacaatgttaactgtaaacgtgatagctgtgacttacttgtcttactgccaaatcgcccaaatttggaactgcttgtcccatgctgctctgatttatacagtgataagggcctattgtggcagtctttactcttggggattttgttactgtgtagagtggattgagaaaagaattgggttctgtcatgaagggagtagcaccttttgtgggcaccacctttatgtgcctcagaggggaccaaaggatggcagaaaactgttctcagtctagtttgacctaatttacactattgccctaggcttgctaggaaagactgaaaaaatttttgtgcctaactttgtggcctggctgccaggatttcctgtgagcccagtgaggagggcatagttggtgcgaaaatctcctgtgcttgtggaagcaacataagttgggtcccttaactgtcacgtactccccagcactgttgagggattgctgtcttctgtacctgtacaggatcaagtccctgatatccagaaccccataggcaagtaacattgactgtaagacctctgtagggcaatgtgaaaatcatgattgctacagaagcactgagataatggagtggggatgactgtggcaaacaaaaggagattcgaacattctagaggggcatccacaagtctcggtgcagttatgatggtgtgggatgggagtgcatagaaattctcaggaccttcagacatctgtatctcctgtggccaaggccactgtcagaggaaataatctaaatgtttgtggattcctgtgtctccctgggcagttgacctgcacagacaggaacctcagcagtgacagaagagagatccagggatgggtcttctctgacccagccagcattccgagtgactgaggtggatgtggacatcattgcttaccaatttttaccaacattgaggcagggctcactctcctaaattgtagggagaggaatatggtaaagccaaaatagttgacagatctaactttcctagtggaacagtatatatagattttaatgaggaacatttatttaatagctttatggaggtatgattaacatgcaataaactgcaaatatgtaaagtgtaaaatgtgctgtttcagcatgtgtgtacacctatgaaaccaccacagtcaagatatccaacacaacaaaagattgtccctttataatcctcaatttttccttatcttgttttccacaattcacaagcaacagcaagcattttctataattttataaatgaaaccatatggtgtgtactttttagggggtggggctctggctttttcagtaaacataactattttaaggttaatccattatcttgttgcatgaatcaattgtttgctcatttgtattgctgcgtagtatttcagtatttcattgtataccacaatttttcttctttgtcaacttaattgttatggatgtttgggtaactttcagtttttggctattacaaataaacctctgaagatttgtgtgcaaa

SEQ ID NO: 23615 - DNA, 1424 bp, Homo sapiens
  misc_feature 1..1424: note = ENST00000513929
  source 1..1424: mol_type = unassigned DNA
tcgaagcttctctggtttcgcattacatttcccagagggccttggggcacagtccaatgaggagcgagccgggtggccggctgaggggcgtgcttcatgctcgcgggatttttaaaaatggtttctcctggatcttatcccaactgcgcctgagaccttgtttcacctcctgatgtgctgggtgtggttaggcctcgagccgggagctatttgcctcccaggaggaagccagggcagggttccgcggggaatggcggtgagggagccactcgggacgcggaggccctaaaatgaagaagcttcggcctgaggcttcgggagcggcgagcagggaagtgggagtgtgtgtgagtgtgtgtgtgtgtgtgtgtgtgtgtgtgtgaataagccagaggctgcctggtggggccccgccgtggcccagtgactgagataattgtcttcgtctgtggggtaatgcgaacaagccccgttcccctaagccgtgatgcatgcggggttgacgcggccgggctctgtccccataaactgtgacacaggtgtgtgtagacgtctatgagggccatagcgccgggctgtaagggcatctgtaggggtgacgcagccgggctgtgtctctgcacctccgttctgtgcgaggtcaatgctggtggggtctgcagaggtggcacggccaggacgggtctccgtgtctctgaaatgtgcctttgcacttctgtcaggttgacagggacaggcagtgtccctctggtgtgagcgtctgtgggtgtgaaagggccagcgagtgtgcggctgtgactggtcgggatcgggcctgggtgcatggccttttgagtgagcacaggtgtgtgcgaccatgtcacctgtctttctagtgtctccgttgcttcctgtgccttggccttccagccatgtggtacctgctagggagcagtggtcccaaagtgacgtgagaggctctacgctattgtgaaaatgaccaagaagaaggcttcacaagtcacgagatggcagttttggagccagaagtgctctccgtgcacactacctggacgacaagaggaagtaacctcaagaatagaattccttttggggaagaaagagctggccttcaggaaaagcatcccggaggaggaagaagaagtgttatatgtcctaaagtaaggtttcaggctggagtgcaatggcatgatctcagctcactggaacctctgcgtcctgggttgcagcgattctcctgcctcagcctcccaagtagctggaattataggcacccaccaccatgcctggctaatttttgtatttttagtagagacggggtttcatcatgttggccaggctggtctcaaactcctgatttcaagttatctgcccgcctcagcctcccaaagtcctgggattacaggtgtgagccaccatgccct

SEQ ID NO: 23616 - DNA, 5042 bp, Homo sapiens
  misc_feature 1..5042: note = ENST00000253144
  source 1..5042: mol_type = unassigned DNA
ggggcacagtccaatgaggagcgagccgggtggccggctgaggggcgtgcttcatgctcgcgggatttttaaaaatggtttctcctggatcttatcccaactgcgcctgagaccttgtttcacctcctgatgtgctgggtgtggttaggcctcgagccgggagctatttgcctcccaggaggaagccagggcagggttccgcggggaatggcggtgagggagccactcgggacgcggaggccctaaaatgaagaagcttcggcctgaggcttcgggagcggcgagcagggaagtgggagtgtgtgtgagtgtgtgtgtgtgtgtgtgtgtgtgtgtgtgaataagccagaggctgcctggtggggccccgccgtggcccagtgactgagataattgtcttcgtctgtggggtaatgcgaacaagccccgttcccctaagccgtgatgcatgcggggttgacgcggccgggctctgtccccataaactgtgacacaggtgtgtgtagacgtctatgagggccatagcgccgggctgtaagggcatctgtaggggtgacgcagccgggctgtgtctctgcacctccgttctgtgcgaggtcaatgctggtggggtctgcagaggtggcacggccaggacgggtctccgtgtctctgaaatgtgcctttgcacttctgtcaggttgacagggacaggcagtgtccctctggtgtgagcgtctgtgggtgtgaaagggccagcgagtgtgcggctgtgactggtcgggatcgggcctgggtgcatggccttttgagtgagcacaggtgtgtgcgaccatgtcacctgtctttctagtgtctccgttgcttcctgtgccttggccttccagccatgtggtacctgctagggagcagtggtcccaaagtgacgtgagaggctctacgctattgtgaaaatgaccaagaagaaggcttcacaagtcacgagatggcagttttggagccagaagtgctctccgtgcacactacctggacgacaagaggaagtaacctcaagaatagaattccttttggggaagaaagagctggccttcaggaaaagcatcccggaggaggaagaagaagtgttatatgtcctaaagtaaggtttcaggccagcatccttcagaaaaagcatccccgaggaggaagacgaatcgttaaacatctgaaagggtcaggccagcatccttcagaaaaagcatccccgaggaggaagacgaatcgttaaacatcttaggtcagctctagcctctcggaatttgtcttcttcagtggaaaccccgagaagactgatcagttcttcagttctaaaacaatggcccagggtttggtgacgttcgccgacgtagccatagacttttctcaggaggagtgggcctgtctgaactctgctcagagggacctgtactgggacgtgatgctggagaactacagtaacttggtctcactggatttggagtcagcatatgaaaataagagtttacctacagaaaaaaacattcatgaaataagggcttccaaaaggaattcagatagaagaagtaaatcccttggccgtaactggatatgtgaaggtacgcttgaaagaccacagcgctccagagggaggtatgtcaatcagatgatcatcaattatgtcaaaagacctgctactagagaaggcacccctcctagaacacatcagagacatcataaggagaattcctttgaatgtaaggactgtgggaaggcctttagtcgtggctatcaacttagtcaacatcagaaaatccatactggtgagaaaccttatgaatgtaaagaatgtaagaaggccttccgttggggcaatcagcttactcaacatcaaaaaattcatactggggagaagccctacgaatgtaaagactgtgggaaggcttttcgatggggctcaagcctcgttattcataagaggattcatactggtgaaaaaccctatgaatgtaaagactgtggaaaggcctttcggcgtggtgatgagctcactcagcaccagagattccacactggggagaaagactacgaatgcaaagactgtgggaagacctttagccgtgtgtataaacttattcagcacaagagaattcatagtggggagaagccttacgagtgtaaagactgtgggaaggcttttatttgtggttcaagcctcattcagcataaaagaattcacacaggtgagaaaccctatgaatgtcaagaatgtgggaaggcctttactcgagtcaattaccttactcagcatcagaagatccacaccggtgagaagcctcacgaatgtaaggagtgtgggaaggcctttcgctggggttcgagcctcgttaagcacgagaggatacatacgggcgagaagccgtacaagtgcacagaatgtgggaaggccttcaattgtggctatcacctcactcagcacgagagaatccacacaggcgaaaccccgtataaatgtaaggagtgtgggaaggctttcatttatggatcgagcctcgtgaaacatgagagaattcataccggggtgaaaccctatgggtgtacagaatgtgggaagagctttagtcacggccatcagcttacacaacatcagaaaacgcacagtggggcgaaatcctacgaatgtaaggagtgcgggaaggcatgtaaccacctaaaccatctccgagaacatcagaggatccacaacagttgaagagccttttgaacgcagtagcccgctcgtatctatggtttcgctttccacagtttgttacctgcagtcaactgcagttcaaaaatattaaatggaaaattccagaaataaagaattttaagtctcaaatggtgtgcccttctgagtagcgtgatgaaatctctcgctgtccggctccagccggccggggatgtgagtcatcccttggtccagcacatccacgctgtatacgccacccaccctgctagtgacttagtagccgtcttggtgatcagatcaactatcccagcatcacagtgcctgtgcccaagcagtcctcactttgcttaacagtggccccagagagcaggagtagtgatgctggtgattcggatatgccaaagagaagccacaaagtgcttccttttaaatgaaaaggtgaaagttctcaacttaaaaaagaaaagaaaaaaatcatatactgaggttgctaagatctacatgacaataagatattttgggagagagatacgttcacataattttattacatatattgttacaattgttctattttgttagttactgttggtaatctcttactgtgcctaatttataaattaaactttagatatgtatgtacaggaaaaaatgtagtatatagtatcgtatatatgtacaggaaaaaaacgtactatctgtggtttcaggtgtccactgcgggtcttcaaacgtacccccctcaggtgagaggggactgctgtacaaagaatataggaaggcctctagactacatccattccttcctcaacaggaggaaaattcctggtacagtttaacgtaaggcttcactgatcactgttgtttttgtttttgtttttgtttttttgagacagagtctcactcttgcccaggctggagtgcagtggcacggtcttggctcactgcaacctccacctcccaggttccagcaattctcctgcctcagcctccccagtagctgggattacagacatgcaccaccacacctggctaatttttgtatttttagtagagacagttttcaccatgttgtccaggctggtctcaactcctgacctcaggtgatccacccaccttgccctcccaaagtgctaggattacaggcgtgagccactgcacctagcccactgatcactcttctgcttacagaatatcagaagtcattctagaggcaaatttgaagagtggaaaaatcactttttctgaatgatcttgtttttggtgtagatgtttttattgtgtgggttagtttaatgaatacataaagactaccagtaccattctgtctttactccgtggcatctgtggaataaccctgctaatgtaacacgtgagaaagcctttggtcatgccacccactctaccagttgtccccaccatcccccgccctcctccctgtgagacactgggccaaaggctcactacccctgtgcgttgtccagcacacagacactatgtgcattatttgtacataaggataatcacatctacctgagactgctatcatggaaattaaatgtttggtacatgtaaagtctttgaaagtgtaactggaatattgtgtaattttaataaataataactattgttgtttttatgatcattactaccatttgtgttgccattagtgaatttttacaagaaaactccctgtgggtgcaatgagtctggaaaagaccattgagtcttctagaagaaaacattaagagattattggcacagccgtgggttacgcaatgatttcttagtacacaaaacacagcaaacataaaaagttgttacacttcatcaaaagtacaaagttctgttcatcaaatgatgctgttaagatagggaaaagacaagaaacaggactggaagaagatgtttgctctaaggtacacctgacaaaggaactctcatagaaaatataaagaatccctcaagttgaaaaaaaaatcaatttaaaggggagaaaacttcagcacgtctcaacagaagaccaccaaatggccaataagtaagtgaaaatgtattcaatgtcattgctcctcaaggaactgtagagtaaaaccacaatgtgctgtcactctagacagtcaccaggatgattaaatttaaatcacaataacaaggctgatttcagatgtctcaccacaaagaaggaggataagggagcgaggtgatggatatgttaattagcttgatttaatccttccacattgtatacatgtatcagaacatcacattgtactccatcaatataatacaattattatttgtcaatcaaatattaataaaatcaaagatgagcagg

SEQ ID NO: 23617 - DNA, 670 bp, Homo sapiens
  misc_feature 1..670: note = ENST00000502248
  source 1..670: mol_type = unassigned DNA
gtcacctgtctttctagtgtctccgttgcttcctgtgccttggccttccagccatgtggtacctgctagggagcagtggtcccaaagtgacgtgagaggctctacgctattgtgaaaatgaccaagaagaaggcttcacaagtcacgagatggcagttttggagccagaagtgctctccgtgcacactacctggacgacaagaggaagtaacctcaagaatagaattccttttggggaagaaagaggccagcatccttcagaaaaagcatccccgaggaggaagacgaatcgttaaacatctgaaagggtcaggccagcatccttcagaaaaagcatccccgaggaggaagacgaatcgttaaacatcttaggtcagctttaccagtgaggaaaccgacactgtgagctctagcctctcggaatttgtcttcttcagtggaaaccccgagaagactgatcagttcttcagttctaaaacaatggcccagggtttggtgacgttcgccgacgtagccatagacttttctcaggaggagtgggcctgtctgaactctgctcagagggacctgtactgggacgtgatgctggagaactacagtaacttggtctcactggatttggagtcagcatatgaaaataagagtttacctacagaaaaaaacattcatg

SEQ ID NO: 23618 - DNA, 1985 bp, Homo sapiens
  misc_feature 1..1985: note = ENST00000511593
  source 1..1985: mol_type = unassigned DNA
tgtctccgttgcttcctgtgccttggccttccagccatgtggtacctgctagggagcagtggtcccaaagtgacgtgagaggctctacgctattgtgaaaatgaccaagaagaaggcttcacaagtcacgagatggcagttttggagccagaagtgctctccgtgcacactacctggacgacaagaggaagtaacctcaagaatagaattccttttggggaagaaagagctggccttcaggaaaagcatcccggaggaggaagaagaagtgttatatgtcctaaagtaaggtttcaggccagcatccttcagaaaaagcatccccgaggaggaagacgaatcgttaaacatcttaggtcagctttaccagtgaggaaaccgacactgtgagctctagcctctcggaatttgtcttcttcagtggaaaccccgagaagactgatcagttcttcagttctaaaacaatggcccagggtttggtgacgttcgccgacgtagccatagacttttctcaggaggagtgggcctgtctgaactctgctcagagggacctgtactgggacgtgatgctggagaactacagtaacttggtctcactggatttggagtcagcatatgaaaataagagtttacctacagaaaaaaacattcatgaaataagggcttccaaaaggaattcagatagaagaagtaaatcccttggccgtaactggatatgtgaaggtacgcttgaaagaccacagcgctccagagggaggtatgtcaatcagatgatcatcaattatgtcaaaagacctgctactagagaaggcacccctcctagaacacatcagagacatcataaggagaattcctttgaatgtaaggactgtgggaaggcctttagtcgtggctatcaacttagtcaacatcagaaaatccatactggtgagaaaccttatgaatgtaaagaatgtaagaaggccttccgttggggcaatcagcttactcaacatcaaaaaattcatactggggagaagccctacgaatgtaaagactgtgggaaggcttttcgatggggctcaagcctcgttattcataagaggattcatactggtgaaaaaccctatgaatgtaaagactgtggaaaggcctttcggcgtggtgatgagctcactcagcaccagagattccacactggggagaaagactacgaatgcaaagactgtgggaagacctttagccgtgtgtataaacttattcagcacaagagaattcatagtggggagaagccttacgagtgtaaagactgtgggaaggcttttatttgtggttcaagcctcattcagcataaaagaattcacacaggtgagaaaccctatgaatgtcaagaatgtgggaaggcctttactcgagtcaattaccttactcagcatcagaagatccacaccggtgagaagcctcacgaatgtaaggagtgtgggaaggcctttcgctggggttcgagcctcgttaagcacgagaggatacatacgggcgagaagccgtacaagtgcacagaatgtgggaaggccttcaattgtggctatcacctcactcagcacgagagaatccacacaggcgaaaccccgtataaatgtaaggagtgtgggaaggctttcatttatggatcgagcctcgtgaaacatgagagaattcataccggggtgaaaccctatgggtgtacagaatgtgggaagagctttagtcacggccatcagcttacacaacatcagaaaacgcacagtggggcgaaatcctacgaatgtaaggagtgcgggaaggcatgtaaccacctaaaccatctccgagaacatcagaggatccacaacagttgaagagccttttgaacgcagtagcccgctcgtatctatggtttcgctttccacagtttgttacctgcagtcaactgcagttcaaaaatattaaatggaaaattccagaaataaagaattttaagtctcaaa

SEQ ID NO: 23619 - DNA, 578 bp, Homo sapiens
  misc_feature 1..578: note = ENST00000504033
  source 1..578: mol_type = unassigned DNA
tgacgttagtacttggaatgagagcgggactcacggggcataactgctacctgtacattgtttacaatgcagcaagcaagggacaccgaatagcagctccggcagcctgtgctagcggcctgcagagaattccaggtgacgctccagaggggctaggagaggatacccttctgaggacagccatggctcgcccggcatcaccccactcaagaggccagacggggtcccagctggggtgacacagctcctttcccagtcgggaaggggcgtctgcagggaccaggaagggcttagcttggggctgcccgctccggcaccgacctgggacgcgccctgaggcccctgcctgggaccgtcccggactacatttcccagagaccatccaggagtacgccgtgctgcatgctggaacacggggcttggggctctggtttcccccgacggccccgcgtcctcttctagcctcaccctctcccgaggccccagcgttgggggactaccgggccagcatccttcagaaaaagcatccccgaggaggaagacgaatcgttaaacatctgaaagggtcaggccagcat

SEQ ID NO: 23620 - DNA, 574 bp, Homo sapiens
  misc_feature 1..574: note = ENST00000514374
  source 1..574: mol_type = unassigned DNA
ttcccccgacggccccgcgtcctcttctagcctcaccctctcccgaggccccagcgttgggggactaccgggccagcatccttcagaaaaagcatccccgaggaggaagacgaatcgttaaacatctgaaagggtcaggccagcatccttcagaaaaagcatccccgaggaggaagacgaatcgttaaacatcttaggtcagctctagcctctcggaatttgtcttcttcagtggaaaccccgagaagactgatcagttcttcagttctaaaacaatggcccagggtttggtgacgttcgccgacgtagccatagacttttctcaggaggagtgggcctgtctgaactctgctcagagggacctgtactgggacgtgatgctggagaactacagtaacttggtctcactggatttggagtcagcatatgaaaataagagtttacctacagaaaaaaacattcatgaaataagggcttccaaaaggaattcagatagaagaagtaaatcccttggccgtaactggatatgtgaaggtacgcttgaaagaccacagcgctccagagggaggtatgt

SEQ ID NO: 23621 - DNA, 2248 bp, Homo sapiens
  misc_feature 1..2248: note = ENST00000411977
  source 1..2248: mol_type = unassigned DNA
gcggccgctgggtgcgcgtgcgcatgcgcgctggcctccagggggtggcgggaccgagtgtgtgacgcacttgcgtgggagtacgaggctgacgcggcggccctgtccccgtaactgtgacacgggtgcacgcgagcgtcattgggggcgatgggggccgtgctgggtgcgcgtttgcaccagtgacgcagccgctgcatctccgccagtccgcgcaggccagcatccttcagaaaaagcatccccgaggaggaagacgaatcgttaaacatctgaaagggtcaggccagcatccttcagaaaaagcatccccgaggaggaagacgaatcgttaaacatcttaggtcagctctagcctctcggaatttgtcttcttcagtggaaaccccgagaagactgatcagttcttcagttctaaaacaatggcccagggtttggtgacgttcgccgacgtagccatagacttttctcaggaggagtgggcctgtctgaactctgctcagagggacctgtactgggacgtgatgctggagaactacagtaacttggtctcactggatttggagtcagcatatgaaaataagagtttacctacagaaaaaaacattcatgaaataagggcttccaaaaggaattcagatagaagaagtaaatcccttggccgtaactggatatgtgaaggtacgcttgaaagaccacagcgctccagagggaggtatgtcaatcagatgatcatcaattatgtcaaaagacctgctactagagaaggcacccctcctagaacacatcagagacatcataaggagaattcctttgaatgtaaggactgtgggaaggcctttagtcgtggctatcaacttagtcaacatcagaaaatccatactggtgagaaaccttatgaatgtaaagaatgtaagaaggccttccgttggggcaatcagcttactcaacatcaaaaaattcatactggggagaagccctacgaatgtaaagactgtgggaaggcttttcgatggggctcaagcctcgttattcataagaggattcatactggtgaaaaaccctatgaatgtaaagactgtggaaaggcctttcggcgtggtgatgagctcactcagcaccagagattccacactggggagaaagactacgaatgcaaagactgtgggaagacctttagccgtgtgtataaacttattcagcacaagagaattcatagtggggagaagccttacgagtgtaaagactgtgggaaggcttttatttgtggttcaagcctcattcagcataaaagaattcacacaggtgagaaaccctatgaatgtcaagaatgtgggaaggcctttactcgagtcaattaccttactcagcatcagaagatccacaccggtgagaagcctcacgaatgtaaggagtgtgggaaggcctttcgctggggttcgagcctcgttaagcacgagaggatacatacgggcgagaagccgtacaagtgcacagaatgtgggaaggccttcaattgtggctatcacctcactcagcacgagagaatccacacaggcgaaaccccgtataaatgtaaggagtgtgggaaggctttcatttatggatcgagcctcgtgaaacatgagagaattcataccggggtgaaaccctatgggtgtacagaatgtgggaagagctttagtcacggccatcagcttacacaacatcagaaaacgcacagtggggcgaaatcctacgaatgtaaggagtgcgggaaggcatgtaaccacctaaaccatctccgagaacatcagaggatccacaacagttgaagagccttttgaacgcagtagcccgctcgtatctatggtttcgctttccacagtttgttacctgcagtcaactgcagttcaaaaatattaaatggaaaattccagaaataaagaattttaagtctcaaatggtgtgcccttctgagtagcgtgatgaaatctctcgctgtccggctccagccggccggggatgtgagtcatcccttggtccagcacatccacgctgtatacgccacccaccctgctagtgacttagtagccgtcttggtgatcagatcaactatcccagcatcacagtgcctgtgcccaagcagtcctcactttgcttaacagtggccccagagagcaggagtagtgatgctggtgattcggatatgccaaagagaagccacaaagtgcttccttttaaatgaaaaggtgaaagttctcaactt

SEQ ID NO: 23622 - DNA, 2120 bp, Homo sapiens
  misc_feature 1..2120: note = ENST00000511154
  source 1..2120: mol_type = unassigned DNA
acgcacttgcgtgggagtacgaggctgacgcggcggccctgtccccgtaactgtgacacgggtgcacgcgagcgtcattgggggcgatgggggccgtgctgggtgcgcgtttgcaccagtgacgcagccgctgcatctccgccagtccgcgcaggccagcatccttcagaaaaagcatccccgaggaggaagacgaatcgttaaacatctgaaagggtcagctctagcctctcggaatttgtcttcttcagtggaaaccccgagaagactgatcagttcttcagttctaaaacaatggcccagggtttggtgacgttcgccgacgtagccatagacttttctcaggaggagtgggcctgtctgaactctgctcagagggacctgtactgggacgtgatgctggagaactacagtaacttggtctcactggatttggagtcagcatatgaaaataagagtttacctacagaaaaaaacattcatgaaataagggcttccaaaaggaattcagatagaagaagtaaatcccttggccgtaactggatatgtgaaggtacgcttgaaagaccacagcgctccagagggaggtatgtcaatcagatgatcatcaattatgtcaaaagacctgctactagagaaggcacccctcctagaacacatcagagacatcataaggagaattcctttgaatgtaaggactgtgggaaggcctttagtcgtggctatcaacttagtcaacatcagaaaatccatactggtgagaaaccttatgaatgtaaagaatgtaagaaggccttccgttggggcaatcagcttactcaacatcaaaaaattcatactggggagaagccctacgaatgtaaagactgtgggaaggcttttcgatggggctcaagcctcgttattcataagaggattcatactggtgaaaaaccctatgaatgtaaagactgtggaaaggcctttcggcgtggtgatgagctcactcagcaccagagattccacactggggagaaagactacgaatgcaaagactgtgggaagacctttagccgtgtgtataaacttattcagcacaagagaattcatagtggggagaagccttacgagtgtaaagactgtgggaaggcttttatttgtggttcaagcctcattcagcataaaagaattcacacaggtgagaaaccctatgaatgtcaagaatgtgggaaggcctttactcgagtcaattaccttactcagcatcagaagatccacaccggtgagaagcctcacgaatgtaaggagtgtgggaaggcctttcgctggggttcgagcctcgttaagcacgagaggatacatacgggcgagaagccgtacaagtgcacagaatgtgggaaggccttcaattgtggctatcacctcactcagcacgagagaatccacacaggcgaaaccccgtataaatgtaaggagtgtgggaaggctttcatttatggatcgagcctcgtgaaacatgagagaattcataccggggtgaaaccctatgggtgtacagaatgtgggaagagctttagtcacggccatcagcttacacaacatcagaaaacgcacagtggggcgaaatcctacgaatgtaaggagtgcgggaaggcatgtaaccacctaaaccatctccgagaacatcagaggatccacaacagttgaagagccttttgaacgcagtagcccgctcgtatctatggtttcgctttccacagtttgttacctgcagtcaactgcagttcaaaaatattaaatggaaaattccagaaataaagaattttaagtctcaaatggtgtgcccttctgagtagcgtgatgaaatctctcgctgtccggctccagccggccggggatgtgagtcatcccttggtccagcacatccacgctgtatacgccacccaccctgctagtgacttagtagccgtcttggtgatcagatcaactatcccagcatcacagtgcctgtgcccaagcagtcctcactttgcttaacagtggccccagagagcaggagtagtgatgctggtgattcggatatgccaaagagaagccacaaagtgcttccttttaaatgaaaaggtgaaagttctcaactt

SEQ ID NO: 23623 - DNA, 461 bp, Homo sapiens
  misc_feature 1..461: note = ENST00000509069
  source 1..461: mol_type = unassigned DNA
gcacttgcgtgggagtacgaggctgacgcggcggccctgtccccgtaactgtgacacgggtgcacgcgagcgtcattgggggcgatgggggccgtgctgggtgcgcgtttgcaccagtgacgcagccgctgcatctccgccagtccgcgcaggccagcatccttcagaaaaagcatccccgaggaggaagacgaatcgttaaacatctgaaagggtcaggtgagtatccttttttttttatattaaatgatatgtgtttataagacttaagaccaaacattaaaggtagatgaccaagatttgagtcctgtttctgcctcttagctttttgagccttctgaagataggcttgtgaggagggtgaaatgcattaacacgcataaaacccatagacgcgcacccctgagtgggagtgcacagtgagtgctgctgttttgtgctaagtctggatgtctgtacat

SEQ ID NO: 23624 - DNA, 670 bp, Homo sapiens
  misc_feature 1..670: note = ENST00000509047
  source 1..670: mol_type = unassigned DNA
agtccgcgcaggtgagattggtgcgcgtggctccgaggggagacgggcacggggcttctgacggtgacgcacttgctggagagtgtggggtgacacagccgggctctccccataactggtgaccgggggtgctccagaggctttgggtcaacgcagcccgtgcctgtgaacctcggcggtgcgtccctgggactctgctccgtgaggccagcatccttcagaaaaagcatccccgaggaggaagacgaatcgttaaacatctgaaagggtcaggccagcatccttcagaaaaagcatccccgaggaggaagacgaatcgttaaacatcttaggtcagctctagcctctcggaatttgtcttcttcagtggaaaccccgagaagactgatcagttcttcagttctaaaacaatggcccagggtttggtgacgttcgccgacgtagccatagacttttctcaggaggagtgggcctgtctgaactctgctcagagggacctgtactgggacgtgatgctggagaactacagtaacttggtctcactggatttggagtcagcatatgaaaataagagtttacctacagaaaaaaacattcatgaaataagggcttccaaaaggaattcagatagaagaagtaaatcccttggccgtaactggatatgtgaagg

SEQ ID NO: 23625 - DNA, 562 bp, Homo sapiens
  misc_feature 1..562: note = ENST00000509585
  source 1..562: mol_type = unassigned DNA
ggtgcgcgtggctccgaggggagacgggcacggggcttctgacggtgacgcacttgctggagagtgtggggtgacacagccgggctctccccataactggtgaccgggggtgctccagaggctttgggtcaacgcagcccgtgcctgtgaacctcggcggtgcgtccctgggactctgctccgtgaggccagcatccttcagaaaaagcatccccgaggaggaagacgaatcgttaaacatctgaaagggtcaggccagcatccttcagaaaaagcatccccgaggaggaagacgaatcgttaaacatcttaggtcagctttaccagtgaggaaaccgacactgtgagctctagcctctcggaatttgtcttcttcagtggaaaccccgagaagactgatcagttcttcagttctaaaacaatggcccagggtttggtgacgttcgccgacgtagccatagacttttctcaggaggagtgggcctgtctgaactctgctcagagggacctgtactgggacgtgatgctggagaactacagtaacttggtctcactggatttg

SEQ ID NO: 23626 - DNA, 350 bp, Homo sapiens
  misc_feature 1..350: note = ENST00000504940
  source 1..350: mol_type = unassigned DNA
gggagacgggcacggggcttctgacggtgacgcacttgctggagagtgtggggtgacacagccgggctctccccataactggtgaccgggggtgctccagaggctttgggtcaacgcagcccgtgcctgtgaacctcggcggtgcgtccctgggactctgctccgtgaggtatggcaggtgttacccttccggttctgttttccccaggccagcatccttcagaaaaagcatccccgaggaggaagacgaatcgttaaacatctgaaagggtcaggtgagtatccttttttttttatattaaatgatatgtgtttataagacttaagaccaaacattaaaggtagatgac

SEQ ID NO: 23627 - DNA, 1890 bp, Homo sapiens
  misc_feature 1..1890: note = ENST00000513999
  source 1..1890: mol_type = unassigned DNA
aggtgtgtgtgacagtgcaacttgtagctccagcgtctctgctgcttcccctgccttcacctcctaaccaagcggtacctgcctgagaacaagggccgcggagggacgtgagcgcctgagcctcgcctggaaattcaccagcaagaaggcagaaacagccatgaggccagcatccttcagaaaaagcatccccgaggaggaagacgaatcgttaaacatctgaaagggtcaggccagcatccttcagaaaaagcatccccgaggaggaagacgaatcgttaaacatcttaggtcagctctagcctctcggaatttgtcttcttcagtggaaaccccgagaagactgatcagttcttcagttctaaaacaatggcccagggtttggtgacgttcgccgacgtagccatagacttttctcaggaggagtgggcctgtctgaactctgctcagagggacctgtactgggacgtgatgctggagaactacagtaacttggtctcactggatttggagtcagcatatgaaaataagagtttacctacagaaaaaaacattcatgaaataagggcttccaaaaggaattcagatagaagaagtaaatcccttggccgtaactggatatgtgaaggtacgcttgaaagaccacagcgctccagagggaggtatgtcaatcagatgatcatcaattatgtcaaaagacctgctactagagaaggcacccctcctagaacacatcagagacatcataaggagaattcctttgaatgtaaggactgtgggaaggcctttagtcgtggctatcaacttagtcaacatcagaaaatccatactggtgagaaaccttatgaatgtaaagaatgtaagaaggccttccgttggggcaatcagcttactcaacatcaaaaaattcatactggggagaagccctacgaatgtaaagactgtgggaaggcttttcgatggggctcaagcctcgttattcataagaggattcatactggtgaaaaaccctatgaatgtaaagactgtggaaaggcctttcggcgtggtgatgagctcactcagcaccagagattccacactggggagaaagactacgaatgcaaagactgtgggaagacctttagccgtgtgtataaacttattcagcacaagagaattcatagtggggagaagccttacgagtgtaaagactgtgggaaggcttttatttgtggttcaagcctcattcagcataaaagaattcacacaggtgagaaaccctatgaatgtcaagaatgtgggaaggcctttactcgagtcaattaccttactcagcatcagaagatccacaccggtgagaagcctcacgaatgtaaggagtgtgggaaggcctttcgctggggttcgagcctcgttaagcacgagaggatacatacgggcgagaagccgtacaagtgcacagaatgtgggaaggccttcaattgtggctatcacctcactcagcacgagagaatccacacaggcgaaaccccgtataaatgtaaggagtgtgggaaggctttcatttatggatcgagcctcgtgaaacatgagagaattcataccggggtgaaaccctatgggtgtacagaatgtgggaagagctttagtcacggccatcagcttacacaacatcagaaaacgcacagtggggcgaaatcctacgaatgtaaggagtgcgggaaggcatgtaaccacctaaaccatctccgagaacatcagaggatccacaacagttgaagagccttttgaacgcagtagcccgctcgtatctatggtttcgctttccacagtttgttacctgcagtcaactgcagttcaaaaatattaaatggaaaattccagaaataaagaattttaagtctcaaa

SEQ ID NO: 23628 - DNA, 2130 bp, Homo sapiens
  misc_feature 1..2130: note = ENST00000512387
  source 1..2130: mol_type = unassigned DNA
gactgtgtgacgcacttgcgtgggagtgcgaggctgacgcggcggctctatctcccgtaactgtgacacgggtgcacgcaagcgtcattgggggtgatgggggccgtgctcggtgcgcttctgcaccggtgacgcaaccgctgtgtctccgccagtccgcgcaggccagcatccttcagaaaaagcatccccgaggaggaagacgaatcgttaaacatcttaggtcagctctagcctctcggaatttgtcttcttcagtggaaaccccgagaagactgatcagttcttcagttctaaaacaatggcccagggtttggtgacgttcgccgacgtagccatagacttttctcaggaggagtgggcctgtctgaactctgctcagagggacctgtactgggacgtgatgctggagaactacagtaacttggtctcactggatttggagtcagcatatgaaaataagagtttacctacagaaaaaaacattcatgaaataagggcttccaaaaggaattcagatagaagaagtaaatcccttggccgtaactggatatgtgaaggtacgcttgaaagaccacagcgctccagagggaggtatgtcaatcagatgatcatcaattatgtcaaaagacctgctactagagaaggcacccctcctagaacacatcagagacatcataaggagaattcctttgaatgtaaggactgtgggaaggcctttagtcgtggctatcaacttagtcaacatcagaaaatccatactggtgagaaaccttatgaatgtaaagaatgtaagaaggccttccgttggggcaatcagcttactcaacatcaaaaaattcatactggggagaagccctacgaatgtaaagactgtgggaaggcttttcgatggggctcaagcctcgttattcataagaggattcatactggtgaaaaaccctatgaatgtaaagactgtggaaaggcctttcggcgtggtgatgagctcactcagcaccagagattccacactggggagaaagactacgaatgcaaagactgtgggaagacctttagccgtgtgtataaacttattcagcacaagagaattcatagtggggagaagccttacgagtgtaaagactgtgggaaggcttttatttgtggttcaagcctcattcagcataaaagaattcacacaggtgagaaaccctatgaatgtcaagaatgtgggaaggcctttactcgagtcaattaccttactcagcatcagaagatccacaccggtgagaagcctcacgaatgtaaggagtgtgggaaggcctttcgctggggttcgagcctcgttaagcacgagaggatacatacgggcgagaagccgtacaagtgcacagaatgtgggaaggccttcaattgtggctatcacctcactcagcacgagagaatccacacaggcgaaaccccgtataaatgtaaggagtgtgggaaggctttcatttatggatcgagcctcgtgaaacatgagagaattcataccggggtgaaaccctatgggtgtacagaatgtgggaagagctttagtcacggccatcagcttacacaacatcagaaaacgcacagtggggcgaaatcctacgaatgtaaggagtgcgggaaggcatgtaaccacctaaaccatctccgagaacatcagaggatccacaacagttgaagagccttttgaacgcagtagcccgctcgtatctatggtttcgctttccacagtttgttacctgcagtcaactgcagttcaaaaatattaaatggaaaattccagaaataaagaattttaagtctcaaatggtgtgcccttctgagtagcgtgatgaaatctctcgctgtccggctccagccggccggggatgtgagtcatcccttggtccagcacatccacgctgtatacgccacccaccctgctagtgacttagtagccgtcttggtgatcagatcaactatcccagcatcacagtgcctgtgcccaagcagtcctcactttgcttaacagtggccccagagagcaggagtagtgatgctggtgattcggatatgccaaagagaagccacaaagtgcttccttttaaatgaaaaggtgaaagttctcaacttaaa

SEQ ID NO: 23629 - DNA, 540 bp, Homo sapiens
  misc_feature 1..540: note = ENST00000511567
  source 1..540: mol_type = unassigned DNA
gtgcacgcaagcgtcattgggggtgatgggggccgtgctcggtgcgcttctgcaccggtgacgcaaccgctgtgtctccgccagtccgcgcaggccagcatccttcagaaaaagcatccccgaggaggaagacgaatcgttaaacatcttagctctagcctctcggaatttgtcttcttcagtggaaaccccgagaagactgatcagttcttcagttctaaaacaatggcccagggtttggtgacgttcgccgacgtagccatagacttttctcaggaggagtgggcctgtctgaactctgctcagagggacctgtactgggacgtgatgctggagaactacagtaacttggtctcactggatttggagtcagcatatgaaaataagagtttacctacagaaaaaaacattcatgaaataagggcttccaaaaggaattcagatagaagaagtaaatcccttggccgtaactggatatgtgaaggtacgcttgaaagaccacagcgctccagagggaggtatgtcaatcagatgatcatc

SEQ ID NO: 23630 - DNA, 913 bp, Homo sapiens
  misc_feature 1..913: note = ENST00000514022
  source 1..913: mol_type = unassigned DNA
gtcattgggggtgatgggggccgtgctcggtgcgcttctgcaccggtgacgcaaccgctgtgtctccgccagtccgcgcaggtgagattggcgcccatggctccaaggggagacgggcacggagcttctagcggtgacgcacttgctggagagggtgtggggtgacgcagccgggctctccccataactagggctggggtgctcccgaggctttggggcgacggaacccgcacctgtgaacctcggcagtgcgtccccgggactctgttctgtgaggccagcatccttcagaaaaagcatccccgaggaggaagacgaatcgttaaacatcttaggtcagctctagcctctcggaatttgtcttcttcagtggaaaccccgagaagactgatcagttcttcagttctaaaacaatggcccagggtttggtgacgttcgccgacgtagccatagacttttctcaggaggagtgggcctgtctgaactctgctcagagggacctgtactgggacgtgatgctggagaactacagtaacttggtctcactggatttggagtcagcatatgaaaataagagtttacctacagaaaaaaacattcatgaaataagggcttccaaaaggaattcagatagaagaagtaaatcccttggccgtaactggatatgtgaaggtacgcttgaaagaccacagcgctccagagggaggtatgtcaatcagatgatcatcaattatgtcaaaagacctgctactagagaaggcacccctcctagaacacatcagagacatcataaggagaattcctttgaatgtaaggactgtgggaaggcctttagtcgtggctatcaacttagtcaacatcagaaaatccatactggtgagaaaccttatgaatgtaaagaatgtaagaaggc

SEQ ID NO: 23631 - DNA, 761 bp, Homo sapiens
  misc_feature 1..761: note = ENST00000505949
  source 1..761: mol_type = unassigned DNA
ggggcgacggaacccgcacctgtgaacctcggcagtgcgtccccgggactctgttctgtgaggccagcatccttcagaaaaagcatccccgaggaggaagacgaatcgttaaacatcttaggtcagctttaccagtgaggaaaccgacactgtgagctctagcctctcggaatttgtcttcttcagtggaaaccccgagaagactgatcagttcttcagttctaaaacaatggcccagggtttggtgacgttcgccgacgtagccatagacttttctcaggaggagtgggcctgtctgaactctgctcagagggacctgtactgggacgtgatgctggagaactacagtaacttggtctcactggatttggagtcagcatatgaaaataagagtttacctacagaaaaaaacattcatgaaataagggcttccaaaaggaattcagatagaagaagtaaatcccttggccgtaactggatatgtgaaggtacgcttgaaagaccacagcgctccagagggaggtatgtcaatcagatgatcatcaattatgtcaaaagacctgctactagagaaggcacccctcctagaacacatcagagacatcataaggagaattcctttgaatgtaaggactgtgggaaggcctttagtcgtggctatcaacttagtcaacatcagaaaatccatactggtgagaaaccttatgaatgtaaagaatgtaagaaggccttccgttggggcaatcagcttactcaacatc

SEQ ID NO: 23632 - DNA, 739 bp, Homo sapiens
  misc_feature 1..739: note = ENST00000513265
  source 1..739: mol_type = unassigned DNA
ggggcgacggaacccgcacctgtgaacctcggcagtgcgtccccgggactctgttctgtgaggccagcatccttcagaaaaagcatccccgaggaggaagacgaatcgttaaacatcttaggtcagctctagcctctcggaatttgtcttcttcagtggaaaccccgagaagactgatcagttcttcagttctaaaacaatggcccagggtttggtgacgttcgccgacgtagccatagacttttctcaggaggagtgggcctgtctgaactctgctcagagggacctgtactgggacgtgatgctggagaactacagtaacttggtctcactggatttggagtcagcatatgaaaataagagtttacctacagaaaaaaacattcatgaaataagggcttccaaaaggaattcagatagaagaagtaaatcccttggccgtaactggatatgtgaaggtacgcttgaaagaccacagcgctccagagggaggtgagaaaccctatgaatgtcaagaatgtgggaaggcctttactcgagtcaattaccttactcagcatcagaagatccacaccggtgagaagcctcacgaatgtaaggagtgtgggaaggcctttcgctggggttcgagcctcgttaagcacgagaggatacatacgggcgagaagccgtacaagtgcacagaatgtgggaaggccttcaattgtggctatcacctcactcagcacgagagaatcca

SEQ ID NO: 23633 - DNA, 573 bp, Homo sapiens
  misc_feature 1..573: note = ENST00000502616
  source 1..573: mol_type = unassigned DNA
ggtgatcgggccttctgggtgacgcaggtgtgtgtgacagcacaacctgtagttccagcgtctctgtgctgagatgggtgatcgggccttctgggtgacgcaggtgtgtgtgacaacacaacctgtagctccagcttctctgtgctgggatggatgatcgggccttctgggtgacgcaggccagcatccttcagaaaaagcatccccgaggaggaagacgaatcgttaaacatcttaggtcagctctagcctctcggaatttgtcttcttcagtggaaaccccgagaagactgatcagttcttcagttctaaaacaatggcccagggtttggtgacgttcgccgacgtagccatagacttttctcaggaggagtgggcctgtctgaactctgctcagagggacctgtactgggacgtgatgctggagaactacagtaacttggtctcactggatttggagtcagcatatgaaaataagagtttacctacagaaaaaaacattcatgaaataagggcttccaaaaggaattcagatagaagaagtaaatcccttggccgtaactggatatgtga

SEQ ID NO: 23634 - DNA, 641 bp, Homo sapiens
  misc_feature 1..641: note = ENST00000504493
  source 1..641: mol_type = unassigned DNA
gctgagatgggtgatcgggccttctgggtgacgcaggtgtgtgtgacaacacaacctgtagctccagcttctctgtgctgggatggatgatcgggccttctgggtgacgcaggtgtgtgtgacagcacaacctgtagctccagcgtctctgctgcttcccctgccttcacctcctaaccaagcggtacctgcctgagaacaagggccgcggaaggacgggagtgcctgagccctgccaggaaattcaccaacaagaaggcagaaacagccatgaggccagcatccttcagaaaaagcatccccgaggaggaagacgaatcgttaaacatcttaggtcagctttaccagtgaggaaaccgacactgtgagctctagcctctcggaatttgtcttcttcagtggaaaccccgagaagactgatcagttcttcagttctaaaacaatggcccagggtttggtgacgttcgccgacgtagccatagacttttctcaggaggagtgggcctgtctgaactctgctcagagggacctgtactgggacgtgatgctggagaactacagtaacttggtctcactggatttggagtcagcatatgaaaataagagtttacctacagaaaaaaacattcatgaaataaggg

SEQ ID NO: 23635 - DNA, 688 bp, Homo sapiens
  misc_feature 1..688: note = ENST00000505426
  source 1..688: mol_type = unassigned DNA
agcggtacctgcctgagaacaagggccgcggaaggacgggagtgcctgagccctgccaggaaattcaccaacaagaaggcagaaacagccatgaggtgacgctttcagagctagaagtgctctccactcagggcgcctgagtgacaggagacggtggcctcaggagtagaattcctcctgtagagggacacgtccctgatgtgggagacagggagaggggcagctccacgcttcatcatctcagttaccacagcgtgctcttcaggaatctcccagaaactccatctcggggcctcgtatttctcattggttttattaggtatggcaggtgttacccttctggttctgttttccccaggccagcatccttcagaaaaagcatccccgaggaggaagacgaatcgttaaacatcttaggtcagctctagcctctcggaatttgtcttcttcagtggaaaccccgagaagactgatcagttcttcagttctaaaacaatggcccagggtttggtgacgttcgccgacgtagccatagacttttctcaggaggagtgggcctgtctgaactctgctcagagggacctgtactgggacgtgatgctggagaactacagtaacttggtctcactggatttggagtcagcatatgaaaataagagtttacctacagaaaaaaacattcatgaaa

SEQ ID NO: 23636 - DNA, 3817 bp, Homo sapiens
  misc_feature 1..3817: note = ENST00000449416
  source 1..3817: mol_type = unassigned DNA
gttttaccagtgaggaaactttaccacactgtgaactctagcctctcggaatttgtcttcttcagtggaaaccccgagaagactgatcagttcttcagttctaaaacaatggcccagggtttggtgacgttcgccgacgtagccatagacttttctcaggaggagtgggcctgtctgaactctgctcagagggacctgtactgggacgtgatgctggagaactacagtaacttggtctcactggatttggagtcagcatatgaaaataagagtttacctacagaaaaaaacattcatgaaataagggcttccaaaaggaattcagatagaagaagtaaatcccttggccgtaactggatatgtgaaggtacgcttgaaagaccacagcgctccagagggaggtatgtcaatcagatgatcatcaattatgtcaaaagacctgctactagagaaggcacccctcctagaacacatcagagacatcataaggagaattcctttgaatgtaaggactgtgggaaggcctttagtcgtggctatcaacttagtcaacatcagaaaatccatactggtgagaaaccttatgaatgtaaagaatgtaagaaggccttccgttggggcaatcagcttactcaacatcaaaaaattcatactggggagaagccctacgaatgtaaagactgtgggaaggcttttcgatggggctcaagcctcgttattcataagaggattcatactggtgaaaaaccctatgaatgtaaagactgtggaaaggcctttcggcgtggtgatgagctcactcagcaccagagattccacactggggagaaagactacgaatgcaaagactgtgggaagacctttagccgtgtgtataaacttattcagcacaagagaattcatagtggggagaagccttacgagtgtaaagactgtgggaaggcttttatttgtggttcaagcctcattcagcataaaagaattcacacaggtgagaaaccctatgaatgtcaagaatgtgggaaggcctttactcgagtcaattaccttactcagcatcagaagatccacaccggtgagaagcctcacgaatgtaaggagtgtgggaaggcctttcgctggggttcgagcctcgttaagcacgagaggatacatacgggcgagaagccgtacaagtgcacagaatgtgggaaggccttcaattgtggctatcacctcactcagcacgagagaatccacacaggcgaaaccccgtataaatgtaaggagtgtgggaaggctttcatttatggatcgagcctcgtgaaacatgagagaattcataccggggtgaaaccctatgggtgtacagaatgtgggaagagctttagtcacggccatcagcttacacaacatcagaaaacgcacagtggggcgaaatcctacgaatgtaaggagtgcgggaaggcatgtaaccacctaaaccatctccgagaacatcagaggatccacaacagttgaagagccttttgaacgcagtagcccgctcgtatctatggtttcgctttccacagtttgttacctgcagtcaactgcagttcaaaaatattaaatggaaaattccagaaataaagaattttaagtctcaaatggtgtgcccttctgagtagcgtgatgaaatctctcgctgtccggctccagccggccggggatgtgagtcatcccttggtccagcacatccacgctgtatacgccacccaccctgctagtgacttagtagccgtcttggtgatcagatcaactatcccagcatcacagtgcctgtgcccaagcagtcctcactttgcttaacagtggccccagagagcaggagtagtgatgctggtgattcggatatgccaaagagaagccacaaagtgcttccttttaaatgaaaaggtgaaagttctcaacttaaaaaagaaaagaaaaaaatcatatactgaggttgctaagatctacatgacaataagatattttgggagagagatacgttcacataattttattacatatattgttacaattgttctattttgttagttactgttggtaatctcttactgtgcctaatttataaattaaactttagatatgtatgtacaggaaaaaatgtagtatatagtatcgtatatatgtacaggaaaaaaacgtactatctgtggtttcaggtgtccactgcgggtcttcaaacgtacccccctcaggtgagaggggactgctgtacaaagaatataggaaggcctctagactacatccattccttcctcaacaggaggaaaattcctggtacagtttaacgtaaggcttcactgatcactgttgtttttgtttttgtttttgtttttttgagacagagtctcactcttgcccaggctggagtgcagtggcacggtcttggctcactgcaacctccacctcccaggttccagcaattctcctgcctcagcctccccagtagctgggattacagacatgcaccaccacacctggctaatttttgtatttttagtagagacagttttcaccatgttgtccaggctggtctcaactcctgacctcaggtgatccacccaccttgccctcccaaagtgctaggattacaggcgtgagccactgcacctagcccactgatcactcttctgcttacagaatatcagaagtcattctagaggcaaatttgaagagtggaaaaatcactttttctgaatgatcttgtttttggtgtagatgtttttattgtgtgggttagtttaatgaatacataaagactaccagtaccattctgtctttactccgtggcatctgtggaataaccctgctaatgtaacacgtgagaaagcctttggtcatgccacccactctaccagttgtccccaccatcccccgccctcctccctgtgagacactgggccaaaggctcactacccctgtgcgttgtccagcacacagacactatgtgcattatttgtacataaggataatcacatctacctgagactgctatcatggaaattaaatgtttggtacatgtaaagtctttgaaagtgtaactggaatattgtgtaattttaataaataataactattgttgtttttatgatcattactaccatttgtgttgccattagtgaatttttacaagaaaactccctgtgggtgcaatgagtctggaaaagaccattgagtcttctagaagaaaacattaagagattattggcacagccgtgggttacgcaatgatttcttagtacacaaaacacagcaaacataaaaagttgttacacttcatcaaaagtacaaagttctgttcatcaaatgatgctgttaagatagggaaaagacaagaaacaggactggaagaagatgtttgctctaaggtacacctgacaaaggaactctcatagaaaatataaagaatccctcaagttgaaaaaaaaatcaatttaaaggggagaaaacttcagcacgtctcaacagaagaccaccaaatggccaataagtaagtgaaaatgtattcaatgtcattgctcctcaaggaactgtagagtaaaaccacaatgtgctgtcactctagacagtcaccaggatgattaaatttaaatcacaataacaaggctgatttcagatgtctcaccacaaagaaggaggataagggagcgaggtgatggatatgttaattagcttgatttaatccttccacattgtatacatgtatcagaacatcacattgtactccatcaatataatacaattattatttgtcaatcaaatattaataaaatcaaagatgagcagg

SEQ ID NO: 23637 - DNA, 1851 bp, Homo sapiens
  misc_feature 1..1851: note = ENST00000587539
  source 1..1851: mol_type = unassigned DNA
atggcccgggtgccattgacattcagcgatgttgccatagacttctctcaggaggagtgggaatatttaaactcggatcagagggatttgtacagagatgtgatgttggagaattatactaacttggtctcattggactttaatttcacaactgaaagcaacaagttatcttcagaaaaaagaaattatgaagtaaatgcgtaccatcaggagacatggaaaagaaataaaaccttcaaccttatgaggtttattttcagaactgacccacagtacacaattgaatttgggagacaacagagacctaaagtgggatgttttagtcaaatgatattcaaaaaacataaatcccttcctctacataagagaaataacacaagagagaaatcatatgagtgtaaggaatataagaagggctttagaaaatatttgcaccttactgaacatctgagagaccatactggtgtgataccctatgaatgtaatgaatgtggaaaagcatttgtagttttccagcattttattagacatcgaaaaatccacactgatttgaaaccctatgaatgcaatggatgtgagaaggcctttaggttttattcacagcttattcagcatcagataattcatactggtatgaaaccctatgaatgtaagcaatgcgggaaggcttttagacgtcattctcaccttacagaacatcagaaaattcatgttggcttgaaaccctttgaatgtaaggaatgtggggaaacgtttagattatatcgacatatgtgtctgcatcagaaaattcatcatggtgtgaaaccctacaaatgtaaagaatgtggaaaggcttttggtcatcgttcaagtctttaccaacataagaaaattcattctggtgagaaaccatataaatgtgaacaatgtgaaaaggcctttgttcgcagctatctacttgttgaacatcaaagaagtcatactggtgagaaacctcatgaatgcatggaatgtggaaaggcttttggtaagggctcaagccttcttaaacataagagaattcatagtagtgagaaactctatgattgtaaggattgtggaaaggccttttgtagaggctctcaacttacacagcatcagagaattcatactggtgagaagccacatgaatgtaaagaatgtgggaagacttttaagcttcattcatatcttattcaacatcagataattcatactgatttgaagccatatgaatgtaagcaatgtgggaaagccttcagtcgtgttggagaccttaagacacatcaatcaattcatgctggggagaaaccctatgaatgtaaggaatgtggaaaaacctttagacttaattctcaactaatttatcatcagacaattcatactggtttgaaaccctatgtatgtaaagaatgtaagaaggcctttcgttctatctcaggtctttctcaacataagagaattcatactggtgaaaaaccctatgaatgtaaagaatgtgataaggcctttaatcgcagtgatcgacttactcaacatgagacaattcatactggtgtgaaaccacagaaatgcaaagaatgtggtaaggcctttagtcattgctatcaacttagtcaacatcaaagatttcaccatggtgagagactcttaatgtaatgagagggaaagcctttagccatggcacatttttactgttgtcactattatgatgctatagtgaagattaaactagttaatatagaatataaatacttggaaaggcatctggcacatcgtatttgcttactaaatacattatttttatgataattgttagaattactaaaaataaatcttatagaaggaaga

SEQ ID NO: 23638 - DNA, 631 bp, Homo sapiens
  misc_feature 1..631: note = ENST00000588094
  source 1..631: mol_type = unassigned DNA
gattcatggaggcgtgaaggatcccagcaagaaaacacagacttgatcttgagacgagatttttgaaattggttgcggcctcaaggcaggctctgagaagactcgataaagagttctcaggaataggcatccctcctggatatttcccccttggaagcgccgaggagccagctctatgtttgtaaccatagcatttctaaagctccagccccaggaacctgctgtgaattagagacagattccaccctaggcatcactgatcttggcctctcttgtattgggaaggtcaacactgttccagtttctctcctactcccatctggttgtgctcggtgaagtaggtgagcagtgctacccttctgttaaaaaaaaaaaaaaaaaaaagatcctgaaagaggaaagaatttttgctacacatctgaaagctaaagtccaggtgatgccttgattacctagctttggcttctctgaactctgcttctctgatagaggaaacctgaagagaactagcatttctgaaaccatggcccgggtgatccgcctgcctcaccctccgaaagtgctgggattacaggggtgagccatcgcacctggcctctgctgggattttgactgagattttgttgaatct

SEQ ID NO: 23639 - DNA, 1844 bp, Homo sapiens
  misc_feature 1..1844: note = ENST00000324394
  source 1..1844: mol_type = unassigned DNA
tttcaggtgccattgacattcagcgatgttgccatagacttctctcaggaggagtgggaatatttaaactcggatcagagggatttgtacagagatgtgatgttggagaattatactaacttggtctcattggactttaatttcacaactgaaagcaacaagttatcttcagaaaaaagaaattatgaagtaaatgcgtaccatcaggagacatggaaaagaaataaaaccttcaaccttatgaggtttattttcagaactgacccacagtacacaattgaatttgggagacaacagagacctaaagtgggatgttttagtcaaatgatattcaaaaaacataaatcccttcctctacataagagaaataacacaagagagaaatcatatgagtgtaaggaatataagaagggctttagaaaatatttgcaccttactgaacatctgagagaccatactggtgtgataccctatgaatgtaatgaatgtggaaaagcatttgtagttttccagcattttattagacatcgaaaaatccacactgatttgaaaccctatgaatgcaatggatgtgagaaggcctttaggttttattcacagcttattcagcatcagataattcatactggtatgaaaccctatgaatgtaagcaatgcgggaaggcttttagacgtcattctcaccttacagaacatcagaaaattcatgttggcttgaaaccctttgaatgtaaggaatgtggggaaacgtttagattatatcgacatatgtgtctgcatcagaaaattcatcatggtgtgaaaccctacaaatgtaaagaatgtggaaaggcttttggtcatcgttcaagtctttaccaacataagaaaattcattctggtgagaaaccatataaatgtgaacaatgtgaaaaggcctttgttcgcagctatctacttgttgaacatcaaagaagtcatactggtgagaaacctcatgaatgcatggaatgtggaaaggcttttggtaagggctcaagccttcttaaacataagagaattcatagtagtgagaaactctatgattgtaaggattgtggaaaggccttttgtagaggctctcaacttacacagcatcagagaattcatactggtgagaagccacatgaatgtaaagaatgtgggaagacttttaagcttcattcatatcttattcaacatcagataattcatactgatttgaagccatatgaatgtaagcaatgtgggaaagccttcagtcgtgttggagaccttaagacacatcaatcaattcatgctggggagaaaccctatgaatgtaaggaatgtggaaaaacctttagacttaattctcaactaatttatcatcagacaattcatactggtttgaaaccctatgtatgtaaagaatgtaagaaggcctttcgttctatctcaggtctttctcaacataagagaattcatactggtgaaaaaccctatgaatgtaaagaatgtgataaggcctttaatcgcagtgatcgacttactcaacatgagacaattcatactggtgtgaaaccacagaaatgcaaagaatgtggtaaggcctttagtcattgctatcaacttagtcaacatcaaagatttcaccatggtgagagactcttaatgtaatgagagggaaagcctttagccatggcacatttttactgttgtcactattatgatgctatagtgaagattaaactagttaatatagaatataaatacttggaaaggcatctggcacatcgtatttgcttactaaatacattatttttatgataattgttagaattactaaaaataaatcttatagaagg

SEQ ID NO: 23640 - DNA, 9243 bp, Homo sapiens
  misc_feature 1..9243: note = ENST00000462139
  source 1..9243: mol_type = unassigned DNA
agaattccttctcagtacagagaggccgtcattctttctgtgcgtgtaggatcatcccttgtgaggtttctgtagcttacttaatccgctgtcttcttgatgtgtgtcaaggttttcagtatttattagatcaatgcttcagtgaagcagcttttgtagactacgttgcacatgtgcaacataaacttgagaaatccctgcacggaagggtgggcatgttggtaacgtgcaacaacataaactttaggaatctctgcattgaggggcgagcacgctggtgacctctggacattgcccagcagcgcaccataggagtggtggatgtgcagcctccccagcactgaggaggaagacctgtttctccacatccttggccacccagccaggtagctgccatgtggattttgccaaacaagatagggatgaggtggatccaagagcagaaataacaaagcagtgtgtccactggcgcctggacctggggtagtcggtctcctttctgtctcttctatctgcatgtgttgctttgggctcttccctcagccccagcttccacaccacccccctcccctagtgctatggtctgaatgtttttgtgttcccctccccacagctttgacatgttgaaatgctagcccccaagctgctggcattaagaggtggggcactggggagatgatcaggttataagggcaaatccatcataaatggattagtgcccttctaaaagaggcctcagagagcagccttgccccttccaccatgtgagaacacaatgaaatgatgaccatctatggagcaaggaactgggccctcaccagaacccaactatgctggtatcagctggggacttcctagcctccagaactgtaagacatacatttatgttgtttatgagtccccagtctgcggtattttgttagagcagcccaaatggattaagacagaaaattggcaccgaacattttgggtgctactctaacaaatacaacgtggaagaagcttgggaaccgggtaatgggtagaggctagaagagttttgaagtgcaggctagaaaaagcctgtgttgccatgaacagacaattttttctttttctttttcttttttttttttttttgagatggagtcctgctctgtcacccaggcaggagtgcagtggtgcgatctctgctcactgcaacctcagcctcctgagtagcggagattacagatgtgcaccaccacacctggctaatttttgtatttttagtagagacagggttttgctattttggctagctaggctggtctggaactcctgacctcaggtgatctgccagcctcagcctcccagagtgctgggattacaagtgtgagccaccgtgcccagcccatgaacagactattacgggtgatttctagtgaggctccaaaagaaaagaggagatttgaaatcctcaaccagaatgttggtaaaaatgtgaacagtaaagctattcttatgaggtcccagatggaaatgagaaacgtgtggtgggcaatggaggaaaggccatccttcttatagtggcaaatcacttggctgaactgtgcttatgtattagtgttttgtggaaggtagaacttacgggccactgcaattggatatttggctgcagaaatatctaagcaaggttttgaaggtgcagcttgtgaaatgtgaaaagagagaagtgatttaaagatgggattgttacttaaaagggaagcagaacttaaagatcgggaatatttgtcagcctatgttggtaagagtgagccagcctgtttaggagagaagataaaggttttgccattgaaactgaggctaggagctagtccaagaaaatggaaaaatgaccccaaaggcaattcagaaatcatcagggctcttctgcccatcacaggcccagagcgcaagacccgcagcaagcaggggaccacagcagagagccccgcttcagtcacccctgaagccctagatggtggggccatcagcgaagttccagcccaagagagccttgggcttctgaaagagacagagctgccacagaggtggggccactgcagagaaccacctcaagggcaggccctcaccaggggctgccatggggcgggaccacccagggccttggggactcaactcctgcccagtgaagctgccacctgtgggtttggaaggcggggtcacctcccaacacagtgggcctggggagcacagcatcaagacaaaaaggattattctgcagattattctcaagccgtaaaccataatgtgctgtgacccataggttcaggacttgctggggacctgttactccttttctttttttctgtttcccttttttggaactggaatgtttatcctgtgcccgtctcaccactatatatgtgtgtgtgtgtgtgtgtgtgtgtgtgtgtgtctctgtgtgtgtgttttgtttttttttttttaagactgagtctcaccctgttgcccagggtggagtgcagtggcatgatctcagctcactgcagactccgcctgccgggttcaaatgattctcctgcctcagcctcccaagtagctgggattataggtgctcaccaccacgcctggctgctttttgtatttttggtagagatgaggtttaaccgtattggccaggctggtctcaaactcctgacctcaggtaatctgcctgcctcggcctcccaaggtgctgggattacaggtgtgagccactgcgccggcctcaccactatttggaaggcacataacttgtttcatttcacaggttcacagctggagagaattttgtgtcaggtagaattgtgccttgagtttcaaccgtaactgatttagatgatatttaaatgagatgttggactccggacttttgagttgatgctggaatgaattaagactttgagggttattgggatagaatgaatttgtttggcatgtgaaaaggatatgaatttgggggaaccaggggcagaatgctatggtttcagtgtttatatctccccaaaatttgtgttgaaattgtaatccccaagatgatggtattaggaagtggagacttttggggagatgatctggtaacaagggcaaagtcctcatgagtgggattagtccctcctaaaagaggccccagagaactcccttgccctctccatcatgtaaggacacagaagacacctgtcttttgaccaagaagtgggccctcaccaggcacccagcctgctggcaccttgatcttggacgtccagcctccagaactgtgaggaacagatttctgttgtatagaaactgcccgtcctacagcgttgtgttgtcacagcctcagtggactaagactgagacacctagctcgtcccggactgaggcatccctgttctcctgtgctttcagagtcgggtttctccattcaaggacatgattttatgcttctctgaagaggattggtcccttctagatcctgcccagactggcttctatggagagttcatcattggggaggattacggggtctcaatgcctccaagtaagacttaacttccccccacacctcaagaccagggaactgggcaggggagttctcacttggagtaagagtcaacttcgtcccataggatcagggaagcggggcctgcatcagatctctctgttcacccccaacctggacaggaggtcatttgcacacagcggccctacaggcagtgtgtccgattgaccatcacctgctgtctcgccacatcaggcttatcagaaccaaatagaacatgtgctgtatgtccatttctcttccatcgttcttaccgttttgtccctttatgtctgctttacacccgaaagcctcagagagacccccaagcccatagctctccctgcgtgtgctgcccccactgcccctgcactgccagctctggccttttcacttctcgcccctgatggtgccatgcccgctgggcatccctccgccttctctcttctggaccagccctggttgctgcaggatcagattactaataaacatgtaccctgcctttttctttgaacagacgacctagctgcccagccagatctctcccagggagaggagaatgagccacgcgttccagagttgcaggatctccagggcaaagaagtgccccaggtctcctacttgggtgagtaatgattccagaactgagtggacagagtagggggaagggttgctggcagccggaggtgagcccactctctggcttctctctgcggcccctaattgccttcttcatttccccagactctatgtgggtcttgcatgtcttgccttgtccctgacttttcatagaaagaatggaggatcttaattttgccaggcattggaattgtactcccttggccaaggactgggaaataataggaatgtctttctcctctgcctgtaagtaacatctggtttgtgctgacaatgcagcagcccctccaggagtgaagtcagatactcatgacaagcctagttgcagagggagtgtctcctaactgggcaccgagcgcagccctttgaggtgcctcacctgtctagtcttcccatctgcctggtacaggggtgctgtgaggacactggggtgtggggaggtgctggggctcagcagcagcagtttccagccctccttcaggctgtgtcgccagcacttgcacccatgatctccatgccatggtgcttcgaagcatctgctccttcaggaggaaatagctttgtacagaatcatcagcagctccacaccttcttcccctttgggacctagagctggcatgaagcagacaaggttttgacacaccatccccacctggaacaagcgttcagagacttggtgtggtgcagtagctcctgtaccatctctaccctgtaggctctgcacaagctgtttgtgcaggatgtgcggagtgtgcaggagcctgtggtgatgactatagaaaacccaccacagaaagtgggaataaatatggggctgggggaagtgcttgtctctggccatagagtgggtggagtagaacccggatctacgtcgattctgtctagcgtcagagctcatgtttgtggagttggcccattttgccttcaggttcattcactcagcagacacttattgagtggccaccccctgccagtccccaggacggagcccagggccgcccccagatcgtagcctggcatctattcggatagcaccctcccaggtagtgctgtaggtgcaaaacaaatcaatttttccatttcctcctctggaaagactctccaagtctccagccattccaggtagaagaaagaaggaaacgtgaggagctgcaggtgccagagttccaggcctgcccacagacggtggtgcctcaaaacacctacccagctggcggcaacccgcgatctctagagaacagcctggatgaagaagtgaccatcgagatcgttctctccagctctggggacgaggactcccagcatggcccgtactgcacagaagagctggggagccccacagagaagcagcgcagcctccccgcctcccaccggagcagcaccgaggccggaggcgaggtgcagacctccaagaagtcctacgtgtgtccgaactgtgggaaaatcttccgctggagggtcaacttcatccggcatctgcggagccgcagggagcaggagaagccgcacgagtgctcggtgtgcggggagctgttcagcgacagcgaggacctggatgggcacctagagagccacgaggcccagaagccttaccggtgtggtgcctgcgggaagagcttccgcctgaactcccacctgctctcccaccggcggatacacctgcagccggacagactccagccggtggagaagagagagcaggcggcatccgaggacgcggacaagggtcccaaagagccgctggaaaacggcaaggccaaactgagcttccagtgctgtgagtgtgggaaggccttccagcggcacgaccacctggctcggcaccgcagccactttcacctgaaggacaaagcccggcccttccagtgccggtactgcgtcaagagcttcacgcagaactatgacctcctccgccacgagcgcctgcacatgaagcgccgttccaagcaggctctgaactcctactgagcctctccgcctggggcggcctcaccctggctggtgctgccccctcaccttggtactgatcagcgcccccacccaggacataccttccccaggatagagagcacacctccctcctgtccttgctctcaggtagtgagcgttcgggtggtgccatgggagcactctccctcccccaggtaatgaaagagtggccaagtgagtgttctgtttctgctgtgccaaaaaacgggggggatgtgccatcaccaggttggacatgccaggtgttctgcgtcttagagacccttggcccatgctccccaagctcggggagtaaaactgggctatcccccgtcagggcggcaccctggtcaccagccaaacctcagtatactccctcccctccttccctgtctgaacgctaggatctgctcctgaagctccaggatgcctgcacttccactgagaagctgctggcggatgttggactagaggaaagaagaaggcagggtgggactgatgggctcagtggggagcagggccaggcacactgagccagacatgtcatgtctgagccccagattcgtggccatcaggtaggcaggagcaccccgcagatccaagatgatcaggcagcccttttgggctggcctctgtggcaggggtctgcagagctccttcttgaggtttggaaacagtcgtcatacctgttgattttcctgggggccaatcactagggatctggagctcaccaaaaacaaagcttacattttaatttgtgttgcacacctaccccataatgtctttataccccaaagatccttggtaaatgcttgtgggttggaagcggagttgtcatcgtttaaaaggcacttaagtcccttcttccaatctgtcctgtctaggaatgtggagctctgcccccagtgaggggttctcctgtctgggtgagccaagctccagaacagaaccttgcctgacaacacacttgatagatacattagcttggagtgctggtgtgtccaaacactggctggcttagaacaacaggagtgtattccctgacagttctgggaggtgcacgtccaagatcagggtgtcctcagagttggtgccttccgagagctgtgagggagaagcggcttcatgcctttgctggcagttgccattccttggtgtgtggaagcgtcacccagtctctgccttcatctccacatggcactcttgctgtgtgcgtgtctgtctccaaacctccctttgtttaaggacaccagtcatatcggattagagcccatcccaccgactccagtataacctcatctgtatccgcagcaaccgtttaccaataaggtcacattctgaggtactagaggttgggacttcaacatcggaatttgaaagggacagcattcagcccatgactccagataaacgtgaggtatgctatatcattcctaatttacagatgagtcaatacaaacttgagtgagcttgctcacaattccatcaaaggcagggttcagacccaagtttcagcatttagggcaggtgtcctctgcatggaagaatcatactcaatagccgtaaacgctgacaaattccccttcctccctgccttctgatgggggctgggcaggccagctggagctgtgtctcctgctgggattccggactgagagtgacagcaggtagtgaaacctcaagcaatttaaaacatggtattgttcctggaagactggttatgttggctagggtcagcaagagagggcatcaaggctgtagtctagcagtgatttaatctgcaagtcaaaccagacgggtattttgtattattcatatgtcacatcctaccaacagacagtaagtcaggcaaggctcctggtgctccttgtcactcacgtaattttcacatcaggaaaactctgggctgggtgcagtggctcacacctgtaatcctagcactttgggaaaccaaggtgggtggattgcctagctcagtgacaccagcctgggccacatggcaaaaccccgtctgtaccaaaaatgcaaaaaattagctgggtgtggtgttgacgtttgcggtcccagctactctggaggctgaggtgggaggattgcttgagtctgggaggcagaagttgcagtaagccgagatcatgccactgcacaagctaggtgacagaatgagactctgtctcaaaaataattaaaaagcctctgccccaaactcgttaaaagattttataaccacaactgctgtttctgtgtagatgcatctgcatgcccaggagcagtaaatgcaataaaatcatttggttatactttgaacacaaaataaacggttgaggcttttactttctaaatagtttgtctcttgtatcaacatagctggaaaagggagaaatccgatttttaaggccaagggaggggaaaattccaagtagaagccaggctctctgtacacgtttaccccacctacctgtgtgctcctacctgtgctgaggattctctctgtagctctaaggtcttgggaaggttattcaccttcctgcttcagacgtctgactcaagagaagaacactgttctacttaccagagtgtttttctgtgtaaaaccacatcatgaaggagaaagcgacaaagggaatgtgaggggctggaagccacagggaggctgtctcttgagtccccaccactgatccagagccaaccaaggcacctcaggaaatggaaggccacattgcctctggatttggaaatcctcctgggtaatgtaactgaaacccaggttgatgccatgcagcaggagcagcagggggaacgtgctctcaggagaggtcggccaaccctccagcccaacacccttcaccacagtggtggaggaggctgcacccaggagatctttgtctcccttttggccactgatacctttggccttatctgacaacagctacccctcgatccttccctcccaccccaggggctgggcagctggctggagctttgtgtccaccttgctctggaggttgagacccccatctgagcaacatcctctctctttgttcctctgatcccttggcatcgtcacaaacccacaggtgcataataaaaacttgctgagtcaatat

SEQ ID NO: 23641 - DNA, 5336 bp, Homo sapiens
  misc_feature 1..5336: note = ENST00000294753
  source 1..5336: mol_type = unassigned DNA
ggcccgcgcccggcctccgcggcgccgcctcccagcccagagcccagcgctcaggaaggtgcgggcgggggagaaagcaacaccattgtttttcaggcgcctccatttgcccccgagccgagccgtggctttccggatgatcgggagacgcggtctggacgggccgggaaaggagccgggcgcctgcggagaccccgcctcagcgagtacgcccggccgggcgggctgggaggatgaggacggctgccctggacttccgccgccacaggagggttttcggccggacgccgggagggagctccaggctgtgagctccatttgtaaaggtcttaataacaagaacagtgacttcggctccggagcttcaagatagtggcctgcttggcctgcccatctcggatctctccaggaggacccagccacccaagggtcgtcttctgctgctgacccccatcaaatcccatcatgcccacagccctgtgcccccgagtcttggctccgaaggaaagtgaggagcccaggaaaatgaggagcccacctggagagaaccctagcccccagggggagcttcccagccccgagtcctctcggcgtctcttccgccgtttccgctaccaggaggcggcgggcccccgggaggccctgcagcgcctctgggacctgtgcgggggctggctgcggcctgagaggcacaccaaggagcagattctggagctgctggtgctggagcagttcctggccatcctgccccgggagatccagagctgggtgcgggcgcaggagcctgagagcggagagcaggctgtggccgcggtggaggcactggaacgggagcccgggagaccctggcagtggctcaagcactgtgaagaccctgtggtgattgatgatggggacagccctctggaccaggagcaggagcagctgccggtagagccccacagcgaccttgcaaagaaccaggatgcccagcccataaccctggcacagtgcctggggctcccaagcagaccaccaagccagctcagcggggacccagttctgcaagatgctttccttcttcaggaagagaatgtgcgggacacacagcaggtgaccaccctccagctacccccgagtcgggtttctccattcaaggacatgattttatgcttctctgaagaggattggtcccttctagatcctgcccagactggcttctatggagagttcatcattggggaggattacggggtctcaatgcctccaaacgacctagctgcccagccagatctctcccagggagaggagaatgagccacgcgttccagagttgcaggatctccagggcaaagaagtgccccaggtctcctacttggactctccaagtctccagccattccaggtagaagaaagaaggaaacgtgaggagctgcaggtgccagagttccaggcctgcccacagacggtggtgcctcaaaacacctacccagctggcggcaacccgcgatctctagagaacagcctggatgaagaagtgaccatcgagatcgttctctccagctctggggacgaggactcccagcatggcccgtactgcacagaagagctggggagccccacagagaagcagcgcagcctccccgcctcccaccggagcagcaccgaggccggaggcgaggtgcagacctccaagaagtcctacgtgtgtccgaactgtgggaaaatcttccgctggagggtcaacttcatccggcatctgcggagccgcagggagcaggagaagccgcacgagtgctcggtgtgcggggagctgttcagcgacagcgaggacctggatgggcacctagagagccacgaggcccagaagccttaccggtgtggtgcctgcgggaagagcttccgcctgaactcccacctgctctcccaccggcggatacacctgcagccggacagactccagccggtggagaagagagagcaggcggcatccgaggacgcggacaagggtcccaaagagccgctggaaaacggcaaggccaaactgagcttccagtgctgtgagtgtgggaaggccttccagcggcacgaccacctggctcggcaccgcagccactttcacctgaaggacaaagcccggcccttccagtgccggtactgcgtcaagagcttcacgcagaactatgacctcctccgccacgagcgcctgcacatgaagcgccgttccaagcaggctctgaactcctactgagcctctccgcctggggcggcctcaccctggctggtgctgccccctcaccttggtactgatcagcgcccccacccaggacataccttccccaggatagagagcacacctccctcctgtccttgctctcaggtagtgagcgttcgggtggtgccatgggagcactctccctcccccaggtaatgaaagagtggccaagtgagtgttctgtttctgctgtgccaaaaaacgggggggatgtgccatcaccaggttggacatgccaggtgttctgcgtcttagagacccttggcccatgctccccaagctcggggagtaaaactgggctatcccccgtcagggcggcaccctggtcaccagccaaacctcagtatactccctcccctccttccctgtctgaacgctaggatctgctcctgaagctccaggatgcctgcacttccactgagaagctgctggcggatgttggactagaggaaagaagaaggcagggtgggactgatgggctcagtggggagcagggccaggcacactgagccagacatgtcatgtctgagccccagattcgtggccatcaggtaggcaggagcaccccgcagatccaagatgatcaggcagcccttttgggctggcctctgtggcaggggtctgcagagctccttcttgaggtttggaaacagtcgtcatacctgttgattttcctgggggccaatcactagggatctggagctcaccaaaaacaaagcttacattttaatttgtgttgcacacctaccccataatgtctttataccccaaagatccttggtaaatgcttgtgggttggaagcggagttgtcatcgtttaaaaggcacttaagtcccttcttccaatctgtcctgtctaggaatgtggagctctgcccccagtgaggggttctcctgtctgggtgagccaagctccagaacagaaccttgcctgacaacacacttgatagatacattagcttggagtgctggtgtgtccaaacactggctggcttagaacaacaggagtgtattccctgacagttctgggaggtgcacgtccaagatcagggtgtcctcagagttggtgccttccgagagctgtgagggagaagcggcttcatgcctttgctggcagttgccattccttggtgtgtggaagcgtcacccagtctctgccttcatctccacatggcactcttgctgtgtgcgtgtctgtctccaaacctccctttgtttaaggacaccagtcatatcggattagagcccatcccaccgactccagtataacctcatctgtatccgcagcaaccgtttaccaataaggtcacattctgaggtactagaggttgggacttcaacatcggaatttgaaagggacagcattcagcccatgactccagataaacgtgaggtatgctatatcattcctaatttacagatgagtcaatacaaacttgagtgagcttgctcacaattccatcaaaggcagggttcagacccaagtttcagcatttagggcaggtgtcctctgcatggaagaatcatactcaatagccgtaaacgctgacaaattccccttcctccctgccttctgatgggggctgggcaggccagctggagctgtgtctcctgctgggattccggactgagagtgacagcaggtagtgaaacctcaagcaatttaaaacatggtattgttcctggaagactggttatgttggctagggtcagcaagagagggcatcaaggctgtagtctagcagtgatttaatctgcaagtcaaaccagacgggtattttgtattattcatatgtcacatcctaccaacagacagtaagtcaggcaaggctcctggtgctccttgtcactcacgtaattttcacatcaggaaaactctgggctgggtgcagtggctcacacctgtaatcctagcactttgggaaaccaaggtgggtggattgcctagctcagtgacaccagcctgggccacatggcaaaaccccgtctgtaccaaaaatgcaaaaaattagctgggtgtggtgttgacgtttgcggtcccagctactctggaggctgaggtgggaggattgcttgagtctgggaggcagaagttgcagtaagccgagatcatgccactgcacaagctaggtgacagaatgagactctgtctcaaaaataattaaaaagcctctgccccaaactcgttaaaagattttataaccacaactgctgtttctgtgtagatgcatctgcatgcccaggagcagtaaatgcaataaaatcatttggttatactttgaacacaaaataaacggttgaggcttttactttctaaatagtttgtctcttgtatcaacatagctggaaaagggagaaatccgatttttaaggccaagggaggggaaaattccaagtagaagccaggctctctgtacacgtttaccccacctacctgtgtgctcctacctgtgctgaggattctctctgtagctctaaggtcttgggaaggttattcaccttcctgcttcagacgtctgactcaagagaagaacactgttctacttaccagagtgtttttctgtgtaaaaccacatcatgaaggagaaagcgacaaagggaatgtgaggggctggaagccacagggaggctgtctcttgagtccccaccactgatccagagccaaccaaggcacctcaggaaatggaaggccacattgcctctggatttggaaatcctcctgggtaatgtaactgaaacccaggttgatgccatgcagcaggagcagcagggggaacgtgctctcaggagaggtcggccaaccctccagcccaacacccttcaccacagtggtggaggaggctgcacccaggagatctttgtctcccttttggccactgatacctttggccttatctgacaacagctacccctcgatccttccctcccaccccaggggctgggcagctggctggagctttgtgtccaccttgctctggaggttgagacccccatctgagcaacatcctctctctttgttcctctgatcccttggcatcgtcacaaacccacaggtgcataataaaaacttgctgagtcaatat

SEQ ID NO: 23642 - DNA, 3857 bp, Homo sapiens
  misc_feature 1..3857: note = ENST00000461277
  source 1..3857: mol_type = unassigned DNA
caggctgtggccgcggtggaggcactggaacgggagcccgggagaccctggcagtggctcaagcactgtgaagaccctgtggtgattgatgatggggacagccctctggaccaggagcaggagcagctgccggtagagccccacagcgaccttgcaaagaaccaggatgcccagcccataaccctggcacagtgcctggggctcccaagcagaccaccaagccagctcagcggggacccagttctgcaagatgctttccttcttcaggaagagaatgtgcgggacacacagcaggtgaccaccctccagctacccccgagaatttttcaatttaataatcatcgcagcaatggttatattttagaaatgttaggaagtggagggaagaaagcacagataatttcagtcctgtcacagatctacgtgagtcgggtttctccattcaaggacatgattttatgcttctctgaagaggattggtcccttctagatcctgcccagactggcttctatggagagttcatcattggggaggattacggggtctcaatgcctccaaacgacctagctgcccagccagatctctcccagggagaggagaatgagccacgcgttccagagttgcaggatctccagggcaaagaagtgccccaggtctcctacttggactctccaagtctccagccattccaggtagaagaaagaaggaaacgtgaggagctgcaggtgccagagttccaggcctgcccacagacggtggtgcctcaaaacacctacccagctggcggcaacccgcgatctctagagaacagcctggatgaagaagtgaccatcgagatcgttctctccagctctggggacgaggactcccagcatggcccgtactgcacagaagagctggggagccccacagagaagcagcgcagcctccccgcctcccaccggagcagcaccgaggccggaggcgaggtgcagacctccaagaagtcctacgtgtgtccgaactgtgggaaaatcttccgctggagggtcaacttcatccggcatctgcggagccgcagggagcaggagaagccgcacgagtgctcggtgtgcggggagctgttcagcgacagcgaggacctggatgggcacctagagagccacgaggcccagaagccttaccggtgtggtgcctgcgggaagagcttccgcctgaactcccacctgctctcccaccggcggatacacctgcagccggacagactccagccggtggagaagagagagcaggcggcatccgaggacgcggacaagggtcccaaagagccgctggaaaacggcaaggccaaactgagcttccagtgctgtgagtgtgggaaggccttccagcggcacgaccacctggctcggcaccgcagccactttcacctgaaggacaaagcccggcccttccagtgccggtactgcgtcaagagcttcacgcagaactatgacctcctccgccacgagcgcctgcacatgaagcgccgttccaagcaggctctgaactcctactgagcctctccgcctggggcggcctcaccctggctggtgctgccccctcaccttggtactgatcagcgcccccacccaggacataccttccccaggatagagagcacacctccctcctgtccttgctctcaggtagtgagcgttcgggtggtgccatgggagcactctccctcccccaggtaatgaaagagtggccaagtgagtgttctgtttctgctgtgccaaaaaacgggggggatgtgccatcaccaggttggacatgccaggtgttctgcgtcttagagacccttggcccatgctccccaagctcggggagtaaaactgggctatcccccgtcagggcggcaccctggtcaccagccaaacctcagtatactccctcccctccttccctgtctgaacgctaggatctgctcctgaagctccaggatgcctgcacttccactgagaagctgctggcggatgttggactagaggaaagaagaaggcagggtgggactgatgggctcagtggggagcagggccaggcacactgagccagacatgtcatgtctgagccccagattcgtggccatcaggtaggcaggagcaccccgcagatccaagatgatcaggcagcccttttgggctggcctctgtggcaggggtctgcagagctccttcttgaggtttggaaacagtcgtcatacctgttgattttcctgggggccaatcactagggatctggagctcaccaaaaacaaagcttacattttaatttgtgttgcacacctaccccataatgtctttataccccaaagatccttggtaaatgcttgtgggttggaagcggagttgtcatcgtttaaaaggcacttaagtcccttcttccaatctgtcctgtctaggaatgtggagctctgcccccagtgaggggttctcctgtctgggtgagccaagctccagaacagaaccttgcctgacaacacacttgatagatacattagcttggagtgctggtgtgtccaaacactggctggcttagaacaacaggagtgtattccctgacagttctgggaggtgcacgtccaagatcagggtgtcctcagagttggtgccttccgagagctgtgagggagaagcggcttcatgcctttgctggcagttgccattccttggtgtgtggaagcgtcacccagtctctgccttcatctccacatggcactcttgctgtgtgcgtgtctgtctccaaacctccctttgtttaaggacaccagtcatatcggattagagcccatcccaccgactccagtataacctcatctgtatccgcagcaaccgtttaccaataaggtcacattctgaggtactagaggttgggacttcaacatcggaatttgaaagggacagcattcagcccatgactccagataaacgtgaggtatgctatatcattcctaatttacagatgagtcaatacaaacttgagtgagcttgctcacaattccatcaaaggcagggttcagacccaagtttcagcatttagggcaggtgtcctctgcatggaagaatcatactcaatagccgtaaacgctgacaaattccccttcctccctgccttctgatgggggctgggcaggccagctggagctgtgtctcctgctgggattccggactgagagtgacagcaggtagtgaaacctcaagcaatttaaaacatggtattgttcctggaagactggttatgttggctagggtcagcaagagagggcatcaaggctgtagtctagcagtgatttaatctgcaagtcaaaccagacgggtattttgtattattcatatgtcacatcctaccaacagacagtaagtcaggcaaggctcctggtgctccttgtcactcacgtaattttcacatcaggaaaactctgggctgggtgcagtggctcacacctgtaatcctagcactttgggaaaccaaggtgggtggattgcctagctcagtgacaccagcctgggccacatggcaaaaccccgtctgtaccaaaaatgcaaaaaattagctgggtgtggtgttgacgtttgcggtcccagctactctggaggctgaggtgggaggattgcttgagtctgggaggcagaagttgcagtaagccgagatcatgccactgcacaagctaggtgacagaatgagactctgtctcaaaaataattaaaaagcctctgccccaaactcgttaaaagattttataaccacaactgctgtttctgtgtagatgcatctgcatgcccaggagcagtaaatgcaataaaatcatttggttatactttgaacacaaaataaa

SEQ ID NO: 23643 - DNA, 1007 bp, Homo sapiens
  misc_feature 1..1007: note = ENST00000478225
  source 1..1007: mol_type = unassigned DNA
gcgggctcccgcggcggccaggcctgcgccgcccgccaacagggacgcgccgcggcggcgcctccatttgcccccgagccgagccgtggctttccggatgatcgggagacgcggtctggacgggccgggaaaggagccgggcgcctgcggagaccccgcctcagcgagtacgcccggccgggcgggctgggaggatgaggacggctgccctggacttccgccgccacaggagggttttcggccggacgccgggagggagctccaggctgtgagctccatttgtaaaggtcttaataacaagaacagtgacttcggctccggagcttcaagatagtggcctgcttggcctgcccatctcggatctctccaggaggacccagccacccaagggtcgtcttctgctgctgacccccatcaaatcccatcatgcccacagccctgtgcccccgagtcttggctccgaaggaaagtgaggagcccaggaaaatgaggagcccacctggagagaaccctagcccccagggggagcttcccagccccgagtcctctcggcgtctcttccgccgtttccgctaccaggaggcggcgggcccccgggaggccctgcagcgcctctgggacctgtgcgggggctggctgcggcctgagaggcacaccaaggagcagattctggagctgctggtgctggagcagttcctggccatcctgccccgggagatccagagctgggtgcgggcgcaggagcctgagagcggagagcaggctgtggccgcggtggaggcactggaacgggagcccgggagaccctggcagtggctcaagcactgtgaagaccctgtggtgattgatgatggggacagccctctggaccaggagcaggagcagctgccggtagagccccacagcgaccttgcaaagaaccaggatgcccagcccataaccctggcacagtgcctggggctcccaagcagaccaccaagccagctcagcggggacccaggtatgca

SEQ ID NO: 23644 - DNA, 907 bp, Homo sapiens
  misc_feature 1..907: note = ENST00000477903
  source 1..907: mol_type = unassigned DNA
cgggctcccgcggcggccaggcctgcgccgcccgccaacagggacgcgccgcggcggcgcctccatttgcccccgagccgagccgtggctttccggatgatcgggagacgcggtctggacgggccgggaaaggagccgggcgcctgcggagaccccgcctcagcgagtacgcccggccgggcgggctgggaggatgaggacggctgccctggacttccgccgccacaggagggttttcggccggacgccgggagggagctccaggctgtgagctccatttgtaaaggtcttaataacaagaacagtgacttcggctccggagcttcaagatagtggcctgcttggcctgcccatctcggatctctccaggaggacccagccacccaagccctgtgcccccgagtcttggctccgaaggaaagtgaggagcccaggaaaatgaggagcccacctggagagaaccctagcccccagggggagcttcccagccccgagtcctctcggcgtctcttccgccgtttccgctaccaggaggcggcgggcccccgggaggccctgcagcgcctctgggacctgtgcgggggctggctgcggcctgagaggcacaccaaggagcagattctggagctgctggtgctggagcagttcctggccatcctgccccgggagatccagagctgggtgcgggcgcaggagcctgagagcggagagcaggctgtggccgcggtggaggcactggaacgggagcccgggagaccctggcagtggctcaagcactgtgaagaccctgtggtgattgatgatggggacagccctctggaccaggagcaggagcagctgccggtagagccccacagcgaccttgcaaagaaccaggatgcccagcccataaccctggcacagtgcc

SEQ ID NO: 23645 - DNA, 589 bp, Homo sapiens
  misc_feature 1..589: note = ENST00000597363
  source 1..589: mol_type = unassigned DNA
atttggtcacggagaggtgaggttttcctcttagtccaattccaagaagtcagcaggggttggccttaggttccctgtctccagactctattctcctgcctcatttggacccctacaatctaattgtgaatgtaaaagggatctacggaagtttgaacttgagagtgatgacctagggtatctggcagaagaaatgcctaaataacaaagcattcaagatatggcctggctgcttgtaaccacctatgctaagatgtgggagcaaagaaatgacttaaagctggaacttatatgtaaaagtgagttcttatgagatctggacatttaaacgtgtgtaccatctccctcctcactctcttgctcctgctttcaccatgtgatgtgcctgctcccattttgccttccaccatgattggaaacttcctgaggcctgctcaaaagcagatgccactatgcttcccgtacagcctgcagaactggatcctgaaaaggagggaacaattgttgtagcaggtctaaaagttcaggtccaggaaatggaaacattgctttgcttttcctgaattgtccagtgacctatcccaggcct

SEQ ID NO: 23646 - DNA, 626 bp, Homo sapiens
  misc_feature 1..626: note = ENST00000599504
  source 1..626: mol_type = unassigned DNA
acatttcccagaagccccttgggcagtgttgcctggaccccaagggccctttacattgcgttcttaacggttcagtcaccttaaccgttattattcacttgcgggcgagaagtccgagctagggatcctgaaaaggagggaacaattgttgtagcaggtctaaaagttcaggtccagccccggtttctctggattctgtgcttctccatggaggaaactcaaggagaactgacaagttcttgtggttctaaaaccatggccaatgtatctttggcatttagggatgtgtccatagacctctcccaagaggagtgggagtgcctggacgctgtgcagagggacttgtacaaggatgtgatgttggagaactacagcaacctggtctcactgggatataccattcctaagccagatgtgattactttattggagcaagagaaagagccctggatagtaatgagggaagggacaaggaattggttcacagatttggaatacaagtatattaccaagaatttgctttcagaaaagaatgtttgcaaaatctatttatctcaattgcagacaggggaaaaaagtaaaaacaccatccatgaggacaccattttcagaaatggtttgcagtg

SEQ ID NO: 23647 - DNA, 714 bp, Homo sapiens
  misc_feature 1..714: note = ENST00000596894
  source 1..714: mol_type = unassigned DNA
acatttcccagaagccccttgggcagtgttgcctggaccccaagggccctttacattgcgttcttaacggttcagtcaccttaaccgttattattcacttgcgggcgagaagtccgagctagggatcctgaaaaggagggaacaattgttgtagcaggtctaaaagttcaggtccaggaaatggaaacattgctttgcttttcctgaattgtccagtgacctatcccaggccttcctttccagtgaacaatggaccatgcagagtctcgttctgttgcccaggctggagtgcagtgatgtgatcttggcttactgcaacctccatctcccaggaaaattgcatgaacctaagtggcagaggttgcagtgagctgagatcgcaccactgcactctagcttgggcaacagagcaagactctgtctcttaaataaataaataaatagattaccagaaaaatgaaaagaaaaaaacagacatacaaaataaaagccccagttttttattatggtatttaactgagttaactctgtcagattgctgcaaacatttctaaatacttgctcttggtatctataacttttgcagagaccagaagcaaacaatttgtgggccagtgtcaacacatggaccacactttatatagcactgtaacggaaaatgattctgttaatgtaatgaacatgggaaagaccagccttggcctatctttatga

SEQ ID NO: 23648 - DNA, 490 bp, Homo sapiens
  misc_feature 1..490: note = ENST00000593687
  source 1..490: mol_type = unassigned DNA
atttcccagaagccccttgggcagtgttgcctggaccccaagggccctttacattgcgttcttaacggttcagtcaccttaaccgttattattcacttgcgggcgagaagtccgagctagggatcctgaaaaggagggaacaattgttgtagcaggtctaaaagttcaggtccaggaaatggaaacattgctttgcttttcctgaattgtccagtgacctatcccaggccttcctttccagtgaacaatggaccatgcagagtctcgttctgttgcccaggctggagtgcagtgatgtgatcttggcttactgcaacctccatctcccaggttcaagaaattctcctgcctcagcctcccgagtagctgggattacaggcgcctgctaccacgcccagctaattttttgtatttttaatagagatggggtttcgccatgttggccaagctggtctcaaactcctgacctcaggtgatccacccacctcgg

SEQ ID NO: 23649 - DNA, 561 bp, Homo sapiens
  misc_feature 1..561: note = ENST00000601138
  source 1..561: mol_type = unassigned DNA
agtgttgcctggaccccaagggccctttacattgcgttcttaacggttcagtcaccttaaccgttattattcacttgcgggcgagaagtccgagctagggatcctgaaaaggagggaacaattgttgtagcaggtctaaaagttcaggtccagccccggtttctctggattctgtgcttctccatggaggaaactcaaggagaactgacaagttcttgtggttctaaaaccatggccaatgtatctttggcatttagggatgtgtccatagacctctcccaagaggagtgggagtgcctggacgctgtgcagagggacttgtacaaggatgtgatgttggagaactacagcaacctggtctcactgggatataccattcctaagccagatgtgattactttattggagcaagagaaagagccctggatagtaatgagggaagggacaaggaattggttcacagagtctcgctctgtcacccaggctggagtgcagtggcacaatctcggctcactgcaacctccacctcccgggttcaagcaattcttctgcctcagcctc

SEQ ID NO: 23650 - DNA, 3426 bp, Homo sapiens
  misc_feature 1..3426: note = ENST00000600094
  source 1..3426: mol_type = unassigned DNA
gttgcctggaccccaagggccctttacattgcgttcttaacggttcagtcaccttaaccgttattattcacttgcgggcgagaagtccgagctagggatcctgaaaaggagggaacaattgttgtagcaggtctaaaagttcaggtccaggaaatggaaacattgctttgcttttcctgaattgtccagtgacctatcccaggccttcctttccagtgaacaatggaccatgcagccccggtttctctggattctgtgcttctccatggaggaaactcaaggagaactgacaagttcttgtggttctaaaaccatggccaatgtatctttggcatttagggatgtgtccatagacctctcccaagaggagtgggagtgcctggacgctgtgcagagggacttgtacaaggatgtgatgttggagaactacagcaacctggtctcactgggatataccattcctaagccagatgtgattactttattggagcaagagaaagagccctggatagtaatgagggaagggacaaggaattggttcacagatttggaatacaagtatattaccaagaatttgctttcagaaaagaatgtttgcaaaatctatttatctcaattgcagacaggggaaaaaagtaaaaacaccatccatgaggacaccattttcagaaatggtttgcagtgtaaacatgaatttgagagacaagagagacatcagatgggatgcgttagtcaaatgctaatccaaaaacaaatatctcatcctctacatccaaaaattcatgctagagagaaatcatatgaatgtaaggaatgtagaaaggcctttagacaacagtcataccttattcaacatctgagaattcacactggtgagagaccctataaatgtatggaatgtggaaaggccttttgtcgagtgggagaccttagagtacatcacacaatccatgctggggagagaccctatgaatgtaaagaatgtgggaaggcctttagacttcattatcaccttactgaacatcagagaatacattctggtgtgaaaccctacgagtgtaaggaatgtgggaaagcctttagtcgtgttagagaccttagagtacatcagacaattcatgctggagagagaccttatgaatgtaaagaatgtgggaaggcctttagacttcattatcaactaactgaacatcaaagaattcatactggtgagaggccttatgaatgtaaggtttgtggcaagacctttagggtacaacgacatattagtcaacatcagaaaattcatactggtgtcaaaccctataaatgtaatgaatgtgggaaggcctttagtcatggctcataccttgttcaacatcagaaaattcatactggtgaaaaaccctacgaatgtaaagaatgtggtaagtcctttagttttcatgcagaacttgctcgacatcgtagaattcatactggtgagaaaccctatgaatgtagagaatgtggaaaagcctttcgtcttcaaacggaacttactcggcatcatagaactcatactggtgagaaaccctatgaatgtaaggaatgtgggaaggcctttatttgtggttatcaacttactttacatctgagaactcacaccggtgagattccctatgaatgtaaggaatgtggaaaaaccttcagtagtcgctatcatctcactcaacactacagaattcatactggtgagaaaccctacatatgtaacgaatgtggaaaagcctttcgtcttcaaggagaacttacccgacatcacagaattcatacatgtgagaaaccctatgaatgtaaggaatgtgggaaggcttttattcatagcaatcaatttatttcacaccagcgaattcacaccagtgagagcacctacatatgtaaagaatgtgggaagatttttagtcgtcgctataatcttactcaacattttaaaattcatactggtgaaaaaccctacatatgtaatgaatgtgggaaagcctttcgatttcaaacagaacttactcagcatcacagaattcatactggtgaaaaaccctataaatgtacagaatgtgggaaggcctttattcgtagcactcatctcacgcaacatcacagaattcatactggtgagaaaccctacgaatgtacggaatgtgggaagacgtttagtcggcactatcatcttactcaacatcacagaggccatactggtgagaagccctacatatgtaatgaatgtgggaatgcttttatttgcagttatcgacttacattacatcaaagaattcacactggtgagcttccatatgaatgtaaggaatgtggaaagacctttagtcgtcggtatcatcttactcaacattttagacttcatactggtgagaaaccttatagctgtaaagaatgtgggaatgcctttcgtcttcaagcagaacttactcgacatcacatagttcacacgggtgagaaaccctataaatgtaaagaatgtgggaaagccttcagtgttaattcagaacttactcgacatcacagaattcatactggtgaaaaaccctatcaatgtaaagaatgtggaaaagcctttattcgtagtgatcaacttactttacatcagagaaatcatattagtgaggaagtcctatgcataatgtaaagagaatacgatggcctttagaaaatgccctttagcagagaatttgtaatttaagaaattttctgtttgttacggaacatgtgggaatcccttttacttcatgctcacaatttatcagaaattatttcgtatgttaaagagtcgaaagactatagcatcactcagtccctgttagactttagaagattgatactgatgcactgcatcccaaaccatcaagggccttttcccctacaaactgttgttgaacagtgcttctctaaaatgcaataataatgggccaggtgaagtggctcacacctgtaatcccagcactgtggaaagacaggagttcgaaaccagcctgggcaacatagtgagaccctgcctcatggctttagtgagccatgattgtgccactgcactccagcttggtgacagagtgagatcctgtctctaaataaataaataaaatgcgggccaggcacagtggctcacacctgtaatcccagcactatgggaggcccaggtgagcagatcacctgaggtcaggagttcaagaccagcctggccaacatggtgaaaccccttctctactaaaatacacaaattagctaggcattgtggggggtgcctgtaatcccagctactcaggaggctgaggcaggaaaattgcatgaacctaagtggcagaggttgcagtgagctgagatcgcaccactgcactctagcttgggcaacagagcaagactctgtctcttaaataaataaataaatagattacc

SEQ ID NO: 23651 - DNA, 7987 bp, Homo sapiens
  misc_feature 1..7987: note = ENST00000347077
  source 1..7987: mol_type = unassigned DNA
caagggccctttacattgcgttcttaacggttcagtcaccttaaccgttattattcacttgcgggcgagaagtccgagctagggatcctgaaaaggagggaacaattgttgtagcaggtctaaaagttcaggtccaggaaatggaaacattgctttgcttttcctgaattgtccagtgacctatcccaggccttcctttccagtgaacaatggaccatgcaggtggaccctcctcttcacgggcctccaaatgactttctcatttttcaaatcattcctctgcactcactttctataatgccccggtttctctggattctgtgcttctccatggaggaaactcaaggagaactgacaagttcttgtggttctaaaaccatggccaatgtatctttggcatttagggatgtgtccatagacctctcccaagaggagtgggagtgcctggacgctgtgcagagggacttgtacaaggatgtgatgttggagaactacagcaacctggtctcactgggatataccattcctaagccagatgtgattactttattggagcaagagaaagagccctggatagtaatgagggaagggacaaggaattggttcacagatttggaatacaagtatattaccaagaatttgctttcagaaaagaatgtttgcaaaatctatttatctcaattgcagacaggggaaaaaagtaaaaacaccatccatgaggacaccattttcagaaatggtttgcagtgtaaacatgaatttgagagacaagagagacatcagatgggatgcgttagtcaaatgctaatccaaaaacaaatatctcatcctctacatccaaaaattcatgctagagagaaatcatatgaatgtaaggaatgtagaaaggcctttagacaacagtcataccttattcaacatctgagaattcacactggtgagagaccctataaatgtatggaatgtggaaaggccttttgtcgagtgggagaccttagagtacatcacacaatccatgctggggagagaccctatgaatgtaaagaatgtgggaaggcctttagacttcattatcaccttactgaacatcagagaatacattctggtgtgaaaccctacgagtgtaaggaatgtgggaaagcctttagtcgtgttagagaccttagagtacatcagacaattcatgctggagagagaccttatgaatgtaaagaatgtgggaaggcctttagacttcattatcaactaactgaacatcaaagaattcatactggtgagaggccttatgaatgtaaggtttgtggcaagacctttagggtacaacgacatattagtcaacatcagaaaattcatactggtgtcaaaccctataaatgtaatgaatgtgggaaggcctttagtcatggctcataccttgttcaacatcagaaaattcatactggtgaaaaaccctacgaatgtaaagaatgtggtaagtcctttagttttcatgcagaacttgctcgacatcgtagaattcatactggtgagaaaccctatgaatgtagagaatgtggaaaagcctttcgtcttcaaacggaacttactcggcatcatagaactcatactggtgagaaaccctatgaatgtaaggaatgtgggaaggcctttatttgtggttatcaacttactttacatctgagaactcacaccggtgagattccctatgaatgtaaggaatgtggaaaaaccttcagtagtcgctatcatctcactcaacactacagaattcatactggtgagaaaccctacatatgtaacgaatgtggaaaagcctttcgtcttcaaggagaacttacccgacatcacagaattcatacatgtgagaaaccctatgaatgtaaggaatgtgggaaggcttttattcatagcaatcaatttatttcacaccagcgaattcacaccagtgagagcacctacatatgtaaagaatgtgggaagatttttagtcgtcgctataatcttactcaacattttaaaattcatactggtgaaaaaccctacatatgtaatgaatgtgggaaagcctttcgatttcaaacagaacttactcagcatcacagaattcatactggtgaaaaaccctataaatgtacagaatgtgggaaggcctttattcgtagcactcatctcacgcaacatcacagaattcatactggtgagaaaccctacgaatgtacggaatgtgggaagacgtttagtcggcactatcatcttactcaacatcacagaggccatactggtgagaagccctacatatgtaatgaatgtgggaatgcttttatttgcagttatcgacttacattacatcaaagaattcacactggtgagcttccatatgaatgtaaggaatgtggaaagacctttagtcgtcggtatcatcttactcaacattttagacttcatactggtgagaaaccttatagctgtaaagaatgtgggaatgcctttcgtcttcaagcagaacttactcgacatcacatagttcacacgggtgagaaaccctataaatgtaaagaatgtgggaaagccttcagtgttaattcagaacttactcgacatcacagaattcatactggtgaaaaaccctatcaatgtaaagaatgtggaaaagcctttattcgtagtgatcaacttactttacatcagagaaatcatattagtgaggaagtcctatgcataatgtaaagagaatacgatggcctttagaaaatgccctttagcagagaatttgtaatttaagaaattttctgtttgttacggaacatgtgggaatcccttttacttcatgctcacaatttatcagaaattatttcgtatgttaaagagtcgaaagactatagcatcactcagtccctgttagactttagaagattgatactgatgcactgcatcccaaaccatcaagggccttttcccctacaaactgttgttgaacagtgcttctctaaaatgcaataataatgggccaggtgaagtggctcacacctgtaatcccagcactgtggaaagacaggagttcgaaaccagcctgggcaacatagtgagaccctgcctcatggctttagtgagccatgattgtgccactgcactccagcttggtgacagagtgagatcctgtctctaaataaataaataaaatgcgggccaggcacagtggctcacacctgtaatcccagcactatgggaggcccaggtgagcagatcacctgaggtcaggagttcaagaccagcctggccaacatggtgaaaccccttctctactaaaatacacaaattagctaggcattgtggggggtgcctgtaatcccagctactcaggaggctgaggcaggaaaattgcatgaacctaagtggcagaggttgcagtgagctgagatcgcaccactgcactctagcttgggcaacagagcaagactctgtctcttaaataaataaataaatagattaccagaaaaatgaaaagaaaaaaacagacatacaaaataaaagccccagttttttattatggtatttaactgagttaactctgtcagattgctgcaaacatttctaaatacttgctcttggtatctataacttttgcagagaccagaagcaaacaatttgtgggccagtgtcaacacatggaccacactttatatagcactgtaacggaaaatgattctgttaatgtaatgaacatgggaaagaccagccttggcctatctttatgatatatataaataatataattctcataattccacctctgcctatgtggtgtttggcaaaacatgcccctgtgccttggtttttaaaatggtaataacagtaccacctaatagtatttttgtgaggatgaaatgctaataaaagataaaacctttaaaagagtatttggcacacagcattttatcaataaatattgctttatttttttcattggggatacatttagtacattcatgtgagaggaaggccctgtgggtgtaagaaatttgtaaaaactgtccattacctttcactccttatttagattggaataattaactggagataatatccagtaaaatagattaaacttccatttataaagtcagaacctatctctgaaaattaatgtgagaaagaaatctctagatttgatgggtgtgaagattatgagagtaaagttttgaagactcagggatagctgtaatgcttttttctttttataacccaaaaagcaggtatgtcagtcgctttttctgcccacaatgataaattaaaaacagccactatccatttggaaaacttaaaagaataatgaacagttatgttctatctagattcagcaattgttaatatgttgtcacatttggtttgcttatacataatatttacatattttgctgtagtatttgagtataaattgcagatactataacacatcacatctaagaataaaggctgcctcctacttaattgctatataacaattgtccaacctgtctgtgccccagggcagctttgaatgcagtccaacagaaatttgtaagctgtcttaaaacatgagattttttttgtgattttttttaagctcatccgccattgttagcacattttatgtgtagcccaagataattcttcttccagtgtaacccagggaagccaaaagatttgacccccagtaacttcacacctaaggagattagcaataattccataatctgtaatattcagtctgtgttcatattctcagttgtgttcattcttttcatttgtgtaaacaatgcttttcataggttatttttaaattcaggaaccaaattcatgaattacatttgtgcattgttcgtctcttttaaagtaagaatggcccttccccccacaactttattgcaacattgactttttttttttttttttttttttttttttgagatggagtctctgtcgcccaggctggagtgcagtggtgcgatcttggctcactgcaagctccgcctcccgggttcaggcaattctgcctcagcctccccagtagctgggactacaggcgccttcaaccatgcccggctaattttttgtatttttagtagagacggggtttcaccatgttagccaggacggtctcgatctcctgacctggtgatctgcccgcctcagcctcccaaagtgctgggattacaggcatgagccaccgcacccggccttcccaaagtatttttaaatgtgcttttttatccccagtatttcccattaactggaatttgggattagagacccaattagggacagattaaatattttggcaagaatacttaatgggagaaattttgtatttcaatttgtaacccattaggtggcatacaatgtcattataccactatggtatccttagttcattcacttggtgtagcagaacatacattccaaagatggccacaccaatatatcccattctgcatgttcatcttacaatgtgataccaacactccccaagaggtagagctcatggtccttccttttgaatctggccaggtgggcctgtgtttatggcaggaataacactgtgatttccacgactaagtcataaaaggcaatacagcttctgcctgacccacttgggatgaagcccagccaccatgctatgaagatgccaagtaatcacatagaaaagctaagtaaagctgtcctgattacagctgtaattgaggtaacagccgggatccagcaccaagtgtatgagggtatgagccttcagatgattctaacccttagccttcaggctatcctagctggtgctaagtggagcagagaaaagctttcccccatgagcctgcccaaattgcagatttacgtttaaaatatggcctgttttaagccactaagttttggagtagtttgccacacagcgataggtaactgaaatacttgcttcatatggtaatcaccaggtttctctgttgtagagctaaatatttcttttaatttagtaaacgatctgtagagtagtactttggcatttcggaaatttaaaatctccaataatataatgacactagatcaaaaagaaaatgaaaccataaaggacaatttagaaatgaatggtaagatcagaatttgtgaatgtggccaaacctgtgctcagtgaaaaatcagtaacctgttaatatattcaggaaacaaatattgagggccagcactttgtttctcctgctcaccactctactcccagtgacttaatactgtctctttaacatagtaatcacttataaaactgttaaaagaatgaagaagcattaaactcaagaaactaagggaaaaataagtcaatataagaaagaagggaggatcattaaaaggagttaatgaatttgaaaataaaatagacttattaaggctttgtgaaaaaatattaatacttgattttagtatagctaatcaaaggaaaaagataattacagcattgtgaatgagaattggatgtaagtacagatggaggagatattttttgttttattgaaaatttcaaggaggaagtaatatcaaaatttcactagctctttctacactgatattataatcctgataatacaacagatgaggatagttcttaaaaggcaaaaatgtaggtgagtcattacgaagaaagcagaaattctaaaccatcagcacattcattcaaaaacctagtaaagcaattaagcaaaataatttgtttacttggactgtccagggatagatctgttctagttttccaaattaatgatgggaaaggaagagctgatccagtccaagtatcttcaagatccatgttctcagtttttcttagctttaaatggccaaattgtggcttagattggatatgataatttcctcaatgcttaacactgagcacaatttttcacatatttgaaatcaaggtgtatcttacaatttatggcatctgacaatacttccaaccaggtggcagtcatcaagcagttttgtgaaaagccttcccggtaagaatacaaaagcatctgcaccaaaatatatagatttaatggcatgtaggggtttgcgtgaatatatacagttgaaattcaattcttccttaaaaataattgtaactcatttctttaagactaccatactaccactttcctcaacttggactaatgtccattgtcaaccaaaatgtctgtgatctcatggatccattatgatttgcaactccaggtccattttatgcaaataagacagccataatatatcattgtacaagtcatttactatctaattatatcattgctcaacatttgcaaattatttttacaaataacaataattggatgtaacaaaaagcagagtattttgagacgtatattaatgcaaaatattgttaatgtatcagtggattgttcctccaaagtaccagtgccttaacacaacatatctaaaagaacatctctgggaacagtagtacttaatggcaacttgagaattggtttgtgggcacacagccttgtgaagttttgaatactaaatcccttttttaaaaaagtgcttattatcaggctatcaatcaaaagatttgagtctttcagtaaagaaaatttgcttaattttatctagtgcatgataaactttactaaggaagtctcattcagaatatctaatattttggatgtgagcccacactggaaatgccataaccaaaaaagagtgaccctaaagatagaatattcagatctaatggcagatgcttagctatgctgggaaaggaagtgaattgtatattgctctgctgctcacatattcctctgcaataaattgctggcccagtttagtttttatatactcactactatactaatgaggatggctcaattttttatttgaacgtactataatgaatttaaactttcattggtatttatgttttaacaggttttcactatttcaaatatacttcaataaatatccttgtctgtgatca

SEQ ID NO: 23652 - DNA, 396 bp, Homo sapiens
  misc_feature 1..396: note = ENST00000602253
  source 1..396: mol_type = unassigned DNA
ccgttattattcacttgcgggcgagaagtccgagctagggatcctgaaaaggagggaacaattgttgtagcaggtctaaaagttcaggtccaggaaatggaaacattgctttgcttttcctgaattgtccagtgacctatcccaggccttcctttccagtgaacaatggaccatgcaggtggaccctcctcttcacgggcctccaaatgactttctcatttttcaaatcattcctctgcactcactttctataatggtagagaaatgcatatcctggagtctaaagttaaaactttgttttattgagattaatgtttaggtagaatcacatcatccatcttctccaatcttctccaaagacctcagttttaaaatatgacaggattagagatgacc

SEQ ID NO: 23653 - DNA, 542 bp, Homo sapiens
  misc_feature 1..542: note = ENST00000595225
  source 1..542: mol_type = unassigned DNA
ctggcgtgtcgtgcccgcagggagcctcaggcctggatcctgaaaaggagggaacaattgttgtagcaggtctaaaagttcaggtccaggaaatggaaacattgctttgcttttcctgaattgtccagtgacctatcccaggccttcctttccagtgaacaatggaccatgcaggtggaccctcctcttcacgggcctccaaatgactttctcatttttcaaatcattcctctgcactcactttctataatgccccggtttctctggattctgtgcttctccatggaggaaactcaaggagaactgacaagttcttgtggttctaaaaccatggccaatgtatctttggcatttagggatgtgtccatagacctctcccaagaggagtgggagtgcctggacgctgtgcagagggacttgtacaaggatgtgatgttggagaactacagcaacctggtctcactgggatataccattcctaagccagatgtgattactttattggagcaagagaaagagccctggatagtaatgagggaagg

SEQ ID NO: 23654 - DNA, 589 bp, Homo sapiens; identical to SEQ ID NO: 23645
  misc_feature 1..589: note = ENST00000627810
  source 1..589: mol_type = unassigned DNA

SEQ ID NO: 23655 - DNA, 626 bp, Homo sapiens; identical to SEQ ID NO: 23646
  misc_feature 1..626: note = ENST00000631242
  source 1..626: mol_type = unassigned DNA

SEQ ID NO: 23656 - DNA, 714 bp, Homo sapiens; identical to SEQ ID NO: 23647
  misc_feature 1..714: note = ENST00000629260
  source 1..714: mol_type = unassigned DNA

SEQ ID NO: 23657 - DNA, 490 bp, Homo sapiens; identical to SEQ ID NO: 23648
  misc_feature 1..490: note = ENST00000625917
  source 1..490: mol_type = unassigned DNA

SEQ ID NO: 23658 - DNA, 561 bp, Homo sapiens; identical to SEQ ID NO: 23649
  misc_feature 1..561: note = ENST00000628247
  source 1..561: mol_type = unassigned DNA

SEQ ID NO: 23659 - DNA, 3426 bp, Homo sapiens; identical to SEQ ID NO: 23650
  misc_feature 1..3426: note = ENST00000627583
  source 1..3426: mol_type = unassigned DNA

SEQ ID NO: 23660 - DNA, 7987 bp, Homo sapiens; identical to SEQ ID NO: 23651
  misc_feature 1..7987: note = ENST00000626389
  source 1..7987: mol_type = unassigned DNA

SEQ ID NO: 23661 - DNA, 396 bp, Homo sapiens; identical to SEQ ID NO: 23652
  misc_feature 1..396: note = ENST00000626141
  source 1..396: mol_type = unassigned DNA

SEQ ID NO: 23662 - DNA, 542 bp, Homo sapiens; identical to SEQ ID NO: 23653
  misc_feature 1..542: note = ENST00000626396
  source 1..542: mol_type = unassigned DNA

SEQ ID NO: 23663 - DNA, 1019 bp, Homo sapiens
  misc_feature 1..1019: note = ENST00000592881
  source 1..1019: mol_type = unassigned DNA
ccggacgtgaaagtttgctgcgtagggatagggagaccgggccggattgcggggagtgagcaggttcagcagtgacggcattcttaagagtcctgcccaagtgagggacttggggtgtgggacagagtggcccccagggcagtgggcgttggaaactgagaggccctgcgaaggaggcttggggaggggctacggtgaccaggggacgaggtataggaagaggagggcggaaagccttgagggtgggcttcttggatcccaattgccccagaggcacaggcctgggcatcactgtattatttcccgaggggagaaggggctatttcccatgggaagacaaagtgggatgaatagtggaccttgagaagagggggtggccaggaaaaggttcctgaaggaggcaggacccagactgcaggctggggagggtttgggcagccagagggaggtgagggtgctggagcgggggtcaatcggtcactccggccggagatctgagtggcctctgccccctctgcgctgtggagtgcatctgattgccagcctcgctggaccgttgagaggattcatcgagaccctggatatgaatatgcagtgtgaactgaagtttggggacatgagtaatcagtcacagtggcccaagatttgaggtgtaaatggagaagtcagaatgattcgctgcagctgtctggaacagctgccgctccagatgctgctgctgccgccgcggccaccccaccctcggtcctcctctccggaggccatggacccaccgccccccaaggctccccctttccccaaggcggaaggcccctcctccactccttcctcggcggcggggccccgacccccgcggctgggccgccacctcctcatcgacgccaatggggtcccctacacatacacggtgcagctggaggaggagccccggggcccgccccagcgcgaggcgcccccaggagagcccggccctcgcaagggctacagctgcccggagtgcgcccgtgtctttgccagcc

SEQ ID NO: 23664 - DNA, 1261 bp, Homo sapiens
  misc_feature 1..1261: note = ENST00000325333
  source 1..1261: mol_type = unassigned DNA
acgcctccggtcccctccccgcagggcgctccgcagaggcgaggggtgggagcgccggctccaggcggcggaacctccgcactgggctcgcgcgcttccggccggcgccttttcccagggactccgccaacccctcgcacccccgcgcccccagtccccgcgtccccggcgccgccggcccggagctgcccggaagtctcggttccgccgccggcgctcgccaggggaagcccggggccgcccgggacctcggcccgttcctccggacccgagaggccgccgcacgggctgccgctccagatgctgctgctgccgccgcggccaccccaccctcggtcctcctctccggaggccatggacccaccgccccccaaggctccccctttccccaaggcggaaggcccctcctccactccttcctcggcggcggggccccgacccccgcggctgggccgccacctcctcatcgacgccaatggggtcccctacacatacacggtgcagctggaggaggagccccggggcccgccccagcgcgaggcgcccccaggagagcccggccctcgcaagggctacagctgcccggagtgcgcccgtgtctttgccagccctctgcggctgcagagccaccgcgtgtcgcactcggacctcaagcccttcacgtgcggcgcctgcggcaaggccttcaagcgctccagccacctgtcgcggcatcgcgccacgcaccgcgcccgcgccgggccgccgcacacctgcccgctctgcccacgccgcttccaggacgccgcggagctggcgcagcacgtgcgcctccactaagctcgagacccggcctgtgctgccctgcccgtctcagggccaccaagtctgacccacacagcgtcactcactcccacacacaccccctggctctgctgaggttactgccttaccctgggcctcagtttccccaccttccaaagggaggagcatcattccttccttaccccctttctagctgtgtgatgtagaccaaagtcgttgcccctccctgggcctgggaaccagtcggaactgggttccagtccagctgtgctgtgtgagcctgtgcaagtgacatgacctctctaaaccttggttttctgctctctggagcggtgaaccggtggttgtctgcggggaagagatgataaagagcacgggcacggtctggttcatttctgtatctaccccccttccgcccacgcccccgaccctttgctcaataaacattccgcactcc

SEQ ID NO: 23665 - DNA, 335 bp, Homo sapiens
  misc_feature 1..335: note = ENST00000590190
  source 1..335: mol_type = unassigned DNA
gcgcgcttccggccggcgccttttcccagggactccgccaacccctcgcacccccgcgcccccagtccccgcgtccccggcgccgccggcccggagctgcccggaagtctcggttccgccgccggcgctcgccaggggaagcccggggccgcccgggacctcggcccgttcctccggacccgagaggccgccgcacggggaaacttttcctaaaaggaagtggcaattttaactaatctcccctccgccgctcccagctgccgctccagatgctgctgctgccgccgcggccaccccaccctcggtcctcctctccggaggccatggacccaccg

SEQ ID NO: 23666 - DNA, 1707 bp, Homo sapiens
  misc_feature 1..1707: note = ENST00000543039
  source 1..1707: mol_type = unassigned DNA
ggaaggcatttgagccattttggggtgtatagatgtagtaagacgatgggttccgtagtggggagaggtgactagacttcgaggtgctaagtgtaggaacaggatggaaaagccctagtgaaatgtggggaattgggttagtggggctctggggaggtacctagagaggaagtgagggaggccacggaatatgaagatggggaggccctgcggcatgtagtggggacggagggccaggaggccgatacgggggccggtgggggggtagggggcggcaaagggaggggaagtaaactgaactggggctgggcaacaggaaaaaagaagaaaccacagattagagaaatctcggcggtcaggaggcccggggtctaagatgtaaagaggtaaacagatttagggattgattgtctgctggggtgggttgagaggagaaaagggaagaaaagtcgggggactacgtcctcagacctgacctgagtggtgagaggtggacccaggaggagtggcaggtggtggcggggttttgcagagctcagttggaggccctctccgaggcagcttgatggaacgtgggagagccgggctggagtcacagtttttattttgctagggaggtagtcagtggcgcacaaagggtaacaagcagtgatagtggggatgctttccattttaggaaacttttcctaaaaggaagtggcaattttaactaatctcccctccgccgctcccagctgccgctccagatgctgctgctgccgccgcggccaccccaccctcggtcctcctctccggaggccatggacccaccgccccccaaggctccccctttccccaaggcggaaggcccctcctccactccttcctcggcggcggggccccgacccccgcggctgggccgccacctcctcatcgacgccaatggggtcccctacacatacacggtgcagctggaggaggagccccggggcccgccccagcgcgaggcgcccccaggagagcccggccctcgcaagggctacagctgcccggagtgcgcccgtgtctttgccagccctctgcggctgcagagccaccgcgtgtcgcactcggacctcaagcccttcacgtgcggcgcctgcggcaaggccttcaagcgctccagccacctgtcgcggcatcgcgccacgcaccgcgcccgcgccgggccgccgcacacctgcccgctctgcccacgccgcttccaggacgccgcggagctggcgcagcacgtgcgcctccactaagctcgagacccggcctgtgctgccctgcccgtctcagggccaccaagtctgacccacacagcgtcactcactcccacacacaccccctggctctgctgaggttactgccttaccctgggcctcagtttccccaccttccaaagggaggagcatcattccttccttaccccctttctagctgtgtgatgtagaccaaagtcgttgcccctccctgggcctgggaaccagtcggaactgggttccagtccagctgtgctgtgtgagcctgtgcaagtgacatgacctctctaaaccttggttttctgctctctggagcggtgaaccggtggttgtctgcggggaagagatgataaagagcacgggcacggtctggttcatttctgtatctaccccccttccgcccacgcccccgaccctttgctcaataaacattccgcactcc

SEQ ID NO: 23667 - DNA, 377 bp, Homo sapiens
  misc_feature 1..377: note = ENST00000592461
  source 1..377: mol_type = unassigned DNA
agattagagaaatctcggcggtcaggaggcccggggtctaagatgtaaagagctgccgctccagatgctgctgctgccgccgcggccaccccaccctcggtcctcctctccggaggccatggacccaccgccccccaaggctccccctttccccaaggcggaaggcccctcctccactccttcctcggcggcggggccccgacccccgcggctgggccgccacctcctcatcgacgccaatggggtcccctacacatacacggtgcagctggaggaggagccccggggcccgccccagcgcgaggcgcccccaggagagcccggccctcgcaagggctacagctgcccggagtgcgcccgtgtctttgccagccctc

SEQ ID NO: 23668 - DNA, 1025 bp, Homo sapiens
  misc_feature 1..1025: note = ENST00000545125
  source 1..1025: mol_type = unassigned DNA
agattagagaaatctcggcggtcaggaggcccggggtctaagatgtaaagagctgccgctccagatgctgctgctgccgccgcggccaccccaccctcggtcctcctctccggaggccatggacccaccgccccccaaggctccccctttccccaaggcggaaggcccctcctccactccttcctcggcggcggggccccgacccccgcggctgggccgccacctcctcatcgacgccaatggggtcccctacacatacacggtgcagctggaggaggagccccggggcccgccccagcgcgaggcgcccccaggagagcccggccctcgcaagggctacagctgcccggagtgcgcccgtgtctttgccagccctctgcggctgcagagccaccgcgtgtcgcactcggacctcaagcccttcacgtgcggcgcctgcggcaaggccttcaagcgctccagccacctgtcgcggcatcgcgccacgcaccgcgcccgcgccgggccgccgcacacctgcccgctctgcccacgccgcttccaggacgccgcggagctggcgcagcacgtgcgcctccactaagctcgagacccggcctgtgctgccctgcccgtctcagggccaccaagtctgacccacacagcgtcactcactcccacacacaccccctggctctgctgaggttactgccttaccctgggcctcagtttccccaccttccaaagggaggagcatcattccttccttaccccctttctagctgtgtgatgtagaccaaagtcgttgcccctccctgggcctgggaaccagtcggaactgggttccagtccagctgtgctgtgtgagcctgtgcaagtgacatgacctctctaaaccttggttttctgctctctggagcggtgaaccggtggttgtctgcggggaagagatgataaagagcacgggcacggtctggttcatttctgtatctaccccccttccgcccacgcccccgaccctttgctcaataaacattccgcactcc

SEQ ID NO: 23669 - DNA, 2316 bp, Homo sapiens
  misc_feature 1..2316: note = ENST00000587817
  source 1..2316: mol_type = unassigned DNA
ggtgctagaagtcggaccggaagtggaagtggtcttccaaggcttttttgccgctggtgtcaggagtattttcatattccaataccgataaatctttgaggtttctgggtgtctctggggagcccctgggccagattttcctctagactccagcccatctcttcagagcagctctgcttgagttcacagatgactgccaagcttcagacaccctacagaaaaagggttgagacccagtgtggccatgccagctaattggacctcacctcagaaatcctcagccctggctccagaggatcatggcagctcctatgagggatcagtgtccttcagggatgtggctatcgatttcagcagagaggaatggcggcacctggacccttctcagagaaacctgtaccgggatgtgatgctggagacctacagccacctgctctcagtaggatatcaagttcctgaagcagaggtggtcatgttggagcaaggaaaggaaccatgggcactgcagggtgagaggccacgtcagagctgcccagcaccgtgtcttgtgaactcccatcaccttcaagaaagcttccgagggtgaaggtacgctcgagcgtggtcaatgaggacaagtcaacgagagattcctgagtacgtctatggtcaccctttgcggtaaacttgtgcgctcagaagaagccagggtaacaatgggacaaactaaaaaaacgagagacaaattaattgactgttacacatttctgcaagcagaggttgccaacgcaggactggcaatagcatctgaaatcagactactactcctgcagaacaacatcttactggtaaaaaaaagaatagcccacatgaaggaaaactgatttggtggaaagacaacaacaataagacatgggaaatagggaaggtggtaacgtggaggagaggttttgcttgtgtttcaccaggagaaaatcagcttcctgtttggataccaactagacatttgaagttctacaatgaacctgtcggagatgcaaagaaaagcacctccacggagacagaaacactgcaatcaagcaccatcaactcacaagataaaatggtgatgtcagaagaatagatgaagttgccattcaccaagaaggcagagccgccgacttgggcacaattaaagaagctgacacagttagctaaaaaaggccttgagaacacaaaggtgacacaaactccagagagtatgctgcttgcagctttgatgattgtatcaatggtgcaccgtattctgctagtgagagcaagggaaggcgtgtggatccctgtgtccatggaccgacagtgggaggcctcgccatccatccatattttgactgaatctgcaggtgtacccaacagctccaaagagacagcgaccatcgagaacgggccatgatgacgatggcggttttgtccaaaagaaaagggggaaatgggaaaagagagatcagactgttaccgtgtctatgcagaaataagtagacataagagactccgttttgttctgtaccaagaaaattcttctgccttgagatgctgttaatctgtaaccctagccccaaccctgtgctcacagagacatgtgctgtgttgactcaaggtttaatggatttaccaaagggctatgcaggatgtactttgttaaaaaaaagtgcttgaaggcagtatgcttgttaaaagtcatcaccattctctaatctcaagtacccaggacacaatacactgtggaaggccacagggacctctgcctgggaaagccaggtattgcccaagatttctccccatgtgatagcctgagatatggcctcatgggaagggtaagacctgactgtcccccagcccgacatcccccagcccgacacccgaaaagggtctgtgctgaggaggattagtaaaagaggaaggcctctttgcagttcagataagaggaagtcatctgtctcctgctcgtccctgggcaatagaatgtctcagtgtaaaacccaattgtatgttctatttactgagataggagaaaaccaccttagggctggaggagagacatgctagtggtaatactgctctttaatgcaccgagatgtttgtacacgtgcacatcaaggcacagcaccttttcttaaccttgtttacgacacagagacttttgtttacatgttttcccgctgaccctctccccactattaccctattgtcctgccacatccccctctccgagatggtagagataatgatcaataaatactgagggaactcagagaccagtaagcaccggtcccctgggcccacttttctttctccaca

SEQ ID NO: 23670 - DNA, 670 bp, Homo sapiens
  misc_feature 1..670: note = ENST00000588723
  source 1..670: mol_type = unassigned DNA
ttccaaggcttttttgccgctggtgtcaggagtattttcatattccaataccgataaatctttgaggtttctgggtgtctctggggagcccctgggccagattttcctctagactccagcccatctcttcagagcagctctgcttgagttcacagatgactgccaagcttcagacaccctacagaaaaagggttgagacccagtgtggccatgccagctaattggacctcacctcagaaatcctcagccctggctccagaggatcatggcagctcctatgagggatcagtgtccttcagggatgtggctatcgatttcagcagagaggaatggcggcacctggacccttctcagagaaacctgtaccgggatgtgatgctggagacctacagccacctgctctcagtaggatatcaagttcctgaagcagaggtggtcatgttggagcaaggaaaggaaccatgggcactgcagggtgagaggccacgtcagagctgcccagggtgaaggtacgctcgagcgtggtcaatgaggacaagtcaacgagagattcctgagtacgtctatggtcaccctttgcggtaaacttgtgcgctcagaagaagccagggtaacaatgggacaaactaaaagtaaatatgcctcttagctccattaaaattcttttaaa

SEQ ID NO: 23671 - DNA, 8618 bp, Homo sapiens
  misc_feature 1..8618: note = ENST00000292841
  source 1..8618: mol_type = unassigned DNA
agcctacaaaggggaggtgctagaagtcggaccggaagtggaagtggtcttccaaggcttttttgccgctggtgtcaggagtattttcatattccaataccgataaatctttgaggtttctgggtgtctctggggagcccctgggccagattttcctctagactccagcccatctcttcagagcagctctgcttgagttcacagatgactgccaagcttcagacaccctacagaaaaagggttgagacccagtgtggccatgccagctaattggacctcacctcagaaatcctcagccctggctccagaggatcatggcagctcctatgagggatcagtgtccttcagggatgtggctatcgatttcagcagagaggaatggcggcacctggacccttctcagagaaacctgtaccgggatgtgatgctggagacctacagccacctgctctcagtaggatatcaagttcctgaagcagaggtggtcatgttggagcaaggaaaggaaccatgggcactgcagggtgagaggccacgtcagagctgcccaggagagaaattatgggaccataatcaatgtagaaaaatcctcagttataaacaagtatcctctcaacctcaaaaaatgtatcctggggagaaagcttatgaatgcgccaaatttgaaaagatattcacccagaagtcacagctcaaagtacacctgaaagttcttgcaggagaaaagctctatgtatgcattgaatgtgggaaggcttttgtacagaagccagaatttattatacaccagaaaacccatatgagagagaaaccctttaaatgcaatgaatgtggaaaatccttttttcaagtgtcgtccctcttcaggcatcagagaattcataccggagagaaactctatgaatgcagccagtgtgggaaaggcttctcttataactcagatctcagtatacatgagaaaattcatactggagagagacaccatgaatgcactgactgtggcaaagcattcacacaaaagtccacactcaagatgcatcagaaaatccatacaggcgagagatcctacatctgtattgaatgcggacaggccttcatccagaagacccatttgattgcacaccgaagaattcatactggagaaaaaccatatgagtgcagtaactgtggcaaatccttcatttccaagtcacaacttcaggtacatcaacgtgttcacacaagagtgaagccctatatatgtaccgaatatgggaaggtcttcagcaataattccaacctcgttacacataagaaagttcaaagtagagagaaatcttccatatgtactgagtgtgggaaggcctttacctacaggtcagagttgattattcatcagagaattcacactggagagaaaccttatgaatgcagtgactgtgggaaagccttcactcagaagtcagcactcacagtgcatcagagaattcatacaggagaaaaatcgtatatatgcatgaaatgtggactggccttcattcagaaggcacacttgattgcacatcaaataattcatactggagagaaacctcataaatgtggtcactgtgggaaattgtttacctccaagtcgcaactccatgttcataaacgaattcacacaggagaaaagccctatatgtgcaataaatgtgggaaggcattcaccaaccggtcaaatctcattacacatcagaaaactcatacaggagagaaatcttatatatgttccaaatgtggaaaggccttcacccagaggtcagacttgattacacatcagagaatccatactggggagaagccttatgaatgcaatacttgtggaaaagccttcactcagaagtcacacctcaatatacatcagaaaattcacactggagagagacagtatgaatgccacgaatgtgggaaagccttcaaccagaaatcaatactcattgttcatcagaaaattcatacaggagagaaaccctatgtatgcactgagtgtggaagagctttcatccgcaagtcaaactttattactcatcaaagaattcatactggagagaagccttatgaatgcagtgactgtgggaagtcctttacctccaagtctcagctcctggtgcatcagccagttcacacaggagagaaaccctatgtgtgtgccgagtgcgggaaggcctttagtggcaggtcaaatctcagtaagcaccagaaaactcataccggagaaaagccctacatttgttctgaatgtgggaagacctttcgacagaagtcagagttgattacacatcacagaattcatactggagagaaaccttatgagtgcagtgactgtgggaagtctttcactaaaaaatcacagctccaagtgcatcagcgaattcacactggagagaagccttacgtgtgtgctgagtgtgggaaggcctttactgacaggtccaatttgaataaacatcagacaacacacactggagacaaaccctacaagtgtggcatctgtgggaaaggcttcgttcagaaatcagtgttcagcgtccatcagagcagccacgcttgagagaaacagtgtgagaaaacccccctgagggttgggtctgattgtacactgttgcacgcatgcagcagaaaaatatgtatattattgtaaatagaaatgaccacagcagaatgtcacacatggctgttctggagagggcctctgagaaggcactgaatgaggcgagggacccttcctacattgtcaccatccccagtaaaccttgggtcattattcatactgacaaggaaccgagtcaatttggtgaataggaaaagccttctcatgaaaactacaatagaatactgttaccaaattcttcctaagaaagatcgtattaagttaacgataatcctgtttactgtggattaggtatagtgccaacaaattgaatgataaaacaacataatacgtagttattttgatagtgatgaatcctaagttatgtgagttgttcgttgtggaacacattgtgtaacagactcctgggtgtttttctttctcattcgaatctaccacagttggtcatatccaaccctcattcagtatttctatcaagaaagagatgctacaaaaaaaaaaagaaaaaacctttatgtatacagacgtaaacctcagaatgtatgttgagtccccactgtcatctaccaagacttgcacccccctcattatctaccatgactgtctctcagcctcacgggccctcagcactttgtgttttgacccccagcaccgtgtcttgtgaactcccatcaccttcaagaaagcttccgaggtaagaattttatggtcatctgggacaacttaaatctcccttctgctgtcatagttcttccaactcagttgcctttttttttttttcgtactcatcactgacttgaagcttagtatctggcttccttaaggatgtaactttcatgtaacagattaataacttatatgaaaaccaacacaaccatatgtttagggctggaaagggccatgacgcctggccatttttcctgttttaccttactcttatgtgtgtcacacttcatcaattccggaaacagtttctggagatctcctcattacctcttttacaatcacctcactccagcatggtgtctgttacctcttcccacttgtgacaatgtctagtaaggtccactctccattctgtgtgatgaccacttattacaaccctcagaataggggacagtggtgtgccccctgcaatacaatggtttctatctcctgatacttttattacacctctagcaggatgtcttgtgatcctccttattgatttttccctcacgatgatgaacaattatctcccgttactcacctagcagtatctaactgtccctaacacagcatgtgggaatgccctcaatacggtggatgctgttaactttcttccttcccctcaggcaatggcggtgacttacaatgaaccataatgtccacatttcccaactgtattttggagcctcttctgtccccttctttctaggaccccagttaaaaaaaaaaaaaacaaaaactagcccaatgtctgttgatgcccattaatcactaacacagtgtctgacccctccattaaattttgatggtatctcttggctccccattgtcccgttaacccaatgtctgctgattcccaatttcccacattgcttcatgcggttccttagtcacccttggctactgtacttcccccaagattgcatctccatgtttgcatggtcatgatccctggaagatggtgatgaggatgaggtcccagcctcatagaccttttcctctgagttccccccaaggcacaatggaatgatggacccagggtgggccagggatgatctggagatctcaggagaccacaagctgggcttcctgtctactacatgagtatggtgtgagcagaacagtgaaagctgtctatgttggttcaaattctggtgccaacactgatccacttagggaccctcagcctgcccagaaacctcctctgggcctcaattttctcacttgtaaaatgggattatgggagaatgaagtgactttttttgggtcacatgatggatgggatccaagccagcagggcccaatgacagcatcctgttaatattagtcatcagtcaacataagcatctgactatcctctgtatgcccaagcctcatgaagggaaacaatttattgtaaatgacttttgattatttctcttatatatttattgtaacaatattataatacttacgtatatgtatatgcatatacccgtatatacggaaggctttattttttagagtagttttaggttcaaagcaaaattgggtagaaattacagaggtttcccatatatcccctaatccacatatgcatagcctcccacattatcagcattcctctcagagtagtatatttgttacaattggtgaacctccactgacactcattaccaccccaagtctataggttatattagggttcatccttggtgtaacaccatagaatgtgtcttgtactttctgcttgttggagcaagtggatcatggcatgtttccactgttatacacagagtagtttcactgccctaaaaatcctctgtgttctgcctgtcatcccttcatctcctctaatcctggcaacattttttctgtctccatagttttacctttgatcttttatatcatatagttgaaattatacagtgtgtagccttttcaaattgacttctttcacttagtaatgtggatttcagtttcctccatgtcttttcatggcttgataatgcatttctttttagagccaaattatgttccatcgtctggatgtttatttattcacctactgaaggactgttggatgcttccttttggcaattatgaggaaagctgttataaatatctgtgcaggctttttgtgtggacataactgaaatatttttaaagttatatttattgaggtataatttacattcagtaatagtcacactttttagtgtagagttctgagttttgacagttgtatctaatcatgcaatcaacaccacaatcaagatgaagaacaggcccctcacttccctaacttctttcctatccctttttagtcccttttcccactcccagcccttggcaatcaccagtctgtttccgtctctatagttctgccttttccataatattgtataagtggagtccttgtgtgtgtgtgtgtgtgtgtgtgtgttttgtacgtgtatgtatatctccttttgagtcggagtgctttcatttaatgtgatgtatctgagattcatccatatggttctatgaaaaacaaatggaaaataaggtgatgaaaagatgctcaacatctttaattatcaggaaaatgtaaatcaaaccacaatgagatactactatagaatggcttttagaatggctaaaaatgaaaacgtgccataaattggcaagaatacagaccaatggaaattttcatgcattgcttgtaggattgtaaaacggtctgtccactatgcacaaaagtttggcagcttcttatactattaaccatacatttatcatatgactcagcaactccacacttaggtatttaccctagatgaaagaaaaattctgtttacatgaaaacctatactcagatgttcacagcaattgtataattgcccaaattaggaagtaacacaaatgtacatcagtggatgagtgattaaacaaattgtgtacaccaatactatggagggctgctcagacataaagaaatgatttattgacacttactacaacatggatgaatctcaaaagtgctgttgtattttaggtaaaccatgtgataacttgaattacatttgataaaagatttataagtgtaaaaactagatttatatattttaattttatatgtgcctgtcattacatactatagaaaattgtgtctacagtatgttatatagcatattgtaatatttattactgtatattccttgtgacaataaaatagtttgtattttatataatagtacctgttttatagtatatgttttattttatatgattacctaattttaatattttacatatcaaactttcacataatattttggttatttctactttcacgtagttgcatttaatgtttgtagtgtaaagatataactacaataaaagaggccagagagtctgcagttggagttagtcaacatttttatttgtcaggcatctcaattctggctgttttaacatcaaggatcttttctctggctttgggcctttgcaccgactgttctgagagtgctctgcttctccagtgcccgtgcatcttgctttcctcttccacctttgcagtgcctccatccccatcttatcctgccattgaagtaacacatctgtagagctcacttgctgctcccttattttgtatgatatttgcattgcaaatactattactatctgacctgattcaatattcctttttttggtttctcatccctcttccccactggaccatcagcctcatgagaaccagactttgtctgtcctgtttctgctgtataccaggcgcccagcacggtgccagctcaaagcagatgctcagtacaagcttgttaaatggatgaatgaataatagcaataatatcgaggttgaccagatgccccgcacagattggtaacatgtgtggggaagttggtggggtgggtttgggtcctctaattcaagatttaatgcctcctcccaccatggtccagcacacccagctctaactccatgtcagggcagtaccaaactgagtatcctacctacatacattccacactgtttacaagatctaacttagcctcctcctggtcacagtggcaggtcacatagagggggaaaggggcaggagtgggggatccataggcagggggccactcccatcagcatctagcctagcactttctatcctgcaccccattgtcagtgtcacctgccccacctcctccactggagcagccactggaaaatatagaaccccaggagcaagaggaatgtggcagggctgagggttctggggctcaggcaccttgttggataatggatgtgatgcagtgtggcagacattgaccccgtggccaaagtcagcttaaagccaaggttgtcatggacacttcccataatgccaggatgaatcacaccctccaccctcagctctcaaatgggctactagtgccaatgtgactattttttatttttattttttttgagatggagtctcactctgttgccaggctggagtgcagtggtgtgatcttggctcactgcaacctctgcctcccgggttcaagtgattctcctgcctcagcctccgagtagctgcgattacaggcacccaccaccacacccagctaattttttgtatttttagtagagatggggtttcaccatgttggccaggatggtctcaatctcctgacctcacgatttgcccacctcggccacccaaagcattgggattacaggcctgagccacctcgcccaacccagtgtgactatttatggtatatcctacacctccccaccacactctactccacattcctcataccgtaccataccgtacaccatgccatagcataccacttacagttttacttaattctataattatattgtttctattaatggttttaaatataatcaacacaattatactttataacaaatatcagaatccttgtcattattatatgcctctaaattattaagatatcataaataacaacatatcaattctgatgctaagaaatcctctgtctctgctagtttctgccaccttcaggtgtttgtattatataaacacagtagtcccacccctgggctgatgttttccaccctctgtgaaatcagcacaattaggttacatccttagtgattttattatggtgttattttaatatttattataacaaggaatgctgctattaaaacaaaaaattgtgctctctgtttacatttgtgaaataggacaatataagaagcacattagtacaatcatttgagttatattaagtttgtgcctataataaatgccaatcctgaaaa

SEQ ID NO: 23672 - DNA, 3190 bp, Homo sapiens
  misc_feature 1..3190: note = ENST00000392157
  source 1..3190: mol_type = unassigned DNA
agtgatgggagtctgtggtcagtgacagagcctgtagggtcagttatggtgatcggtttctgggtgtctctggggagcccctgggccagattttcctctagactccagcccatctcttcagagcagctctgcttgagttcacagatgactgccaagcttcagacaccctacagaaaaagggttgagacccagtgtggccatgccagctaattggacctcacctcagaaatcctcagccctggctccagaggatcatggcagctcctatgagtgttaaccttgatgcctgaaagaactggaaattatgaagatagattcagaagtcaaatatgttaactaactgcattgaagagtagaagaaaacaatagcctaggatcagtgtccttcagggatgtggctatcgatttcagcagagaggaatggcggcacctggacccttctcagagaaacctgtaccgggatgtgatgctggagacctacagccacctgctctcagtaggatatcaagttcctgaagcagaggtggtcatgttggagcaaggaaaggaaccatgggcactgcagggtgagaggccacgtcagagctgcccaggagagaaattatgggaccataatcaatgtagaaaaatcctcagttataaacaagtatcctctcaacctcaaaaaatgtatcctggggagaaagcttatgaatgcgccaaatttgaaaagatattcacccagaagtcacagctcaaagtacacctgaaagttcttgcaggagaaaagctctatgtatgcattgaatgtgggaaggcttttgtacagaagccagaatttattatacaccagaaaacccatatgagagagaaaccctttaaatgcaatgaatgtggaaaatccttttttcaagtgtcgtccctcttcaggcatcagagaattcataccggagagaaactctatgaatgcagccagtgtgggaaaggcttctcttataactcagatctcagtatacatgagaaaattcatactggagagagacaccatgaatgcactgactgtggcaaagcattcacacaaaagtccacactcaagatgcatcagaaaatccatacaggcgagagatcctacatctgtattgaatgcggacaggccttcatccagaagacccatttgattgcacaccgaagaattcatactggagaaaaaccatatgagtgcagtaactgtggcaaatccttcatttccaagtcacaacttcaggtacatcaacgtgttcacacaagagtgaagccctatatatgtaccgaatatgggaaggtcttcagcaataattccaacctcgttacacataagaaagttcaaagtagagagaaatcttccatatgtactgagtgtgggaaggcctttacctacaggtcagagttgattattcatcagagaattcacactggagagaaaccttatgaatgcagtgactgtgggaaagccttcactcagaagtcagcactcacagtgcatcagagaattcatacaggagaaaaatcgtatatatgcatgaaatgtggactggccttcattcagaaggcacacttgattgcacatcaaataattcatactggagagaaacctcataaatgtggtcactgtgggaaattgtttacctccaagtcgcaactccatgttcataaacgaattcacacaggagaaaagccctatatgtgcaataaatgtgggaaggcattcaccaaccggtcaaatctcattacacatcagaaaactcatacaggagagaaatcttatatatgttccaaatgtggaaaggccttcacccagaggtcagacttgattacacatcagagaatccatactggggagaagccttatgaatgcaatacttgtggaaaagccttcactcagaagtcacacctcaatatacatcagaaaattcacactggagagagacagtatgaatgccacgaatgtgggaaagccttcaaccagaaatcaatactcattgttcatcagaaaattcatacaggagagaaaccctatgtatgcactgagtgtggaagagctttcatccgcaagtcaaactttattactcatcaaagaattcatactggagagaagccttatgaatgcagtgactgtgggaagtcctttacctccaagtctcagctcctggtgcatcagccagttcacacaggagagaaaccctatgtgtgtgccgagtgcgggaaggcctttagtggcaggtcaaatctcagtaagcaccagaaaactcataccggagaaaagccctacatttgttctgaatgtgggaagacctttcgacagaagtcagagttgattacacatcacagaattcatactggagagaaaccttatgagtgcagtgactgtgggaagtctttcactaaaaaatcacagctccaagtgcatcagcgaattcacactggagagaagccttacgtgtgtgctgagtgtgggaaggcctttactgacaggtccaatttgaataaacatcagacaacacacactggagacaaaccctacaagtgtggcatctgtgggaaaggcttcgttcagaaatcagtgttcagcgtccatcagagcagccacgcttgagagaaacagtgtgagaaaacccccctgagggttgggtctgattgtacactgttgcacgcatgcagcagaaaaatatgtatattattgtaaatagaaatgaccacagcagaatgtcacacatggctgttctggagagggcctctgagaaggcactgaatgaggcgagggacccttcctacattgtcaccatccccagtaaaccttgggtcattattcatactgacaaggaaccgagtcaatttggtgaataggaaaagccttctcatgaaaactacaatagaatactgttaccaaattcttcctaagaaagatcgtattaagttaacgataatcctgtttactgtggattaggtatagtgccaacaaattgaatgataaaacaacataatacgtagttattttgatagtgatgaatcctaagttatgtgagttgttcgttgtggaacacattgtgtaacagactcctgggtgtttttctttctcattcgaatctaccacagttggtcatatccaaccctcattcagtatttctatcaagaaagagatgctacaaaaaaaaaaagaaaaaacctttatgta

SEQ ID NO: 23673 - DNA, 596 bp, Homo sapiens
  misc_feature 1..596: note = ENST00000588354
  source 1..596: mol_type = unassigned DNA
tcttccaaggcttttttgccgctggtgtcaggagtattttcatattccaataccgataaatctttgaggtttctgggtgtctctggggagcccctgggccagattttcctctagactccagcccatctcttcagagcagctctgcttgagttcacagatgactgccaagcttcagacaccctacagaaaaagggttgagacccagtgtggccatgccagctaattggacctcacctcagaaatcctcagccctggctccagaggatcatggcagctcctatgagtgttaaccttgatgcctgaaagaactggaaattatgaagatagattcagaagtcaaatatgttaactaactgcattgaagagtagaagaaaacaatagcctagtaggtttttactgggattagtgaaacaactgctatgttctcagcaacccactccaaagccaaagtcaaaactaaaattgtaaaatatctcaaaaacaataaaaatggtatatatatatcagaagctctggtatatagcaaaactgtactaaaaataatttagaaaaataatttatctcatgcaaatgaataaaaaaatctaaatgaaaa

SEQ ID NO: 23674 - DNA, 6822 bp, Homo sapiens
  misc_feature 1..6822: note = ENST00000356958
  source 1..6822: mol_type = unassigned DNA
agcctacaaaggggaggtgctagaagtcggaccggaagtggaagtggtcttccaaggcttttttgccgctggtgtcaggagtattttcatattccaataccgataaatctttgaggtttctgggtgtctctggggagcccctgggccagattttcctctagactccagcccatctcttcagagcagctctgcttgagttcacagatgactgccaagcttcagacaccctacagaaaaagggttgagacccagtgtggccatgccagctaattggacctcacctcagaaatcctcagccctggctccagaggatcatggcagctcctatgagtgttaaccttgatgcctgaaagaactggaaattatgaagatagattcagaagtcaaatatgttaactaactgcattgaagagtagaagaaaacaatagcctaggatcagtgtccttcagggatgtggctatcgatttcagcagagaggaatggcggcacctggacccttctcagagaaacctgtaccgggatgtgatgctggagacctacagccacctgctctcagtaggatatcaagttcctgaagcagaggtggtcatgttggagcaaggaaaggaaccatgggcactgcagggtgagaggccacgtcagagctgcccaggagagaaattatgggaccataatcaatgtagaaaaatcctcagttataaacaagtatcctctcaacctcaaaaaatgtatcctggggagaaagcttatgaatgcgccaaatttgaaaagatattcacccagaagtcacagctcaaagtacacctgaaagttcttgcaggagaaaagctctatgtatgcattgaatgtgggaaggcttttgtacagaagccagaatttattatacaccagaaaacccatatgagagagaaaccctttaaatgcaatgaatgtggaaaatccttttttcaagtgtcgtccctcttcaggcatcagagaattcataccggagagaaactctatgaatgcagccagtgtgggaaaggcttctcttataactcagatctcagtatacatgagaaaattcatactggagagagacaccatgaatgcactgactgtggcaaagcattcacacaaaagtccacactcaagatgcatcagaaaatccatacaggcgagagatcctacatctgtattgaatgcggacaggccttcatccagaagacccatttgattgcacaccgaagaattcatactggagaaaaaccatatgagtgcagtaactgtggcaaatccttcatttccaagtcacaacttcaggtacatcaacgtgttcacacaagagtgaagccctatatatgtaccgaatatgggaaggtcttcagcaataattccaacctcgttacacataagaaagttcaaagtagagagaaatcttccatatgtactgagtgtgggaaggcctttacctacaggtcagagttgattattcatcagagaattcacactggagagaaaccttatgaatgcagtgactgtgggaaagccttcactcagaagtcagcactcacagtgcatcagagaattcatacaggagaaaaatcgtatatatgcatgaaatgtggactggccttcattcagaaggcacacttgattgcacatcaaataattcatactggagagaaacctcataaatgtggtcactgtgggaaattgtttacctccaagtcgcaactccatgttcataaacgaattcacacaggagaaaagccctatatgtgcaataaatgtgggaaggcattcaccaaccggtcaaatctcattacacatcagaaaactcatacaggagagaaatcttatatatgttccaaatgtggaaaggccttcacccagaggtcagacttgattacacatcagagaatccatactggggagaagccttatgaatgcaatacttgtggaaaagccttcactcagaagtcacacctcaatatacatcagaaaattcacactggagagagacagtatgaatgccacgaatgtgggaaagccttcaaccagaaatcaatactcattgttcatcagaaaattcatacaggagagaaaccctatgtatgcactgagtgtggaagagctttcatccgcaagtcaaactttattactcatcaaagaattcatactggagagaagccttatgaatgcagtgactgtgggaagtcctttacctccaagtctcagctcctggtgcatcagccagttcacacaggagagaaaccctatgtgtgtgccgagtgcgggaaggcctttagtggcaggtcaaatctcagtaagcaccagaaaactcataccggagaaaagccctacatttgttctgaatgtgggaagacctttcgacagaagtcagagttgattacacatcacagaattcatactggagagaaaccttatgagtgcagtgactgtgggaagtctttcactaaaaaatcacagctccaagtgcatcagcgaattcacactggagagaagccttacgtgtgtgctgagtgtgggaaggcctttactgacaggtccaatttgaataaacatcagacaacacacactggagacaaaccctacaagtgtggcatctgtgggaaaggcttcgttcagaaatcagtgttcagcgtccatcagagcagccacgcttgagagaaacagtgtgagaaaacccccctgagggttgggtctgattgtacactgttgcacgcatgcagcagaaaaatatgtatattattgtaaatagaaatgaccacagcagaatgtcacacatggctgttctggagagggcctctgagaaggcactgaatgaggcgagggacccttcctacattgtcaccatccccagtaaaccttgggtcattattcatactgacaaggaaccgagtcaatttggtgaataggaaaagccttctcatgaaaactacaatagaatactgttaccaaattcttcctaagaaagatcgtattaagttaacgataatcctgtttactgtggattaggtatagtgccaacaaattgaatgataaaacaacataatacgtagttattttgatagtgatgaatcctaagttatgtgagttgttcgttgtggaacacattgtgtaacagactcctgggtgtttttctttctcattcgaatctaccacagttggtcatatccaaccctcattcagtatttctatcaagaaagagatgctacaaaaaaaaaaagaaaaaacctttatgtatacagacgtaaacctcagaatgtatgttgagtccccactgtcatctaccaagacttgcacccccctcattatctaccatgactgtctctcagcctcacgggccctcagcactttgtgttttgacccccagcaccgtgtcttgtgaactcccatcaccttcaagaaagcttccgaggtaagaattttatggtcatctgggacaacttaaatctcccttctgctgtcatagttcttccaactcagttgcctttttttttttttcgtactcatcactgacttgaagcttagtatctggcttccttaaggatgtaactttcatgtaacagattaataacttatatgaaaaccaacacaaccatatgtttagggctggaaagggccatgacgcctggccatttttcctgttttaccttactcttatgtgtgtcacacttcatcaattccggaaacagtttctggagatctcctcattacctcttttacaatcacctcactccagcatggtgtctgttacctcttcccacttgtgacaatgtctagtaaggtccactctccattctgtgtgatgaccacttattacaaccctcagaataggggacagtggtgtgccccctgcaatacaatggtttctatctcctgatacttttattacacctctagcaggatgtcttgtgatcctccttattgatttttccctcacgatgatgaacaattatctcccgttactcacctagcagtatctaactgtccctaacacagcatgtgggaatgccctcaatacggtggatgctgttaactttcttccttcccctcaggcaatggcggtgacttacaatgaaccataatgtccacatttcccaactgtattttggagcctcttctgtccccttctttctaggaccccagttaaaaaaaaaaaaaacaaaaactagcccaatgtctgttgatgcccattaatcactaacacagtgtctgacccctccattaaattttgatggtatctcttggctccccattgtcccgttaacccaatgtctgctgattcccaatttcccacattgcttcatgcggttccttagtcacccttggctactgtacttcccccaagattgcatctccatgtttgcatggtcatgatccctggaagatggtgatgaggatgaggtcccagcctcatagaccttttcctctgagttccccccaaggcacaatggaatgatggacccagggtgggccagggatgatctggagatctcaggagaccacaagctgggcttcctgtctactacatgagtatggtgtgagcagaacagtgaaagctgtctatgttggttcaaattctggtgccaacactgatccacttagggaccctcagcctgcccagaaacctcctctgggcctcaattttctcacttgtaaaatgggattatgggagaatgaagtgactttttttgggtcacatgatggatgggatccaagccagcagggcccaatgacagcatcctgttaatattagtcatcagtcaacataagcatctgactatcctctgtatgcccaagcctcatgaagggaaacaatttattgtaaatgacttttgattatttctcttatatatttattgtaacaatattataatacttacgtatatgtatatgcatatacccgtatatacggaaggctttattttttagagtagttttaggttcaaagcaaaattgggtagaaattacagaggtttcccatatatcccctaatccacatatgcatagcctcccacattatcagcattcctctcagagtagtatatttgttacaattggtgaacctccactgacactcattaccaccccaagtctataggttatattagggttcatccttggtgtaacaccatagaatgtgtcttgtactttctgcttgttggagcaagtggatcatggcatgtttccactgttatacacagagtagtttcactgccctaaaaatcctctgtgttctgcctgtcatcccttcatctcctctaatcctggcaacattttttctgtctccatagttttacctttgatcttttatatcatatagttgaaattatacagtgtgtagccttttcaaattgacttctttcacttagtaatgtggatttcagtttcctccatgtcttttcatggcttgataatgcatttctttttagagccaaattatgttccatcgtctggatgtttatttattcacctactgaaggactgttggatgcttccttttggcaattatgaggaaagctgttataaatatctgtgcaggctttttgtgtggacataactgaaatatttttaaagttatatttattgaggtataatttacattcagtaatagtcacactttttagtgtagagttctgagttttgacagttgtatctaatcatgcaatcaacaccacaatcaagatgaagaacaggcccctcacttccctaacttctttcctatccctttttagtcccttttcccactcccagcccttggcaatcaccagtctgtttccgtctctatagttctgccttttccataatattgtataagtggagtccttgtgtgtgtgtgtgtgtgtgtgtgtgttttgtacgtgtatgtatatctccttttgagtcggagtgctttcatttaatgtgatgtatctgagattcatccatatggttctatgaaaaacaaatggaaaataaggtgatgaaaagatgctcaacatctttaattatcaggaaaatgtaaatcaaaccacaatgagatactactatagaatggcttttagaatggctaaaaatgaaaacgtgccataaattggcaagaatacagaccaatggaaattttcatgcattgcttgtaggattgtaaaacggtctgtccactatgcacaaaagtttggcagcttcttatactattaaccatacatttatcatatgactcagcaactccacacttaggtatttaccctagatgaaagaaaaattctgtttacatgaaaacctatactcagatgttcacagcaattgtataattgcccaaattaggaagtaacacaaatgtacatcagtggatgagtgattaaacaaattgtgtacaccaatactatggagggctgctcagacataaagaaatgatttattgacacttactacaacatggatgaatctcaaaagtgctgttgtattttaggtaaaccatgtgataacttgaattacatttgataaaagatttataagtgtaaaaactagatttatatattttaattttatatgtgcctgtcattacatactatagaaaattgtgtctacagtatgttatatagcatattgtaatatttattactgtatattccttgtgacaataaaatagtttgtattttatataatagtacctgttttatagtatatgttttattttatatgattacctaattttaatattttacatatcaaactttcacataatattttggttatttctactttcacgtagttgcatttaatgtttgtagtgtaaagatataactacaataaaagaggccagagagtctgca

SEQ ID NO: 23675 - DNA, 4364 bp, Homo sapiens
  misc_feature 1..4364: note = ENST00000355202
  source 1..4364: mol_type = unassigned DNA
gatctgcgcatgcgcactcgaggcaaggcggccactcccagaagtctccggggctcgagcggtgggtgggaggcgcggtccaagtggtcgctgccgtatttctcgtaggtttttaggattctggactccatttctcaccggtacctgcggtcctgactgttctggcttggactacatattacaaaggcaacggagaaaacttggacccctggctccggttccgggaccttttggttccacctgaagaaggcggcgcaggtcactgcgggagcctctgcagccccagcccgccgcccgcgtggtaccctgcgtggcggtgagagtggggctgcaggaggcgctcagagcgcggaggcccccaggcgggccgggcgagtctcccgcctcctcaggccctagggtgctggagctgcggaggaggggcccgtctctaggagacaggcggggagcgtgagagaccgcgcagcggcgacaggaccggcttgcctgtgtgacgtgggtgcagttgcgggactgtgaggggtcttggttcttttgactttgctcttctggtagagaaacgccaaggactgatcaactcttgccagtctcaaaccatgtcctatggatcaataacattcggggatgtggccatagacttctctcatcaggagtgggaatatctcagcctggttcagaagaccttgtaccaggaggtgatgatggagaactatgacaacttagtctcattggcaggacattccgtatctaagccagatttaatcaccttattggagcaaggaaaagagccatggatgattgtgagggaagaaacaagaggagagtgtacagatttggattcaagatgtgaaataatcagcgatgggaaaatgcagctttataggaaacactcatgtgttactctccatcagagaattcataatggacagaaaccatatgagtgtaagcaatgtcagaagtcctttagtcatcttacagaactcatggtacatcaaacaattcatactagtgaggaacctgatcaatgtgaaaagtttaggaaggcatttagccatcttacagaccttagaaagcatcagaaaattaatgctcgtgagaaaccttatgaatgtgaagaatgtgggaaggtcttcagttatcctgcaaaccttgctcaacatgggaaagttcatgttgagaaaccctatgaatgtaaagagtgtggggaagcttttaggactagccgtcaacttactgtacatcatagatttcattatggtgagaaaccctacgaatgtaaggaatgtggcaaggcctttagtgtgtatggacgacttagtcgacatcagagtattcacactggtgagaagccctttgaatgtaacaaatgtgggaagtcctttaggctcaaagcaggccttaaagtacatcagagtattcatactggagagaagccacatgaatgtaaggaatgtggaaaggcctttcgtcagttttcccaccttgtgggtcataaaagaattcatactggagaaaaaccctatgaatgcaaggaatgcgggaagggctttacatgtaggtatcaacttaccatgcatcagagaatttattcaggggagaaacactatgaatgtaaagaaaatggggaggcttttagtagtggccatcaacttactgcacctcatacatttgaaagtgttgagaaaccttataagtgtgaggaatgtgggaaagcctttagtgtgcatggacgacttactcgacatcagggtattcatagtggtaagaaaccctatgaatgtaacaaatgtgggaagtcctttaggctcaattcatcccttaaaatacatcaaaatattcataccggtgagaaaccctacaaatgtaaggaatgtgggaaggccttcagtcagcgtgcacaccttgcccatcataacagaattcatactggttacaaaccctttgaatgtaaagaatgtgggaagtcctttcgttgtgcctcatatcttgttatacatgagagaattcatacaggagagaaaccctatgtatgtcaagagtgtgggaagggttttagttatagccataaactcactatacatcgcagagttcatactggtgagaaaccttatgaatgtaaggaatgtgggaaggcctttagtgtatctggacaacttactcagcatctgagtattcacagtggtaagaaaccctttgaatgcaacaaatgcgggaagtcttttaggttcatttctgtacttaaagcccatcagaatattcatagcgctgagaaaccctacgaatgtaaggaatgtggcaaggcctttcgtcatgccacaagcctcatatatcatgaccgaactcatgctggtgaaaagtcctatgaatgtaaagaatgtggggaaacttttagtcatgcttcacatcttattattcatgagagaattcataccagtgataaaccctatgaatgtaaaagatgtgggaaggcatttcactgtgcctcatatcttgttagacatgaaagcgttcatgctgatggaaatccctatatgtgtgaagagtgtgggaaagcttttaatagtagccatgaacttagtatacatcatagagttcatactggtgagaaaccctttaaatgtaacaaatgcagaaggtcctttaggcttagatccatccttgaagtacatcagagaattcatatttgatagagaaattgtggcatatacaggtagtaaagaaagcacattgtgtcaatggatttatcccactgaacaatttgaatgaagacaatgtggaatggctttgagatacagttcagtttttattaggcatcaatttgtattggtgtgaacttttcaaaatgtaaatcatatatgcagtttctttggtatgacctgtgttaactcagattcagagaatttataatgtatttttttaataacataagaaaacttttctgatattcctctagttttggattgccaaaatattcacagtagaggaaaactgagaaaacgtaggaaaccattctttatacttgcatgtaaacatcttccagcaacaatcatttattgttaaacctggaaaaagccattacacaggaaacctctgttgatataagcgatgatgggaaaggctatttagccactctgcatatttaatgctcatgatcaacatctgcttcctatagctgggatgatatgggggaagatatttatcccttctggggatcatatataaatgatgatagtagtacctacagtatagtgctgttagaattacatgagttagatgtggaggtcagagtggaagcaggtgtgagagggtcccgcagaagaaaacatggctgccaaagtgtttgagtccatcggcaagtttggcctggccttagctgttgcaggaggcatggtgaactctgccttatgtaatgtggatgctgggcacagagctgccatctttgaccaattccgtggagtacagaacattgtggtaggggaagggactcactttctcatcccatgtgtacaaaaaccaattatctttgactgctgttctcaaccacgtagtgcgccagtcatcactggtagcaaagatttacagaatgtcaacatcacactgtgcatcctcttccggcccatcactagccagcttcctcgcatcttcaccagcattggagaggactacgatgagtgtgtgctgccgttcattaccacggagatcctcaagtcactggtggctcgctttgatgctggagaactaatcacccagagggagctggtctccagccaggtgagcaacaaccttatggagtgagcagccacctttgggctcattctggacgacgtgtctttgacacatctgaccttcttgaaggagttaacagacaggtggccccccaggaagcagagagcgccagatttgtggtggaaaaggcggccatcatctctgctgagggtgactccaaggcagctgagctgatcgccaactcactggccactgcaggggacggccagagcgagctgtgcaagctggaagctgcagaagacattgcataccagctctcatgctctcggaacatcacctgcctgccggcagggcagtccgtgctcctccagctgccctagtgaggccccagcctacctgcacctccgtgaggcaactgggccacagccccgatgattcgtaacaccacctttcgccctcaccccagaaatcactgaaatttcatgattggcttaaagtgaaggaagtaaaggtaaaatcacttcagatctctaaaaaacaaagaattacatgagttagtacatgaaaaaattatgggaaactacatgaaatatactgttacgttcaataaacattagcttctgtatataataatatca

SEQ ID NO: 23676 - DNA, 4003 bp, Homo sapiens
  misc_feature 1..4003: note = ENST00000395835
  source 1..4003: mol_type = unassigned DNA
attgacccttggctccaggttccctgctgcttcctgtgccttcctcagcctagtacgactacaacagagaaatggtcccaatgggaaatcagatactgagtcttagatgaagatttccagtgagaagaaacagataggatgagaagcttagaagagtaattgcccttaagaaaggtcttggttcttttgactttgctcttctggtagagaaacgccaaggactgatcaactcttgccagtctcaaaccatgtcctatggatcaataacattcggggatgtggccatagacttctctcatcaggagtgggaatatctcagcctggttcagaagaccttgtaccaggaggtgatgatggagaactatgacaacttagtctcattgggacattccgtatctaagccagatttaatcaccttattggagcaaggaaaagagccatggatgattgtgagggaagaaacaagaggagagtgtacagatttggattcaagatgtgaaataatcagcgatgggaaaatgcagctttataggaaacactcatgtgttactctccatcagagaattcataatggacagaaaccatatgagtgtaagcaatgtcagaagtcctttagtcatcttacagaactcatggtacatcaaacaattcatactagtgaggaacctgatcaatgtgaaaagtttaggaaggcatttagccatcttacagaccttagaaagcatcagaaaattaatgctcgtgagaaaccttatgaatgtgaagaatgtgggaaggtcttcagttatcctgcaaaccttgctcaacatgggaaagttcatgttgagaaaccctatgaatgtaaagagtgtggggaagcttttaggactagccgtcaacttactgtacatcatagatttcattatggtgagaaaccctacgaatgtaaggaatgtggcaaggcctttagtgtgtatggacgacttagtcgacatcagagtattcacactggtgagaagccctttgaatgtaacaaatgtgggaagtcctttaggctcaaagcaggccttaaagtacatcagagtattcatactggagagaagccacatgaatgtaaggaatgtggaaaggcctttcgtcagttttcccaccttgtgggtcataaaagaattcatactggagaaaaaccctatgaatgcaaggaatgcgggaagggctttacatgtaggtatcaacttaccatgcatcagagaatttattcaggggagaaacactatgaatgtaaagaaaatggggaggcttttagtagtggccatcaacttactgcacctcatacatttgaaagtgttgagaaaccttataagtgtgaggaatgtgggaaagcctttagtgtgcatggacgacttactcgacatcagggtattcatagtggtaagaaaccctatgaatgtaacaaatgtgggaagtcctttaggctcaattcatcccttaaaatacatcaaaatattcataccggtgagaaaccctacaaatgtaaggaatgtgggaaggccttcagtcagcgtgcacaccttgcccatcataacagaattcatactggttacaaaccctttgaatgtaaagaatgtgggaagtcctttcgttgtgcctcatatcttgttatacatgagagaattcatacaggagagaaaccctatgtatgtcaagagtgtgggaagggttttagttatagccataaactcactatacatcgcagagttcatactggtgagaaaccttatgaatgtaaggaatgtgggaaggcctttagtgtatctggacaacttactcagcatctgagtattcacagtggtaagaaaccctttgaatgcaacaaatgcgggaagtcttttaggttcatttctgtacttaaagcccatcagaatattcatagcgctgagaaaccctacgaatgtaaggaatgtggcaaggcctttcgtcatgccacaagcctcatatatcatgaccgaactcatgctggtgaaaagtcctatgaatgtaaagaatgtggggaaacttttagtcatgcttcacatcttattattcatgagagaattcataccagtgataaaccctatgaatgtaaaagatgtgggaaggcatttcactgtgcctcatatcttgttagacatgaaagcgttcatgctgatggaaatccctatatgtgtgaagagtgtgggaaagcttttaatagtagccatgaacttagtatacatcatagagttcatactggtgagaaaccctttaaatgtaacaaatgcagaaggtcctttaggcttagatccatccttgaagtacatcagagaattcatatttgatagagaaattgtggcatatacaggtagtaaagaaagcacattgtgtcaatggatttatcccactgaacaatttgaatgaagacaatgtggaatggctttgagatacagttcagtttttattaggcatcaatttgtattggtgtgaacttttcaaaatgtaaatcatatatgcagtttctttggtatgacctgtgttaactcagattcagagaatttataatgtatttttttaataacataagaaaacttttctgatattcctctagttttggattgccaaaatattcacagtagaggaaaactgagaaaacgtaggaaaccattctttatacttgcatgtaaacatcttccagcaacaatcatttattgttaaacctggaaaaagccattacacaggaaacctctgttgatataagcgatgatgggaaaggctatttagccactctgcatatttaatgctcatgatcaacatctgcttcctatagctgggatgatatgggggaagatatttatcccttctggggatcatatataaatgatgatagtagtacctacagtatagtgctgttagaattacatgagttagatgtggaggtcagagtggaagcaggtgtgagagggtcccgcagaagaaaacatggctgccaaagtgtttgagtccatcggcaagtttggcctggccttagctgttgcaggaggcatggtgaactctgccttatgtaatgtggatgctgggcacagagctgccatctttgaccaattccgtggagtacagaacattgtggtaggggaagggactcactttctcatcccatgtgtacaaaaaccaattatctttgactgctgttctcaaccacgtagtgcgccagtcatcactggtagcaaagatttacagaatgtcaacatcacactgtgcatcctcttccggcccatcactagccagcttcctcgcatcttcaccagcattggagaggactacgatgagtgtgtgctgccgttcattaccacggagatcctcaagtcactggtggctcgctttgatgctggagaactaatcacccagagggagctggtctccagccaggtgagcaacaaccttatggagtgagcagccacctttgggctcattctggacgacgtgtctttgacacatctgaccttcttgaaggagttaacagacaggtggccccccaggaagcagagagcgccagatttgtggtggaaaaggcggccatcatctctgctgagggtgactccaaggcagctgagctgatcgccaactcactggccactgcaggggacggccagagcgagctgtgcaagctggaagctgcagaagacattgcataccagctctcatgctctcggaacatcacctgcctgccggcagggcagtccgtgctcctccagctgccctagtgaggccccagcctacctgcacctccgtgaggcaactgggccacagccccgatgattcgtaacaccacctttcgccctcaccccagaaatcactgaaatttcatgattggcttaaagtgaaggaagtaaaggtaaaatcacttcagatctctaaaaaacaaagaattacatgagttagtacatgaaaaaattatgggaaactacatgaaatatactgttacgttcaataaacattagcttctgtatat

SEQ ID NO: 23677 - DNA, 1190 bp, Homo sapiens
  misc_feature 1..1190: note = ENST00000586559
  source 1..1190: mol_type = unassigned DNA
acagagaaatggtcccaatgggaaatcagatactgagtcttagatgaagatttccagtgagaagaaacagataggatgagaagcttagaagagtaattgcccttaagaaaggtcttggttcttttgactttgctcttctggtagagaaacgccaaggactgatcaactcttgccagtctcaaaccatgtcctatggatcaataacattcggggatgtggccatagacttctctcatcaggagtgggaatatctcagcctggttcagaagaccttgtaccaggaggtgatgatggagaactatgacaacttagtctcattgggacattccgtatctaagccagatttaatcaccttattggagcaaggaaaagagccatggatgattgtgagggaagaaacaagaggagagtgtacagcagagctacagagtaaaaattgtggattccaactgagagacctgcaagacagtctccatttaagaaagaattgctagggaaacccaaagagaagacataaataaagactggaagaattgaagctgcaacacaaacacagctacagcacacaatgaacacggcctaactcctacgcagacgaacctcaaactttgcactgaagatttggattcaagatgtgaaataatcagcgatgggaaaatgcagctttataggaaacactcatgtgttactctccatcagagaattcataatggacagaaaccatatgagtgtaagcaatgtcagaagtcctttagtcatcttacagaactcatggtacatcaaacaattcatactagtgaggaacctgatcaatgtgaaaagtttaggaaggcatttagccatcttacagaccttagaaagcatcagaaaattaatgctcgtgagaaaccttatgaatgtgaagaatgtgggaaggtcttcagttatcctgcaaaccttgctcaacatgggaaagttcatgttgagaaaccctatgaatgtaaagagtgtggggaagcttttaggactagccgtcaacttactgtacatcatagatttcattatggtgagaaaccctacgaatgtaaggaatgtggcaaggcctttagtgtgtatggacgacttagtcgacatcagagtattcacactggtgagaagccctttgaatgtaacaaatgtgggaagtcctttaggctcaaagcaggccttaa

SEQ ID NO: 23678 - DNA, 549 bp, Homo sapiens
  misc_feature 1..549: note = ENST00000590670
  source 1..549: mol_type = unassigned DNA
ttgacccttggctccaggttccctgctgcttcctgtgccttcctcagcctagtacgactacaacagagaaatggtcccaatgggaaatcagatactgagtcttagatgaagatttccagtgagaagaaacagataggatgagaagcttagaagagtaattgcccttaagaaagatttggattcaagatgtgaaataatcagcgatgggaaaatgcagctttataggaaacactcatgtgttactctccatcagagaattcataatggacagaaaccatatgagtgtaagcaatgtcagaagtcctttagtcatcttacagaactcatggtacatcaaacaattcatactagtgaggaacctgatcaatgtgaaaagtttaggaaggcatttagccatcttacagaccttagaaagcatcagaaaattaatgctcgtgagaaaccttatgaatgtgaagaatgtgggaaggtcttcagttatcctgcaaaccttgctcaacatgggaaagttcatgttgagaaaccctatgaatgtaaagagtgtgggga

SEQ ID NO: 23679 - DNA, 741 bp, Homo sapiens
  misc_feature 1..741: note = ENST00000591664
  source 1..741: mol_type = unassigned DNA
gggaggcgcggtccaagtggtcgctgccgtatttctcgtaggtttttaggattctggactccatttctcaccggtacctgcggtcctgactgttctggcttggactacatattacaaaggcaacggagaaaacttggacccctggctccggttccgggaccttttggttccacctgaagaaggcggcgcaggtcactgcgggagcctctgcagccccagcccgccgcccgcgtggtaccctgcgtggcggtgagagtggggctgcaggaggcgctcagagcgcggaggcccccaggcgggccgggcgagtctcccgcctcctcaggccctagggtgctggagctgcggaggaggggcccgtctctaggagacaggcggggagcgtgagagaccgcgcagcggcgacaggaccggcttgcctgtgtgacgtgggtgcagttgcgggactgtgaggggtcttggttcttttgactttgctcttctggtagagaaacgccaaggactgatcaactcttgccagtctcaaaccatgtcctatggatcaataacattcggggatgtggccatagacttctctcatcaggagtgggaatatctcagcctggttcagaagaccttgtaccaggaggtgatgatggagaactatgacaacttagtctcattggatttggattcaagatgtgaaataatcagcgatgggaaaatgcagctttataggaaacactcatgtgttactctcca

SEQ ID NO: 23680 - DNA, 3349 bp, Homo sapiens
  misc_feature 1..3349: note = ENST00000331569
  source 1..3349: mol_type = unassigned DNA
gctatttgacgtgcggctcgaggaaggcgaaggtttttgtgttgctagccggggccagcggcggtggcggcggcggcggaggcgtcggtggaggaggggaggcggcgaggaggcgcagctcccgctgcaccgcgatcgacgctgcggagcgagcccacccgccccgggagctcgcctccccggtgctcccccgccctccccgcccccccagcggcgctgcctcctccaaatgagcgattcgcccgctggatctaacccaaggacacccgaaagcagcggcagcggcagcggcggcggcgggaagaggccggcggtgccggcagcggtgtccctcttgccaccggcggaccccctgcgccaggcgaaccggctcccgatcagggtcctgaagatgctgagcgctcacaccggtcacctcctgcacccggagtacctgcagccgctgtcctccactcccgtcagccccattgagctggacgccaagaagagccccttggcgctgctggctcagacctgctcgcagatcggcaagccggacccgccgccctcctccaaactcaactcggtggcggcggcggccaacgggctgggagcggagaaggaccccggccgctcagccccgggcgccgcctccgcagccgcggccctgaagcagctgggggactcaccggccgaggacaagtccagcttcaagccctactccaagggctccggcggcggcgactcccgcaaagacagcggctcctcctcggtgtcttccacctcctcctcgtcctcctcgtccccgggagacaaggcgggcttcagggtccccagcgccgcctgcccgccctttcccccgcatggagcgccggtctccgcatcctcgtcctcgtcgtcgcccggcggctcccgcggcggctccccgcaccactctgactgcaagaacggcggcggggttggcggcggggagctggacaagaaagaccaggagcccaagcccagcccggagccggcagccgtgagccgcggcggcggtggggagcccggggcgcacggtggcgccgagtccggggcctccgggcgcaagtccgagccgccctcggcgctggtgggggccggccacgtggcgccggtgtctccctacaagccgggccactcggtgttcccgctgccgccctccagcattggctaccacggctccatcgtgggcgcctacgccggctacccgtctcagttcgtgcctggcctggatcctagcaagtccggcctcgtgggaggccagctgtctgggggcctgggcctgccgccgggcaagccccccagctccagcccgctcaccggggcctccccgccctccttcctgcagggattatgccgcgacccctattgcttgggaggttaccacggcgcctcgcacctcggcggctccagctgctccacctgcagcgcgcacgaccctgccgggcccagcctgaaggcggggggctacccgctggtgtaccccgggcacccgctgcagcccgccgcgctctcgtccagcgccgcccaggccgcgctccccggccacccgctctacacctacggcttcatgctgcagaacgaaccgctgccgcacagctgcaactgggtggcagccagtgggccgtgcgacaagcgcttcgccacctcggaggagctgctcagccacctacggacccacacggccctgccgggagccgagaaacttctggccgcctaccccggggcctcgggcctgggcagcgccgccgccgccgccgccgccgccgcctcctgccatctgcacctccccccgcccgccgcccccggcagccccgggtcgctgtccttgcggaatccacacactttgggcctaagccggtaccacccctatggcaagagccacttatccacagcggggggcctggccgtgccgtccctccccacagccggaccctactattcgccatacgcgctgtatggacagagactagcttcagcctcggcgctgggataccagtaactacagctcttcctccaccccagccccctcaccctcctccctctccctcctcctccctccccacctgccgtcgccgctgcaacctccactactgcttgaccctgccgggattccccacccagcccttccccaccggactgtgtatttatttactataatgttagcttacaagctgggaatataagtgcattaacggcccacatgagtcaatggtatgcaaaaagtctgtgttctcccaaataataatattaatcccacaaataacgacatgatccccgcccctgttcctttctgttattttttcttagatataagttttacattttttattccttttcctctttttttggttttgattggtttggtttgagggagagttggggtctttgggttcttctagacgttttgttttcccttcctggggagtttcttgcatgagtcttaacttaaaactacgtttccgccttctctttttccctcttcccccttcattccctcttgtttccttccatttgcggttctgtttttgttttttgttttgttttgttttgttttttcctttgttgtacaagtaacagagaggaggttttttttgtaactcattttgggggtggagggggccacctgggtggcaggggccctggagctctattgacctggtacactgctccgggactcctcccccgccaccctccgcgcatagggtccttggtctggaccctgccccccaaaagtagggccttgctcctctaccttgctctgagcacggagagccctgaccccaccagtaggctcgcccccagaagggcccaagtggccgtctaccgtcaccttccagactcccgcccctaacacccagtggctacagtgcgcctgtcggggcacctggagcgctcacctggttgaattcaaagtcccagaaggccccgctggcgtgaagccggccccttacattttgcgaagtgcattatagtccttgtttttctctccctcgtgggggcaacgacccctcccctggcagtaggggtggggtaggtgactctcgctagatccctccaaagcagaccggtggcgatgtcagcggatgtcacgagctcgttagctgcgttcggggaaggttggggcgtcagggagctctcggatcacagcagcccccgccctctcctaggcctggcccggcagagcccccagagtggaccccccagcgactggggtcttctccccactcctccctccttctggtctgatgcggcagcgcgggggctgcggggcctgtttgggacgaacagagctctcccttggtaagacttattttgttaataaatggaatacttggctatattcaca

SEQ ID NO: 23681 - DNA, 4124 bp, Homo sapiens
  misc_feature 1..4124: note = ENST00000373165
  source 1..4124: mol_type = unassigned DNA
cggaaacccgaatgtgaggaccttaagggatccacagctgccgccccccgcagccatccagagcgcggtcacagtccgactggcggcacggaggcggcggcggcggcggcggcggcagcggcggcggcagcggcggcggcagctgtagctgcagcagcaggtaaagagagcgttttcccaaagaaaataacatagcacagaaggaaaaataaaaagaaattgctgcagattttactttatgtgagaaaatctacaatttcttcgagacactcatataaagatattggtgaatgaactttgctaagtatggattcaggcggtggaagtcttggattgcacacgccagactctagaatggcccataccatgattatgcaagattttgtggctggaatggctggtactgcacatatcgatggagaccatattgttgtttcagttcctgaagctgttttagtttctgatgttgtcacagatgatgggataactcttgatcatggccttgcagctgaagttgtccatggacctgatatcatcacagagactgatgtagtaacagaaggtgtgattgttcctgaagcggtacttgaagctgatgttgccattgaagaggatttagaggaagatgatggtgatcacatcttgacttctgaactaattacagaaaccgttagggtaccagagcaggttttcgtggctgaccttgttactggtcctaatggacacttagaacatgtggtccaagattgtgtttcaggagtcgactctcccacaatggtatcagaggaggttcttgtaactaattcagatacagaaactgtgattcaagcagctggaggtgttcctggttctacagttactataaaaaccgaagatgatgatgatgatgatgtcaagagcacttctgaagactacttaatgatatctttggatgatgttggagaaaaattagagcatatggggaatacaccattaaaaattggcagtgatggttcacaagaagatgctaaagaagatgggtttggttctgaagttataaaagtgtatatatttaaagcggaggctgaagatgatgttgaaataggtggaacagaaattgtcacagagagtgagtacaccagtggacattcagtagctggagtgcttgaccagagccgaatgcagcgggagaagatggtttacatggcagttaaagattcttctcaagaagaagatgatatcagagatgaaagaagagtttcccgaaggtatgaagattgtcaagcatcaggaaatactttggactcagcattagaaagcagaagtagtacagcagcacagtaccttcaaatttgtgacggcattaatacaaataaagtacttaaacaaaaagccaaaaagaggagaaggggagaaaccaggcagtggcaaacagctgttataataggtcctgatggacagcccctcacagtgtacccttgccatatttgcacaaaaaagtttaaatccaggggattcttaaaaagacacatgaagaatcatcctgatcatttaatgagaaaaaaatatcagtgtacagattgtgactttacaactaacaagaaagtgagtttccataaccacttagaaagccataagctcataaacaaagtcgacaaaacccatgaatttacagaatacacacgaagatacagagaggctagtccactgagttccaataaacttattttaagagacaaggagccgaagatgcacaagtgcaaatactgtgactatgaaactgcagaacaaggactgttaaacaggcatttgttggccgttcacagcaagaattttcctcatgtttgtgttgagtgtgggaagggttttcgacatccttctgaactcaagaaacatatgagaacccatactggtgagaagccatatcagtgtcagtattgtattttcaggtgtgcagatcaatcaaatctgaaaactcacattaagtctaaacatggtaacaatttgccatataaatgtgagcattgtccccaagcatttggtgatgagagggagcttcaacgccatctggatttgtttcaaggacataagacacaccagtgtcctcattgtgaccataagagcaccaattcaagtgaccttaagcggcacatcatatctgtccatactaaggattttcctcacaaatgtgaggtctgtgataaaggttttcatcgtccttctgagctcaaaaagcatagtgatatccataagggtaggaagattcatcagtgcaggcactgtgactttaaaacatccgatccatttattcttagtggccatatcctttcagttcatactaaagatcagccattgaaatgtaaaaggtgcaagagaggattcagacaacaaaatgagctaaaaaaacatatgaagacccatactggaaggaagatttaccaatgtgagtattgtgaatacagcactacagatgcatctggctttaaacgacatgtgatatcaatacatacaaaagactatccacacaggtgtgaattctgcaagaagggattccgaagaccatcagaaaaaaatcagcatattatgaggcaccacaaagaggctcttatgtaataagatcaatataaagaaagaagctatttaggagatatgatatgctacttgggagaaaactctcactaactgtctcaccgggtttcaaagcttgatactaaaccatgactttacattctttgtattaaagatcttaaaatatttgaattcacaggggatcccatagccctttgaaaattacttaaagaatttaagaagcactatagaatggttacagaaaaacttcttaagtatctgtgtaatagtattatatgcatacttaaactacagaggggaaaagcaaagacaaatactttatttggctgattatgttagatacaaatgtttctgagaagagaatacataattgagtttagtgatgctttgctatagcaagcaaacccacttttatgcaattttagaaatggggcagggaaacaaaatgtggtcattcatcagtcacttagtcattgagccttttatattgtacctggaaattaaattccagcaatgacaaaagttttgtgtattcattaaaagaaaactaactggaaaacaggttagattaattcagtactattaaaaaagaattcagagctgttaatattttatcacaggataggatacttaaaatatagcattctgtgctgagatctaaggtgaagtctataaagattaaagttcccttttttctgatgttcaagttgattgttgttcagtatggcatatatgacaaaagtatatttgagtcaaatgtggctttctaaaatggatgcaacattagcgttgcaaacaaaatcagcactatatttcttaatgatctaaagattaatttgagagaacacagttttcttaaatattataatgtctagagtttttttaggacagtcttagcaagtatgattgttctagtcttacttgctctaatgtttaaaggtgcaattttatgccattattgaaattgatttttaaaatctatataccatatgattaacatgcattttcaatatgaggcagtgtttatgcagtatttaacagagcaatctgctgccaatagagtttggaggtggatatttagtttacagtgtataaacttaaaatatgcatccctttaacaacgctttgtgttagcatgctgcaaatcaaaatggcacttaatattaaaagctggtttagggaaattttatgaaaatcctgttcataaatgtaatgcatatgatatgtacttttaagttttagttgcttcatgtttacattcagctgttcaacataattaaaatgtaattttacttcatgctatattgtggctttgtgtttcaaataatgttcacctttctgtttttgcaccagataagaatcagttccttgagaataaattttttatctttcttaacttcagaatattaaatttggaatatctactaaaattgtgtgttatgtggctgtaaatgatgtacacgctgtaaaataagatcgctactgttatgtgggattattatttctaaatgttactcattgaaatgagcatacaataaaaagcatttattgcactt

SEQ ID NO: 23682 - DNA, 2887 bp, Homo sapiens
  misc_feature 1..2887: note = ENST00000276123
  source 1..2887: mol_type = unassigned DNA
gccatccagagcgcggtcacagtccgactggcggcacggaggcggcggcggcggcggcggcggcagcggcggcggcagcggcggcggcagctgtagctgcagcagcaggtaaagagagcgttttcccaaagaaaataacatagcacagaaggaaaaataaaaagaaattgctgcagattttactttatgtgagaaaatctacaatttcttcgagacactcatataaaggaagcagtcatgtttcatgagtcctcaaaactgagacaagagaatgtagtagagtgaggccagaagtccttactggttcaaagaactccggggaaactgggatagaacattttacattataagtagaaccctgggagccagaggtgaatacaagtttatctgcagagctccgctgcagggctgatctgggtctggaagaaatggatgagagccagtggatgaaattcactaatactagacatctgagtcctctaatattggtgaatgaactttgctaagtatggattcaggcggtggaagtcttggattgcacacgccagactctagaatggcccataccatgattatgcaagattttgtggctggaatggctggtactgcacatatcgatggagaccatattgttgtttcagttcctgaagctgttttagtttctgatgttgtcacagatgatgggataactcttgatcatggccttgcagctgaagttgtccatggacctgatatcatcacagagactgatgtagtaacagaaggtgtgattgttcctgaagcggtacttgaagctgatgttgccattgaagaggatttagaggaagatgatggtgatcacatcttgacttctgaactaattacagaaaccgttagggtaccagagcaggttttcgtggctgaccttgttactggtcctaatggacacttagaacatgtggtccaagattgtgtttcaggagtcgactctcccacaatggtatcagaggaggttcttgtaactaattcagatacagaaactgtgattcaagcagctggaggtgttcctggttctacagttactataaaaaccgaagatgatgatgatgatgatgtcaagagcacttctgaagactacttaatgatatctttggatgatgttggagaaaaattagagcatatggggaatacaccattaaaaattggcagtgatggttcacaagaagatgctaaagaagatgggtttggttctgaagttataaaagtgtatatatttaaagcggaggctgaagatgatgttgaaataggtggaacagaaattgtcacagagagtgagtacaccagtggacattcagtagctggagtgcttgaccagagccgaatgcagcgggagaagatggtttacatggcagttaaagattcttctcaagaagaagatgatatcagagatgaaagaagagtttcccgaaggtatgaagattgtcaagcatcaggaaatactttggactcagcattagaaagcagaagtagtacagcagcacagtaccttcaaatttgtgacggcattaatacaaataaagtacttaaacaaaaagccaaaaagaggagaaggggagaaaccaggcagtggcaaacagctgttataataggtcctgatggacagcccctcacagtgtacccttgccatatttgcacaaaaaagtttaaatccaggggattcttaaaaagacacatgaagaatcatcctgatcatttaatgagaaaaaaatatcagtgtacagattgtgactttacaactaacaagaaagtgagtttccataaccacttagaaagccataagctcataaacaaagtcgacaaaacccatgaatttacagaatacacacgaagatacagagaggctagtccactgagttccaataaacttattttaagagacaaggagccgaagatgcacaagtgcaaatactgtgactatgaaactgcagaacaaggactgttaaacaggcatttgttggccgttcacagcaagaattttcctcatgtttgtgttgagtgtgggaagggttttcgacatccttctgaactcaagaaacatatgagaacccatactggtgagaagccatatcagtgtcagtattgtattttcaggtgtgcagatcaatcaaatctgaaaactcacattaagtctaaacatggtaacaatttgccatataaatgtgagcattgtccccaagcatttggtgatgagagggagcttcaacgccatctggatttgtttcaaggacataagacacaccagtgtcctcattgtgaccataagagcaccaattcaagtgaccttaagcggcacatcatatctgtccatactaaggattttcctcacaaatgtgaggtctgtgataaaggttttcatcgtccttctgagctcaaaaagcatagtgatatccataagggtaggaagattcatcagtgcaggcactgtgactttaaaacatccgatccatttattcttagtggccatatcctttcagttcatactaaagatcagccattgaaatgtaaaaggtgcaagagaggattcagacaacaaaatgagctaaaaaaacatatgaagacccatactggaaggaagatttaccaatgtgagtattgtgaatacagcactacagatgcatctggctttaaacgacatgtgatatcaatacatacaaaagactatccacacaggtgtgaattctgcaagaagggattccgaagaccatcagaaaaaaatcagcatattatgaggcaccacaaagaggctcttatgtaataagatcaatataaagaaagaagctatttaggagatatgatatgctacttgggagaaaactctcactaactgtctcaccgggtttcaaagctt

SEQ ID NO: 23683 - DNA, 4844 bp, Homo sapiens
  misc_feature 1..4844: note = ENST00000360700
  source 1..4844: mol_type = unassigned DNA
acactaaaacaccaccattttggttcccaaccgtctcccacgtagcggggcagaggaagctggaggaggctgaggggctgggcagcacggcgtgggtagcagcggtggcgaccgctgcaccaagtaaagagagcgttttcccaaagaaaataacatagcacagaaggaaaaataaaaagaaattgctgcagattttactttatgtgagaaaatctacaatttcttcgagacactcatataaaggaagcagtcatgtttcatgagtcctcaaaactgagacaagagaatgtagtagagtgaggccagaagtccttactggttcaaagaactccggggaaactgggatagaacattttacattataagtagaaccctgggagccagaggtgaatacaagtttatctgcagagctccgctgcagggctgatctgggtctggaagaaatggatgagagccagtggatgaaattcactaatactagacatctgagtcctctagtaatgtataaatatcctaactattgtttgttgtcatctcgttcttcttttataacctatgttttaactggaacttttagcactgcagttttgttgttttgctttcttctaccacttccctatggctcatcagcttgactgtgcctttgtctccattatttttggtttacttccacttggcacttcttttatttatggttgtcacataaagcatctaaccatggtttttctttgttttgctttcttttgtaataagctttccacacttggttgaaaggcatattgtcaattgcatttttttctcaaaacaactaactttggactaaatatattaaactattttaaaagccatttcttttgcagatattggtgaatgaactttgctaagtatggattcaggcggtggaagtcttggattgcacacgccagactctagaatggcccataccatgattatgcaagattttgtggctggaatggctggtactgcacatatcgatggagaccatattgttgtttcagttcctgaagctgttttagtttctgatgttgtcacagatgatgggataactcttgatcatggccttgcagctgaagttgtccatggacctgatatcatcacagagactgatgtagtaacagaaggtgtgattgttcctgaagcggtacttgaagctgatgttgccattgaagaggatttagaggaagatgatggtgatcacatcttgacttctgaactaattacagaaaccgttagggtaccagagcaggttttcgtggctgaccttgttactggtcctaatggacacttagaacatgtggtccaagattgtgtttcaggagtcgactctcccacaatggtatcagaggaggttcttgtaactaattcagatacagaaactgtgattcaagcagctggaggtgttcctggttctacagttactataaaaaccgaagatgatgatgatgatgatgtcaagagcacttctgaagactacttaatgatatctttggatgatgttggagaaaaattagagcatatggggaatacaccattaaaaattggcagtgatggttcacaagaagatgctaaagaagatgggtttggttctgaagttataaaagtgtatatatttaaagcggaggctgaagatgatgttgaaataggtggaacagaaattgtcacagagagtgagtacaccagtggacattcagtagctggagtgcttgaccagagccgaatgcagcgggagaagatggtttacatggcagttaaagattcttctcaagaagaagatgatatcagttgcgctgaaatagcagatgaagtttacatggaagtcattgtaggggaagaggaaggaacttctctccctgagattcagcttgaggactctgatgttaataaaacagttgtccctgttgtctgggctgcggcatatggagatgaaagaagagtttcccgaaggtatgaagattgtcaagcatcaggaaatactttggactcagcattagaaagcagaagtagtacagcagcacagtaccttcaaatttgtgacggcattaatacaaataaagtacttaaacaaaaagccaaaaagaggagaaggggagaaaccaggcagtggcaaacagctgttataataggtcctgatggacagcccctcacagtgtacccttgccatatttgcacaaaaaagtttaaatccaggggattcttaaaaagacacatgaagaatcatcctgatcatttaatgagaaaaaaatatcagtgtacagattgtgactttacaactaacaagaaagtgagtttccataaccacttagaaagccataagctcataaacaaagtcgacaaaacccatgaatttacagaatacacacgaagatacagagaggctagtccactgagttccaataaacttattttaagagacaaggagccgaagatgcacaagtgcaaatactgtgactatgaaactgcagaacaaggactgttaaacaggcatttgttggccgttcacagcaagaattttcctcatgtttgtgttgagtgtgggaagggttttcgacatccttctgaactcaagaaacatatgagaacccatactggtgagaagccatatcagtgtcagtattgtattttcaggtgtgcagatcaatcaaatctgaaaactcacattaagtctaaacatggtaacaatttgccatataaatgtgagcattgtccccaagcatttggtgatgagagggagcttcaacgccatctggatttgtttcaaggacataagacacaccagtgtcctcattgtgaccataagagcaccaattcaagtgaccttaagcggcacatcatatctgtccatactaaggattttcctcacaaatgtgaggtctgtgataaaggttttcatcgtccttctgagctcaaaaagcatagtgatatccataagggtaggaagattcatcagtgcaggcactgtgactttaaaacatccgatccatttattcttagtggccatatcctttcagttcatactaaagatcagccattgaaatgtaaaaggtgcaagagaggattcagacaacaaaatgagctaaaaaaacatatgaagacccatactggaaggaagatttaccaatgtgagtattgtgaatacagcactacagatgcatctggctttaaacgacatgtgatatcaatacatacaaaagactatccacacaggtgtgaattctgcaagaagggattccgaagaccatcagaaaaaaatcagcatattatgaggcaccacaaagaggctcttatgtaataagatcaatataaagaaagaagctatttaggagatatgatatgctacttgggagaaaactctcactaactgtctcaccgggtttcaaagcttgatactaaaccatgactttacattctttgtattaaagatcttaaaatatttgaattcacaggggatcccatagccctttgaaaattacttaaagaatttaagaagcactatagaatggttacagaaaaacttcttaagtatctgtgtaatagtattatatgcatacttaaactacagaggggaaaagcaaagacaaatactttatttggctgattatgttagatacaaatgtttctgagaagagaatacataattgagtttagtgatgctttgctatagcaagcaaacccacttttatgcaattttagaaatggggcagggaaacaaaatgtggtcattcatcagtcacttagtcattgagccttttatattgtacctggaaattaaattccagcaatgacaaaagttttgtgtattcattaaaagaaaactaactggaaaacaggttagattaattcagtactattaaaaaagaattcagagctgttaatattttatcacaggataggatacttaaaatatagcattctgtgctgagatctaaggtgaagtctataaagattaaagttcccttttttctgatgttcaagttgattgttgttcagtatggcatatatgacaaaagtatatttgagtcaaatgtggctttctaaaatggatgcaacattagcgttgcaaacaaaatcagcactatatttcttaatgatctaaagattaatttgagagaacacagttttcttaaatattataatgtctagagtttttttaggacagtcttagcaagtatgattgttctagtcttacttgctctaatgtttaaaggtgcaattttatgccattattgaaattgatttttaaaatctatataccatatgattaacatgcattttcaatatgaggcagtgtttatgcagtatttaacagagcaatctgctgccaatagagtttggaggtggatatttagtttacagtgtataaacttaaaatatgcatccctttaacaacgctttgtgttagcatgctgcaaatcaaaatggcacttaatattaaaagctggtttagggaaattttatgaaaatcctgttcataaatgtaatgcatatgatatgtacttttaagttttagttgcttcatgtttacattcagctgttcaacataattaaaatgtaattttacttcatgctatattgtggctttgtgtttcaaataatgttcacctttctgtttttgcaccagataagaatcagttccttgagaataaattttttatctttcttaacttcagaatattaaatttggaatatctactaaaattgtgtgttatgtggctgtaaatgatgtacacgctgtaaaataagatcgctactgttatgtgggattattatttctaaatgttactcattgaaatgagcatacaataaaaagcatttattgcacttaa

SEQ ID NO: 23684 - DNA, 578 bp, Homo sapiens
  misc_feature 1..578: note = ENST00000493036
  source 1..578: mol_type = unassigned DNA
gctacgagcggttaagagactacagctcccaggatgtacggtgatggcacccgtttggactccgcccctctgcgcgtctagagctgttctcccgtgcggaggggatcctggctgttcccaaatctcgcctgcctgcgaggagccagcgtggcccgggcagctgatctcaacctgtgattgtgacatcacccctacctgaggaagcctcttccagcctgctcaagtttttcagattaactaagtaattcatattgtacatttctgaaattgaagtacgcacagcttcaattctgtgcagggaggatgcagcaggagagaatatcctgggcacatctttctggagaatcacttttactacaagatttgtaagaaacaaatttatttccaagggtggccaacttgggtgtcttcctctgccagggtcaaggacaaggattgaaacgggtggggcctggagccctagccaatcagtggcgccagcgtgaaactgtccaatcaagtgcgcagctacagaggaagaggcggcctcttcaatatggcggggcctttgtctcctagcttccgggctctgatcctag

SEQ ID NO: 23685 - DNA, 1027 bp, Homo sapiens
  misc_feature 1..1027: note = ENST00000465343
  source 1..1027: mol_type = unassigned DNA
agagctgttctcccgtgcggaggggatcctggctgttcccaaatctcgcctgcctgcgaggagccagcgtggcccgggcagctgatctcaacctgtgattgtgacatcacccctacctgaggaagcctcttccagcctgctcaaggttgccgtagttaggtttaccctcccttccttccctcaccccgtcctttccctcatccctgccccttcctctgtcccacgcggctttcagacatgcatagtgcagcccctcagtaaaggtgcagctaatggcccgtgggcctagcagttgtcaggccttttgggagcccatgatgggagctccctgatcctcctctgtaccccaagaacaccccattggatttccgggctggctgcttggcctacacacctgggtcaggcctctcgcagggatgcgcctgccactgtaataaagaggagaaaacgtcacacgggaaaggcctgactccttcgtacaatcagaatactcaactgcacagagaagggacccctttaagccactttgggagccacatccaccactctgtgactcccacacaggctggttcccaggtatcaggtgtcctagtgttaacacgggccaaaaggacaaaacaggaccctaggtccttcccaaaacattaggaaagtttgtgtactgagtttttcagattaactaagtaattcatattgtacatttctgaaattgaagtacgcacagcttcaattctgtgcagggaggatgcagcaggagagaatatcctgggcacatctttctggagaatcacttttactacaagatttgtaagaaacaaatttatttccaagcccctgggaaacactctcctacttggtgttttctatgactttaactactcttaagtaccacatatgagaagaatcatatagtaaagaaatcatgaggaagaatgataaaaaatgtatcacatgcttattaattttcaataaaaacaccaacagagatcagtagtacctgttgattataaataaacagataaatgag

SEQ ID NO: 23686 - DNA, 490 bp, Homo sapiens
  misc_feature 1..490: note = ENST00000492322
  source 1..490: mol_type = unassigned DNA
gggacccctttaagccactttgggagccacatccaccactctgtgactcccacacaggctggttcccaggtatcaggtgtcctagtgttaacacgggccaaaaggacaaaacaggaccctaggtccttcccaaaacattaggaaagtttgtgtactgagtttttcagattaactaagtaattcatattgtacatttctgaaattgaagtacgcacagcttcaattctgtgcagggaggatgcagcaggagagaatatcctgggcacatctttctggagaatcacttttactacaagatttgtaagaaacaaatttatttccaaggtaagaaattaaaactctaaaacaaggctagaaagtcatctgcctttaataacccttagtcatctgtgcctgatatgtgagactttctccaagataaatctctcaaggataacctattttccatcattataattagtaaaaattagaaattttagaaagtcaattg

SEQ ID NO: 23687 - DNA, 424 bp, Homo sapiens
  misc_feature 1..424: note = ENST00000606716
  source 1..424: mol_type = unassigned DNA
actctgtctcttaaaaaataatataaaaatttaaaataattttatacattatgttaaaatacacataaaattaactattttaaccattttaaaggtttccattgagatgaattaagtacactcattattttgctaccatcatttccatatataaaaagcatattccattttttgaaactgaaactgtacccattaaacaactccttattctccctgtagcccctgggaaacactctcctacttggtgttttctatgactttaactactcttaagtaccacatatgagaagaatcatatagtaaagaaatcatgaggaagaatgataaaaaatgtatcacatgcttattaattttcaataaaaacaccaacagagatcagtagtacctgttgattataaataaacagataaatgagaaaaaggaa

SEQ ID NO: 23688 - DNA, 562 bp, Homo sapiens
  misc_feature 1..562: note = ENST00000438373
  source 1..562: mol_type = unassigned DNA
gtgcctgcccagctggagtgctgggcccccggggtcaccatgcagcagggcctgacactgaccagggagccatggccacaggctcttggcagctggcccaaaataaatattctccataacctctgccgatctgctggaccctcacctctcagtctcactgagccactccgttaactggaggcagacccaaaattgctccacaggctgaagggtggccaacttgggtgtcttcctctgccagggtcaaggacaaggattgaaacgggtggggcctggagccctagccaatcagtggcgccagcgtgaaactgtccaatcaagtgcgcagctacagaggaagaggcggcctcttcaatatggcggggcctttgtctcctagcttccgggctctgatcctagttcgcgtctccactgttccatctcctccgttcctggagttcctcggtgactctactatagcttctgttatcctgtgacctgcaggtactgggagatccatagggaggacggcggaacatctggaggctgggaaatgggagtgttgacattcagggatgtggct

SEQ ID NO: 23689 - DNA, 743 bp, Homo sapiens
  misc_feature 1..743: note = ENST00000488621
  source 1..743: mol_type = unassigned DNA
ctagttcgcgtctccactgttccatctcctccgttcctggagttcctcggtgactctactatagcttctgttatcctgtgacctgcaggtactgggagatccatagggaggacggcggaacatctggaggctgggaaatgggagtgttgacattcagggatgtggctgtagaattctccccagaagagtgggaatgcctggactctgctcagcagcgtttgtatagggatgtgatgttagagaactatggaaacctggtctccttgggtcttgctatctttaagccagacttgatgacctgtctggagcaaagaaaagagccttggaaagtgaagagacaggaggcagtagccaaacacccaggtaggtgggagtgaatgaagcagatgacacaaatgacggatcccaatgtcaaggaggaagccaaacctttaaacatgcttccagaagctctgctccagtggaaatggtttctgagaaaccttcatttctttctcttgctttaacatagggacattttttgtcccattcttgtgaattttccaagcactgtacttccccttcagtaatgtgtgtgtgtgtgttgtgtgtgtgttttgttttgttttttgtttttagtttacagcaataatgaaagtctttcatggcttgacagaaaatgtgtgatttgactgcttttccattgctttggggaaacagcaatatctgtatttttgagaaactatattaaaccatttttttaa

SEQ ID NO: 23690 - DNA, 7119 bp, Homo sapiens
  misc_feature 1..7119: note = ENST00000423484
  source 1..7119: mol_type = unassigned DNA
actgttccatctcctccgttcctggagttcctcggtgactctactatagcttctgttatcctgtgacctgcaggtactgggagatccatagggaggacggcggaacatctggaggctgggaaatgggagtgttgacattcagggatgtggctgtagaattctccccagaagagtgggaatgcctggactctgctcagcagcgtttgtatagggatgtgatgttagagaactatggaaacctggtctccttgggtcttgctatctttaagccagacttgatgacctgtctggagcaaagaaaagagccttggaaagtgaagagacaggaggcagtagccaaacacccagctggttcttttcattttactgcagagatattgccggatcatgacataaaagattcatttcaaaaagtgattctgagaaaatatggaagctgtgaccttaataatttacatttaaagaaagactaccaaagtgtgggtaattgcaaggggcagaaaagcagttataatggccttcatcaatgtttgtcagctacccatagcaaaacctgtcaatgtaataaatgtggcagaggttttcagttgtgctcaatcttcactgaacataaagacatttttagcagagagaaatgccacaaatgtgaagaatgtggcaaagactgtaggttgttctcagattttactagacataagaaaattcatactgtagagagatgctacaaatgtgaagaatgtggcaaagcgtttaaaaagttttcaaaccttactgaacataagagagttcatactggagagaaaccttacaaatgtgaaggatgtggcaaaacttttacctgctcctcaacccttgttaaacacaagagaaatcatactggagacagaccctacaaatgtgaagaatgtggcaaagcctttaagtgcttctcagaccttactaatcataagagaattcatactggagagaaaccctacaaatgtgaagaatgtaacaaagcctataggtggttctcagaccttgctaaacataagataattcatactggagacaaaccctacacatgtaatgaatgtggaaaagcttttaagtggttctcggcccttagtaaacataagagaattcatactggagagaaaccctacatctgtgaagaatgtggcaaagcctttacccgctcctcaaccctttttaaccacaagagaattcatatggaagagagaccttacaaatgtgaagaatgcagcaaaacctttaagtgcttctcagacctgactaatcataagagaattcacactggagagaaaccctacaaatgtgaagaatgtggcaaagcatcgagctggttctcacacctcatcagacataagagaattcatactagagagaagctccacaagtgttaaaaatgtggaaaagcctttaccaagtcctcatactgtgttcaacatctgaaatttaatactgaacaaatgcagtataaatgtaatgacagtggaagaacatttatcatcttagagggtctctaagaacttactttataatctggttgcttatatgttgggtacatatatagccctttgctattatgtaatgccctttttttttaaatctatgttaatttcaagtctgttttgtcagaaactaggattgcaacccctgcttcttttcctgttttctatttgcttggtaggcttttctttttccctttattttgagcttatttgagatgggtgtcttgattaaagcataccattagatcttgattcttttttcagcttgccatctgtgctttaatttgggtatttagcccatttacatttaaggttagtattcatatgtgtggattggattctgttattaggatcttagctggctattttgcacatttgtttctgtggttgctttatagtgtccacagtttgtatactttagtgtgcttttgtagtgactggtaatagtctttttcttatttaatgctttcttcagaagctcttttaagacagatcctgtggtaacattttctcagcatttgcttgtctgaataggatcatatatattttttacttctgaagcttaccttggtcagatatgaaattctgtgttggaattctttttttaagaatgttgaatattggcccctataatctcttttgacttgtaggatttcagctgaaagatttgttgttttcctgatgagcttctttttagaggtgacctggcctttctctctagctgcctttaacatattttttctttcattttgaccctggagaatctcatgattatgtgtcttgaggatgaccttctcctggggtatcttactggggttctccacatttcctgcatttgaatgttggcctctctaggttggggaagttctcatggatgttatcctgaaatacgtatttcaagttgttttcattctccccatcactttcaggcaatctcttgcatcatagatttggtttctttacataatcccatatttcttagaggttttgttcattcctctttattcttttttcactgttcttgtctgtctgatttcagaaagccagtcttgaggccctgagattctttcctctgcttggcctattctgctgttaatatatgtgattacattataaaggttttgtattgtgtttttcagttctatcaggttggccacattttttctccagactggctgttttttccgtcagttcctgcaattttttttcctcccttgcattgggttgcaaattacttttgtaactcagtgaagtttgtttctacccatattctgaattctacttctgtcatcttaggccttgctggaaatgtaatttggtcatttggatgaaagaagtcactctggctttttgtgtttttatctttgcactgattgtgtcttatctttgtgggcatatctttgaggttgctgacctttgggcttttttttttttaatcctatttgatggtcttgagtatttgattgtggtataagatggatgcagccaacaggctttgttcctgggaggttttttttgttttgttttgttttgttttgttttgtttggtggtggtggtgggtgggcaatgctcagctcacaactcagaggctgcatactctaactccgggggacttgttttgagccccaactgtgttctctggctccttgagatttggagtttgcgagtttgtgggatgaaggtgccatagctggagcagagtgctagtggatatgggatttctgcctgtctttgggtactcacctcagtggcaggagcaaagcagctgggaagggagtgggggatacctgctggaggctgtgtgctgttgcactaaaggtggtgttggcttggggcaggatactggccagtaaaggttttgatgccttctctgtgccccccaagaaagagtgattgttcagagtgtgggaggttaccctgttctctgcacagtgttagcacaaaggcaggggtggagttttctggctctctgcccaccaaagtttcatctacaatggcagttgctgggggtggcggggcatattgcattcccatttgctggtggggcaagcaaagccaaacctgcctttgcagacatgtgccagcaaagaaatatcaggagttgccatggtgtcacgggaagctgcagtatggggaagaaatgtgggctggtgcagtcataggggctgctttgctggagctcttcatgagtcaggcatgtccctccagtgcagatgctctggtatgagcttccagggtacctgagactgccctgtaagcagctgtggccagactgggtccctgggagaggccagcagaccaaggagtgctcagttggaccagcttcttctgatttgcaagaccatcctgcagaaattaggcccaacagttcccgtagggctaaagtctcttatgggagacagttgagcctagagaaatggccatcactggccacactttactacagatgctcttgcaccaaaccctctggccaccacatgagctggcttgctgcattatctctttgcttgtcttctgggggctgcatctcagagagatgtaggtcagcaattactcagtgcagccagcccaggatggaagatctttacttttggccaagttaggggtttactgtctgctgaggagcagtgggtagtttgtgggacccatggaggatgggctggcttcctctccttgggtaaactgcagtttgaggtgtgaataaggcacttagggtttgggattttttattagtctgagggtagcaaggacagttgtactgcagaggcccctggaggctctgtccagggagttgctaagctgctactggctcaatagctctggcaatgattggctagtggcccgggcctggagaacctgcctcgtgagaatatatgagaacaggcactcacgtaacagtccgaccacttctgaagggctgctgcagtatgctgggtgtccactacagtttctagtcacctcagattttccagtactggaagttatcaccactgaatgctgcaaaacagcaacaatggcagcatgcccttttctctgggagcgccatcccagggaggtatagacctgttgccagcccaaaagcacctgtaggaggtagctggaagcccctgttgaaggtcctacccagtgaggaaaacatgattggggacccacttaagaaagcagtctagccatatttttgcaggacagctctgctattcagaggtaccacttccacccccagtttatttggattctccaaagccagaaggctggaacagctaactcacacaaacagcaaaaatggcagctcactcctccctctaggaactgtatcccaaagaggtttcaaaactccatcaaccaaagagcgctggtggtggtagctggagaccctcattgggaagtactttccagtgagaaggaatgaaacgggggacctgctttaacaggcagtctggccatgtctttttagagcacctgtactgtgctaggagatcctttccgccccccggtcagcttgggctcttcaaagcctgaaggctggaatggctaagttgctcaagcagcaaagatggtggcccactcctctttctggtagctccatcccagggaggtgcagtgctgctaccaatggttggctggaatctaagccagtaggtcttaccacgtgaggcattgttgaagtgggtcctacagaccatcactatcagccccctggattctgcctctttcctatgggtatgttcaggggtgtaacctgctttgctcgagttgcagctactttttctgggaagcctggaaagccagtatctaaggctcttgaatctgcgcaggcctaagtggcttatctgctgagactccatgtagctctgtgtgttaaactgaaggccttggtgaagtgggttcatgagggtatctcctcacctgaaggttgcagagatctgtgggagaatcatgggtttctagggtcacacatgcactcactgctttactgggtggggaggttcccttggctccatgttgttcccaggtggcccattgtcctgccttgctttactccattctccatagattgtttctttgattattcccaatgcaagtacctggatgtttcagttgcaggtgctgtatttatgtataccttgcattcctgtctatgagaactgcacagtctagctgcttctagtcagcaatctcgatcacttttctctaaagggaacctacttttttatattaaaaggattcaatatttttcaaaagcaaatttcaatataatttaactcttacatttgatgctgtgtcttcatttctagaatttatgtgaaagaacatggtcagtggttgcaccagagttgtgagaggttcttctatattagatggacagatttatatacttttccatggaggattaagtaaactgaaacctaagacacacgaagaaattctaagtggaaaggccacttattagtttacagcagtatcgtaagtgacaggatgataggagtgtggtaagtgatcaggataataatctgcttagtaagagaaacaatttgaattttagaaggaaattgccttaccatttgcaaattaaggtaattaaaatacagtgaatttcaaaatgcctttttaatgacaatgtgtgaacttaatttgttttaataaaccaaaattattgttattgtgttaaggctattttacattgaatgtgtatcttgccactgatgttaacttatcccatcttacccaaggttgtaggtaacaatatactattgggtgacagtggactaacatctctagtgatccctttgtcagtggtctttaacttaaaataatttagagaatatggtttctacaacttacatttttgtttacttgtaactacagattattatgatggttgtaatgaagattatgagtataattggagctatatgtttctgaattctgaacaactatttataaaattttatcctacttttttctgttgaacatatgacttctctggtctgctaaacacatacagacctttagttttggtttacatggatttaaatatatagatatatcactgtaaaataaacttcaggtgtaacagatttatagagaaagtaatcatatttgtttatggttgtgtacctactttgagaagaaaagaaaaatattagaatgaacagataattttacaagtgttgatcacttaccagcaaaccagaaacttcagagattttgaaagcaaatctattttctctgctgtgtattaaattcatttatctaaaatgttattgctcctggcttagaatcatcttgtgcaaattctttttttgttgtttgtctgtttgcctgttgctcaccatagacataattttcttttcataaaacattctttgtataatcacctcagagattatgaaagtgactttgataaaatttaatggtgttcacaaaataattttcacgtgagtaatttcacagtgcgtgtattgtatgttatttagtgtattttatattttgtttcaattagagaatgctattgaatccagtttttgtttagttactgttcattttactttataaaattgacataattgagtttattaaatttattgggccaatttaagtaaa

SEQ ID NO: 23691 - DNA, 2098 bp, Homo sapiens
  misc_feature 1..2098: note = ENST00000355095
  source 1..2098: mol_type = unassigned DNA
ggtggccaacttgggtgtcttcctctgccagggtcaaggacaaggattgaaacgggtggggcctggagccctagccaatcagtggcgccagcgtgaaactgtccaatcaagtgcgcagctacagaggaagaggcggcctcttcaatatggcggggcctttgtctcctagcttccgggctctgatcctagttcgcgtctccactgttccatctcctccgttcctggagttcctcggtgactctactatagcttctgttatcctgtgacctgcaggtactgggagatccatagggaggacggcggaacatctggaggctgggaaatgggagtgttgacattcagggatgtggctgtagaattctccccagaagagtgggaatgcctggactctgctcagcagcgtttgtatagggatgtgatgttagagaactatggaaacctggtctccttgggtcttgctatctttaagccagacttgatgacctgtctggagcaaagaaaagagccttggaaagtgaagagacaggaggcagtagccaaacacccagctggttcttttcattttactgcagagatattgccggatcatgacataaaagattcatttcaaaaagtgattctgagaaaatatggaagctgtgaccttaataatttacatttaaagaaagactaccaaagtgtgggtaattgcaaggggcagaaaagcagttataatggccttcatcaatgtttgtcagctacccatagcaaaacctgtcaatgtaataaatgtggcagaggttttcagttgtgctcaatcttcactgaacataaagacatttttagcagagagaaatgccacaaatgtgaagaatgtggcaaagactgtaggttgttctcagattttactagacataagaaaattcatactgtagagagatgctacaaatgtgaagaatgtggcaaagcgtttaaaaagttttcaaaccttactgaacataagagagttcatactggagagaaaccttacaaatgtgaaggatgtggcaaaacttttacctgctcctcaacccttgttaaacacaagagaaatcatactggagacagaccctacaaatgtgaagaatgtggcaaagcctttaagtgcttctcagaccttactaatcataagagaattcatactggagagaaaccctacaaatgtgaagaatgtaacaaagcctataggtggttctcagaccttgctaaacataagataattcatactggagacaaaccctacacatgtaatgaatgtggaaaagcttttaagtggttctcggcccttagtaaacataagagaattcatactggagagaaaccctacatctgtgaagaatgtggcaaagcctttacccgctcctcaaccctttttaaccacaagagaattcatatggaagagagaccttacaaatgtgaagaatgcagcaaaacctttaagtgcttctcagacctgactaatcataagagaattcacactggagagaaaccctacaaatgtgaagaatgtggcaaagcatcgagctggttctcacacctcatcagacataagagaattcatactagagagaagctccacaagtgttaaaaatgtggaaaagcctttaccaagtcctcatactgtgttcaacatctgaaatttaatactgaacaaatgcagtataaatgtaatgacagtggaagaacatttatcatcttagagggtctctaagaacttactttataatctggttgcttatatgttgggtacatatatagccctttgctattatgtaatgccctttttttttaaatctatgttaatttcaagtctgttttgtcagaaactaggattgcaacccctgcttcttttcctgttttctatttgcttggtaggcttttctttttccctttattttgagcttatttgagatgggtgtcttgattaaagcataccattagatcttgattcttttttcagcttgccatctgtgctttaatttgggtatttagcccatttacatttaaggttagtattcatatgtgtggattggattctgttattaggatcttagctggctattttgcacatttgtttctg

SEQ ID NO: 23692 - DNA, 3501 bp, Homo sapiens
  misc_feature 1..3501: note = ENST00000543758
  source 1..3501: mol_type = unassigned DNA
aatgcttgcaggtggcccgttcttcctctttgtccttcgctgccacgtgagaggggagtgtacgcgtgtgcgcgcgtgcgagtgtgcgcgtgtgcagtccccgactcgtcccggcccgttcggagccgcccgggagcgcacaaaggccgacggtttgggcgcgtgcgcgggacacgggggacgggcggtgtcacgtgatcgcgaggccgcgggcgcgcgggcgcgactcggcggcggcgtcttttagacctaggcttccactgttccattttactatattctgtttccctgagagtgctgtttcagttatatagcaagcgtacctctggccttagatgatcgtgaattccaagttcctagcaagagagaaagagatttcatgtgcaatgtgaatataccagttgaagtacatttctcccgaagtccacagatcctggtccctacaaataagcctgctcatgtgagataagaaaggagttcctggaaccaggaattcattctcagtgtagaagacctagctgagacctcactccacagttttggggcagaagcagaagagacgcacagtagaaccgatctcagccttgctgatcatctcgtacagcagcagaaaatgaccatgttacaggagtcattctcatttgacgatttatctgtggacttcacccaaaaggagtggcagctactggatccctctcagaagaatttatacaaggatgtgatgttggagaactatagcagcctagtgtcactggggtatgaagttatgaaaccagatgtcatcttcaaattggagcaaggagaagagccgtgggtaggagatggagaaattccaagttcagattctccagtctggaaagtagatggtaacatgatgtggcaccaggataaccaagacaagcttaaaattataaaaagaggtcatgaatgtgatgcatttggaaaaaatttcaatctgaacatgaactttgttcctttaaggaaatcaaacagtgaaggtgacttagatggattgattttaaaacatcatttagatttgcttattccaaaaggagattatggaaaagcagaatcagatgactttaatgtgtttgataatttttttctccattccaagcctgaggatactgatacctggttaaaatactatgactgtgataaatataaagagagctataaaaagtcacagattatcatatatcatagaaatcgtttaggggagaaactctatgaatgcagtgaatgtaggaagcgcttcagtaagaaaccaagtctcattaaacatcagagcagacatataagagacatagcctttggctgtggtaattgtggcaaaacctttccccagaagtctcagtttattacacatcacagaactcatacaggagaaaaaccttataattgtagccagtgtgggaaagccttctcccaaaagtcacagctcacatcccatcagcggacacatacaggagagaaaccttatgagtgtggtgaatgtgggaaagccttctcccggaagtcacatctcatatcgcattggagaacacacacaggagagaaaccctatggatgcaatgaatgtgggagggcctttagtgaaaagtccaatctcattaaccatcagagaattcataccggtgagaagccttttgaatgcagggaatgtgggaaagccttcagcaggaagtcacaactcgttacacatcacagaactcacacaggaacaaaaccctttggatgtagtgattgtagaaaagcattctttgagaagtcagagcttattagacatcagacaattcatactggagagaaaccctatgaatgcagcgagtgtaggaaagcatttagagagaggtcgagtctcattaatcatcagagaacacatacaggagagaaacctcatggatgcattcagtgtgggaaggccttctcccagaagtcacatctcatatcacatcagatgacacacacaggagaaaaaccctttatatgcagtaaatgtgggaaagccttcagcaggaaatcacagctcgttagacatcagagaactcatacgggagaaaaaccgtatgaatgcagtgagtgtgggaaagctttcagtgaaaaattaagtctcactaatcatcaaagaattcatacaggagaaaaaccatatgtatgcagtgaatgtgggaaagccttttgtcagaagtcacatctcatatcacatcagaggacacatacaggggagaaaccctatgaatgcagtgaatgtgggaaggcctttggtgagaagtcaagtcttgcaactcatcagagaactcatactggagaaaaaccgtatgaatgcagggactgtgaaaaagctttctcccagaaatcacagctaaatacccatcagagaattcacactggagagaaaccctatgaatgcagtctttgtaggaaagctttttttgagaagtcggagctaattagacatctgagaactcatacaggagaaaaaccttatgaatgcaatgaatgtagaaaagccttcagggagaagtcaagtctcatcaatcatcagagaatacatacaggagagaagccttttgaatgcagtgagtgtggcaaagctttctctcggaagtcacaccttataccacatcaaaggacacatacgggtgagaaaccctatggatgcagtgaatgtaggaaggccttctctcagaagtcacagctggttaatcatcagagaattcatacaggagagaagccttatcgatgcattgaatgtgggaaagctttctcacagaagtcacagctcatcaatcatcagagaactcatacagtaaaaaaatcctaggaatacagttaatagtagtctttgacagatcatcttggacttcaggaaatgcaattatgataacgtttgtagacagtcacgtcatgttaggtgtttgtactccatgaggatgagaactctaaatgaggtggtgtatggaaagccgatcataattcatagagtagagtgaacctatgactgcagtggatctcaaaaacttttaaaaccatagacaagccttatagagtagaacattcacagcaaagaagaatcctgtgaatgtccaaaagccttccagaagtcaagtctcttaagctattagaaatattcccactggggatgagggaaaaccccatgaatgcgggaaatgaggcaatatttttaagaaatgacagttcattgtacataagaaaatgctcttaggaatgaagttctatgaaagtactaaatatgggacagtgcaacaagtaacgagactattttgtattttggagaattcatattatggagaacctaacaatttaaagacactgggaacacttgcccctcagtatagtactgtcaagggaagccatacactttttgtagacatgggtaccaaaaatacccaattctaagtggttgacagatgttcactttgaagtgtgaagttttaaaaatacgtgaataaattggttattgaaacatctaagaca

SEQ ID NO: 23693 - DNA, 3237 bp, Homo sapiens
  misc_feature 1..3237: note = ENST00000539354
  source 1..3237: mol_type = unassigned DNA
gtgtgcagtccccgactcgtcccggcccgttcggagccgcccgggagcgcacaaaggccgacggtttgggcgcgtgcgcgggacacgggggacgggcggtgtcacgtgatcgcgaggccgcgggcgcgcgggcgcgactcggcggcggcgtctttttccacagatcctggtccctacaaataagcctgctcatgtgagataagaaaggagttcctggaaccaggaattcattctcagtgtagaagacctagctgagacctcactccacagttttggggcagaagcagaagagacgcacagtagaaccgatctcagccttgctgatcatctcgtacagcagcagaaaatgaccatgttacaggagtcattctcatttgacgatttatctgtggacttcacccaaaaggagtggcagctactggatccctctcagaagaatttatacaaggatgtgatgttggagaactatagcagcctagtgtcactggggtatgaagttatgaaaccagatgtcatcttcaaattggagcaaggagaagagccgtgggtaggagatggagaaattccaagttcagattctccagaagtctggaaagtagatggtaacatgatgtggcaccaggataaccaagacaagcttaaaattataaaaagaggtcatgaatgtgatgcatttggaaaaaatttcaatctgaacatgaactttgttcctttaaggaaatcaaacagtgaaggtgacttagatggattgattttaaaacatcatttagatttgcttattccaaaaggagattatggaaaagcagaatcagatgactttaatgtgtttgataatttttttctccattccaagcctgaggatactgatacctggttaaaatactatgactgtgataaatataaagagagctataaaaagtcacagattatcatatatcatagaaatcgtttaggggagaaactctatgaatgcagtgaatgtaggaagcgcttcagtaagaaaccaagtctcattaaacatcagagcagacatataagagacatagcctttggctgtggtaattgtggcaaaacctttccccagaagtctcagtttattacacatcacagaactcatacaggagaaaaaccttataattgtagccagtgtgggaaagccttctcccaaaagtcacagctcacatcccatcagcggacacatacaggagagaaaccttatgagtgtggtgaatgtgggaaagccttctcccggaagtcacatctcatatcgcattggagaacacacacaggagagaaaccctatggatgcaatgaatgtgggagggcctttagtgaaaagtccaatctcattaaccatcagagaattcataccggtgagaagccttttgaatgcagggaatgtgggaaagccttcagcaggaagtcacaactcgttacacatcacagaactcacacaggaacaaaaccctttggatgtagtgattgtagaaaagcattctttgagaagtcagagcttattagacatcagacaattcatactggagagaaaccctatgaatgcagcgagtgtaggaaagcatttagagagaggtcgagtctcattaatcatcagagaacacatacaggagagaaacctcatggatgcattcagtgtgggaaggccttctcccagaagtcacatctcatatcacatcagatgacacacacaggagaaaaaccctttatatgcagtaaatgtgggaaagccttcagcaggaaatcacagctcgttagacatcagagaactcatacgggagaaaaaccgtatgaatgcagtgagtgtgggaaagctttcagtgaaaaattaagtctcactaatcatcaaagaattcatacaggagaaaaaccatatgtatgcagtgaatgtgggaaagccttttgtcagaagtcacatctcatatcacatcagaggacacatacaggggagaaaccctatgaatgcagtgaatgtgggaaggcctttggtgagaagtcaagtcttgcaactcatcagagaactcatactggagaaaaaccgtatgaatgcagggactgtgaaaaagctttctcccagaaatcacagctaaatacccatcagagaattcacactggagagaaaccctatgaatgcagtctttgtaggaaagctttttttgagaagtcggagctaattagacatctgagaactcatacaggagaaaaaccttatgaatgcaatgaatgtagaaaagccttcagggagaagtcaagtctcatcaatcatcagagaatacatacaggagagaagccttttgaatgcagtgagtgtggcaaagctttctctcggaagtcacaccttataccacatcaaaggacacatacgggtgagaaaccctatggatgcagtgaatgtaggaaggccttctctcagaagtcacagctggttaatcatcagagaattcatacaggagagaagccttatcgatgcattgaatgtgggaaagctttctcacagaagtcacagctcatcaatcatcagagaactcatacagtaaaaaaatcctaggaatacagttaatagtagtctttgacagatcatcttggacttcaggaaatgcaattatgataacgtttgtagacagtcacgtcatgttaggtgtttgtactccatgaggatgagaactctaaatgaggtggtgtatggaaagccgatcataattcatagagtagagtgaacctatgactgcagtggatctcaaaaacttttaaaaccatagacaagccttatagagtagaacattcacagcaaagaagaatcctgtgaatgtccaaaagccttccagaagtcaagtctcttaagctattagaaatattcccactggggatgagggaaaaccccatgaatgcgggaaatgaggcaatatttttaagaaatgacagttcattgtacataagaaaatgctcttaggaatgaagttctatgaaagtactaaatatgggacagtgcaacaagtaacgagactattttgtattttggagaattcatattatggagaacctaacaatttaaagacactgggaacacttgcccctcagtatagtactgtcaagggaagccatacactttttgtagacatgggtaccaaaaatacccaattctaagtggttgacagatgttcactttgaagtgtgaagttttaaaaatacgtgaataaattggttattgaaacatctaagaca

SEQ ID NO: 23694 - DNA, 559 bp, Homo sapiens
  misc_feature 1..559: note = ENST00000438628
  source 1..559: mol_type = unassigned DNA
gcagtccccgactcgtcccggcccgttcggagccgcccgggagcgcacaaaggccgacggtttgggcgcgtgcgcgggacacgggggacgggcggtgtcacgtgatcgcgaggccgcgggcgcgcgggcgcgactcggcggcggcgtcttttgtgagttcatccacagatcctggtccctacaaataagcctgctcatgtgagataagaaaggagttcctggaaccaggaattcattctcagtgtagaagacctagctgagacctcactccacagttttggggcagaagcagaagagacgcacagtagaaccgatctcagccttgctgatcatctcgtacagcagcagaaaatgaccatgttacaggagtcattctcatttgacgatttatctgtggacttcacccaaaaggagtggcagctactggatccctctcagaagaatttatacaaggatgtgatgttggagaactatagcagcctagtgtcactggggtatgaagttatgaaaccagatgtcatcttcaaattggagcaaggagaagagccgtgggtaggag

SEQ ID NO: 23695 - DNA, 960 bp, Homo sapiens
  misc_feature 1..960: note = ENST00000540031
  source 1..960: mol_type = unassigned DNA
ggacgggcggtgtcacgtgatcgcgaggccgcgggcgcgcgggcgcgactcggcggcggcgtcttttatcctggtccctacaaataagcctgctcatgtgagataagaaaggagttcctggaaccaggaattcattctcagtgtagaagacctagctgagacctcactccacagttttggggcagaagcagaagagacgcacagtagaaccgatctcagccttgctgatcatctcgtacagcagcagaaaatgaccatgttacaggagtcattctcatttgacgatttatctgtggacttcacccaaaaggagtggcagctactggatccctctcagaagaatttatacaaggatgtgatgttggagaactatagcagcctagtgtcactggggtatgaagttatgaaaccagatgtcatcttcaaattggagcaaggagaagagccgtgggtaggagatggagaaattccaagttcagattctccagaagtctggaaagtagatggtaacatgatgtggcaccaggataaccaagacaagcttaaaattataaaaagaggtcatgaatgtgatgcatttggaaaaaatttcaatctgaacatgaactttgttcctttaaggaaatcaaacagtgaaggtgacttagatggattgattttaaaacatcatttagatttgcttattccaaaaggagattatggaaaagcagaatcagatgactttaatgtgtttgataatttttttctccattccaagcctgaggatactgatacctggttaaaatactatgactgtgataaatataaagagagctataaaaagtcacagattatcatatatcatagaaatcgtttaggggagaaactctatgaatgcagtgaatgtaggaagcgcttcagtaagaaaccaagtctcattaaacatcagagcagacatataagagacatagcctttggctg

SEQ ID NO: 23696 - DNA, 598 bp, Homo sapiens
  misc_feature 1..598: note = ENST00000539098
  source 1..598: mol_type = unassigned DNA
gaggccgcgggcgcgcgggcgcgactcggcggcggcgtctttttccacagatcctggtccctacaaataagcctgctcatgtgagataagaaaggagttcctggaaccaggaattcattctcagtgtagaagacctagctgagacctcactccacagttttggggcagaagcagaagagacgcacagtagaaccgatctcagccttgctgatcatctcgtacagcagcagaaaatgaccatgttacaggagtcattctcatttgacgatttatctgtggacttcacccaaaaggagtggcagctactggatccctctcagaagaatttatacaaggatgtgatgttggagaactatagcagcctagtgtcactgggtaataaaagctttcttgaggaccttggactatgcccaatgcattgccttttatttttagttgctgggaagtttcagaagcctatagctaggcttctgaaatttttaatgattttagacctgaaacttagatcacagttgcttggactatgacaccaagaaagtatttgggtctcacctttcaataatgaagttgtaagtttgtcatgcagcctctgaaactt

SEQ ID NO: 23697 - DNA, 637 bp, Homo sapiens
  misc_feature 1..637: note = ENST00000539686
  source 1..637: mol_type = unassigned DNA
gactcggcggcggcgtcttttgtgagttcatccacagatcctggtccctacaaataagcctgctcatgtgagataagaaaggagttcctggaaccaggaattcattctcagtgtagaagacctagctgagacctcactccacagttttggggcagaagcagaagagacgcacagtagaaccgatctcagccttgctgatcatctcgtacagcagcagaaaatgaccatgttacaggagtcattctcatttgacgatttatctgtggacttcacccaaaaggagtggcagctactggatccctctcagaagaatttatacaaggatgtgatgttggagaactatagcagcctagtgtcactgggtaataaaagctttcttgaggaccttggactatgcccaatgcattgccttttatttttagttgctgggaagtttcagaagcctatagctaggcttctgaaatttttaatgattttagacctgaaacttagatcacagttgcttggactatgacaccaagaaagtatttgggtctcacctttcaataatgaagttgtaagtttgtcatgcagcctctgaaacttaagtagtaatagtttgagcagtagtgatagcacctaatgcatataacttact

SEQ ID NO: 23698 - DNA, 558 bp, Homo sapiens
  misc_feature 1..558: note = ENST00000536123
  source 1..558: mol_type = unassigned DNA
ggcggcggcgtcttttgtgagttcaagacctaggcttccactgttccattttactatattctgtttccctgagagtgctgtttcagttatatagcaagcgtacctctggccttagatgatcgtgaattccaagttcctagcaagagagaaagagatttcatgtgcaatgtgaatataccagttgaagtacatttctcccgaagtccacagatcctggtccctacaaataagcctgctcatgtgagataagaaaggagttcctggaaccaggaattcattctcagtgtagaagacctagctgagacctcactccacagttttggggcagaagcagaagagacgcacagtagaaccgatctcagccttgctgatcatctcgtacagcagcagaaaatgaccatgttacaggagtcattctcatttgacgatttatctgtggacttcacccaaaaggagtggcagctactggatccctctcagaagaatttatacaaggatgtgatgttggagaactatagcagcctagtgtcactggggtatgaagttatgaaaccagat

SEQ ID NO: 23699 - DNA, 7162 bp, Homo sapiens
  misc_feature 1..7162: note = ENST00000327668
  source 1..7162: mol_type = unassigned DNA
gggggctccgggaatggcgggggaggcgcgcgggagtggccgcggggagcttcggcttcaaggccctgggcgtccgcgcgcggatgcgggtctggggcgggttggggctgggccgggtcgtgaagatgccgtgggccgcggagctgcgcggattctgggctgtggggcgggcacggcctttccggaggcgccgctcctgggcgtcctttcaggcgggcgtggaggcgccagcctcgggcgcgtttagcctcgggcgcgtttagcctcgacctcgggccagcccgcttgccgcgccgtggccctaaggagcggctgccctgctggaccgcatccaccagcagcctggctctgccgctatcgaaggaggcttttaaagcgctggggttacagtccacagatcctggtccctacaaataagcctgctcatgtgagataagaaaggagttcctggaaccaggaattcattctcagtgtagaagacctagctgagacctcactccacagttttggggcagaagcagaagagacgcacagtagaaccgatctcagccttgctgatcatctcgtacagcagcagaaaatgaccatgttacaggagtcattctcatttgacgatttatctgtggacttcacccaaaaggagtggcagctactggatccctctcagaagaatttatacaaggatgtgatgttggagaactatagcagcctagtgtcactggggtatgaagttatgaaaccagatgtcatcttcaaattggagcaaggagaagagccgtgggtaggagatggagaaattccaagttcagattctccagaagtctggaaagtagatggtaacatgatgtggcaccaggataaccaagacaagcttaaaattataaaaagaggtcatgaatgtgatgcatttggaaaaaatttcaatctgaacatgaactttgttcctttaaggaaatcaaacagtgaaggtgacttagatggattgattttaaaacatcatttagatttgcttattccaaaaggagattatggaaaagcagaatcagatgactttaatgtgtttgataatttttttctccattccaagcctgaggatactgatacctggttaaaatactatgactgtgataaatataaagagagctataaaaagtcacagattatcatatatcatagaaatcgtttaggggagaaactctatgaatgcagtgaatgtaggaagcgcttcagtaagaaaccaagtctcattaaacatcagagcagacatataagagacatagcctttggctgtggtaattgtggcaaaacctttccccagaagtctcagtttattacacatcacagaactcatacaggagaaaaaccttataattgtagccagtgtgggaaagccttctcccaaaagtcacagctcacatcccatcagcggacacatacaggagagaaaccttatgagtgtggtgaatgtgggaaagccttctcccggaagtcacatctcatatcgcattggagaacacacacaggagagaaaccctatggatgcaatgaatgtgggagggcctttagtgaaaagtccaatctcattaaccatcagagaattcataccggtgagaagccttttgaatgcagggaatgtgggaaagccttcagcaggaagtcacaactcgttacacatcacagaactcacacaggaacaaaaccctttggatgtagtgattgtagaaaagcattctttgagaagtcagagcttattagacatcagacaattcatactggagagaaaccctatgaatgcagcgagtgtaggaaagcatttagagagaggtcgagtctcattaatcatcagagaacacatacaggagagaaacctcatggatgcattcagtgtgggaaggccttctcccagaagtcacatctcatatcacatcagatgacacacacaggagaaaaaccctttatatgcagtaaatgtgggaaagccttcagcaggaaatcacagctcgttagacatcagagaactcatacgggagaaaaaccgtatgaatgcagtgagtgtgggaaagctttcagtgaaaaattaagtctcactaatcatcaaagaattcatacaggagaaaaaccatatgtatgcagtgaatgtgggaaagccttttgtcagaagtcacatctcatatcacatcagaggacacatacaggggagaaaccctatgaatgcagtgaatgtgggaaggcctttggtgagaagtcaagtcttgcaactcatcagagaactcatactggagaaaaaccgtatgaatgcagggactgtgaaaaagctttctcccagaaatcacagctaaatacccatcagagaattcacactggagagaaaccctatgaatgcagtctttgtaggaaagctttttttgagaagtcggagctaattagacatctgagaactcatacaggagaaaaaccttatgaatgcaatgaatgtagaaaagccttcagggagaagtcaagtctcatcaatcatcagagaatacatacaggagagaagccttttgaatgcagtgagtgtggcaaagctttctctcggaagtcacaccttataccacatcaaaggacacatacgggtgagaaaccctatggatgcagtgaatgtaggaaggccttctctcagaagtcacagctggttaatcatcagagaattcatacaggagagaagccttatcgatgcattgaatgtgggaaagctttctcacagaagtcacagctcatcaatcatcagagaactcatacagtaaaaaaatcctaggaatacagttaatagtagtctttgacagatcatcttggacttcaggaaatgcaattatgataacgtttgtagacagtcacgtcatgttaggtgtttgtactccatgaggatgagaactctaaatgaggtggtgtatggaaagccgatcataattcatagagtagagtgaacctatgactgcagtggatctcaaaaacttttaaaaccatagacaagccttatagagtagaacattcacagcaaagaagaatcctgtgaatgtccaaaagccttccagaagtcaagtctcttaagctattagaaatattcccactggggatgagggaaaaccccatgaatgcgggaaatgaggcaatatttttaagaaatgacagttcattgtacataagaaaatgctcttaggaatgaagttctatgaaagtactaaatatgggacagtgcaacaagtaacgagactattttgtattttggagaattcatattatggagaacctaacaatttaaagacactgggaacacttgcccctcagtatagtactgtcaagggaagccatacactttttgtagacatgggtaccaaaaatacccaattctaagtggttgacagatgttcactttgaagtgtgaagttttaaaaatacgtgaataaattggttattgaaacatctaagacatttcttagtggtatttgtggcttatcttctagtgtcacgtatgttttgtgttttggacttacctataatttaatgtaattgggagtatgaaatgcatatgccttttagtgcctctgatgtctgtgaagacaacactacacaccactggtttttattttttaacaataatataaaaaatggaaactcatgtaacatgactacatgaataagtaccttaagtgataacccgtttcttttaacttatagacatacataaggggtcttttgtttttatggacctttctattcagtaactgaagccaacattgtgtaagtcttctgcatcctcagagtctgagtaacagtttatataaaataaatatgcaaaggcaggaaccacagaataaccatagtaatatataactgaatgagcaaaataaaggtgtgtgaactacattacaacacccaaactaaatgaaataaagtagtgctgtattaaatctttttctcatttagtgaggtgcctccatatagtatatatatatgtatcttaagtgatatgtaacccaaatgtcactattttaatttactgtgataaagtatcatggatattttgtgctgctgttatgctttttgtgttgcataaaatatcttgtaaaaattagatggataaatgaattattaaaaaatcacatttctgaagatgtaaagtattagggaattttgtgctggaaaaacatttttgacattcaaggatgcctattttatcttctagcaaatttctgtggtccctggaaaagtacagatgatcctggacttacagtggggttacctcccaataaacccattgtaagttgaaaacattgtaagtcaaaaatgcatttaatacacccaacttaccaaacatcatagcttagcgtagcctaccttaaacattctcagaacacattctaatgcatcatctattttataaaaaggtgttgaatatctgatgtaattattgaatactgaaggtgaaaaatagtagtgtatggataccattgtaatgttgagaaactgtaagtcacatcctcttaagtcaggaactatctgtataaggaaacaagatttccattttatcatttgaaatgtatttgactttgtttcactagttgcattatccccatggaaaacttcacattgagaacttaccattatatatttccataaaaatgcatgaaccatcccttagctaagtaaggattttgtaatgttctctcaataatgttgcttggcaaagttaatattttttgtatgctgatgaaatttagaaaagtccaatattgagcttgattgcaaacttagaaaaactcaagacttctccttttatgttcaaattgttgtatcagtatggtattttgcacctttaccttaaacaatattttctcctttaattattgattttgcaacattttgggaaagttggaattttaaataaatgaataattttctaaaccagaataccagttcaacagccaaataattctgtctttccatgctgtaattttaaagcatttaattttccaactttttgttcatactcaagtgtatgaacttcctggctgggcacagtggctcatgcctgtaatcccagcactttgggaggctgaggacctcaagtggagacctcaagtggatcacttgaggtcaggagttgaagaccagcatgttcatggccaacatggcaaaaccctgtcttaaattagccgggcatggttgtgcgtgcctgtaatcccagttactcaggaggctgaggcaggagaatcacttgaacctgagaggcagaggttgcagtgagccaagattgtgcagcctgggcgacagagcgagcctctgtcaaaaaaagaaaagaaaaagaacttcctactttttaatatctcaaattcattttactagacgtgggagaccaactaatgcaaatgaacagttacagggtgatgttgtactttgtgatttttgccctattttttctttccatctatcaccattctctttccaatcccagagattgatttattaggtcttggaaattctagattattccattaactattaagcagttaaacctgatacttcctacactagataatggaacttcaacattagcctattgattgcccaagaacaaacatttttttctaaatgtcaggtgttatggggaggattgatgctgacagcagaggtctagttaaaaactgatgcagaggttcaaatacgttgtgcagtaatcactagaactcaccttctaaagtgtcatgagagctctgattctgcaattagagattttttaatgtgtttttgaaattaccttgtaaaccacaaatctgtgtctctgcattgccccttattgtttcctaccacaaattctacatcaagaagaaagttttaaagttagactggatttatttgtgattttatggagcacaataaggtacattgagatagcatactaaaggaggccaaatacaggaagcatcatcttttcttattctcttactgcctggattttcccactgacctggaattgtgcacagttctacaaaggacaattgacattgttttccttttactaagtagtgggttttccttaaggtccagactgaattttgagacctgtatcaggattgccttctgtgtgactttttcttgcaggatctgacatcattacctatgggtccatatatttgtgatactttggtttcgggaacatcacttttagaatgttgacataaaatgcacccacagaatgccgtatttatcaaaagtaactttctagcaaaatctacagcagtaggcatttggaatctgcatttgagacctctgcagtcatttggtcattccagcaatctatgtccaggttgtcaatttcagaggtcttattagtctatacaggtaccaatgagctttcagatgttcaacacctacccctggcctaactgctgataaccaaccataacccttgcagatgcatgcatgttttctgcaccttgctatcatttttcagtccatttttcacatgtatacatagtgattatttttaaatgcaaccctgatttcacatgcctcatgttgaaatatcgtgtggcttattgtggacttaaagtgtaacattctccttatggtatgtaaggacttttgtataaaccaatgcctatctatctatcatttctgaaaactttttcctcctatgcaatattttctggcctctgtgaacaacttgtagttccttgagatttctattatcacttatgtttttgcaaatctgcaattgaaatgcccttgttccttgttaatgcctattgaatctatatgaacctgtacgtgtgtttctcactgtgataatataatcattgcatgttttatctttcccactagaaagcttctagaaagctagtactatcttttttgtctgtgtaatttttgcatcacaagctatatttaaatgtgggtgcagtgagtggctgttttctgccacatggagaaacatggtctgcagtgagagagaagaatgaagccatgatgaaagcaaaatcaagaaagagtcccgattgtgttccagtacctggttcttctggtcttcatgttcaggtccacctctgcccttttcatgtcttgattgttgaattcttctgtgagatactccaaatatcctaataaattctcatgtttgctt

SEQ ID NO: 23700 - DNA, 562 bp, Homo sapiens
  misc_feature 1..562: note = ENST00000543310
  source 1..562: mol_type = unassigned DNA
aaataaggttattgacctggaaagatgttcttcacataatgggaaaaaaacaaaaacagcttttaaatatgaccatatgcttccattgtatgaaaaatatcacaatagtttccatcatcctaagaatggttacctgtgtccacagatcctggtccctacaaataagcctgctcatgtgagataagaaaggagttcctggaaccaggaattcattctcagtgtagaagacctagctgagacctcactccacagttttggggcagaagcagaagagacgcacagtagaaccgatctcagccttgctgatcatctcgtacagcagcagaaaatgaccatgttacaggagtcattctcatttgacgatttatctgtggacttcacccaaaaggagtggcagctactggatccctctcagaagaatttatacaaggatgtgatgttggagaactatagcagcctagtgtcactggggtatgaagttatgaaaccagatgtcatcttcaaattggagcaaggagaagagccgtgggtaggagatggagaaattccaagttcagattct

SEQ ID NO: 23701 - DNA, 546 bp, Homo sapiens
  misc_feature 1..546: note = ENST00000545299
  source 1..546: mol_type = unassigned DNA
gacctggaaagatgttcttcacataatgggaaaaaaacaaaaacagcttttaaatatgaccatatgcttccattgtatgaaaaatatcacaatagtttccatcatcctaagaatggttacctgtggtgagatcatagataatagttcttatttagcttgtagacctaggcttccactgttccattttactatattctgtttccctgagagtgctgtttcagttatatagcaagcgtacctctggccttagatgatcgtgaattccaagttcctagcaagagagaaagagatttcatgtgcaatgtgaatataccagttgaagtacatttctcccgaagtccacagatcctggtccctacaaataagcctgctcatgtgagataagaaaggagttcctggaaccaggaattcattctcagtgtagaagacctagctgagacctcactccacagttttggggcagaagcagaagagacgcacagtagaaccgatctcagccttgctgatcatctcgtacagcagcagaaaatgaccatgttacaggtg

SEQ ID NO: 23702 - DNA, 1451 bp, Homo sapiens
  misc_feature 1..1451: note = ENST00000542358
  source 1..1451: mol_type = unassigned DNA
ggaggcacacaaacctgtagttccagctacgtgggaggctgaggcaggaggatcccttgagcctggagttcaaagttgcagtgagctctgattgtgccactgcatgccagcctgggttagggagcaagaccgtaccaaaaaaaaaaaaaaaaaaaaagaatgctgatgttgcagacttcatctaagataaaatagattttaaggcaaaaagcattattgggggtatgaagcgttgttacacaatgattttttaaaacccctatttaaccttgacgcatcaaacaacatagccataagcatataatccaaacatcagcagaattataaggaaaaactgaccaatctctagtcatattgtgagattttaacccatttccttctgaaatgggtagacaaaaatggcagacaaaagttaaggatatattaatagaagattttaataggaaattaggctcagaatggtgaaatttgtttgtttttgccaaaagtcatctagctggtaaaggaaaaagttgattgaaactcaaatctgttttaatacagatcatataaactgtgtttttcctaacagcacctgttaaactgatttgcatttcagcattcacagtgaatattgagtgaatctcacaattactttatttctgatatttccttatctgtttgcagagacctaggcttccactgttccattttactatattctgtttccctgagagtgctgtttcagttatatagcaagcgtacctctggccttagatgatcgtgaattccaagttcctagcaagagagaaagagatttcatgtgcaatgtgaatataccagttgaagtacatttctcccgaagtccacagatcctggtccctacaaataagcctgctcatgtgagataagaaaggagttcctggaaccaggaattcattctcagtgtagaagacctagctgagacctcactccacagttttggggcagaagcagaagagacgcacagtagaaccgatctcagccttgctgatcatctcgtacagcagcagaaaatgaccatgttacaggagtcattctcatttgacgatttatctgtggacttcacccaaaaggagtggcagctactggatccctctcagaagaatttatacaaggatgtgatgttggagaactatagcagcctagtgtcactgggtaataaaagctttcttgaggaccttggactatgcccaatgcattgccttttatttttagttgctgggaagtttcagaagcctatagctaggcttctgaaatttttaatgattttagacctgaaacttagatcacagttgcttggactatgacaccaagaaagtatttgggtctcacctttcaataatgaagttgtaagtttgtcatgcagcctctgaaacttaagtagtaatagtttgagcagtagtgatagcacctaatgcatataacttact

SEQ ID NO: 23703 - DNA, 436 bp, Homo sapiens
  misc_feature 1..436: note = ENST00000441040
  source 1..436: mol_type = unassigned DNA
tccacagatcctggtccctacaaataagcctgctcatgtgagataagaaaggagttcctggaaccaggaattcattctcagtgtagaagacctagctgagacctcactccacagttttggggcagaagcagaagagacgcacagtagaaccgatctcagccttgctgatcatctcgtacagcagcagaaaatgaccatgttacagatttaccaggattgtgctcttacaggagtcattctcatttgacgatttatctgtggacttcacccaaaaggagtggcagctactggatccctctcagaagaatttatacaaggatgtgatgttggagaactatagcagcctagtgtcactggggtatgaagttatgaaaccagatgtcatcttcaaattggagcaaggagaagagccgtgggtaggagatggagaaattcc

SEQ ID NO: 23704 - DNA, 540 bp, Homo sapiens
  misc_feature 1..540: note = ENST00000542874
  source 1..540: mol_type = unassigned DNA
tccacagatcctggtccctacaaataagcctgctcatgtgagataagaaaggagttcctggaaccaggaattcattctcagtgtagaagacctagctgagacctcactccacagttttggggcagaagcagaagagacgcacagtagaaccgatctcagccttgctgatcatctcgtacagcagcagaaaatgaccatgttacaggagtcattctcatttgacgatttatctgtggacttcacccaaaaggagtggcagctactggatccctctcagaagaatttatacaaggatgtgatgttggagaactatagcagcctagtgtcactggggtatgaagttatgaaaccagatgtcatcttcaaattggagcaaggagaagagccgtgggtaggagatggagaaattccaagttcagattctccagggacctccatagtatgacactactgctgcctgttcagttatttcttcctatctcccattcatgaagtctggaaagtagatggtaacatgatgtggcaccaggataaccaaga

SEQ ID NO: 23705 - DNA, 647 bp, Homo sapiens
  misc_feature 1..647: note = ENST00000535439
  source 1..647: mol_type = unassigned DNA
atcctggtccctacaaataagcctgctcatgtgagataagaaaggagttcctggaaccaggaattcattctcagtgtagaagacctagctgagacctcactccacagttttggggcagaagcagaagagacgcacagtagaaccgatctcagccttgctgatcatctcgtacagcagcagaaaatgaccatgttacaggagtcattctcatttgacgatttatctgtggacttcacccaaaaggagtggcagctactggatccctctcagaagaatttatacaaggatgtgatgttggagaactatagcagcctagtgtcactggggtatgaagttatgaaaccagatgtcatcttcaaattggagcaaggagaagagccgtgggtaggagatggagaaattccaagttcagattctccagtgagtggctgttttctgccacatggagaaacatggtctgcagtgagagagaagaatgaagccatgatgaaagcaaaatcaagaaagagtcccgattgtgttccagtacctggttcttctggtcttcatgttcaggtccacctctgcccttttcatgtcttgattgttgaattcttctgtgagatactccaaatatcctaataaattctcatgtttgcttcatctgg

SEQ ID NO: 23706 - DNA, 1607 bp, Homo sapiens
  misc_feature 1..1607: note = ENST00000543124
  source 1..1607: mol_type = unassigned DNA
ccgtactggctgtagacaccttcgtctttctttacctccctggatacacatgtagtttactatggcacctgtcttctcatggcagtactctgttcccaaacaaacatcattttcttctggagaggctctctttaatctttaggttaacagttgtataaatggaaggatggaagaatgcacaatgacattttatcacacaaaatatgcaaaggtagagacatagtaggcattttgtataacttgttatgagaatgaagtgctaaagctccaatatttttttctcacatcatacggtgttaactgcttcagatttaccaggattgtgctcttacaggagtcattctcatttgacgatttatctgtggacttcacccaaaaggagtggcagctactggatccctctcagaagaatttatacaaggatgtgatgttggagaactatagcagcctagtgtcactgggtaataaaagctttcttgaggaccttggactatgcccaatgcattgccttttatttttagttgctgggaagtttcagaagcctatagctaggcttctgaaatttttaatgattttagacctgaaacttagatcacagttgcttggactatgacaccaagaaagtatttgggtctcacctttcaataatgaagttgtaagtttgtcatgcagcctctgaaacttaagtagtaatagtttgagcagtagtgatagcacctaatgcatataacttactatatgccacatcttataccaagtgctttacgtatatcaactcatttagtcatcagagcaatcctatgtggcaagtacagtcattatccatttttcctgatgagaagatcgaggccaagagaggttaagtaactttcccaagaactaacagctagtaaattaaagagcctggatgtaaacccaggcttactggctccagagcctctgaagtgttcagtggctttgtactagaccctattagccaccaagggagaccgttactgtaactttgagaattacttactctgttggggtacagcttcaccaggccaactttgatgtgaaaccttgctcaactttagaggccctaaaccccaagcagttgggcccaaggcctttgtgatttttcccttaacagggtatgaagttatgaaaccagatgtcatcttcaaattggagcaaggagaagagccgtgggtaggagatggagaaattccaagttcagattctccagaagtctggaaagtagatggtaacatgatgtggcaccaggataaccaagacaagcttaaaattataaaaagaggtcatgaatgtgatgcatttggaaaaaatttcaatctgaacatgaactttgttcctttaaggaaatcaaacagtgaaggtgacttagatggattgattttaaaacatcatttagatttgcttattccaaaaggagattatggaaaagcagaatcagatgactttaatgtgtttgataatttttttctccattccaagcctgaggatactgatacctggttaaaatactatgactgtgataaatataaagagagctataaaaagtcacagattatcatatatcatagaaatcgtttaggggagaaact

SEQ ID NO: 23707 - DNA, 7020 bp, Homo sapiens
  misc_feature 1..7020: note = ENST00000392319
  source 1..7020: mol_type = unassigned DNA
actcttggtaatgcttgcaggtggcccgttcttcctctttgtccttcgctgccacgtgagaggggagtgtacgcgtgtgcgcgcgtgcgagtgtgcgcgtgtgcagtccccgactcgtcccggcccgttcggagccgcccgggagcgcacaaaggccgacggtttgggcgcgtgcgcgggacacgggggacgggcggtgtcacgtgatcgcgaggccgcgggcgcgcgggcgcgactcggcggcggcgtcttttatcctggtccctacaaataagcctgctcatgtgagataagaaaggagttcctggaaccaggaattcattctcagtgtagaagacctagctgagacctcactccacagttttggggcagaagcagaagagacgcacagtagaaccgatctcagccttgctgatcatctcgtacagcagcagaaaatgaccatgttacaggagtcattctcatttgacgatttatctgtggacttcacccaaaaggagtggcagctactggatccctctcagaagaatttatacaaggatgtgatgttggagaactatagcagcctagtgtcactggggtatgaagttatgaaaccagatgtcatcttcaaattggagcaaggagaagagccgtgggtaggagatggagaaattccaagttcagattctccagaagtctggaaagtagatggtaacatgatgtggcaccaggataaccaagacaagcttaaaattataaaaagaggtcatgaatgtgatgcatttggaaaaaatttcaatctgaacatgaactttgttcctttaaggaaatcaaacagtgaaggtgacttagatggattgattttaaaacatcatttagatttgcttattccaaaaggagattatggaaaagcagaatcagatgactttaatgtgtttgataatttttttctccattccaagcctgaggatactgatacctggttaaaatactatgactgtgataaatataaagagagctataaaaagtcacagattatcatatatcatagaaatcgtttaggggagaaactctatgaatgcagtgaatgtaggaagcgcttcagtaagaaaccaagtctcattaaacatcagagcagacatataagagacatagcctttggctgtggtaattgtggcaaaacctttccccagaagtctcagtttattacacatcacagaactcatacaggagaaaaaccttataattgtagccagtgtgggaaagccttctcccaaaagtcacagctcacatcccatcagcggacacatacaggagagaaaccttatgagtgtggtgaatgtgggaaagccttctcccggaagtcacatctcatatcgcattggagaacacacacaggagagaaaccctatggatgcaatgaatgtgggagggcctttagtgaaaagtccaatctcattaaccatcagagaattcataccggtgagaagccttttgaatgcagggaatgtgggaaagccttcagcaggaagtcacaactcgttacacatcacagaactcacacaggaacaaaaccctttggatgtagtgattgtagaaaagcattctttgagaagtcagagcttattagacatcagacaattcatactggagagaaaccctatgaatgcagcgagtgtaggaaagcatttagagagaggtcgagtctcattaatcatcagagaacacatacaggagagaaacctcatggatgcattcagtgtgggaaggccttctcccagaagtcacatctcatatcacatcagatgacacacacaggagaaaaaccctttatatgcagtaaatgtgggaaagccttcagcaggaaatcacagctcgttagacatcagagaactcatacgggagaaaaaccgtatgaatgcagtgagtgtgggaaagctttcagtgaaaaattaagtctcactaatcatcaaagaattcatacaggagaaaaaccatatgtatgcagtgaatgtgggaaagccttttgtcagaagtcacatctcatatcacatcagaggacacatacaggggagaaaccctatgaatgcagtgaatgtgggaaggcctttggtgagaagtcaagtcttgcaactcatcagagaactcatactggagaaaaaccgtatgaatgcagggactgtgaaaaagctttctcccagaaatcacagctaaatacccatcagagaattcacactggagagaaaccctatgaatgcagtctttgtaggaaagctttttttgagaagtcggagctaattagacatctgagaactcatacaggagaaaaaccttatgaatgcaatgaatgtagaaaagccttcagggagaagtcaagtctcatcaatcatcagagaatacatacaggagagaagccttttgaatgcagtgagtgtggcaaagctttctctcggaagtcacaccttataccacatcaaaggacacatacgggtgagaaaccctatggatgcagtgaatgtaggaaggccttctctcagaagtcacagctggttaatcatcagagaattcatacaggagagaagccttatcgatgcattgaatgtgggaaagctttctcacagaagtcacagctcatcaatcatcagagaactcatacagtaaaaaaatcctaggaatacagttaatagtagtctttgacagatcatcttggacttcaggaaatgcaattatgataacgtttgtagacagtcacgtcatgttaggtgtttgtactccatgaggatgagaactctaaatgaggtggtgtatggaaagccgatcataattcatagagtagagtgaacctatgactgcagtggatctcaaaaacttttaaaaccatagacaagccttatagagtagaacattcacagcaaagaagaatcctgtgaatgtccaaaagccttccagaagtcaagtctcttaagctattagaaatattcccactggggatgagggaaaaccccatgaatgcgggaaatgaggcaatatttttaagaaatgacagttcattgtacataagaaaatgctcttaggaatgaagttctatgaaagtactaaatatgggacagtgcaacaagtaacgagactattttgtattttggagaattcatattatggagaacctaacaatttaaagacactgggaacacttgcccctcagtatagtactgtcaagggaagccatacactttttgtagacatgggtaccaaaaatacccaattctaagtggttgacagatgttcactttgaagtgtgaagttttaaaaatacgtgaataaattggttattgaaacatctaagacatttcttagtggtatttgtggcttatcttctagtgtcacgtatgttttgtgttttggacttacctataatttaatgtaattgggagtatgaaatgcatatgccttttagtgcctctgatgtctgtgaagacaacactacacaccactggtttttattttttaacaataatataaaaaatggaaactcatgtaacatgactacatgaataagtaccttaagtgataacccgtttcttttaacttatagacatacataaggggtcttttgtttttatggacctttctattcagtaactgaagccaacattgtgtaagtcttctgcatcctcagagtctgagtaacagtttatataaaataaatatgcaaaggcaggaaccacagaataaccatagtaatatataactgaatgagcaaaataaaggtgtgtgaactacattacaacacccaaactaaatgaaataaagtagtgctgtattaaatctttttctcatttagtgaggtgcctccatatagtatatatatatgtatcttaagtgatatgtaacccaaatgtcactattttaatttactgtgataaagtatcatggatattttgtgctgctgttatgctttttgtgttgcataaaatatcttgtaaaaattagatggataaatgaattattaaaaaatcacatttctgaagatgtaaagtattagggaattttgtgctggaaaaacatttttgacattcaaggatgcctattttatcttctagcaaatttctgtggtccctggaaaagtacagatgatcctggacttacagtggggttacctcccaataaacccattgtaagttgaaaacattgtaagtcaaaaatgcatttaatacacccaacttaccaaacatcatagcttagcgtagcctaccttaaacattctcagaacacattctaatgcatcatctattttataaaaaggtgttgaatatctgatgtaattattgaatactgaaggtgaaaaatagtagtgtatggataccattgtaatgttgagaaactgtaagtcacatcctcttaagtcaggaactatctgtataaggaaacaagatttccattttatcatttgaaatgtatttgactttgtttcactagttgcattatccccatggaaaacttcacattgagaacttaccattatatatttccataaaaatgcatgaaccatcccttagctaagtaaggattttgtaatgttctctcaataatgttgcttggcaaagttaatattttttgtatgctgatgaaatttagaaaagtccaatattgagcttgattgcaaacttagaaaaactcaagacttctccttttatgttcaaattgttgtatcagtatggtattttgcacctttaccttaaacaatattttctcctttaattattgattttgcaacattttgggaaagttggaattttaaataaatgaataattttctaaaccagaataccagttcaacagccaaataattctgtctttccatgctgtaattttaaagcatttaattttccaactttttgttcatactcaagtgtatgaacttcctggctgggcacagtggctcatgcctgtaatcccagcactttgggaggctgaggacctcaagtggagacctcaagtggatcacttgaggtcaggagttgaagaccagcatgttcatggccaacatggcaaaaccctgtcttaaattagccgggcatggttgtgcgtgcctgtaatcccagttactcaggaggctgaggcaggagaatcacttgaacctgagaggcagaggttgcagtgagccaagattgtgcagcctgggcgacagagcgagcctctgtcaaaaaaagaaaagaaaaagaacttcctactttttaatatctcaaattcattttactagacgtgggagaccaactaatgcaaatgaacagttacagggtgatgttgtactttgtgatttttgccctattttttctttccatctatcaccattctctttccaatcccagagattgatttattaggtcttggaaattctagattattccattaactattaagcagttaaacctgatacttcctacactagataatggaacttcaacattagcctattgattgcccaagaacaaacatttttttctaaatgtcaggtgttatggggaggattgatgctgacagcagaggtctagttaaaaactgatgcagaggttcaaatacgttgtgcagtaatcactagaactcaccttctaaagtgtcatgagagctctgattctgcaattagagattttttaatgtgtttttgaaattaccttgtaaaccacaaatctgtgtctctgcattgccccttattgtttcctaccacaaattctacatcaagaagaaagttttaaagttagactggatttatttgtgattttatggagcacaataaggtacattgagatagcatactaaaggaggccaaatacaggaagcatcatcttttcttattctcttactgcctggattttcccactgacctggaattgtgcacagttctacaaaggacaattgacattgttttccttttactaagtagtgggttttccttaaggtccagactgaattttgagacctgtatcaggattgccttctgtgtgactttttcttgcaggatctgacatcattacctatgggtccatatatttgtgatactttggtttcgggaacatcacttttagaatgttgacataaaatgcacccacagaatgccgtatttatcaaaagtaactttctagcaaaatctacagcagtaggcatttggaatctgcatttgagacctctgcagtcatttggtcattccagcaatctatgtccaggttgtcaatttcagaggtcttattagtctatacaggtaccaatgagctttcagatgttcaacacctacccctggcctaactgctgataaccaaccataacccttgcagatgcatgcatgttttctgcaccttgctatcatttttcagtccatttttcacatgtatacatagtgattatttttaaatgcaaccctgatttcacatgcctcatgttgaaatatcgtgtggcttattgtggacttaaagtgtaacattctccttatggtatgtaaggacttttgtataaaccaatgcctatctatctatcatttctgaaaactttttcctcctatgcaatattttctggcctctgtgaacaacttgtagttccttgagatttctattatcacttatgtttttgcaaatctgcaattgaaatgcccttgttccttgttaatgcctattgaatctatatgaacctgtacgtgtgtttctcactgtgataatataatcattgcatgttttatctttcccactagaaagcttctagaaagctagtactatcttttttgtctgtgtaatttttgcatcacaagctatatttaaatgtgggtgcagtgagtggctgttttctgccacatggagaaacatggtctgcagtgagagagaagaatgaagccatgatgaaagcaaaatcaagaaagagtcccgattgtgttccagtacctggttcttctggtcttcatgttcaggtccacctctgcccttttcatgtcttgattgttgaattcttctgtgagatactccaaatatcctaataaattctcatgtttgcttc

SEQ ID NO: 23708 - DNA, 15455 bp, Homo sapiens
  misc_feature 1..15455: note = ENST00000537226
  source 1..15455: mol_type = unassigned DNA
gttcaggccacgctccgcccccagcccgtcagccgcgcgccccgggaccctagagccggcgattcgtcgccggcgccgcagccgccactctgtgccggaccctgcgggccttcggcccagagcgcgtccgtgacgcacagaccaggcccctctgcggggcggcgcaggagctcctgggaaacgtagttcggcctcgcgtccccctcgggcgggaccgcggacgcctggaggcaggcactgaggacggggagaacttcgggtgaaatgcatccctcctgtgactggattggagacacaagaacagaaacatcctgatctctctactctactgtgcaggcttatgtactcataaaatggcagttatggacctatcctccccatgggctttaactaaacaggactctgcctgtttccatctgagaaatgctgaagaggaaaggatgattgctgtatttctgacaacctggttacaggaaccaatgactttcaaagatgtagctgtggagttcactcaggaggagtggatgatgctggattctgctcaaagaagtctgtacagagatgtgatgttggaaaactatagaaatctcacctccgtggaatatcagttgtacaggcttactgtgatctccccattggatcaagaagagataaggaatatgaaaaagagaattccccaagccatctgtccagaccagaagattcaacctaaaaccaaagaatcaactgtgcagaaaattttgtgggaggaaccatccaatgcagtgaaaatgataaaactcacaatgcataattggtcctccacattaagagaagactgggaatgccataagatcagaaaacagcataagattccagggggacattggaggcaaatgatatatgccccaaagaaaacagtacctcaggagctattccgtgactatcatgaattagaggaaaactctaaacttggatcaaaacttattttttcacagagcattttcaccagtaaacattgccaaaaatgttactcagagattggatgtttgaaacacaattcaatcataaacaattatgtgaaaaactctataagtgagaagctctatgaaagtcatgaatgtgatacaactctatggcattttcagagaaatcaaacagtacaaaaagagtacacatattctaaacatggaatgcacttcacacataatatgtttcctgtacctaacaatttgcatatggcacagaatgcctgtgaatgtaataaagatgaaacgctgtgtcatcaatcatcccttaagaaacaaggacaaactcatactgaaaagaaacatgaatgcaatcaatgtggaaaagccttcaaaaggatttctaatcttactttatacaagaaaagtcacatgggtgagaaacaatatgaatgtaaagaatgtggtaaagtgttcaatgattcctcaaccttaaggagacatgtaagaactcacactggagagaaaccctatgaatgtaatcaatgtggaaaagctttcagtcaaaaaacatcccttaaggctcacatgagaactcacactggagagaaaccttatgaatgtaatcagtgtggaaaatcctttggcacaagctcttaccttatagtgcacaagagaatacacactggagaaaaactctatgaatgcagtgagtgtggaaaagccttcaacacgagctctcaccttaaagttcataagaaaattcataccggagagaatgtttatgaatgcagtgactgtgggaaagttttcagtggggtctcatcccttagaatgcatataagaactcacactggagagaaaccctatgaatgtaaggaatgtaggaaagccttcagtgtttcctcttcccttaggaggcatgtgagaattcacactggagagaaaccctatgaatgtattcaatgtggaaaagccttcagtcagagctcttcacttattatacacaagagaattcatactgagagagaaaccctgtaagtgttatgaatgtggaattgctgttttcattgtcttaaggtggattccaagctccttgtctcagtctttgttctctaaaagaacgatttaaggttacaaatggctctttttttaatataacattttctgtaaatactaattatgactttttttgatccatggctgtttagaattaggtatttttaatatgtgaggtaggtatattttcagttatctttttattgttggtttctaggttaattccattgtgttcagagaatctggactatattttactgctttgttggtgtttttataaaagttgttttctggcccagtgagactggtattgctagcagccaaccaaacatttgagctcatctttccttactaatgaattccatcttagccaagaacaataaggtctctggttatagaacgcttctttgacttcttgtagctaagggtagccatatcattcattcttgctgattcaaaaatagacatatcactgggatcagaactatctatcttgtcctctactttttgcacttcatctttgtccctatgaattggccattcctgaagctgctgaaagagctatcttgtgatcatgaaaatgacagctgtagccaagggatgaagtagaagaaagagatccctgttcctcaaagaaatctttaaatagttgtaccagccctgcactacttgtatctggatatgttcctacatgagaaaaataaggttttttgtttgttttttgagatggagtctcggtatgttgcccaggctggagtgcagtggcacaatctcagctcactgcaacctccacctcccaggttcaggtgattctcctgcctcagcctcctgagtagctgggattacaggcaccaccgccatgcctggctaattttagtatttttaatagagacggggtttcaccatgttggccaggttggtctcaaactcctgacctcaggtgatccacccacctaggcgtcccaaagtgttggcattacaggcgtgagccactgtgcccggccaagaaaaatatgttaattgattttttctttttttttttcaatttttcagacagagtctctgtctctcaggctagaatgcagtggtgtggtcatggctcattgcaacctcgacctcctgggctcaggtgatccaccacagtctcctcagtagttgggatcacaaatgcatgccaccatgcctggctaattttaaaaatatatattttgtagagacaggctcttcctacattgctcagactggtctgaaactcctgggctcaagcagtcctcctgcctttgcctcccaaagtgctaggattccaggcatgagttaccatgcctggctcttactgattttttttaaagcactacataaatacagtcaacgcagtcaccatattgtagaaaaacagaagtatatacagttaaatgttttatgttggatgtacacatttgaagaggaacatagaaaaaaagtatggaaaaggaatgttgaccgagcttttatgcttaagcagcagatgaagatagaaccaagatcactgaaagcaagtgtttagaacagcaaaaagagtatcccaacatttcagcattggaactacagaaagttttcagacagaggggaagttaccaattttaaatgctaagtaaagcatgagattttgctgcttgatcttgcagatactgaccagattagttctaacaaaatatggaaggagtggcatacggtggaagaaagaaggcagtagctgctgttgtagttattcatgttagcctcagaggatggtgagacatccagatgaagaggttggtacgcaattctagaattgaggaggtgtctagatagagatataaattgtagtgacatcagtaaagagacaataacaggctttggaaggtgagtaagaatgaaaagggaaggtctgccacctaccctgaagacatacatttaaaggaactatagtagagagataagaggaaaacaagaagagtggagtttcactgaaccaagacaaacaagtttcaaaaaggaaggtgaagttggccaggtgtggtggttcacgcctgtaatcctggcactttgagaggctgaggcaggcggatcacaaggtcagatcgagaccatcctggccaacatggtgaaaccctggttctactaaaatacaaaaattagccgggtgtggtggcacatgcctgtagtcccagctactcaggagctgaggcagaagaatcacttgaacctgggaggcagaggttgcagtgagatgagatctcaccactgcactccagcctggtgacagagcaggacttcatctcaaaaaaaaaaaaaaaaaaaggaaggtgaaggtaaatgtttttagtgttacttagggatccaattagatgaagtctaaaaaggtaaacatatacagccaagtgaagatcatttgtgattgtagttggaaataacatagtggtacataatgaagatggttgctagattgggctgactttaggaatcaataaagggcaaagaagtaaagactggatgtagacaagtttgaataataggagaaagggtagtagctggagagatttggagtaaagagataatatgtttaaaatatgaaaaactagaacatgtttgaattctaatgtgatgaatgtagtatggtgaggtttaatatgcagcataataaagtttaatataagcttctgagaatggggtgtagatgtttagagcacaaacaaaagtattggtgtttgccatgaggcggagggatactcccaccattctttcaggagtagaaaaatgggtgggttggtttaaattacttgtttatttatttacacctaactgtactaagcagtgatcagaatatgtgaactatataatgttttgtgtttcctaagaactgtgtggcagccactgctaattactaaccaaatatatatattttttattctttatgaatagatcttcagttttgctaacagtagtattgtatttagctacaaaactacttatcccaacctctttgtagccttgatgccatttctactgttcctggccagtaaaatatagatatatgattataggtttcatggtaagattatctgctaagaggaaggtggatgaaattctgcaaggaggttttagtgaagaagatctctatgtatttgaaagtccttccaagttatcaatagagccatcagtggagaagacagcaaagcaagtagcaaagtctatgtgattgaggagaggtcatttaaataaaagatagcaaggaagagagggagaaagtggtataactagatggtatgaacttcaaaggaaggagtggttttctccaggctgcaatggttagaagcagtgttagggagtaaggaagatactgatcccacttccaacctgtggatatgtggaatacatgagaataagcccccttgtgatgtgattgttgtcaggtaggtgttttttccttcccagggaacagccaagtttaaattaatgaaaggaaatgttcagggaaatagttgaggatattaagggagtttattaagggaatctcagagggcaccatgaaagagtctccagaagggcaggggtttagggtttctggctttggcctgaggaatacagaagattgtaatgacattattgatagaggaaaaaagaccagatcaggggctatgaccagtgaaaacaaaatttagagggagtataggttaaatcccagcagtctgtaagaagatgatgggtatttaggtctactgggattcatttgtagcttggaaaggagagcctgcagtcatgctgtgaaaccaagtggtttcaggtgttagcagccctggtgggtatagcactagccatcagtagttagaaaatggtcccaactggccgggtgcagtggctcacgcttctaatcccagcactttgggaggccgaggcaggcggatcacgaggtcaggagattgagaccatcctggctaacatgatgaaacctcgtctctactaaaaatacaaaaaattagccaagtgtggtggtgggcgcctgtagtaccagctactcgggaggctgaggcaggagaatgctgtgaacccgggaggcagaggttgtggtaagccgagatcgcaccactgcattccggcctaggtgacagagcaagactccgtctcaagaaaatcgtcccaactgcatgtggtccttgggtgagatcatcttaaggagtactcagcaagggattgtactttgcttggttaggactggaatttacactctaattttggcccagtgatcttggaacagattgagcatctcaaatctgaaaatctgaaattcagaatgctccaaaacctgaaaccttgtgcgccgatgtgactttcaaaagaaatgctcattggagcatttaaaattttggattttcagatttgtgatgctcaactagtaggtataatgcaaatattccaaaatccaaaacagttctggtcccaagtgttttgaataaggaatactcatcctgtacaccaggaggtagactcaggcacagtctcgcccagcatctcacctggattttattgcaatagcctcctaactggtttctctgacttgaatcatactttcctttagtatgttttctatgcagctgccatggtatcctattaaaaaacaaaacaaaacaaaacaaaaactttgtggtttttaataataaaactaatacatgcataggagaaaacaatgtaaataacttctgccctacacagaaggaaaccctggattctactgccttaaaaaattaatatcgtaggtgaatgtgcattctgtcagactttatgtacatacaaacattttataaaaattgagttataccttttatcccacatcttttttttttttttttttttttttttgagaaggagttttgctttttcccaggctggagtgcagtggcacgttctcggctcacagcaacctctgcctcctgggttcaagcaattctcctgcctcagcctcccaagtagctgggattacaggcatgtgccaccactcctggctaattttgtatttttagtagagacagggtttctccatgttggtcaggctggtctcaaactcctaacctcaggtgatccgcctgcctcagcctcccaaattgttgggattgtgaggccatcgcccccagcctatccaacatctttttaaacatctttccatgtcagtgcatgtagttctatttcatttgtaatagctgcttagtatttgattatatgcttgtaccataatgtatttgatccatttgcctccagagtttttataacaatactgcaatcaataatattgtttatatattgtgctttcctatcaactgttctctacacttcccagggtgatccatctaaagtactaacctgatcacataacatttcacgtttaatcttcttctggcctttttctccagttaagataaaatctttttacaagaccttgctcaaactcttgccttttcaggccttatctctggttattccctttatcttcactgtctccctaatttaacctgtcctatttatcctttaggtattgtgtccttcatctgctttaacaatacttgtcacactttcacactgtattgcctgtttgtgtattgtgccctctacactgtaagttttggtaaggtgggaactttgtctaaatttttcattgttttattacttggcccagtgtaggtgttcagttaaatatttacggttcttcagcaaattttgtgccttttcttttacttaccattctagtggaagtttaacttaaaagctatttaagtgattgtaaggtaaaagttgcaaggaggtgggtgcaatggcctgtgcctgtagtcctatctgctctggaggctgacgtgggaggattgcttgagcccaggagtttgagaccagcctgagtaacatgagactccattatagtaaaaatgcatggaattaatttttcttctaggtataggaaaatgttgcaccataacaggtgtgcagaaactaagactgttaggacaacagcagtttaatgttatttatattatgtccctctcctagtccttctcctctcttccctcatcccactcaccaccaccccattcactacacagacttattttttgtagagcaagtgttcatattctgttccattatgtattataatatgaaaagggatgagttgaccaagtattggtgggtgtgtcgtatacttgctttagactaccaatggaagcgtaaattagtacaaacttactgggtgggtgtggtggctcacatctgtaatcccagcactttgagaggctgaggtgagtagattgcttgagcccaggagtttgaaaccagcctaggcaacatggcaaaaccccatctctaccaaaaaaaaaaaattacccatggtgtcatgaatctgtggtcccagccactagggatgctggggtaggaggatcacttgagctgcagtggggttgagtctgcagtgagctgtgtgcaccactgcactccagcctgggtgacagagtaagaccctgtctaaaaacaaaaacaaaccaaaaaaaacttgggacagtaaagcaataaatgtccaaagctggaatatttataacctttaaatatttaaaacccagcaattttaaactgagattttataaaaggatttttcatgtataagtaacaatattcacctgtttcatgccctagtgaaaaactggaaaattcctaaattcccagtaacagtcaataaaatggaatataatgcagtcattaaaatgtatttgtgtggattgacatgtggagatatatttgatacattatgaattttaaacagtcacaaaatatggtatgactttttaatgcatgttataaatatgtgtgtgtgcattgaaaatatggaaagacataacaccaaagttttatcaatggttatgtcataatttttttcttttgtctttttttaagatgtctagtttagtgaacagagctgtggtctatttcttaaaaataattctatcattaactttttaataaatactttttaaagcatgattttaatatcttcaaagttgtaaagtaaataatttgcttaggctgttgttggacacatagattcttttcatttttttaaataccagattaaaaaaattgaaaaatatatttttttatattttataaatatatttttaataaataaatataaatatatatatatatattttttgagacagagtcttgctctgtcgcccaggctgtagtgcagtggcacgatctctgctcaccgcaagctccacctcctgggttcatgccattctcctgcctcagcctcccgagtagctgggactacaggcgcacgccaccatgcccagctaattttttgtatttttagtagagacagggtttcaccgtattagccaggatggtctcgatctcctgacctcgtgatctgcccgtctcggcctcccaaagtgctggggaaaatatattttttaacttaccatttctatctcctactttttaaaggcaaactttttgaaagtgttgataaagggtgtggatactttttagacttcctcttactctaggcagaattcaaaatatgaaggatacaaataagtttctctgataagaacagggaattgtgttagaaaaagcagtcagggctaggcgcagtggcgcacgcctgtaatcccagtgttttcgggaggcagaggtgggtggattgcctgagctcaagagttcaagaccagcctgggcaacatggtgaaaccccatgtctactaaaaatacaaaaactagctgggcgtggtggcacacacctgtagtcccagctactgggaggctgaggcaggagaatcacttgaacccaggaggcggaggttgcagtgagccaagatagtgccactgcactccagcctgggtgacagagcaagactgtgtctcaaaaaaaaaaaagaaggtctccatgagaaaataacatttaacttgaaatacgaagttaaagaaggagtagggagctccttcttctggctccatgggcagagggtggagggacagaggaagagctttctaaatagaacagcaagagcaaaaagactcatcaggatttgacatatttgtggaacagaaagtaagtccagtaaatggaaaactgttaggcaaaggggtaaggagaagagtatgtgaaaccagattgaaaggaggcaggggccagataaagaccttgctagctatgacatgagtttatactttatttgaagagttatgaggaactatttaagtttttcagagattgaaattatttgttttaaaaagatcacatttttgtataaaaaaatcttgagagactaggaagctatttgcaatagttcatgtatgaaatttgaatgccaaaaactaatttccttagcattcacttttttatttatttttctttattttttaattttctgtaagttactgggtttcctttttaatttttccataagttgcattcactttttaaaagacaatgagatttgttttagcataaacaggaaattcatggctaatacatgtcatgacttaaattcacctctaacttaagaaatgcatgtcaaatacataaaattatattttctacctatgagcacagtttcatgggagttttgatttttctaaaatattttttgatgcaatatccatttttttccatgcaattttgtcctttgtgatattgagggtgttcatgatgcagaatttattttaaaaaattatttctgtaatatttatttctccctttttttgagacagtgtctcactcttgcccagactggagtgtagtggcacaatctcagctcactgccacctcaaccttctgggctcatgtgatcctcctacctcagcctcctcagttgtggggaccacaggcatgtgctattacacctggataatttttttatttgtattttttgtagaaatggggtctcactgcattgcccaggctggtatcaaactcctgggctcaagcaatctttctgccttggcctcccaaagtgctgggttacataatttatttttttttgttttgtttccttaaaagaattgttaacataccagataattttttacactttttgccactttttctatgtcctgccttttaaaggcagactttttgaatgagttgctaaggactcagactctttcttccaaatcaatcatacccaataggcaggttttgctacctctctttgctctgaaatttcttggatctcttcagagggatttaacaaatttcctgtcctttttctcttttctttttcttttgttggttttgttttgttttgttgagatggaatcttgctttgtcgcccaggctggaatacagtagcgtgatctcggctcactgcaacctccacctcctgggttcaagtgattctccatgcctcagcctccatgagtagcttggattacaggcatgcaccgccacacccaactaattttttgtatttttagtagcaatggggtttcaccatgttggccaggctgattttaaactcttgacctcaagtgatctgcctgcctcagcctcccatgctgggatcatgctgggattacaggcacaagtcacttagccccctgccttacatacattgatgtatgatagaaaattcttttgggcacatcacagcaacaaaagttaacccagctttacctatttgtgagtatcttaagtctcccaaagcatttgattgttgctttccaagaaaatacagaattgtggtcattctcccatgactattctttactaatattgattgcatctgttgttctgtcgcctttctgcattcatagtaacttctttttccaatgctgaagattagttttaataaccttttgggagacttcttttaaaaaacttttttttcctgaagaataatacataaaggcatgcagctttatgaatttccccaaatagaacacacttaaccagtccccagatcatgagagccaaattaatacttttactacttttgcaatattcctagactcatcttttaaacgtctccctcctttcttgtgctattgtcgtgctatttacttcggtgtattttataatccaccagatattgttatgaaagtaaatatttatatcagagttgacaaactttgtctgaaggtcctgagagtaaataaatattctaggttttctttttttttgagacggagtctcgctctgtcacccaggctggagtacagtggcgcaatctcagctcactgcaagctccgcctcccaggttcacgccattcttctgcttcagcctctcaagcagctgggactacaggcgtctgccaccacgcccggccaatattctaggttttgcaggccatatatggtaactgttgcatattcttatttttctaagcagctttttaaagatgttaaaatcattcttagctcaaaggccttgatttggtccatagaccataatttcccaacacctgacttgtatttatcaacatatttacccctccagtgttatttatttctgcatttccaagtttctaagatcatttcatactgcctgaaaaattatttcttttagcataagaatgctaccgtaaatttcctctatttttattctgaaacatctttatttctgaaggatattttagctcagtatgaaaagaggttagcagtttttcacagtgtacatatgagccccccgtcccccactgcaatagtttttcttaaagggacctgcctctcccttagttgagaatatttaagtgaacttgagaatatttaagtgaactggcttcaaccatatgtcaagtagtatgtttgtgggctatcaatttatttctaggaaccctatgatcatttagccattgccacctatatggttaaaattctcattaacagtgcatcccttggactcttgtgcagattttacccaacccctcccatgccaagatcctatgatctctactgaaattgggatcttactttcattatagaagttctgcatcatctacagtctagagagggtgggtaccacagagttgtccaaggatggtggtaaactcctcaccaatgtatttcttaataccctgacgggaatgtcttttggcctttctctggctaagggaaaaaatgaacataataattcattgatagttacatctccctctaaagcagaggtgtccaatcttttggcttccctgggctacaccagaagaagaattttcttgagccacaataactgatagctatcattagtgttcacgtattttatatgtggcccaagacaattcttccaatgtggcccagggatgccaaaagattggacactggattccatccagtatgacttttcagatatctaagaagattttgctacacttattacaatggtagttttcccacagtgtaattctctgatataggtttgaaatattgcagaaattcactctacattcatttatacagttgctttttctcctacaagagtattaaaatttaagtattgcattgtaattgaaggcattcccaaatcactgtgtttgtatcactttggttaattggagattgctccaaagtaaacgttctcaatgttggctgcactcaacaaaaactagagggcaaagatttgatgtagtcaggggttggccaagtttttctgtaaagggctagatagtaaatgtttaacctttatggctgtatattaaactcttcagttatagaggtaaggagccatagactatgtaaatgaatacctggcccatgggctgtagcttgatgacctctgatatagttcatgaggtgcatccccacagagtaaacagtaggaaggaaagtggatgtggagcagataatgggagaaattgagtatactcttaaataaataaataatgaatttttcatatcctaattttgctgacagggtaacttgatttttaccctgatacaaaccattcctgcctgagaaaaccaaatcagatactagatacccatatgtaataaggcatgctgcttgaggacaccaaatcagatattaaatacccatatgtaataaggcatgctgcttgagaaaatcaaatcagatattagatacccatacgtagtaaggcatgctgcttgtattcgagtcagactgtacactattgtaagataaatcagcctctctgaaacaactcttatggaaacttgagaagcttctaaatgtatgtaccaatatggcatgccaatggcaggtttgaggaaatacacttctgataatgtatttagaactctagtacatgtaaataaggtgtttttgggctaaaacttttataaatttcacctcttacaaaattacttatatttatctaataacacctcctacaaatgtgccctcaatgcagccattacattaatgctcactaaattcattcctattcatattctctacctctctttctacaaaataaaattgcttaccttcctgattaaggcaaactaaccctgatggtgtgacctttgtcagctgggcaggtggtaatgccagaacagttttaaatacctgcttacaaaagaacggttttcaccgtacatggaacaaaacaggaagaataccttggtaattttctgtgatgtatcttatatttgtttcacactgaataacaaatgtctatagtcagattcaaggataactgtcagcattaccttaaatccaaactctgtctgaaagttaaaatcataaaacacctaaaaacactttgttatgtttgtatgtttcaacaagaaaaactactgtttattttttatgtcaatattgtagttacattttcagaatcacatgctgtgggaaaaaatcagcaagcagaaggtttataataaaccaaaagatttatttataacattttctgaattcacttaaaaaacaaaaaggaatcccccttccctcaaaatagaaccgtttcctacagattccatccagtatgacttttcagatatctaaggagattttgctacacttattacaatggtagttttcccacagtgtaattctctgatataggtttgaaatattgcagaaagtcactctacattcatttatacagttgctttttctcctacaagagtattaaaatgtaagtattgcattgtaaatgaaggcattcccaaatcactgtgtttgtatcactttgcttaaatatgaattttctgatctccaaagtgcatcatctttgtaaagctcatcccttgtccatgctttctgtcctggttgacagatgcggaatgagggctaatctctggctttctccaatctattggatatgtattctttcctggtaggaatttacacacgtaaagtaagggactcctaccaaatgaagtcttctcaacattaccagatggaagaatcttctcaacaatattgatttcaccttgttattgcaaaaaaataaaagagtggttattaatggcttttccacata

SEQ ID NO: 23709 - DNA, 1225 bp, Homo sapiens
  misc_feature 1..1225: note = ENST00000305105
  source 1..1225: mol_type = unassigned DNA
gagagtgcgggcggaagacggggagagcgagaggctggcggcgacagggagggaggaagcctaggagtccgccgcgggacggaggcctgggggaactgggagttcagctttctgcagagggccactaggaacctcggattgcccacggaagccagccactttctttgacagtccagcccacctcctcttctgcccggagaagctccaggggctgcctttgtgatcacagcatcttcacaaggaccaaaggaaaataagatttcttgtaagaacaccgtgaccacatctttaaaatgacccatttcgtggctcccacaagatttacacctccacactgaggccggaagtggttttgcccctataaaacatggcgaaaagctttcttgtctccaaggaaacgccacgtaatgagtcaaagctgtggcgcacgcgcagaagtacaagctaccggaagtgatggcgcccctactaaagccttggggttagtacgcgtgcgcagcagtttcttccgacagttgtgttgtgccaatggtggagaagaaaacttcggttcgctcccaggaccccgggcagcggcgggtgctggaccgggctgcccggcagcgtcgcatcaaccggcagctggaggccctggagaatgacaacttccaggatgacccccacgcgggactccctcagctcggcaagagactgcctcagtttgatgacgatgcggacactggaaagaaaaagaagaaaacccgaggtgatcattttaaacttcgcttccgaaaaaactttcaggccctgttggaggagcagaacttgagtgtggccgagggccctaactacctgacggcctgtgcgggacccccatcgcggccccagcgccccttctgtgctgtctgtggcttcccatccccctacacctgtgtcagctgcggtgcccggtactgcactgtgcgctgtctggggacccaccaggagaccaggtgtctgaagtggactgtgtgagcctgggcattcccagagaggaagggccgctgtgcactgcccggccttcagaaagacagaatttcatcacccaatgcagggggagctcttcctggaccaagggaggagccgctcattcacccaacaaaactgtgtcttatctgccaggaaagaccagcctcactcctgggaactgtctggcaggtaggctgggccccccagtgctgttagaataaaaagcctcgtgccggaa

SEQ ID NO: 23710 - DNA, 571 bp, Homo sapiens
  misc_feature 1..571: note = ENST00000461205
  source 1..571: mol_type = unassigned DNA
gcagtttcttccgacagttgtgttgtgccaatggtggagaagaaaacttcgggctggagtgcagtggcatagtcatagctcactgcagcctcgatttcctgggatcaaaccatcctcccacctcagcctccggagtggctggaactgcaagcatgaggccccacgcctggttaatttttaatttgttatgtggtgacgggctctcgctatgttgcccagttcgctcccaggaccccgggcagcggcgggtgctggaccgggctgcccggcagcgtcgcatcaaccggcagctggaggccctggagaatgacaacttccaggatgacccccacgcgggactccctcagctcggcaagagactgcctcagtttgatgacgatgcggacactggaaagaaaaagaagaaaacccgaggtgatcattttaaacttcgcttccgaaaaaactttcaggccctgttggaggagcagaacttgagtgtggccgagggccctaactacctgacggcctgtgcgggacccccatcgcggccccagcgccccttctgtgctgtctgtggcttcccatcccc

SEQ ID NO: 23711 - DNA, 3958 bp, Homo sapiens
  misc_feature 1..3958: note = ENST00000492315
  source 1..3958: mol_type = unassigned DNA
agttgtgttgtgccaatggtggagaagaaaacttcgggctggagtgcagtggcatagtcatagctcactgcagcctcgatttcctgggatcaaaccatcctcccacctcagcctccggagtggctggaactgcaagcatgaggccccacgcctggttaatttttaatttgttatgtggtgacgggctctcgctatgttgcccaggttggtctccaactcttggcctcaaagcgatcctcctgcgtgggccttccaaagtgctgggattacaggcgtgagctgccgcgcccggccccagctattcctcgtaaatcccttcctcagccctcgggtcctggcgttgacccttcattcacgttttattggtgcctgctccaagccgggcgctggggatgaagaggagaaagacccctcttatccaagcattggctttttctggaaggggggcagaaacgcagacctaacactgtattttactgtgatttgtgatttgtgctatggcagagggaagcacagcgcctgggaacagggagacgtggcatctagcccaggttctgggaggcaggggactgtgaaagcttgaaggaaaaatgaaaaagcttgaattgagtcttgaaagtctagttagggtttctctcagtgggaacctcacgtgcaaaggcagtgaagcaagaaaaagcaagtcgcttaggaagccaagttcacagtttggatcttacagagtaataagaaaggatcgaaggctggggaaaggttacattttgaaaggcattatacacactgcccaggagtttgaactctgtagggaaacactggagagccagcaaagactttttttttttagacagagtcttgctctgtcacccaggctggaatgcagtggttctatataactcactgcagcctcaacctcccatgctcaagtgattcttccacctcagccacctgagtaggtggaactacaggtgggtgcaggccaccatgctgggctagtttttatattttttgttgagatgggtgtctcactatgttgcccaggctggtcttgaactcctgagctcatgtgatcctcctgcctcggccttccaaaatgctaggattacaagtatgagccactgcgcttggcccttttagtttttctttctttctttttttttctttttgagacggagtcttgctctgtcccccaggctggagtgcagtggcgcaatctcggttcactgcaagctctgcctcccgggttcacaccattctctggcctcagcttctggagtagctgggactacaggcgcccgccaccacacccagcttatcttttgtatttttagtagagacagggtttcaccatgttagccaggatggtcttgatctcctgacctcgtgatccacccgcctcggccccccaaaatgctagaattacaggcatgagccactgcgcttggccctctcagtttttcaaaggcatcgcagtctcccagccatcagttttttcatgttggcctcaaggtctgaaataccccgctgtctcccctagccaggtcattcaccagttaggccttaacctagacttaccttcttctgggaagtcttccctgactactccaaggccaggttgggtgtttctgtcctgggctctgcagcactttatacttccgtatcctagcctactccatgctgtacttactgtgtttgtttcattaatcatttgtgtttgccactggactgtaagctttggcatccctaaaacctagagcactgcctggcatttggaggggagacagagtagtacagtgatcataatcatatttttttttgtttggttggttttgggtttttttttttttttttttttttttgaaacagggtcttgctctgtcacccaggctggagtgcagtggcacaaacacagctcactgcagccttgagctcctgggctcaagcaatccttgcgcctcagcctcctgaatagctgggactacaggtgtgtcccactacacctggctaatttttgtattttttttgtagaaacatggttttgccatgttgcccaggctggcctcgaactcccgcgctcaaacaatccacccaccttggcctcccaaagtgctgagataacaggcatgagccactgcgcctggcaaggtcatgctttttgatgctgggtagttctttgactcctgacctggccacttgttagctatgtgaactttggacacatttcttaatctctgaatgttggtaaattggggatgatgatactgtcccatacagctgttgtaagggttaaatggttcaagtgttgcaaagagctgagcacgtgcctggctcatagtaagtgtccaacaagtgatagctactggggctgctgctgttattattatgcttaacaggtggttaatgaataaagagatatattatgcaaaattatcagaatctggcaaacagctgataaggcaatgaggaaagaggttttttgttttttgtttttgagacagggtctctctctgttgcccaggctggaatgcaatggcgcgatctcagctcgctgcaacctccacctcccgggttcaagcgattcttgtgcctcagcctcccgcgtagctgggattacaggcatgtgccaccacaccctgctaatttttgtatttttagtagagacatggtttcaccacgttggtcaggctggtctcgaactcctgacctgaagtgatgagcccacctcagcctcccaaagtgctgggattgcaggggtgagccactatgtccagccgaggaaagaggtttaaaataacttctaggtttctggtttggatgtctgcatagacggttccatttgcgtagagagaatctgcaggagaagcagacttggatgggaatttttttttttttttgagttgcagtgtccacagggccagtgggtgatttcttttttccttctttctttttttttttttttggagacagtcttgctttgtcactcaggctggagtggtggcgcgatcacggcttgctgcacactgcagcctcaacctcccgggcccatgtagtcctcccaccgcagcctcccaagtaactgggactacaggcatgtgcaaccacgcctggcttattttttaattttttgtagagatggggtttggctatgctgcccaggctggtttctaactcctggcatcaagcgatcctttggcctcccaaagtgctgagattacaggcgtgcgccaccacacccggcctcaccaggcgctggctgcatggccagttctggagcccgggagcaggttctgtgttgagggagtcactctgggagtcatttgcttgtgggtgatcatcagagccctttgtttggagtcaaaatcccaggaagagtgcatagactgagcagagaagagggccagccacctccatagaggcagggagagcagccgagctggagccggaggattcctggacatggagaaggcctgcagttttgtcaaggaagcaagcaaagggtctctttctactcgatgaagttcgctcccaggaccccgggcagcggcgggtgctggaccgggctgcccggcagcgtcgcatcaaccggcagctggaggccctggagaatgacaacttccaggatgacccccacgcgggactccctcagctcggcaagagactgcctcagtttgatgacgatgcggacactggaaagaaaaagaagaaaacccgaggtgatcattttaaacttcgcttccgaaaaaactttcaggccctgttggaggagcagaacttgagtgtggccgagggccctaactacctgacggcctgtgcgggacccccatcgcggccccagcgccccttctgtgctgtctgtggcttcccatccccctacacctgtgtcagctgcggtgcccggtactgcactgtgcgctgtctggggacccaccaggagaccaggtgtctgaagtggactgtgtga

SEQ ID NO: 23712 - DNA, 2898 bp, Homo sapiens
  misc_feature 1..2898: note = ENST00000485387
  source 1..2898: mol_type = unassigned DNA
caaagtgctgagataacaggcatgagccactgcgcctggcaaggtcatgctttttgatgctgggtagttctttgactcctgacctggccacttgttagctatgtgaactttggacacatttcttaatctctgaatgttggtaaattggggatgatgatactgtcccatacagctgttgtaagggttaaatggttcaagtgttgcaaagagctgagcacgtgcctggctcatagtaagtgtccaacaagtgatagctactggggctgctgctgttattattatgcttaacaggtggttaatgaataaagagatatattatgcaaaattatcagaatctggcaaacagctgataaggcaatgaggaaagaggttttttgttttttgtttttgagacagggtctctctctgttgcccaggctggaatgcaatggcgcgatctcagctcgctgcaacctccacctcccgggttcaagcgattcttgtgcctcagcctcccgcgtagctgggattacaggcatgtgccaccacaccctgctaatttttgtatttttagtagagacatggtttcaccacgttggtcaggctggtctcgaactcctgacctgaagtgatgagcccacctcagcctcccaaagtgctgggattgcaggggtgagccactatgtccagccgaggaaagaggtttaaaataacttctaggtttctggtttggatgtctgcatagacggttccatttgcgtagagagaatctgcaggagaagcagacttggatgggaatttttttttttttttgagttgcagtgtccacagggccagtgggtgatttcttttttccttctttctttttttttttttttggagacagtcttgctttgtcactcaggctggagtggtggcgcgatcacggcttgctgcacactgcagcctcaacctcccgggcccatgtagtcctcccaccgcagcctcccaagtaactgggactacaggcatgtgcaaccacgcctggcttattttttaattttttgtagagatggggtttggctatgctgcccaggctggtttctaactcctggcatcaagcgatcctttggcctcccaaagtgctgagattacaggcgtgcgccaccacacccggcctcaccaggcgctggctgcatggccagttctggagcccgggagcaggttctgtgttgagggagtcactctgggagtcatttgcttgtgggtgatcatcagagccctttgtttggagtcaaaatcccaggaagagtgcatagactgagcagagaagagggccagccacctccatagaggcagggagagcagccgagctggagccggaggattcctggacatggagaaggcctgcagttttgtcaaggaagcaagcaaagggtctctttctactcgatgaaggtagtcggcaccgccacagggtggacagggctcaggtccaaggaggaggaggaaggcacactggagccgctctggggcccagagcgtgggtgggtggtcccccaggatgaccaggcaggtgtcagattttggggttcaaggagaggatgggaggtgaaaaagtgacacatcacgtgagttgctgtgaaggagaaggagctgtgaagccgagtagacacatgagcgtcgccagctctttgatggaaagtgccggttgaggaggaggggttgaagatgggagagggagggaatgggctggaggtgaaggctcggggtcagtggtgggacttggggcgctccagggcaggggtgtgcccacttggcatcacgtttgtgggtaggtggcctggaagatgagcgtatccaagcatgggtggcccctggttcctttgaggtaggaggtgagatgctgagtgtgagggccatgtgtattgagggcccaggacagcctggaagccccagggcgctgtgacctccccagtcagcagtgagctgtctccaggccggggctcactggctgggactgggattgagaggaaggcggagaaaacaggcaggagaaactgaaagggtctcagctggcgggacaggaagtgtgggcccagggcttggcccgggaggagacaaggggaccaagggcttggcaatggggatgagatcagagagctgcagcttccaccccgggtgccttcctcgccctgcccagagcggcggccacactgctctttcttggaagccctgtaactttgcgtgccctgctccatccagttcgctcccaggaccccgggcagcggcgggtgctggaccgggctgcccggcagcgtcgcatcaaccggcagctggaggccctggagaatgacaacttccaggatgacccccacgcgggactccctcagctcggcaagagactgcctcagtttgatgacgatgcggacactggaaagaaaaagaagaaaacccgaggtgatcattttaaacttcgcttccgaaaaaactttcaggccctgttggaggagcagaacttgagtgtggccgagggccctaactacctgacggcctgtgcgggacccccatcgcggccccagcgccccttctgtgctgtctgtggcttcccatccccctacacctgtgtcagctgcggtgcccggtactgcactgtgcgctgtctggggacccaccaggagaccaggtgtctgaagtggactgtgtgagcctgggcattcccagagaggaagggccgctgtgcactgcccggccttcagaaagacagaatttcatcacccaatgcagggggagctcttcctggaccaagggaggagccgctcattcacccaacaaaactgtgtcttatctgccaggaaagaccagcctcactcctgggaactgtctggcaggtaggctgggccccccagtgctgttagaataaaaagcctcgtgccggaa

SEQ ID NO: 23713 - DNA, 743 bp, Homo sapiens
  misc_feature 1..743: note = ENST00000446493
  source 1..743: mol_type = unassigned DNA
gggcgcagagctggcgctctagcccacggagttggttaactcctctcaccggcccctggaaagggttccaagtcctttagtacccgacgctgtctgggaattccgggcgtttcggctccttggtcgcagaggcaggaggcacccgaccgcatgtctgtcatggacctcgccaatacttgctccagctttcagtcggacctggatttctgttcagattgcggctcggtcctgcctctgcccggggctcaggatacggtcacctgtattcgctgtggcttcaacatcaacgttcgggactttgaggggaaggttgtgaagacttcggttgtgttccaccaactggggacagccatgcctatgtcggtggaggaagggcctgagtgccagggacctgtggttgacaggcgctgccctcgatgtggtcatgaaggaatggcataccacaccagacagatgcgttcagccgatgaagggcaaactgtcttctacacctgtaccaactgcaagttccaggagaaggaagactcttgacctttttcctgggcaactctacagtccctccctcctttcggaaggtgcaggatactgggtttttagatgccttgtccatcctgtctggttgcaatgttttgctcccagaagagaatcagatcatcatgtggggattaccattgttcctggagtactcctacccttagttgaatttccttattaaagttatatttttctataagaccctgaca

SEQ ID NO: 23714 - DNA, 864 bp, Homo sapiens
  misc_feature 1..864: note = ENST00000455948
  source 1..864: mol_type = unassigned DNA
gccgcgggcgcagagctggcgctctagcccacggagttggttaactcctctcaccggcccctggaaagggttccaagtcctttagtacccgacgctgtctgggaattccgggcgtttcggctccttggtcgcagaggcaggaggcgtgcgtggcaggagggttcgggttatatactcctaggtcctgggacagaatagttacgacctctgggacaggaactcttctctcttttgttaataaacttccaactccctcctcagacccgaccgcatgtctgtcatggacctcgccaatacttgctccagctttcagtcggacctggatttctgttcagattgcggctcggtcctgcctctgcccggggctcaggatacggtcacctgtattcgctgtggcttcaacatcaacgttcgggactttgaggggaaggttgtgaagacttcggttgtgttccaccaactggggacagccatgcctatgtcggtggaggaagggcctgagtgccagggacctgtggttgacaggcgctgccctcgatgtggtcatgaaggaatggcataccacaccagacagatgcgttcagccgatgaagggcaaactgtcttctacacctgtaccaactgcaagttccaggagaaggaagactcttgacctttttcctgggcaactctacagtccctccctcctttcggaaggtgcaggatactgggtttttagatgccttgtccatcctgtctggttgcaatgttttgctcccagaagagaatcagatcatcatgtggggattaccattgttcctggagtactcctacccttagttgaatttccttattaaagttatatttttctataagaccctgaca

SEQ ID NO: 23715 - DNA, 3672 bp, Homo sapiens
  misc_feature 1..3672: note = ENST00000481657
  source 1..3672: mol_type = unassigned DNA
gtcttttataccatttagagttcaaaggatggtctttacagtctgacagagctagatctgaaatctaattctaccacttcctaggtgtgtgactcagggcaagtaacttctgtcagctttctcatctataaaatggagatgtaagacaaaaatctgcctctcagggttataaagaacaaatatgaattagatgtaaagagcttggtaagttctcaataaattctatctatctgtccttcacaggtcaagctcctgattataaagtctttccagtctactctgtcagtgatcttcccttcctctaaatacttgacatattttaattctacaactcatttgaaaattaatcgtggtttacactgtgatatctgtattcacatatcacttttaacattttgatgctgaaatttaggctcataaggaatgaaaactgtaatttatatctacaaatatgatgcctctatattgttggaaaggatctgatatcaaatatttggtctcactgacctcttaggaacattcttatttgtctacgtaagcttattttgagattgtaaacgtatgatcatcttacttttacttctctgtacatggcttctagcacaatacttaacattagagtctgtgatcccaagttctcaaaattaatgatttgctgattgctgatgatccttgacacataatatctgagcatcttttttaaatatctgccataacattgtatctatttttattaagccatttcccagtcttccttgaagtttacagatatgtttgctttatatgcatgttctgggctctcacattttgtacctactagcacagttttattatattctaattattcattcatgttccttgaggtcagagaacacagatttcaactttgcaggctcagcctcagctcaaaacctggcatagttgctcaataaatctttactgattagactgtgagcttttgttgggaaaaggatatgccttttaatgctttgttcctttactgcaattcacaggggatgttggctgtttttcaaattaaaaacagaaaactgaggagggtagaatttcaagttccattttcaaaggagacacacagataagtgagaataaaaactgtctacgacaatcagctcaacaacacgtctccctttgtaagacagaataacaagcaatttcacagttaagtgatagggcttgtcactcttcagcagtttgctgagttttaaccctttcactatggcgttctctccattattacagagaaaggcagatgggagcctctcccagcgaaaagactacagcttgtgtccttcataggagaaaacagtgatggctccagaacttttatatgaatgaacttagcacagctatcagagtggatggtggtgggagggctagcaggaaactagtaaacaactacaagctgccccttcagggaaagtttctacttggaatataagttacagattaatgaaaatagaaagatttcccaaagatacttattctcatgttttataaaagatcagggaaatgtcagctgtccacttaacggatgacataatgaattaagagttcgataggcggcaggcacaactaaaagccaaactcgacctaagtcttatgaaatcctacttaatgagctttcttgactactgctagcctcacttatctggcaggagtcgaaggagaggaagccccaagctcctctgttccaccacctccaaagtcctgaaccccttctcaagtgtaccacttcatccctgcttcctttcgtcccgtgggactaagcattcctcgggccttcactctcaccacttgctgtccctcaaaaagccgactcacccctttccaagcgcagtgaaccgtccgcaaagcacgaggccggttgcgagctgcagaaagcccacgctcgccagcgggacccaaggaacgctagaactatacgtcccagaacacttagctttgtttttaactacggtgcagccgcaaaagggaaataccggctcaggacccaggggagttgtagttctctaatccaaagaaatcattatttggcaacgtacggttttcagggggatataccccgcgactgcgttcctgtaggatgtgagacaaagagaataaatatcccaggattgggtgctggtgggaaaatctgctggaagcgcagcattggttaccaattttgtgctcaacctctcagtaccagggtgaaagtggagacgcaatctcccttggaagacgttagtctccatctctaacgctcccgagacacggttcgcaattaattatgacgtcacagccaatcgtcaacgcgaaagcctgacgctctagccggctctatctcgctgccccgccgcgggcgcagagctggcgctctagcccacggagttggttaactcctctcaccggcccctggaaagggttccaagtcctttagtacccgacgctgtctgggaattccgggcgtttcggctccttggtcgcagaggcaggaggcgtgcgtggcaggagggttcgggttatatactcctaggtcctgggacagaatagttacgacctctgggacaggaactcttctctcttttgttaataaacttccaactccctcctcagacccgaccgcatgtctgtcatggacctcgccaatacttgctccagctttcagtcggacctggatttctgttcagattgcggctcggtcctgcctctgcccggggctcaggatacggtcacctgtattcgctgtggcttcaacatcaacgttcggggtgagaggcttgtacgcaggggtcctggcggagggcgcagggtcggaagcttggggaactcaagatcggttgggttgaggaggggatcctagagcaggacatcaggcggttgtacatttggtctagcgatgaaaactgagggaaaggatgtagggcctcctggcctaaccagccaggggaaaggggaggtttccggtgtcagctgtctctggttgtctccataaccagttcttacttgcctgtgcagactttgaggggaaggttgtgaagacttcggttgtgttccaccaactggggacagccatgcctatgtcggtggaggaagggcctgagtgccagggacctgtggtaagctaatgagatcaagaactggctccataaggtgggtaggaaagaaatggaggagtgattgcaaagctctggagagttttgtgcccaattccaagagggaaaagagatgtaaaccatcgacgtttgagaggcgtgatcgcctgattcctgtgggaagtaaggggatatgaccaggcctccctaacccaccagtttcttcccaggttgacaggcgctgccctcgatgtggtcatgaaggaatggcataccacaccagacagatgcgttcagccgatgaagggcaaactgtcttctacacctgtaccaactgcaagttccaggagaaggaagactcttgacctttttcctgggcaactctacagtccctccctcctttcggaaggtgcaggatactgggtttttagatgccttgtccatcctgtctggttgcaatgttttgctcccagaagagaatcagatcatcatgtggggattaccattgttcctggagtactcctacccttagttgaatttccttattaaagttatatttttctataagaccctgaca

SEQ ID NO: 23716 - DNA, 571 bp, Homo sapiens
  misc_feature 1..571: note = ENST00000472459
  source 1..571: mol_type = unassigned DNA
gtcctttagtacccgacgctgtctgggaattccgggcgtttcggctccttggtcgcagaggcaggaggcacccgaccgcatgtctgtcatggacctcgccaatacttgctccagctttcagtcggacctggatttctgttcagattgcggctcggtcctgcctctgcccggggctcaggatacggtcacctgtattcgctgtggcttcaacatcaacgttcggggttgacaggcgctgccctcgatgtggtcatgaaggaatggcataccacaccagacagatgcgttcagccgatgaagggcaaactgtcttctacacctgtaccaactgcaagttccaggagaaggaagactcttgacctttttcctgggcaactctacagtccctccctcctttcggaaggtgcaggatactgggtttttagatgccttgtccatcctgtctggttgcaatgttttgctcccagaagagaatcagatcatcatgtggggattaccattgttcctggagtactcctacccttagttgaatttccttattaaagttatatttttctataagaccctgaca

SEQ ID NO: 23717 - DNA, 736 bp, Homo sapiens
  misc_feature 1..736: note = ENST00000428913
  source 1..736: mol_type = unassigned DNA
gcgggcgcagagctggcgctctagcccacggagttggttaactcctctcaccggcccctggaaagggttccaagtcctttagtacccgacgctgtctgggaattccgggcgtttcggctccttggtcgcagagacccgaccgcatgtctgtcatggacctcgccaatacttgctccagctttcagtcggacctggatttctgttcagattgcggctcggtcctgcctctgcccggggctcaggatacggtcacctgtattcgctgtggcttcaacatcaacgttcgggactttgaggggaaggttgtgaagacttcggttgtgttccaccaactggggacagccatgcctatgtcggtggaggaagggcctgagtgccagggacctgtggttgacaggcgctgccctcgatgtggtcatgaaggaatggcataccacaccagacagatgcgttcagccgatgaagggcaaactgtcttctacacctgtaccaactgcaagttccaggagaaggaagactcttgacctttttcctgggcaactctacagtccctccctcctttcggaaggtgcaggatactgggtttttagatgccttgtccatcctgtctggttgcaatgttttgctcccagaagagaatcagatcatcatgtggggattaccattgttcctggagtactcctacccttagttgaatttccttattaaagttatatttttctataagaccctgaca

SEQ ID NO: 23718 - DNA, 754 bp, Homo sapiens
  misc_feature 1..754: note = ENST00000451875
  source 1..754: mol_type = unassigned DNA
gcagagctggcgctctagcccacggagttggttaactcctctcaccggcccctggaaagggttccaagtcctttagtacccgacgctgtctgggaattccgggcgtttcggctccttggtcgcagaggcaggaggcgtgcgtggcaggaggacccgaccgcatgtctgtcatggacctcgccaatacttgctccagctttcagtcggacctggatttctgttcagattgcggctcggtcctgcctctgcccggggctcaggatacggtcacctgtattcgctgtggcttcaacatcaacgttcgggactttgaggggaaggttgtgaagacttcggttgtgttccaccaactggggacagccatgcctatgtcggtggaggaagggcctgagtgccagggacctgtggttgacaggcgctgccctcgatgtggtcatgaaggaatggcataccacaccagacagatgcgttcagccgatgaagggcaaactgtcttctacacctgtaccaactgcaagttccaggagaaggaagactcttgacctttttcctgggcaactctacagtccctccctcctttcggaaggtgcaggatactgggtttttagatgccttgtccatcctgtctggttgcaatgttttgctcccagaagagaatcagatcatcatgtggggattaccattgttcctggagtactcctacccttagttgaatttccttattaaagttatatttttctataagaccctgaca

SEQ ID NO: 23719 - DNA, 571 bp, Homo sapiens
  misc_feature 1..571: note = ENST00000471263
  source 1..571: mol_type = unassigned DNA
gtcctttagtacccgacgctgtctgggaattccgggcgtttcggctccttggtcgcagaggcaggaggcacccgaccgcatgtctgtcatggacctcgccaatacttgctccagctttcagtcggacctggatttctgttcagattgcggctcggtcctgcctctgcccggggctcaggatacggtcacctgtattcgctgtggcttcaacatcaacgttcggggttgacaggcgctgccctcgatgtggtcatgaaggaatggcataccacaccagacagatgcgttcagccgatgaagggcaaactgtcttctacacctgtaccaactgcaagttccaggagaaggaagactcttgacctttttcctgggcaactctacagtccctccctcctttcggaaggtgaaggatactgggtttttagatgccttgtccatcctgtctggttgcaatgttttgctcccagaagagaatcagatcatcatgtggggattaccattgttcctggagtactcctacccttagttgaatttccttattaaagttatatttttctataagaccctgaca

SEQ ID NO: 23720 - DNA, 736 bp, Homo sapiens
  misc_feature 1..736: note = ENST00000437507
  source 1..736: mol_type = unassigned DNA
gcgggcgcagagctggcgctctagcccacggagttggttaactcctctcaccggcccctggaaagggttccaagtcctttagtacccgacgctgtctgggaattccgggcgtttcggctccttggtcgcagagacccgaccgcatgtctgtcatggacctcgccaatacttgctccagctttcagtcggacctggatttctgttcagattgcggctcggtcctgcctctgcccggggctcaggatacggtcacctgtattcgctgtggcttcaacatcaacgttcgggactttgaggggaaggttgtgaagacttcggttgtgttccaccaactggggacagccatgcctatgtcggtggaggaagggcctgagtgccagggacctgtggttgacaggcgctgccctcgatgtggtcatgaaggaatggcataccacaccagacagatgcgttcagccgatgaagggcaaactgtcttctacacctgtaccaactgcaagttccaggagaaggaagactcttgacctttttcctgggcaactctacagtccctccctcctttcggaaggtgaaggatactgggtttttagatgccttgtccatcctgtctggttgcaatgttttgctcccagaagagaatcagatcatcatgtggggattaccattgttcctggagtactcctacccttagttgaatttccttattaaagttatatttttctataagaccctgaca

SEQ ID NO: 23721 - DNA, 864 bp, Homo sapiens
  misc_feature 1..864: note = ENST00000443494
  source 1..864: mol_type = unassigned DNA
gccgcgggcgcagagctggcgctctagcccacggagttggttaactcctctcaccggcccctggaaagggttccaagtcctttagtacccgacgctgtctgggaattccgggcgtttcggctccttggtcgcagaggcaggaggcgtgcgtggcaggagggttcgggttatatactcctaggtcctgggacagaatagttacgacctctgggacaggaactcttctctcttttgttaataaacttccaactccctcctcagacccgaccgcatgtctgtcatggacctcgccaatacttgctccagctttcagtcggacctggatttctgttcagattgcggctcggtcctgcctctgcccggggctcaggatacggtcacctgtattcgctgtggcttcaacatcaacgttcgggactttgaggggaaggttgtgaagacttcggttgtgttccaccaactggggacagccatgcctatgtcggtggaggaagggcctgagtgccagggacctgtggttgacaggcgctgccctcgatgtggtcatgaaggaatggcataccacaccagacagatgcgttcagccgatgaagggcaaactgtcttctacacctgtaccaactgcaagttccaggagaaggaagactcttgacctttttcctgggcaactctacagtccctccctcctttcggaaggtgaaggatactgggtttttagatgccttgtccatcctgtctggttgcaatgttttgctcccagaagagaatcagatcatcatgtggggattaccattgttcctggagtactcctacccttagttgaatttccttattaaagttatatttttctataagaccctgaca

SEQ ID NO: 23722 - DNA, 3672 bp, Homo sapiens
  misc_feature 1..3672: note = ENST00000465992
  source 1..3672: mol_type = unassigned DNA
gtcttttataccatttagagttcaaaggatggtctttacagtctgacagagctagatctgaaatctaattctaccacttcctaggtgtgtgactcagggcaagtaacttctgtcagctttctcatctataaaatggagatgtaagacaaaaatctgcctctcagggttataaagaacaaatatgaattagatgtaaagagcttggtaagttctcaataaattctatctatctgtccttcacaggtcaagctcctgattataaagtctttccagtctactctgtcagtgatcttcccttcctctaaatacttgacatattttaattctacaactcatttgaaaattaatcgtggtttacactgtgatatctgtattcacatatcacttttaacattttgatgctgaaatttaggctcataaggaatgaaaactgtaatttatatctacaaatatgatgcctctatattgttggaaaggatctgatatcaaatatttggtctcactgacctcttaggaacattcttatttgtctacgtaagcttattttgagattgtaaacgtatgatcatcttacttttacttctctgtacatggcttctagcacaatacttaacattagagtctgtgatcccaagttctcaaaattaatgatttgctgattgctgatgatccttgacacataatatctgagcatcttttttaaatatctgccataacattgtatctatttttattaagccatttcccagtcttccttgaagtttacagatatgtttgctttatatgcatgttctgggctctcacattttgtacctactagcacagttttattatattctaattattcattcatgttccttgaggtcagagaacacagatttcaactttgcaggctcagcctcagctcaaaacctggcatagttgctcaataaatctttactgattagactgtgagcttttgttgggaaaaggatatgccttttaatgctttgttcctttactgcaattcacaggggatgttggctgtttttcaaattaaaaacagaaaactgaggagggtagaatttcaagttccattttcaaaggagacacacagataagtgagaataaaaactgtctacgacaatcagctcaacaacacgtctccctttgtaagacagaataacaagcaatttcacagttaagtgatagggcttgtcactcttcagcagtttgctgagttttaaccctttcactatggcgttctctccattattacagagaaaggcagatgggagcctctcccagcgaaaagactacagcttgtgtccttcataggagaaaacagtgatggctccagaacttttatatgaatgaacttagcacagctatcagagtggatggtggtgggagggctagcaggaaactagtaaacaactacaagctgccccttcagggaaagtttctacttggaatataagttacagattaatgaaaatagaaagatttcccaaagatacttattctcatgttttataaaagatcagggaaatgtcagctgtccacttaacggatgacataatgaattaagagttcgataggcggcaggcacaactaaaagccaaactcgacctaagtcttatgaaatcctacttaatgagctttcttgactactgctagcctcacttatctggcaggagtcgaaggagaggaagccccaagctcctctgttccaccacctccaaagtcctgaaccccttctcaagtgtaccacttcatccctgcttcctttcgtcccgtgggactaagcattcctcgggccttcactctcaccacttgctgtccctcaaaaagccgactcacccctttccaagcgcagtgaaccgtccgcaaagcacgaggccggttgcgagctgcagaaagcccacgctcgccagcgggacccaaggaacgctagaactatacgtcccagaacacttagctttgtttttaactacggtgcagccgcaaaagggaaataccggctcaggacccaggggagttgtagttctctaatccaaagaaatcattatttggcaacgtacggttttcagggggatataccccgcgactgcgttcctgtaggatgtgagacaaagagaataaatatcccaggattgggtgctggtgggaaaatctgctggaagcgcagcattggttaccaattttgtgctcaacctctcagtaccagggtgaaagtggagacgcaatctcccttggaagacgttagtctccatctctaacgctcccgagacacggttcgcaattaattatgacgtcacagccaatcgtcaacgcgaaagcctgacgctctagccggctctatctcgctgccccgccgcgggcgcagagctggcgctctagcccacggagttggttaactcctctcaccggcccctggaaagggttccaagtcctttagtacccgacgctgtctgggaattccgggcgtttcggctccttggtcgcagaggcaggaggcgtgcgtggcaggagggttcgggttatatactcctaggtcctgggacagaatagttacgacctctgggacaggaactcttctctcttttgttaataaacttccaactccctcctcagacccgaccgcatgtctgtcatggacctcgccaatacttgctccagctttcagtcggacctggatttctgttcagattgcggctcggtcctgcctctgcccggggctcaggatacggtcacctgtattcgctgtggcttcaacatcaacgttcggggtgagaggcttgtacgcaggggtcctggcggagggcgcagggtcggaagcttggggaactcaagatcggttgggttgaggaggggatcctagagcaggacatcaggcggttgtacatttggtctagcgatgaaaactgagggaaaggatgtagggcctcctggcctaaccagccaggggaaaggggaggtttccggtgtcagctgtctctggttgtctccataaccagttcttacttgcctgtgcagactttgaggggaaggttgtgaagacttcggttgtgttccaccaactggggacagccatgcctatgtcggtggaggaagggcctgagtgccagggacctgtggtaagctaatgagatcaagaactggctccataaggtgggtaggaaagaaatggaggagtgattgcaaagctctggagagttttgtgcccaattccaagagggaaaagagatgtaaaccatcgacgtttgagaggcgtgatcgcctgattcctgtgggaagtaaggggatatgaccaggcctccctaacccaccagtttcttcccaggttgacaggcgctgccctcgatgtggtcatgaaggaatggcataccacaccagacagatgcgttcagccgatgaagggcaaactgtcttctacacctgtaccaactgcaagttccaggagaaggaagactcttgacctttttcctgggcaactctacagtccctccctcctttcggaaggtgaaggatactgggtttttagatgccttgtccatcctgtctggttgcaatgttttgctcccagaagagaatcagatcatcatgtggggattaccattgttcctggagtactcctacccttagttgaatttccttattaaagttatatttttctataagaccctgaca

SEQ ID NO: 23723 - DNA, 754 bp, Homo sapiens
  misc_feature 1..754: note = ENST00000453694
  source 1..754: mol_type = unassigned DNA
gcagagctggcgctctagcccacggagttggttaactcctctcaccggcccctggaaagggttccaagtcctttagtacccgacgctgtctgggaattccgggcgtttcggctccttggtcgcagaggcaggaggcgtgcgtggcaggaggacccgaccgcatgtctgtcatggacctcgccaatacttgctccagctttcagtcggacctggatttctgttcagattgcggctcggtcctgcctctgcccggggctcaggatacggtcacctgtattcgctgtggcttcaacatcaacgttcgggactttgaggggaaggttgtgaagacttcggttgtgttccaccaactggggacagccatgcctatgtcggtggaggaagggcctgagtgccagggacctgtggttgacaggcgctgccctcgatgtggtcatgaaggaatggcataccacaccagacagatgcgttcagccgatgaagggcaaactgtcttctacacctgtaccaactgcaagttccaggagaaggaagactcttgacctttttcctgggcaactctacagtccctccctcctttcggaaggtgaaggatactgggtttttagatgccttgtccatcctgtctggttgcaatgttttgctcccagaagagaatcagatcatcatgtggggattaccattgttcctggagtactcctacccttagttgaatttccttattaaagttatatttttctataagaccctgaca

SEQ ID NO: 23724 - DNA, 743 bp, Homo sapiens
  misc_feature 1..743: note = ENST00000443142
  source 1..743: mol_type = unassigned DNA
gggcgcagagctggcgctctagcccacggagttggttaactcctctcaccggcccctggaaagggttccaagtcctttagtacccgacgctgtctgggaattccgggcgtttcggctccttggtcgcagaggcaggaggcacccgaccgcatgtctgtcatggacctcgccaatacttgctccagctttcagtcggacctggatttctgttcagattgcggctcggtcctgcctctgcccggggctcaggatacggtcacctgtattcgctgtggcttcaacatcaacgttcgggactttgaggggaaggttgtgaagacttcggttgtgttccaccaactggggacagccatgcctatgtcggtggaggaagggcctgagtgccagggacctgtggttgacaggcgctgccctcgatgtggtcatgaaggaatggcataccacaccagacagatgcgttcagccgatgaagggcaaactgtcttctacacctgtaccaactgcaagttccaggagaaggaagactcttgacctttttcctgggcaactctacagtccctccctcctttcggaaggtgaaggatactgggtttttagatgccttgtccatcctgtctggttgcaatgttttgctcccagaagagaatcagatcatcatgtggggattaccattgttcctggagtactcctacccttagttgaatttccttattaaagttatatttttctataagaccctgaca

SEQ ID NO: 23725 - DNA, 3669 bp, Homo sapiens
  misc_feature 1..3669: note = ENST00000466305
  source 1..3669: mol_type = unassigned DNA
gtcttttataccatttagagttcaaaggatggtctttacagtctgacagagctagatctgaaatctaattctaccacttcctaggtgtgtgactcagggcaagtaacttctgtcagctttctcatctataaaatggagatgtaagacaaaaatctgcctctcagggttataaagaacaaatatgaattagatgtaaagagcttggtaagttctcaataaattctatctatctgtccttcacaggtcaagctcctgattataaagtctttccagtctactctgtcagtgatcttcccttcctctaaatacttgacatattttaattctacaactcatttgaaaattaatcgtggtttacactgtgatatctgtattcacatatcacttttaacattttgatgctgaaatttaggctcataaggaatgaaaactgtaatttatatctacaaatatgatgcctctatattgttggaaaggatctgatatcaaatatttggtctcactgacctcttaggaacattcttatttgtctacgtaagcttattttgagattgtaaacgtatgatcatcttacttttacttctctgtacatggcttctagcacaatacttaacattagagtctgtgatcccaagttctcaaaattaatgatttgctgattgctgatgatccttgacacatatctgagcatcttttttaaatatctgccataacattgtatctatttttattaagccatttcccagtcttccttgaagtttacagatatgtttgctttatatgcatgttctgggctctcacattttgtacctactagcacagttttattatattctaattattcattcatgttccttgaggtcagagaacacagatttcaactttgcaggctcagcctcagctcaaaacctggcatagttgctcaataaatctttactgattagactgtgagcttttgttgggaaaaggatatgccttttaatgctttgttcctttactgcaattcacaggggatgttggctgtttttcaaattaaaaacagaaaactgaggagggtagaatttcaagttccattttcaaaggagacacacagataagtgagaataaaaactgtctacgacaatcagctcaacaacacgtctccctttgtaagacagaataacaagcaatttcacagttaagtgatagggcttgtcactcttcagcagtttgctgagttttaaccctttcactatggcgttctctccattattacagagaaaggcagatgggagcctctcccagcgaaaagactacagcttgtgtccttcataggagaaaacagtgatggctccagaacttttatatgaatgaacttagcacagctatcagagtggatggtggtgggagggctagcaggaaactagtaaacaactacaagctgccccttcagggaaagtttctacttggaatataagttacagattaatgaaaatagaaagatttcccaaagatacttattctcatgttttataaaagatcagggaaatgtcagctgtccacttaacggatgacataatgaattaagagttcgataggcggcaggcacaactaaaagccaaactcgacctaagtcttatgaaatcctacttaatgagctttcttgactactgctagcctcacttatctggcaggagtcgaaggagaggaagccccaagctcctctgttccaccacctccaaagtcctgaaccccttctcaagtgtaccacttcatccctgcttcctttcgtcccgtgggactaagcattcctcgggccttcactctcaccacttgctgtccctcaaaaagccgactcacccctttccaagcgcagtgaaccgtccgcaaagcacgaggccggttgcgagctgcagaaagcccacgctcgccagcgggacccaaggaacgctagaactatacgtcccagaacacttagctttgtttttaactacggtgcagccgcaaaagggaaataccggctcaggacccaggggagttgtagttctctaatccaaagaaatcattatttggcaacgtacggttttcagggggatataccccgcgactgcgttcctgtaggatgtgagacaaagagaataaatatcccaggattgggtgctggtgggaaaatttgctggaagcgcagcattggttaccaattttgtgctcaacctctcagtaccagggtgaaagtggagacgcaatctcccttggaagacgttagtctccatctctaacgctcccgagacacggttcgcaattaattatgacgtcacagccaatcgtcaacgcgaaagcctgacgctctagccggctctatctcgctgccccgccgcgggcgcagagctggcgctctagcccacggagttggttaactcctctcaccggcccctggaaagggttccaagtcctttagtacccgacgctgtctgggaattccgggcgtttcggctccttggtcgcagaggcaggaggcgtgcgtggcaggagggttcgggttatatactcctaggtcctgggacagaatagttacgacctctgggacaggaactcttctctcttttgttaataaacttccaactccctcctcagacccgaccgcatgtctgtcatggacctcgccaatacttgctccagctttcagtcggacctggatttctgttcagattgcggctcggtcctgcctctgcccggggctcaggatacggtcacctgtattcgctgtggcttcaacatcaacgttcggggtgagaggcttgtacgcaggggtcctggcggagggcgcagggtcggaagcttggggaactcaagatcggttgggttgaggaggggatcctagagcaggacatcaggcggttgtacatttggtctagcgatgaaaactgagggaaaggatgtagggcctcctggcctaaccagccaggggaaaggggaggtttccggtgtcagctctctctggttgtctccataaccagttcttacttgcctgtgcagactttgaggggaaggttgtgaagacttcggttgtgttccaccaactggggacagccatgcctatgtcggtggaggaagggcctgagtgccagggacctgtggtaagctaatgagatcaagaactggctccataaggtgggtaggaaagaaatggaggagtgattgcaaagctctggagagttttgtgcccaattccaagagggaaaagagatgtaaaccatcgacgtttgagaggcgtgatcgcctgattcctgtgggaagtaaggggatatgaccaggcctccctaacccaccagtttcttcccaggttgacaggcgctgccctcgatgtggtcatgaaggaatggcataccacaccagacagatgcgttcagccgatgaagggcaaactgtcttctacacctgtaccaactgcaagttccaggagaaggaagactcttgacctttttcctgggcaactctacagtccctccctcctttcggaaggtgaaggatactgggtttttagatgccttgtccatcctgtctggttgcaatgttttgctcccagaagagaatcagatcatcatgtggggattaccattgttcctggagtactcctacccttagttgaatttccttattaaagttatatttttctataagaccctgaca

SEQ ID NO: 23726 - DNA, 864 bp, Homo sapiens; identical to SEQ ID NO: 23721
  misc_feature 1..864: note = ENST00000417738
  source 1..864: mol_type = unassigned DNA

SEQ ID NO: 23727 - DNA, 736 bp, Homo sapiens; identical to SEQ ID NO: 23720
  misc_feature 1..736: note = ENST00000429558
  source 1..736: mol_type = unassigned DNA

SEQ ID NO: 23728 - DNA, 743 bp, Homo sapiens; identical to SEQ ID NO: 23724
  misc_feature 1..743: note = ENST00000441251
  source 1..743: mol_type = unassigned DNA

SEQ ID NO: 23729 - DNA, 754 bp, Homo sapiens; identical to SEQ ID NO: 23723
  misc_feature 1..754: note = ENST00000431416
  source 1..754: mol_type = unassigned DNA

SEQ ID NO: 23730 - DNA, 571 bp, Homo sapiens; identical to SEQ ID NO: 23719
  misc_feature 1..571: note = ENST00000477956
  source 1..571: mol_type = unassigned DNA

SEQ ID NO: 23731 - DNA, 3672 bp, Homo sapiens
  misc_feature 1..3672: note = ENST00000466296
  source 1..3672: mol_type = unassigned DNA; mol_type = unassigned DNA
gtcttttataccatttagagttcaaaggatggtctttacagtctgacagagctagatctgaaatctaattctaccacttcctaggtgtgtgactcagggcaagtaacttctgtcagctttctcatctataaaatggagatgtaagacaaaaatctgcctctcagggttataaagaacaaatatgaattagatgtaaagagcttggtaagttctcaataaattctatctatctgtccttcacaggtcaagctcctgattataaagtctttccagtctactctgtcagtgatcttcccttcctctaaatacttgacatattttaattctacaactcatttgaaaattaatcgtggtttacactgtgatatctgtattcacatatcacttttaacattttgatgctgaaatttaggctcataaggaatgaaaactgtaatttatatctacaaatatgatgcctctatattgttggaaaggatctgatatcaaatatttggtctcactgacctcttaggaacattcttatttgtctacgtaagcttattttgagattgtaaacgtatgatcatcttacttttacttctctgtacatggcttctagcacaatacttaacattagagtctgtgatcccaagttctcaaaattaatgatttgctgattgctgatgatccttgacacataatatctgagcatcttttttaaatatctgccataacattgtatctatttttattaagccatttcccagtcttccttgaagtttacagatatgtttgctttatatgcatgttctgggctctcacattttgtacctactagcacagttttattatattctaattattcattcatgttccttgaggtcagagaacacagatttcaactttgcaggctcagcctcagctcaaaacctggcatagttgctcaataaatctttactgattagactgtgagcttttgttgggaaaaggatatgccttttaatgctttgttcctttactgcaattcacaggggatgttggctgtttttcaaattaaaaacagaaaactgaggagggtagaatttcaagttccattttcaaaggagacacacagataagtgagaataaaaactgtctacgacaatcagctcaacaacacgtctccctttgtaagacagaataacaagcaatttcacagttaagtgatagggcttgtcactcttcagcagtttgctgagttttaaccctttcactatggcgttctctccattattacagagaaaggcagatgggagcctctcccagcgaaaagactacagcttgtgtccttcataggagaaaacagtgatggctccagaacttttatatgaatgaacttagcacagctatcagagtggatggtggtgggagggctagcaggaaactagtaaacaactacaagctgccccttcagggaaagtttctacttggaatataagttacagattaatgaaaatagaaagatttcccaaagatacttattctcatgttttataaaagatcagggaaatgtcagctgtccacttaacggatgacataatgaattaagagttcgataggcggcaggcacaactaaaagccaaactcgacctaagtcttatgaaatcctacttaatgagctttcttgactactgctagcctcacttatctggcaggagtcgaaggagaggaagccccaagctcctctgttccaccacctccaaagtcctgaaccccttctcaagtgtaccacttcatccctgcttcctttcgtcccgtgggactaagcattcctcgggccttcactctcaccacttgctgtccctcaaaaagccgactcacccctttccaagcgcagtgaaccgtccgcaaagcacgaggccggttgcgagctgcagaaagcccacgctcgccagcgggacccaaggaacgctagaactatacgtcccagaacacttagctttgtttttaactacggtgcagccgcaaaagggaaataccggctcaggacccaggggagttgtagttctctaatccaaagaaatcattatttggcaacgtacggttttcagggggatataccccgcgactgcgttcctgtaggatgtgagacaaagagaataagtatcccaggattgggtgctggtgggaaaatttgctggaagcgcagcattggttaccaattttgtgctcaacctctcagtaccagggtgaaagtggagacgcaatctcccttggaagacgttagtctccatctctaacgctcccgagacacggttcgcaattaattatgacgtcacagccaatcgtcaacgcgaaagcctgacgctctagccggctctatctcgctgccccgccgcgggcgcagagctggcgctctagcccacggagttggttaactcctctcaccggcccctggaaagggttccaagtcctttagtacccgacgctgtctgggaattccgggcgtttcggctccttggtcgcagaggcaggaggcgtgcgtggcaggagggttcgggttatatactcctaggtcctgggacagaatagttacgacctctgggacaggaactcttctctcttttgttaataaacttccaactccctcctcagacccgaccgcatgtctgtcatggacctcgccaatacttgctccagctttcagtcggacctggatttctgttcagattgcggctcggtcctgcctctgcccggggctcaggatacggtcacctgtattcgctgtggcttcaacatcaacgttcggggtgagaggcttgtacgcaggggtcctggcggagggcgcagggtcggaagcttggggaactcaagatcggttgggttgaggaggggatcctagagcaggacatcaggcggttgtacatttggtctagcgatgaaaactgagggaaaggatgtagggcctcctggcctaaccagccaggggaaaggggaggtttccggtgtcagctctctctggttgtctccataaccagttcttacttgcctgtgcagactttgaggggaaggttgtgaagacttcggttgtgttccaccaactggggacagccatgcctatgtcggtggaggaagggcctgagtgccagggacctgtggtaagctaatgagatcaagaactggctccataaggtgggtaggaaagaaatggaggagtgattgcaaagctctggagagttttgtgcccaattccaagagggaaaagagatgtaaaccatcgacgtttgagaggcgtgatcgcctgattcctgtgggaagtaaggggatatgaccaggcctccctaacccaccagtttcttcccaggttgacaggcgctgccctcgatgtggtcatgaaggaatggcataccacaccagacagatgcgttcagccgatgaagggcaaactgtcttctacacctgtaccaactgcaagttccaggagaaggaagactcttgacctttttcctgggcaactctacagtccctccctcctttcggaaggtgaaggatactgggtttttagatgccttgtccatcctgtctggttgcaatgttttgctcccagaagagaatcagatcatcatgtggggattaccattgttcctggagtactcctacccttagttgaatttccttattaaagttatatttttctataagaccctgaca

SEQ ID NO: 23732 - DNA, 864 bp, Homo sapiens; identical to SEQ ID NO: 23721
  misc_feature 1..864: note = ENST00000432904
  source 1..864: mol_type = unassigned DNA; mol_type = unassigned DNA

SEQ ID NO: 23733 - DNA, 736 bp, Homo sapiens; identical to SEQ ID NO: 23720
  misc_feature 1..736: note = ENST00000420100
  source 1..736: mol_type = unassigned DNA

SEQ ID NO: 23734 - DNA, 743 bp, Homo sapiens; identical to SEQ ID NO: 23724
  misc_feature 1..743: note = ENST00000432227
  source 1..743: mol_type = unassigned DNA

SEQ ID NO: 23735 - DNA, 754 bp, Homo sapiens; identical to SEQ ID NO: 23723
  misc_feature 1..754: note = ENST00000444027
  source 1..754: mol_type = unassigned DNA

SEQ ID NO: 23736 - DNA, 571 bp, Homo sapiens; identical to SEQ ID NO: 23719
  misc_feature 1..571: note = ENST00000476397
  source 1..571: mol_type = unassigned DNA

SEQ ID NO: 23737 - DNA, 3674 bp, Homo sapiens
  misc_feature 1..3674: note = ENST00000484199
  source 1..3674: mol_type = unassigned DNA
gtcttttataccatttagagttcaaaggatggtctttacagtctgacagagctagatctgaaatctaattctaccacttcctaggtgtgtgactcagggcaagtaacttctgtcagctttctcatctataaaatggagatgtaagacaaaaatctgcctctcagggttataaagaacaaatatgaattagatgtaaagagcttggtaagttctcaataaattctatctatctgtccttcacaggtcaagctcctgattataaagtctttccagtctactctgtcagtgatcttcccttcctctaaatacttgacatattttaattctacaactcatttgaaaattaatcgtggtttacactgtgatatctgtattcacatatcacttttaacattttgatgctgaaatttaggctcataaggaatgaaaactgtaatttatatctacaaatatgatgcctctatattgttggaaaggatctgatatcaaatatttggtctcactgacctcttaggaacattcttatttgtctacgtaagcttattttgagattgtaaacgtatgatcatcttacttttacttctctgtacatggcttctagcacaatacttaacattagagtctgtgatcccaagttctcaaaattaatgatttgctgattgctgatgatccttgacacataatatctgagcatcttttttaaatatctgccataacattgtatctatttttattaaaccatttcccagtcttccttgaagtttacagatatgtttgctttatatgcatgttctgggctctcacattttgtacctactagcacagttttattatattctaattattcattcatgttccttgaggtcagagaacacagatttcaactttgcaggctcagcctcagctcaaaacctggcatagttgctcaataaatctttactgattagactgtgagcttttgttgggaaaaggatatgccttttaatgctttgttcctttactgcaattcacaggggatgttggctgtttttcaaattaaaaacagaaaactgaggagggtagaatttcaagttccattttcaaaggagacacacagataagtgagaataaaaactgtctacgacaatcagctcaacaacacgtctccctttgtaagacagaataacaagcaatttcacagttaagtgatagggcttgtcactcttcagcagtttgctgagttttaaccctttcactatggcgttctctccattattacagagaaaggcagatgggagcctctcccagcgaaaagactacagcttgtgtccttcataggagaaaacagtgatggctccagaacttttatatgaatgaacttagcacagctatcagagtggatggtggtgggagggctagcaggaaactagtaaacaactacaagctgccccttcagggaaagtttctacttggaatataagttacagattaatgaaaatagaaagatttcccaaagatacttattctcatgttttataaaagatcagggaaatgtcagctgtccacttaacggatgacgataatgaattaagagttcgataggcggcaggcacaactaaaagccaaactcgacctaagtcttatgaaatcctacttaatgagctttcttgactactgctagcctcacttatctggcaggagtcgaaggagaggaagccccaagctcctctgttccaccacctccaaagtcctgaaccccttctcaagtgtcccacttcatccctgcttcctttcgtcccgtgggactaagcattcctcctgccctcactctcaccacttgctgtccctcaaaaagccgactcacccctttccaagcgcagtgaaccgtccgcaaagcacgaggccggttgcgagctgcagaaagcccacgctcgccagcgggacccaaggaacgctagaactatacgtcccagaacacttagctttgtttttaactacggtgcagccgcaaaagggaaataccggctcaggacccaggggagttgtagttctctaatccaaagaaatcattatttggcaacgtacggttttcagggggatataccccgcgactgcgttcctgtaggatgtgagacaaagagaataaatatccccggattgggtgctggtgggaaaatttgctggaagcgcagcattggttaccaattttgtgctcaatctctcagtaccagggtgaaagtggagacgcaatctcccttgaaagacgttagtctccatctctaacgctcccgagacacggttcgcaattaattatgacgtcacagccaatcgtcaacgcgaaagcctgacgctctagccggctctatctcgctgccccgccgcgggcgcagagctggcgctctagcccacggagttggttaactcctctcaccggcccctggaaagggttccaagtgctttagtacccgacgctgtctgggaattccgggcgtttcggctccttggtcgcagaggcaggagggcgtgcgtggcaggagggttcgggttatatactcctaggtcctgggacagaatagttacgacctctgggacaggaactcttctctcttttgttaataaacttccaactccctcctcagacccgaccgcatgtctgtcatggacctcgccaatacttgctccagctttcagtcggacctggatttctgttcagattgcggctcggtcctgcctctgcccggggctcaggatacggtcacctgtattcgctgtggcttcaacatcaacgttcggggtgagaggcttgtacgcaggggtcctggcggagggcgcagggtcggaagcttggggaactcaagatcggttgggttgaggaggggatcctagagcaggacatcaggcggttgtacatttggtctagcgatgaaaactgagggaaaggatgtagggcctcctggcctaaccagccaggggaaaggggaggtttccggtgtcagctctctctggttgtctccataaccagttcttacttgcctgtgcagactttgaggggaaggttgtgaagacttcggttgtgttccaccaactggggacagccatgcctatgtcggtggaggaagggcctgagtgccagggacctgtggtaagctaatgagatcaagaactggctccataaggtgggtaggaaagaaatggaggagtgattgcaaagctctggagagttttgtgcccaattccaagagggaaaagagatgtaaaccatcgacgtttgagaggcgtgatcgcctgattcctgtgggaagtaaggggatatgaccaggcctccctaacccaccagtttcttcccaggttgacaggcgctgccctcgatgtggtcatgaaggaatggcataccacaccagacaaatgcgttcagccgatgaagggcaaactgtcttctacacctgtaccaactgcaagttccaggagaaggaagactcttgacctttttcctgggcaactctgcagtccctccctcctttcggaaggtgaaggatactgggtttttagatgccttgtccatcctgtctggttgcaatgttttgctcccagaagagaatcagatcatcatgtggggattaccattgttcctggagtactcctacccttagttgaatttccttattaaagttatatttttctataagaccctgaca

SEQ ID NO: 23738 - DNA, 865 bp, Homo sapiens
  misc_feature 1..865: note = ENST00000400662
  source 1..865: mol_type = unassigned DNA; mol_type = unassigned DNA
gccgcgggcgcagagctggcgctctagcccacggagttggttaactcctctcaccggcccctggaaagggttccaagtgctttagtacccgacgctgtctgggaattccgggcgtttcggctccttggtcgcagaggcaggagggcgtgcgtggcaggagggttcgggttatatactcctaggtcctgggacagaatagttacgacctctgggacaggaactcttctctcttttgttaataaacttccaactccctcctcagacccgaccgcatgtctgtcatggacctcgccaatacttgctccagctttcagtcggacctggatttctgttcagattgcggctcggtcctgcctctgcccggggctcaggatacggtcacctgtattcgctgtggcttcaacatcaacgttcgggactttgaggggaaggttgtgaagacttcggttgtgttccaccaactggggacagccatgcctatgtcggtggaggaagggcctgagtgccagggacctgtggttgacaggcgctgccctcgatgtggtcatgaaggaatggcataccacaccagacaaatgcgttcagccgatgaagggcaaactgtcttctacacctgtaccaactgcaagttccaggagaaggaagactcttgacctttttcctgggcaactctgcagtccctccctcctttcggaaggtgaaggatactgggtttttagatgccttgtccatcctgtctggttgcaatgttttgctcccagaagagaatcagatcatcatgtggggattaccattgttcctggagtactcctacccttagttgaatttccttattaaagttatatttttctataagaccctgaca

SEQ ID NO: 23739 - DNA, 736 bp, Homo sapiens
  misc_feature 1..736: note = ENST00000383613
  source 1..736: mol_type = unassigned DNA; mol_type = unassigned DNA
gcgggcgcagagctggcgctctagcccacggagttggttaactcctctcaccggcccctggaaagggttccaagtgctttagtacccgacgctgtctgggaattccgggcgtttcggctccttggtcgcagagacccgaccgcatgtctgtcatggacctcgccaatacttgctccagctttcagtcggacctggatttctgttcagattgcggctcggtcctgcctctgcccggggctcaggatacggtcacctgtattcgctgtggcttcaacatcaacgttcgggactttgaggggaaggttgtgaagacttcggttgtgttccaccaactggggacagccatgcctatgtcggtggaggaagggcctgagtgccagggacctgtggttgacaggcgctgccctcgatgtggtcatgaaggaatggcataccacaccagacaaatgcgttcagccgatgaagggcaaactgtcttctacacctgtaccaactgcaagttccaggagaaggaagactcttgacctttttcctgggcaactctgcagtccctccctcctttcggaaggtgaaggatactgggtttttagatgccttgtccatcctgtctggttgcaatgttttgctcccagaagagaatcagatcatcatgtggggattaccattgttcctggagtactcctacccttagttgaatttccttattaaagttatatttttctataagaccctgaca

SEQ ID NO: 23740 - DNA, 744 bp, Homo sapiens
  misc_feature 1..744: note = ENST00000400660
  source 1..744: mol_type = unassigned DNA
gggcgcagagctggcgctctagcccacggagttggttaactcctctcaccggcccctggaaagggttccaagtgctttagtacccgacgctgtctgggaattccgggcgtttcggctccttggtcgcagaggcaggagggcacccgaccgcatgtctgtcatggacctcgccaatacttgctccagctttcagtcggacctggatttctgttcagattgcggctcggtcctgcctctgcccggggctcaggatacggtcacctgtattcgctgtggcttcaacatcaacgttcgggactttgaggggaaggttgtgaagacttcggttgtgttccaccaactggggacagccatgcctatgtcggtggaggaagggcctgagtgccagggacctgtggttgacaggcgctgccctcgatgtggtcatgaaggaatggcataccacaccagacaaatgcgttcagccgatgaagggcaaactgtcttctacacctgtaccaactgcaagttccaggagaaggaagactcttgacctttttcctgggcaactctgcagtccctccctcctttcggaaggtgaaggatactgggtttttagatgccttgtccatcctgtctggttgcaatgttttgctcccagaagagaatcagatcatcatgtggggattaccattgttcctggagtactcctacccttagttgaatttccttattaaagttatatttttctataagaccctgaca

SEQ ID NO: 23741 - DNA, 755 bp, Homo sapiens
  misc_feature 1..755: note = ENST00000400659
  source 1..755: mol_type = unassigned DNA
gcagagctggcgctctagcccacggagttggttaactcctctcaccggcccctggaaagggttccaagtgctttagtacccgacgctgtctgggaattccgggcgtttcggctccttggtcgcagaggcaggagggcgtgcgtggcaggaggacccgaccgcatgtctgtcatggacctcgccaatacttgctccagctttcagtcggacctggatttctgttcagattgcggctcggtcctgcctctgcccggggctcaggatacggtcacctgtattcgctgtggcttcaacatcaacgttcgggactttgaggggaaggttgtgaagacttcggttgtgttccaccaactggggacagccatgcctatgtcggtggaggaagggcctgagtgccagggacctgtggttgacaggcgctgccctcgatgtggtcatgaaggaatggcataccacaccagacaaatgcgttcagccgatgaagggcaaactgtcttctacacctgtaccaactgcaagttccaggagaaggaagactcttgacctttttcctgggcaactctgcagtccctccctcctttcggaaggtgaaggatactgggtttttagatgccttgtccatcctgtctggttgcaatgttttgctcccagaagagaatcagatcatcatgtggggattaccattgttcctggagtactcctacccttagttgaatttccttattaaagttatatttttctataagaccctgaca

SEQ ID NO: 23742 - DNA, 572 bp, Homo sapiens
  misc_feature 1..572: note = ENST00000476699
  source 1..572: mol_type = unassigned DNA
gtgctttagtacccgacgctgtctgggaattccgggcgtttcggctccttggtcgcagaggcaggagggcacccgaccgcatgtctgtcatggacctcgccaatacttgctccagctttcagtcggacctggatttctgttcagattgcggctcggtcctgcctctgcccggggctcaggatacggtcacctgtattcgctgtggcttcaacatcaacgttcggggttgacaggcgctgccctcgatgtggtcatgaaggaatggcataccacaccagacaaatgcgttcagccgatgaagggcaaactgtcttctacacctgtaccaactgcaagttccaggagaaggaagactcttgacctttttcctgggcaactctgcagtccctccctcctttcggaaggtgaaggatactgggtttttagatgccttgtccatcctgtctggttgcaatgttttgctcccagaagagaatcagatcatcatgtggggattaccattgttcctggagtactcctacccttagttgaatttccttattaaagttatatttttctataagaccctgaca

SEQ ID NO: 23743 - DNA, 3672 bp, Homo sapiens; identical to SEQ ID NO: 23722
  misc_feature 1..3672: note = ENST00000485907
  source 1..3672: mol_type = unassigned DNA

SEQ ID NO: 23744 - DNA, 864 bp, Homo sapiens; identical to SEQ ID NO: 23721
  misc_feature 1..864: note = ENST00000437373
  source 1..864: mol_type = unassigned DNA

SEQ ID NO: 23745 - DNA, 736 bp, Homo sapiens; identical to SEQ ID NO: 23720
  misc_feature 1..736: note = ENST00000431032
  source 1..736: mol_type = unassigned DNA

SEQ ID NO: 23746 - DNA, 743 bp, Homo sapiens; identical to SEQ ID NO: 23724
  misc_feature 1..743: note = ENST00000433264
  source 1..743: mol_type = unassigned DNA

SEQ ID NO: 23747 - DNA, 754 bp, Homo sapiens; identical to SEQ ID NO: 23723
  misc_feature 1..754: note = ENST00000432545
  source 1..754: mol_type = unassigned DNA

SEQ ID NO: 23748 - DNA, 571 bp, Homo sapiens; identical to SEQ ID NO: 23719
  misc_feature 1..571: note = ENST00000459984
  source 1..571: mol_type = unassigned DNA

SEQ ID NO: 23749 - DNA, 3672 bp, Homo sapiens
  misc_feature 1..3672: note = ENST00000481680
  source 1..3672: mol_type = unassigned DNA
gtcttttataccatttagagttcaaaggatggtctttacagtctgacagagctagatctgaaatctaattctaccacttcctaggtgtgtgactcagggcaagtaacttctgtcagctttctcatctataaaatggagatgtaagacaaaaatctgcctctcagggttataaagaacaaatatgaattagatgtaaagagcttggtaagttctcaataaattctatctatctgtccttcacaggtcaagctcctgattataaagtctttccagtctactctgtcagtgatcttcccttcctctaaatacttgacatattttaattctacaactcatttgaaaattaatcgtggtttacactgtgatatctgtattcacatatcacttttaacattttgatgctgaaatttaggctcataaggaatgaaaactgtaatttatatctacaaatatgatgcctctatattgttggaaaggatctgatatcaaatatttggtctcactgacctcttaggaacattcttatttgtctacgtaagcttattttgagattgtaaacgtatgatcatcttacttttacttctctgtacatggcttctagcacaatacttaacattagagtctgtgatcccaagttctcaaaattaatgatttgctgattgctgatgatccttgacacataatatctgagcatcttttttaaatatctgccataacattgtatctatttttattaagccatttcccagtcttccttgaagtttacagatatgtttgctttatatgcatgttctgggctctcacattttgtacctactagcacagttttattatattctaattattcattcatgttccttgaggtcagagaacacagatttcaactttgcaggctcagcctcagctcaaaacctggcatagttgctcaataaatctttactgattagactgtgagcttttgttgggaaaaggatatgccttttaatgctttgttcctttactgcaattcacaggggatgttggctgtttttcaaattaaaaacagaaaactgaggagggtagaatttcaagttccattttcaaaggagacacacagataagtgagaataaaaactgtctacgacaatcagctcaacaacacgtctccctttgtaagacagaataacaagcaatttcacagttaagtgatagggcttgtcactcttcagcagtttgctgagttttaaccctttcactatggcgttctctccattattacagagaaaggcagatgggagcctctcccagcgaaaagactacagcttgtgtccttcataggagaaaacagtgatggctccagaacttttatatgaatgaacttagcacagctatcagagtggatggtggtgggagggctagcaggaaactagtaaacaactacaagctgccccttcagggaaagtttctacttggaatataagttacagattaatgaaaatagaaagatttcccaaagatacttattctcatgttttataaaagatcagggaaatgtcagctgtccacttaacggatgacataatgaattaagagttcgataggcggcaggcacaactaaaagccaaactcgacctaagtcttatgaaatcctacttaatgagctttcttgactactgctagcctcacttatctggcaggagtcgaaggagaggaagccccaagctcctctgttccaccacctccaaagtcctgaaccccttctcaagtgtaccacttcatccctgcttcctttcgtcccgtgggactaagcattcctcgggccttcactctcaccacttgctgtccctcaaaaagccgactcacccctttccaagcgcagtgaaccgtccgcaaagcatgaggccggttgcgagctgcagaaagcccacgctcgccagcgggacccaaggaacgctagaactatacgtcccagaacacttagctttgtttttaactacggtgcagccgcaaaagggaaataccggctcaggacccaggggagttgtagttctctaatccaaagaaatcattatttggcaacgtacggttttcagggggatataccccgcgactgcgttcctgtaggatgtgagacaaagagaataaatatcccaggattgggtgctggtgggaaaatttgctggaagcgcagcattggttaccaattttgtgctcaacctctcagtaccagggtgaaagtagagacgcaatctcccttggaagacgttagtctccatctctaacgctcccgagacacggttcgcaattaattatgacgtcacagccaatcgtcaacgcgaaagcctgacgctctagccggctctatctcgctgccccgccgcgggcgcagagctggcgctctagcccacggagttggttaactcctctcaccggcccctggaaagggttccaagtcctttagtacccgacgctgtctgggaattccgggcgtttcggctccttggtcgcagaggcaggaggcgtgcgtggcaggagggttcgggttatatactcctaggtcctgggacagaatagttacgacctctgggacaggaactcttctctcttttgttaataaacttccaactccctcctcagacccgaccgcatgtctgtcatggacctcgccaatacttgctccagctttcagtcggacctggatttctgttcagattgcggctcggtcctgcctctgcccggggctcaggatacggtcacctgtattcgctgtggcttcaacatcaacgttcggggtgagaggcttgtacgcaggggtcctggcggagggcgcagggtcggaagcttggggaactcaagatcggttgggttgaggaggggatcctagagcaggacatcaggcggttgtacatttggtctagcgatgaaaactgagggaaaggatgtagggcctcctggcctaaccagccaggggaaaggggaggtttccggtgtcagctctctctggttgtctccataaccagttcttacttgcctgtgcagactttgaggggaaggttgtgaagacttcggttgtgttccaccaactggggacagccatgcctatgtcggtggaggaagggcctgagtgccagggacctgtggtaagctaatgagatcaagaactggctccataaggtgggtaggaaagaaatggaggagtgattgcaaagctctggagagttttgtgcccaattccaagagggaaaagagatgtaaaccatcgacgtttgagaggcgtgatcgcctgattcctgtgggaagtaaggggatatgaccaggcctccctaacccaccagtttcttcccaggttgacaggcgctgccctcgatgtggtcatgaaggaatggcataccacaccagacagatgcgttcagccgatgaagggcaaactgtcttctacacctgtaccaactgcaagttccaggagaaggaagactcttgacctttttcctgggcaactctacagtccctccctcctttcggaaggtgaaggatactgggtttttagatgccttgtccatcctgtctggttgcaatgttttgctcccagaagagaatcagatcatcatgtggggattaccattgttcctggagtactcctacccttagttgaatttccttattaaagttatatttttctataagaccctgaca

SEQ ID NO: 23750 - DNA, 864 bp, Homo sapiens; identical to SEQ ID NO: 23721
  misc_feature 1..864: note = ENST00000417275
  source 1..864: mol_type = unassigned DNA

SEQ ID NO: 23751 - DNA, 736 bp, Homo sapiens; identical to SEQ ID NO: 23720
  misc_feature 1..736: note = ENST00000444794
  source 1..736: mol_type = unassigned DNA; mol_type = unassigned DNA

SEQ ID NO: 23752 - DNA, 743 bp, Homo sapiens; identical to SEQ ID NO: 23724
  misc_feature 1..743: note = ENST00000442585
  source 1..743: mol_type = unassigned DNA; mol_type = unassigned DNA

SEQ ID NO: 23753 - DNA, 754 bp, Homo sapiens; identical to SEQ ID NO: 23723
  misc_feature 1..754: note = ENST00000412396
  source 1..754: mol_type = unassigned DNA; mol_type = unassigned DNA

SEQ ID NO: 23754 - DNA, 571 bp, Homo sapiens; identical to SEQ ID NO: 23719
  misc_feature 1..571: note = ENST00000484119
  source 1..571: mol_type = unassigned DNA; mol_type = unassigned DNA

SEQ ID NO: 23755 - DNA, 3672 bp, Homo sapiens
  misc_feature 1..3672: note = ENST00000471008
  source 1..3672: mol_type = unassigned DNA; mol_type = unassigned DNA
gtcttttataccatttagagttcaaaggatggtctttacagtctgacagagctagatctgaaatctaattctaccacttcctaggtgtgtgactcagggcaagtaacttctgtcagctttctcatctataaaatggagatgtaagacaaaaatctgcctctcagggttataaagaacaaatatgaattagatgtaaagagcttggtaagttctcaataaattctatctatctgtccttcacaggtcaagctcctgattataaagtctttccagtctactctgtcagtgatcttcccttcctctaaatacttgacatattttaattctacaactcatttgaaaattaatcgtggtttacactgtgatatctgtattcacatatcacttttaacattttgatgctgaaatttaggctcataaggaatgaaaactgtaatttatatctacaaatatgatgcctctatattgttggaaaggatctgatatcaaatatttggtctcactgacctcttaggaacattcttatttgtctacgtaagcttattttgagattgtaaacgtatgatcatcttacttttacttctctgtacatggcttctagcacaatacttaacattagagtctgtgatcccaagttctcaaaattaatgatttgctgattgctgatgatccttgacacataatatctgagcatcttttttaaatatctgccataacattgtatctatttttattaagccatttcccagtcttccttgaagtttacagatatgtttcctttatatgcatgttctgggctctcacattttgtacctactagcacagttttattatattctaattattcattcatgttccttgaggtcagagaacacagatttcaactttgcaggctcagcctcagctcaaaacctggcatagttgctcaataaatctttactgattagactgtgagcttttgttgggaaaaggatatgccttttaatgctttgttcctttactgcaattcacaggggatgttggctgtttttcaaattaaaaacagaaaactgaggagggtagaatttcaagttccattttcaaaggagacacacagataagtgagaataaaaactgtctacgacaatcagctcaacaacacgtctccctttgtaagacagaataacaagcaatttcacagttaaatgatagggcttgtcactcttcagcagtttgctgagttttaaccctttcactatggcgttctctccattattacagagaaaggcagatgggagcctctcccagcgaaaagactacagcttgtgtccttcataggagaaaacagtgatggctccagaacttttatatgaatgaacttagcacagctatcagagtggatggtggtgggagggctagcaggaaactagtaaacaactacaagctgccccttcagggaaagtttctacttggaatataagttacagattaatgaaaatagaaagatttcccaaagatacttattctcatgttttataaaagatcagggaaatgtcagctgtccacttaacggatgacataatgaattaagagttcgataggcggcaggcacaactaaaagccaaactcgacctaagtcttatgaaatcctacttaatgagctttcttgactactgctagcctcacttatctggcaggagtcgaaggagaggaagccccaagctcctctgttccaccacctccaaagtcctgaaccccttctcaagtgtaccacttcatccctgcttcctttcgtcccgtgggactaagcattcctcgggccttcactctcaccacttgctgtccctcaaaaagccgactcacccctttccaagcgcagtgaaccgtccgcaaagcacgaggccggttgcgagctgcagaaagcccacgctcgccagcgggacccaaggaacgctagaactatacgtcccagaacacttagctttgtttttaactacggtgcagccgcaaaagggaaataccggctcaggacccaggggagttgtagttctctaatccaaagaaatcattatttggcaacgtacggttttcagggggatataccccgcgactgcgttcctgtaggatgtgagacaaagagaataaatatcccaggattgggtgctggtgggaaaatttgctggaagcgcagcattggttaccaattttgtgctcaacctctcagtaccagggtgaaagtggagacgcaatctcccttggaagacgttagtctccatctctaacgctcccgagacacggttcgcaattaattatgacgtcacagccaatcgtcaacgcgaaagcctgacgctctagccggctctatctcgctgccccgccgcgggcgcagagctggcgctctagcccacggagttggttaactcctctcaccggcccctggaaagggttccaagtcctttagtacccgacgctgtctgggaattccgggcgtttcggctccttggtcgcagaggcaggaggcgtgcgtggcaggagggttcgggttatatactcctaggtcctgggacagaatagttacgacctctgggacaggaactcttctctcttttgttaataaacttccaactccctcctcagacccgaccgcatgtctgtcatggacctcgccaatacttgctccagctttcagtcggacctggatttctgttcagattgcggctcggtcctgcctctgcccggggctcaggatacggtcacctgtattcgctgtggcttcaacatcaacgttcggggtgagaggcttgtacgcaggggtcctggcggagggcgcagggtcggaagcttggggaactcaagatcggttgggttgaggaggggatcctagagcaggacatcaggcggttgtacatttggtctagcgatgaaaactgagggaaaggatgtagggcctcctggcctaaccagccaggggaaaggggaggtttccggtgtcagctctctctggttgtctccataaccagttcttacttgcctgtgcagactttgaggggaaggttgtgaagacttcggttgtgttccaccaactggggacagccatgcctatgtcggtggaggaagggcctgagtgccagggacctgtggtaagctaatgagatcaagaactggctccataaggtgggtaggaaagaaatggaggagtgattgcaaagctctggagagttttgtgcccaattccaagagggaaaagagatgtaaaccatcgacgtttgagaggcgtgatcgcctgattcctgtgggaagtaaggggatatgaccaggcctccctaacccaccagtttcttcccaggttgacaggcgctgccctcgatgtggtcatgaaggaatggcataccacaccagacagatgcgttcagccgatgaagggcaaactgtcttctacacctgtaccaactgcaagttccaggagaaggaagactcttgacctttttcctgggcaactctacagtccctccctcctttcggaaggtgaaggatactgggtttttagatgccttgtccatcctgtctggttgcaatgttttgctcccagaagagaatcagatcatcatgtggggattaccattgttcctggagtactcctacccttagttgaatttccttattaaagttatatttttctataagaccctgaca

SEQ ID NO: 23756 - DNA, 864 bp, Homo sapiens; identical to SEQ ID NO: 23721
  misc_feature 1..864: note = ENST00000332435
  source 1..864: mol_type = unassigned DNA; mol_type = unassigned DNA

SEQ ID NO: 23757 - DNA, 736 bp, Homo sapiens; identical to SEQ ID NO: 23720
  misc_feature 1..736: note = ENST00000376782
  source 1..736: mol_type = unassigned DNA; mol_type = unassigned DNA

SEQ ID NO: 23758 - DNA, 743 bp, Homo sapiens; identical to SEQ ID NO: 23724
  misc_feature 1..743: note = ENST00000359374
  source 1..743: mol_type = unassigned DNA; mol_type = unassigned DNA

SEQ ID NO: 23759 - DNA, 754 bp, Homo sapiens; identical to SEQ ID NO: 23723
  misc_feature 1..754: note = ENST00000376785
  source 1..754: mol_type = unassigned DNA; mol_type = unassigned DNA

SEQ ID NO: 23760 - DNA, 571 bp, Homo sapiens; identical to SEQ ID NO: 23719
  misc_feature 1..571: note = ENST00000463141
  source 1..571: mol_type = unassigned DNA; mol_type = unassigned DNA

SEQ ID NO: 23761 - DNA, 4620 bp, Homo sapiens
  misc_feature 1..4620: note = ENST00000335325
  source 1..4620: mol_type = unassigned DNA; mol_type = unassigned DNA
tccacggcggcgaggagcgccggcgagcgcagcccgggaccgagcggggcggcgcggctggcggggccggcggcggctgaagcgagagcgcgacgcgacgcgaccgcggcttcccgagctgcgcctggccgcccagcgccgcggcccgcccgaggcctggaggggtccgggccgccgtccatggtcgcggcgtcctgaggcgggggacgcgcccggcgcccccggccctcctccgcctcctcccgcggggcgggcggcctcctccggcgcctccccgcgcccgcccgccgctcgccgccgcctccctccctccttccctgcggctcccccggctttcggagcccgggggcggcctgtggcgcgcggagcccgcgccggactgcgcctctttggaccttgaggggaaacatgcgtttgccttggatcgtttgaaattctgagtttgggatccccgcccgcccgcctgcctcttccgccccgcgggttttttccttttttccttttgctttttttccttttctccctccgggtctcctttttgactccctccccctttatgctcgcccagccctccccctgctgctgagaagtgggggagggtctcggcctccaggttcccgccccaccggggcccgggcgagcatggggggcaagcagagcacggcggcccgctcccggggccccttcccgggggtctccaccgatgacagcgccgtgccgccgccgggaggggcgccccatttcgggcactaccggacgggcggcggggccatggggctgcgcagccgctcggtcagctcggtggcaggcatgggcatggaccccagcacggccgggggggtgccctttggcctctacacccccgcctcccggggcaccggcgactccgagagggcgcccggcggcggagggtctgcgtccgactccacctatgcccatggcaatggttaccaggagacgggcggcggtcaccatagagacgggatgctgtacctgggctcccgagcctcgctggcggatgctctacctctgcacatcgcacccaggtggttcagctcgcatagtggtttcaagtgccccatttgctccaagtctgtggcttctgacgagatggaaatgcactttataatgtgtttgagcaaacctcgcctctcctacaacgatgatgtgctgactaaagacgcgggtgagtgtgtgatctgcctggaggagctgctgcagggggacacgatagccaggctgccctgcctgtgcatctatcacaaaagctgcatagactcgtggtttgaagtgaacagatcttgtccggaacaccctgcggactgacctgcgggcttgcttgctgactcctctcaaagggacagagcgcccctgctccagggaggaggctcaccggaccctggggcagagctgagcttgggacaccagcgggaacagggcaccccttctgcactgacttccagatcatggttctcccttcctccctgaggacaccaaattggatgagagcaagtttgagagaagaatgaatcaactgctatccttcccctcacccctcagcccaggagggaaagggcattttctttttcatctttgaaaggcattgtgggtctgtctttaaagtgtttacaaaaaaaaattatataaaaaaaaagtctagtgtcgactggtgttttccctcgtgatgtttacagcttgctgtttgctgcccagccataacccactcagtgacagacgaacacagctaaggcctcgctgccagccttctgacggcgggcgagcacacggtctcttcccctgccccaactggccctctccaccaccaacttctctactttgggtttgtttggttttttccctctatttttctggctggttttttgctcttttctccccttgagaccctaatatcttgacttcattgccaaaaaacaacccattgagaactttcttcctactgatcccatctcttttcccttctttcctcctggttccggtcagttcagaggatttaacaatcacaagtgtcctgcaaaaatgcctgaacattattcttaggccctcgtggattttttttttcagaaaacttaaacaaaaaaagacttactaagaaatatgtacagctacccctgttttcaggcactatgtttgagaacattttagccattgatgttcacacgtggcatcagcccatgcaagataggtttctgtatttatatattaaaatacaaaaaaaaacttataaaatgtttaaaaaaatgttcaaagcttgggagaaaagctttcttcattagtcaaggtgttttgatatggtattaaaatgtctaataaaagatggcactgcgtgattttattttaatgaagtgttatacaatcaagaaatgggggcaagggcctgccccccactccctcacctacctccttagcattccttcaggctgctactcggggctccaggtgtgtgaattggtcctcagatagtcaggcctgggtggagggagtggcaagtcaggcgtgcctcctacaagcttcctaacctcttaagcatcatggaaccagtcagccctctgtggagtcattgtgctggacctctgaaaagatctgcaggggccaagatgttgcagccaccggaggctgcaaggatgtgggttcttccaggtgtgggcccagcccccctccttccagcctttgctccccatcccacgttccactcgccctgcctgttgttcagtttgcgtctcagtgctgactcacgggcatgcttcattgaggcccaggaagaggccctggtttggggctgtgccagctcagagcccttgaaccagaaccaactgctcaggctcacaaaagttggcaaaatgcgggctgggcaggcagctcggggcagggagcagcagtgcaggcctggcctgtgtccccgtgcccagcgggctcccggagcagcattccagagcctcctgcagagccagcgaaggaaagctctagagggagacgactccaccgcctctctgctctgacccttctcaggcccgcctgatgtgctggaccatccccctgctgccacggcccctggctccgcagtcaccctccatcagatgcttccagaagcacctactctgtgcaagggcattcacaacaggccagtgggcaaacgtgagccagggccagcggagaaacactaaagaagactcggtggttcagagcctgggtctcagcgcgggacccgtctggggtgaagaccttggggctgttgtgagtcggtggcaggaacgtgggctctagactgtgcattcaggctctcctacttggcagaatgatcttggggaaacgacttcatctgaacttcagatatttcacatgtgaagcggggacaaaaccatgcagctcagaggtccctgtgggggctgggggagctgccctgcaggtcttggcacatgcacagcaggctccccatagctttgtcaccacaaagggcactgttctattcacagcacctcctgcttctgcctggcaactgtgtctccctgtgctatatttaattccaccagcaaagctggcgaggcagggcccagccctgaaggagatctccttgcctgacccctggacctggaaatggaggcttcatgtgcccgccttggcggcttaagcctgctgctttggcagtgccatgggtgagccgagcagctgtgaggtgggtggggcagggctgtagcccacgccgggtgctattccaggctctaggggctggtgctcatccccacccccagcgacttccgtcctacctggcatgctgcagccctctgccggctgtggtgtcctctgaatttggacccaggttgcctgctcttgttgtgggggtgggattggggctgtctgtgtttcccaggtggagctcatgtttgtgatcctctatctggacagctctccagaatcctgtgttgcccctgttctgcctttctgggatgggagagaaggtgagggagccggcgagcaggttctaccctctctgctaagggcctagcacactttgatgaggttcctggacgtgagaccctcacaaagaccaaccattcctctaatagccatttaacggtactgcagttcatgggaaaatgtcctcattcttaggagatagatgctggattatataggtgaatgccttcaagaaatgtgtaatttaattccaaatagttccccccaaaatacacaaagcaaataaggccaaaatgttcattgttgaatctgcagtggctggtatttcagtgaacagtgtacttgttctttcaacttttctgtatgtttggaatttttcttaataaaagattgtgggaaatggtcatttgctgagcgcctcctagttgccaggcactggagggcgcatcaaagaagagtcctacccaggagggagagcgcagctgctgcaggattctcgcctggaagagtgggtggctggctggctggctggaaggggaggggcgagagggctgtctcggtgatgagcacacgcgtgctggggtggtttggggagagggctgagatttgtcaccagtgagcccttggcacggtctctgctccccaccagggcagcacgggacagaaacgtcacggaggagtagcctc

SEQ ID NO: 23762 - DNA, 2479 bp, Homo sapiens
  misc_feature 1..2479: note = ENST00000320619
  source 1..2479: mol_type = unassigned DNA; mol_type = unassigned DNA
cggcgaggagcgccggcgagcgcagcccgggaccgagcggggcggcgcggctggcggggccggcggcggctgaagcgagagcgcgacgcgacgcgaccgcggcttcccgagctgcgcctggccgcccagcgccgcggcccgcccgaggcctggaggggtccgggccgccgtccatggtcgcggcgtcctgaggcgggggacgcgcccggcgcccccggccctcctccgcctcctcccgcggggcgggcggcctcctccggcgcctccccgcgcccgcccgccgctcgccgccgcctccctccctccttccctgcggctcccccggctttcggagcccgggggcggcctgtggcgcgcggagcccgcgccggactgcgcctctttggaccttgaggggaaacatgcgtttgccttggatcgtttgaaattctgagtttgggatccccgcccgcccgcctgcctcttccgccccgcgggttttttccttttttccttttgctttttttccttttctccctccgggtctcctttttgactccctccccctttatgctcgcccagccctccccctgctgctgagaagtgggggagggtctcggcctccaggttcccgccccaccggggcccgggcgagcatggggggcaagcagagcacggcggcccgctcccggggccccttcccgggggtctccaccgatgacagcgccgtgccgccgccgggaggggcgccccatttcgggcactaccggacgggcggcggggccatggggctgcgcagccgctcggtcagctcggtggcaggcatgggcatggaccccagcacggccgggggggtgccctttggcctctacacccccgcctcccggggcaccggcgactccgagagggcgcccggcggcggagggtctgcgtccgactccacctatgcccatggcaatggttaccaggagacgggcggcggtcaccatagagacgggatgctgtacctgggctcccgagcctcgctggcggatgctctacctctgcacatcgcacccaggtggttcagctcgcatagtggtttcaagtgccccatttgctccaagtctgtggcttctgacgagatggaaatgcactttataatgtgtttgagcaaacctcgcctctcctacaacggaagaatacaaagaagcctcagaggggctcagcctgagaaaacctggctctcaggaagaactttgcaagagcagccgtggaggacagagtgctcttgggcccccatggcccaaatgcagagttacccccactgccctgtggagaaccgggaagatgatgtgctgactaaagacgcgggtgagtgtgtgatctgcctggaggagctgctgcagggggacacgatagccaggctgccctgcctgtgcatctatcacaaaagctgcatagactcgtggtttgaagtgaacagatcttgtccggaacaccctgcggactgacctgcgggcttgcttgctgactcctctcaaagggacagagcgcccctgctccagggaggaggctcaccggaccctggggcagagctgagcttgggacaccagcgggaacagggcaccccttctgcactgacttccagatcatggttctcccttcctccctgaggacaccaaattggatgagagcaagtttgagagaagaatgaatcaactgctatccttcccctcacccctcagcccaggagggaaagggcattttctttttcatctttgaaaggcattgtgggtctgtctttaaagtgtttacaaaaaaaaattatataaaaaaaaagtctagtgtcgactggtgttttccctcgtgatgtttacagcttgctgtttgctgcccagccataacccactcagtgacagacgaacacagctaaggcctcgctgccagccttctgacggcgggcgagcacacggtctcttcccctgccccaactggccctctccaccaccaacttctctactttgggtttgtttggttttttccctctatttttctggctggttttttgctcttttctccccttgagaccctaatatcttgacttcattgccaaaaaacaacccattgagaactttcttcctactgatcccatctcttttcccttctttcctcctggttccggtcagttcagaggatttaacaatcacaagtgtcctgcaaaaatgcctgaacattattcttaggccctcgtggattttttttttcagaaaacttaaacaaaaaaagacttactaagaaatatgtacagctacccctgttttcaggcactatgtttgagaacattttagccattgatgttcacacgtggcatcagcccatgcaagataggtttctgtatttatatattaaaatacaaaaaaaaacttataaaatgtttaaaaaaatgttcaaagcttgggagaaaagctttcttcattagtcaaggtgttttgatatggtattaaaatgtctaataaaa

SEQ ID NO: 23763 - DNA, 1069 bp, Homo sapiens
  misc_feature 1..1069: note = ENST00000566250
  source 1..1069: mol_type = unassigned DNA
ccctgcggctcccccggctttcggagcccgggggcggcctgtggcgcgcggagcccgcgccggactgcgcctctttggaccttgaggggaaacatgcgtttgccttggatcgtttgaaattctgagtttgggatccccgcccgcccgcctgcctcttccgccccgcgggttttttccttttttccttttgctttttttccttttctccctccgggtctcctttttgactccctccccctttatgctcgcccagccctccccctgctgctgagaagtgggggagggtctcggcctccaggttcccgccccaccggggcccgggcgagcatggggggcaagcagagcacggcggcccgctcccggggccccttcccgggggtctccaccgatgacagcgccgtgccgccgccgggaggggcgccccatttcgggcactaccggacgggcggcggggccatggggctgcgcagccgctcggtcagctcggtggcaggcatgggcatggaccccagcacggccgggggggtgccctttggcctctacacccccgcctcccggggcaccggcgactccgagagggcgcccggcggcggagggtctgcgtccgactccacctatgcccatggcaatggttaccaggagacgggcggcggtcaccatagagacgggatgctgtacctgggctcccgagcctcgctggcggatgctctacctctgcacatcgcacccaggtggttcagctcgcatagtggtttcaagtgccccatttgctccaagtctgtggcttctgacgagatggaaatgcactttataatgtgtttgagcaaacctcgcctctcctacaacgatgatgtgctgactaaagacgcgggtgagtgtgtgatctgcctggaggagctgctgcagggggacacgatagccaggctgccctgcctgtgcatctatcacaaaaggtaggaggggttggcaaggtagcttagtgcaccccacctcccagaggggcggacccccatctccagccattctgtctcctttggttatgggatgacctctcccccgacctctggct

SEQ ID NO: 23764 - DNA, 1234 bp, Homo sapiens
  misc_feature 1..1234: note = ENST00000567962
  source 1..1234: mol_type = unassigned DNA; mol_type = unassigned DNA
ccctgcggctcccccggctttcggagcccgggggcggcctgtggcgcgcggagcccgcgccggactgcgcctctttggaccttgaggggaaacatgcgtttgccttggatcgtttgaaattctgagtttgggatccccgcccgcccgcctgcctcttccgccccgcgggttttttccttttttccttttgctttttttccttttctccctccgggtctcctttttgactccctccccctttatgctcgcccagccctccccctgctgctgagaagtgggggagggtctcggcctccaggttcccgccccaccggggcccgggcgagcatggggggcaagcagagcacggcggcccgctcccggggccccttcccgggggtctccaccgatgacagcgccgtgccgccgccgggaggggcgccccatttcgggcactaccggacgggcggcggggccatggggctgcgcagccgctcggtcagctcggtggcaggcatgggcatggaccccagcacggccgggggggtgccctttggcctctacacccccgcctcccggggcaccggcgactccgagagggcgcccggcggcggagggtctgcgtccgactccacctatgcccatggcaatggttaccaggagacgggcggcggtcaccatagagacgggatgctgtacctgggctcccgagcctcgctggcggatgctctacctctgcacatcgcacccaggtggttcagctcgcatagtggtttcaagtgccccatttgctccaagtctgtggcttctgacgagatggaaatgcactttataatgtgtttgagcaaacctcgcctctcctacaacgatgatgtgctgactaaagacgcgggtgagtgtgtgatctgcctggaggagctgctgcagggggacacgatagccaggctgccctgcctgtgcatctatcacaaaagctgcatagactcgtggtttgaagtgaacagatcttgtccggaacaccctgcggactgacctgcgggcttgcttgctgactcctctcaaagatcatggttctcccttcctccctgaggacaccaaattggatgagagcaagtttgagagaagaatgaatcaactgctatccttcccctcacccctcagcccaggagggaaagggcattttctttttcatctttgaaaggcattgtgggtctgtctttaaagtgtttacaaaaaaaaattatataaaaaaaaa

SEQ ID NO: 23765 - DNA, 607 bp, Homo sapiens
  misc_feature 1..607: note = ENST00000564320
  source 1..607: mol_type = unassigned DNA; mol_type = unassigned DNA
atacctaccgtctggaaactaggctttctgcgaggctgcggagcctggcgatttagggactcacggcgtgtgttcacttgtggaagggcagagcgaagcctacctattggagttccatttattggcatcaccctcctcagagaagagagacggggtttcaccgtgttagccaggatggtcttgatctcctgacctcatgatcagcccacctcggcctcccaaagtgctgggattacaggtgtgagccaccacgcccggaatgaagtatttcaggtttcaagtgccccatttgctccaagtctgtggcttctgacgagatggaaatgcactttataatgtgtttgagcaaacctcgcctctcctacaacgatgatgtgctgactaaagacgcgggtgagtgtgtgatctgcctggaggagctgctgcagggggacacgatagccaggctgccctgcctgtgcatctatcacaaaagctgcatagactcgtggtttgaagtgaacagatcttgtccggaacaccctgcggactgacctgcgggcttgcttgctgactcctctcaaagggacagagcgcccctgctccagggaggaggctcaccggaccc

SEQ ID NO: 23766 - DNA, 485 bp, Homo sapiens
  misc_feature 1..485: note = ENST00000568511
  source 1..485: mol_type = unassigned DNA; mol_type = unassigned DNA
cttccaggacatctgtttcctctgttacacattgctgcaagaagcaaaacttgtttctgctttggagcctttgagatgaagagaaaaatcttcaagctttcagaagccaaaggaacaaattattaaggaaaagagtcacactggcaccagatttcctatttacaacaccaagaagctagaagatggtggaatttcatctacagaccacggggataaaaggaatgcagctcaagcatcctgtacccaggcaagctatccattcagctgtcagaatgaaagaaaggtttcaagtgccccatttgctccaagtctgtggcttctgacgagatggaaatgcactttataatgtgtttgagcaaacctcgcctctcctacaacgatgatgtgctgactaaagacgcgggtgagtgtgtgatctgcctggaggagctgctgcagggggacacgatagccaggctgccctgcctgtgcatctatcacaaaag

SEQ ID NO: 23767 - DNA, 571 bp, Homo sapiens
  misc_feature 1..571: note = ENST00000579084
  source 1..571: mol_type = unassigned DNA; mol_type = unassigned DNA
aaaagactctggatgcagatgatgtgctgactaaagacgcgggtgagtgtgtgatctgcctggaggagctgctgcagggggacacgatagccaggctgccctgcctgtgcatctatcacaaaaggtaggaggggttggcaaggtagcttagtgcaccccacctcccagaggggcggacccccatctccagccattctgtctcctttggttatgggatgacctctcccccgacctctggctccgagcgggtaagggcagaggccatcagacaggtgtccactgtgccggcgggaaggtgcgagcatcccaagtgcagagcagagtggagttgccagaggtgtgctctggtttgagggctcaggtggtgggagctgatggggagacccgtagagcctcacaggttggaggagcttcggatcccactgggaaggttggttctccgtctgtctccctgcctcttcttcctctacgggtccctctgctccacaggggtagaacatcaatctgtgcgaggaaggccaggcggagggtgtacccactgccttgcactggccttctccctagagggccg

SEQ ID NO: 23768 - DNA, 3980 bp, Homo sapiens
  misc_feature 1..3980: note = ENST00000566244
  source 1..3980: mol_type = unassigned DNA; mol_type = unassigned DNA
caatactgatctcctttccctctctatggatgtatctattctggacatttcatataaatgggttcatacaataggtggtttcttttactttgtgtagtatttttgacgtttatccatgttttagcatgtggtggttcttccttttcttggcttagtaatattccattgtgtggatacatcatcttttgtttatccgttgcgcagtttgtagacactgggttgtttccacctttgggctgttgtgaacaatgctgctgtgaacctccgtgcacaaggattttcttggggacctgtttcttcctctcattcttgcctcctaccactctacccattaccatatttttccaaaccagacatcagcacactggctacgtgtgtgtttaggaaagcatctgtggagggaaacagcttgcctcatgctgcccctgcttcctgtctacccttctccaagcctttttcgtccgctgtcacctaggcttttggttaatcacatgttgagattaatcccattttgtctttgggtaattaacatgtgatgtccacgcattatctccacggtgaaagtcttaaggtcaacgtccctcttggggttctgtgtcccctgcagagccgggcacagcttggggcagctaagcagtcccctagttcctaggcccttgcttgccccatgccacctgtccactggtgactaaccctcctgcactctcccctgtcccccttgcagatgatgtgctgactaaagacgcgggtgagtgtgtgatctgcctggaggagctgctgcagggggacacgatagccaggctgccctgcctgtgcatctatcacaaaaggtaggaggggttggcaaggtagcttagtgcaccccacctcccagaggggcggacccccatctccagccattctgtctcctttggttatgggatgacctctcccccgacctctggctccgagcgggtaagggcagaggccatcagacaggtgtccactgtgccggcgggaaggtgcgagcatcccaagtgcagagcagagtggagttgccagaggtgtgctctggtttgagggctcaggtggtgggagctgatggggagacccgtagagcctcacaggttggaggagcttcggatcccactgggaaggttggttctccgtctgtctccctgcctcttcttcctctacgggtccctctgctccacaggggtagaacatcaatctgtgcgaggaaggccaggcggagggtgtacccactgccttgcactggccttctccctagagggccgggaggcaggaagagccatttcctgtggggccacagcactgggcacagttaaaagtagcagggcccagatatgccttgggactccagtgtgagcctcgtccttgtttccagctggaaggaaggcaccctcttgcccaagacaggacactgtgctgcctggggccagcacctgttgaatcctcgagcccagagcttcttcctgacactcaggcctttcaaagcctgactctcagggccactgctgcacagggtgacaaccgggcatggcacgcagtgtggctggtgcagaggaggcttaaggctggcctgggagagattcttggtctagctcccagcacggagccttgcttgtgtcccagggcggcactaaccagaaccagaaaaggaaatctttggccctcggggagaattatgccaattatctgtctggttcctgtctttgaaaatgcccagatgttggtttacaaatcaggaagctgtcttggggcaatctctgttccctctttgatgcagagagcctttctctgtaaacactggagagcagggcttcactgtctggctcccctcccgcctcttgcaggaaggactagatgctgctgatcagctgatcatggctgagccgggtagagcttggggctctcctaagaggtcacccactgggagggagcttcacagctgttcttttgacccaggaaggagctctttcaggactgtggcacccagagccgtggccctcctgccatgccattgttcccacttccctgcccttgggagtcttggagacagctgactagctgccctgaggggtccaccgctctcaccttctcactggtggctgctgccattctcctgggctctgcacagaaagctttggtccttctgaaagccactctgccccttcctgcagcaccagatccccctgagccggtactgctgcctccacctgggccaagactagtcttggtgttcacccttcttcgtgcttcagaaagtagggatatctggggacatgactgtgtttccctggggtcctttcagaagagacttaggaagctcctgctcaggaatctggccctctgaaagagccccttcaaagcagcctgggcagcaggtaacgtggtttcccttgcggccccctcctcccagctgcatagactcgtggtttgaagtgaacagatcttgtccggaacaccctgcggactgacctgcgggcttgcttgctgactcctctcaaaggtgagcccgcgtttgggggtgctccgggctcaaggcttggggtcaggtcactttgggggcctgcagtttagggagccgggctgcccttatgccactgagaagaaagcaggagcagagggaaggagcacctcatcagtgagcagttagtcatccggaaatgattttccctgggaaggacaagagatacaaaccaacatggacagttatgaagaacaggctcagaagagttaggatcagttggggaagagaccagtacaatctacattcctaaagaaagttcaggaatatcccctgggaatgtgcacgggcaggaaaaggagcctgagcggtgggtttgtgcctggcttggcctcatcctcgctcacctctgagtctccgcctcttctatggtaacggggataatctcactccctgttgccataaggacattgcacttactaaacagccatgggcagtgcattgttccctgcaaagtgctggtcagcgatcatttgaccactgcttcttcccatgccgcttccagatgaatctgaggcctccaggccagactcgatccctctatcccacagcactgggtgctgactccacacatccccctggcttaccgctgggtctggcctccccatttctcccccaggggtaccccacttgctgccaaccatccacccctgacccccatctcacctgtcccctccaagttctgggctggcattttcctttttctggcaaacaagtagacaaaacccccataaaaaccaaaagcccaactccatctcacagccaaaggttttgggacctttttcttcccccctccctttctctctctcttgctttcgttttcttttgttaggtttattttatttattccaagtaaactcccagaacagctgatgatgtcagacaaatcagggacatttgctctttttacctccacctcaaaaactgatgacaaggggagaagaaagagccaggggggagagtgaggcaggggagtagaacctgcccaggcacatggctgcaaattccccgtgtgctgtttggcttctggggtcctgtgtagacgccccagccccgcctgccctcttgggatgcagctgccctgggatgagcagacagccctcggcccgatggagcacgacttatttattacggtccacacagggacagagcgcccctgctccagggaggaggctcaccggaccctggggcagagctgagcttgggacaccagcgggaacagggcaccccttctgcactgacttccagatcatggttctcccttcctccctgaggacaccaaattggatgagagcaagtttgagagaagaatgaatcaactgctatccttcccctcacccctcagcccaggagggaaagggcattttctttttcatctttgaaaggcattgtgggtctgtctttaaagtgtttacaaaaaaaaattatataaaaaaaaagtctagtgtcg

SEQ ID NO: 23769 - DNA, 964 bp, Homo sapiens
  misc_feature 1..964: note = ENST00000568351
  source 1..964: mol_type = unassigned DNA; mol_type = unassigned DNA
atgatgtgctgactaaagacgcgggtgagtgtgtgatctgcctggaggagctgctgcagggggacacgatagccaggctgccctgcctgtgcatctatcacaaaagggacagagcgcccctgctccagggaggaggctcaccggaccctggggcagagctgagcttgggacaccagcgggaacagggcaccccttctgcactgacttccagatcatggttctcccttcctccctgaggacaccaaattggatgagagcaagtttgagagaagaatgaatcaactgctatccttcccctcacccctcagcccaggagggaaagggcattttctttttcatctttgaaaggcattgtgggtctgtctttaaagtgtttacaaaaaaaaattatataaaaaaaaagtctagtgtcgactggtgttttccctcgtgatgtttacagcttgctgtttgctgcccagccataacccactcagtgacagacgaacacagctaaggcctcgctgccagccttctgacggcgggcgagcacacggtctcttcccctgccccaactggccctctccaccaccaacttctctactttgggtttgtttggttttttccctctatttttctggctggttttttgctcttttctccccttgagaccctaatatcttgacttcattgccaaaaaacaacccattgagaactttcttcctactgatcccatctcttttcccttctttcctcctggttccggtcagttcagaggatttaacaatcacaagtgtcctgcaaaaatgcctgaacattattcttaggccctcgtggattttttttttcagaaaacttaaacaaaaaaagacttactaagaaatatgtacagctacccctgttttcaggcactatgtttgagaacattttagccattgatgttcacacgtggcatcagcccatgcaagataggtttctgtattta

SEQ ID NO: 23770 - DNA, 2046 bp, Homo sapiens
  misc_feature 1..2046: note = ENST00000568494
  source 1..2046: mol_type = unassigned DNA; mol_type = unassigned DNA
aaagacgcgggtgagtgtgtgatctgcctggaggagctgctgcagggggacacgatagccaggctgccctgcctgtgcatctatcacaaaaggtaggaggggttggcaaggtagcttagtgcaccccacctcccagaggggcggacccccatctccagccattctgtctcctttggttatgggatgacctctcccccgacctctggctccgagcgggtaagggcagaggccatcagacaggtgtccactgtgccggcgggaaggtgcgagcatcccaagtgcagagcagagtggagttgccagaggtgtgctctggtttgagggctcaggtggtgggagctgatggggagacccgtagagcctcacaggttggaggagcttcggatcccactgggaaggttggttctccgtctgtctccctgcctcttcttcctctacgggtccctctgctccacaggggtagaacatcaatctgtgcgaggaaggccaggcggagggtgtacccactgccttgcactggccttctccctagagggccgggaggcaggaagagccatttcctgtggggccacagcactgggcacagttaaaagtagcagggcccagatatgccttgggactccagtgtgagcctcgtccttgtttccagctggaaggaaggcaccctcttgcccaagacaggacactgtgctgcctggggccagcacctgttgaatcctcgagcccagagcttcttcctgacactcaggcctttcaaagcctgactctcagggccactgctgcacagggtgacaaccgggcatggcacgcagtgtggctggtgcagaggaggcttaaggctggcctgggagagattcttggtctagctcccagcacggagccttgcttgtgtcccagggcggcactaaccagaaccagaaaaggaaatctttggccctcggggagaattatgccaattatctgtctggttcctgtctttgaaaatgcccagatgttggtttacaaatcaggaagctgtcttggggcaatctctgttccctctttgatgcagagagcctttctctgtaaacactggagagcagggcttcactgtctggctcccctcccgcctcttgcaggaaggactagatgctgctgatcagctgatcatggctgagccgggtagagcttggggctctcctaagaggtcacccactgggagggagcttcacagctgttcttttgacccaggaaggagctctttcaggactgtggcacccagagccgtggccctcctgccatgccattgttcccacttccctgcccttgggagtcttggagacagctgactagctgccctgaggggtccaccgctctcaccttctcactggtggctgctgccattctcctgggctctgcacagaaagctttggtccttctgaaagccactctgccccttcctgcagcaccagatccccctgagccggtactgctgcctccacctgggccaagactagtcttggtgttcacccttcttcgtgcttcagaaagtagggatatctggggacatgactgtgtttccctggggtcctttcagaagagacttaggaagctcctgctcaggaatctggccctctgaaagagccccttcaaagcagcctgggcagcaggtaacgtggtttcccttgcggccccctcctcccagctgcatagactcgtggtttgaagtgaacagatcttgtccggaacaccctgcggactgacctgcgggcttgcttgctgactcctctcaaagggacagagcgcccctgctccagggaggaggctcaccggaccctggggcagagctgagcttgggacaccagcgggaacagggcaccccttctgcactgacttccagatcatggttctcccttcctccctgaggacaccaaattggatgagagcaagtttgagagaagaatgaatcaactgctatccttcccctcacccctcagcccaggagggaaagggcattttctttttcatctttgaaaggcattgtgggtctgtctttaaagtgtttac

SEQ ID NO: 23771 - DNA, 5331 bp, Homo sapiens
  misc_feature 1..5331: note = ENST00000568844
  source 1..5331: mol_type = unassigned DNA; mol_type = unassigned DNA
gttaaaagtagcagggcccagatatgccttgggactccagtgtgagcctcgtccttgtttccagctggaaggaaggcaccctcttgcccaagacaggacactgtgctgcctggggccagcacctgttgaatcctcgagcccagagcttcttcctgacactcaggcctttcaaagcctgactctcagggccactgctgcacagggtgacaaccgggcatggcacgcagtgtggctggtgcagaggaggcttaaggctggcctgggagagattcttggtctagctcccagcacggagccttgcttgtgtcccagggcggcactaaccagaaccagaaaaggaaatctttggccctcggggagaattatgccaattatctgtctggttcctgtctttgaaaatgcccagatgttggtttacaaatcaggaagctgtcttggggcaatctctgttccctctttgatgcagagagcctttctctgtaaacactggagagcagggcttcactgtctggctcccctcccgcctcttgcaggaaggactagatgctgctgatcagctgatcatggctgagccgggtagagcttggggctctcctaagaggtcacccactgggagggagcttcacagctgttcttttgacccaggaaggagctctttcaggactgtggcacccagagccgtggccctcctgccatgccattgttcccacttccctgcccttgggagtcttggagacagctgactagctgccctgaggggtccaccgctctcaccttctcactggtggctgctgccattctcctgggctctgcacagaaagctttggtccttctgaaagccactctgccccttcctgcagcaccagatccccctgagccggtactgctgcctccacctgggccaagactagtcttggtgttcacccttcttcgtgcttcagaaagtagggatatctggggacatgactgtgtttccctggggtcctttcagaagagacttaggaagctcctgctcaggaatctggccctctgaaagagccccttcaaagcagcctgggcagcaggtaacgtggtttcccttgcggccccctcctcccagctgcatagactcgtggtttgaagtgaacagatcttgtccggaacaccctgcggactgacctgcgggcttgcttgctgactcctctcaaaggtgagcccgcgtttgggggtgctccgggctcaaggcttggggtcaggtcactttgggggcctgcagtttagggagccgggctgcccttatgccactgagaagaaagcaggagcagagggaaggagcacctcatcagtgagcagttagtcatccggaaatgattttccctgggaaggacaagagatacaaaccaacatggacagttatgaagaacaggctcagaagagttaggatcagttggggaagagaccagtacaatctacattcctaaagaaagttcaggaatatcccctgggaatgtgcacgggcaggaaaaggagcctgagcggtgggtttgtgcctggcttggcctcatcctcgctcacctctgagtctccgcctcttctatggtaacggggataatctcactccctgttgccataaggacattgcacttactaaacagccatgggcagtgcattgttccctgcaaagtgctggtcagcgatcatttgaccactgcttcttcccatgccgcttccagatgaatctgaggcctccaggccagactcgatccctctatcccacagcactgggtgctgactccacacatccccctggcttaccgctgggtctggcctccccatttctcccccaggggtaccccacttgctgccaaccatccacccctgacccccatctcacctgtcccctccaagttctgggctggcattttcctttttctggcaaacaagtagacaaaacccccataaaaaccaaaagcccaactccatctcacagccaaaggttttgggacctttttcttcccccctccctttctctctctcttgctttcgttttcttttgttaggtttattttatttattccaagtaaactcccagaacagctgatgatgtcagacaaatcagggacatttgctctttttacctccacctcaaaaactgatgacaaggggagaagaaagagccaggggggagagtgaggcaggggagtagaacctgcccaggcacatggctgcaaattccccgtgtgctgtttggcttctggggtcctgtgtagacgccccagccccgcctgccctcttgggatgcagctgccctgggatgagcagacagccctcggcccgatggagcacgacttatttattacggtccacacagggacagagcgcccctgctccagggaggaggctcaccggaccctggggcagagctgagcttgggacaccagcgggaacagggcaccccttctgcactgacttccagatcatggttctcccttcctccctgaggacaccaaattggatgagagcaagtttgagagaagaatgaatcaactgctatccttcccctcacccctcagcccaggagggaaagggcattttctttttcatctttgaaaggcattgtgggtctgtctttaaagtgtttacaaaaaaaaattatataaaaaaaaagtctagtgtcgactggtgttttccctcgtgatgtttacagcttgctgtttgctgcccagccataacccactcagtgacagacgaacacagctaaggcctcgctgccagccttctgacggcgggcgagcacacggtctcttcccctgccccaactggccctctccaccaccaacttctctactttgggtttgtttggttttttccctctatttttctggctggttttttgctcttttctccccttgagaccctaatatcttgacttcattgccaaaaaacaacccattgagaactttcttcctactgatcccatctcttttcccttctttcctcctggttccggtcagttcagaggatttaacaatcacaagtgtcctgcaaaaatgcctgaacattattcttaggccctcgtggattttttttttcagaaaacttaaacaaaaaaagacttactaagaaatatgtacagctacccctgttttcaggcactatgtttgagaacattttagccattgatgttcacacgtggcatcagcccatgcaagataggtttctgtatttatatattaaaatacaaaaaaaaacttataaaatgtttaaaaaaatgttcaaagcttgggagaaaagctttcttcattagtcaaggtgttttgatatggtattaaaatgtctaataaaagatggcactgcgtgattttattttaatgaagtgttatacaatcaagaaatgggggcaagggcctgccccccactccctcacctacctccttagcattccttcaggctgctactcggggctccaggtgtgtgaattggtcctcagatagtcaggcctgggtggagggagtggcaagtcaggcgtgcctcctacaagcttcctaacctcttaagcatcatggaaccagtcagccctctgtggagtcattgtgctggacctctgaaaagatctgcaggggccaagatgttgcagccaccggaggctgcaaggatgtgggttcttccaggtgtgggcccagcccccctccttccagcctttgctccccatcccacgttccactcgccctgcctgttgttcagtttgcgtctcagtgctgactcacgggcatgcttcattgaggcccaggaagaggccctggtttggggctgtgccagctcagagcccttgaaccagaaccaactgctcaggctcacaaaagttggcaaaatgcgggctgggcaggcagctcggggcagggagcagcagtgcaggcctggcctgtgtccccgtgcccagcgggctcccggagcagcattccagagcctcctgcagagccagcgaaggaaagctctagagggagacgactccaccgcctctctgctctgacccttctcaggcccgcctgatgtgctggaccatccccctgctgccacggcccctggctccgcagtcaccctccatcagatgcttccagaagcacctactctgtgcaagggcattcacaacaggccagtgggcaaacgtgagccagggccagcggagaaacactaaagaagactcggtggttcagagcctgggtctcagcgcgggacccgtctggggtgaagaccttggggctgttgtgagtcggtggcaggaacgtgggctctagactgtgcattcaggctctcctacttggcagaatgatcttggggaaacgacttcatctgaacttcagatatttcacatgtgaagcggggacaaaaccatgcagctcagaggtccctgtgggggctgggggagctgccctgcaggtcttggcacatgcacagcaggctccccatagctttgtcaccacaaagggcactgttctattcacagcacctcctgcttctgcctggcaactgtgtctccctgtgctatatttaattccaccagcaaagctggcgaggcagggcccagccctgaaggagatctccttgcctgacccctggacctggaaatggaggcttcatgtgcccgccttggcggcttaagcctgctgctttggcagtgccatgggtgagccgagcagctgtgaggtgggtggggcagggctgtagcccacgccgggtgctattccaggctctaggggctggtgctcatccccacccccagcgacttccgtcctacctggcatgctgcagccctctgccggctgtggtgtcctctgaatttggacccaggttgcctgctcttgttgtgggggtgggattggggctgtctgtgtttcccaggtggagctcatgtttgtgatcctctatctggacagctctccagaatcctgtgttgcccctgttctgcctttctgggatgggagagaaggtgagggagccggcgagcaggttctaccctctctgctaagggcctagcacactttgatgaggttcctggacgtgagaccctcacaaagaccaaccattcctctaatagccatttaacggtactgcagttcatgggaaaatgtcctcattcttaggagatagatgctggattatataggtgaatgccttcaagaaatgtgtaatttaattccaaatagttccccccaaaatacacaaagcaaataaggccaaaatgttcattgttgaatctgcagtggctggtatttcagtgaacagtgtacttgttctttcaacttttctgtatgtttggaatttttcttaataaaagattgtgggaaatggtca

SEQ ID NO: 23772 - DNA, 2241 bp, Homo sapiens
  misc_feature 1..2241: note = ENST00000574091
  source 1..2241: mol_type = unassigned DNA; mol_type = unassigned DNA
atggcgtgcaggcagagaggaggctcttggagtccctcaggctggttcaatgcaggctggagcacctacaggtcgatttctctcttcttcgcccttgtgacttcagggaactccatagatgtttctcagttggtaaatcctgcctttccaggcactgtcacttgcgatgaaagggaaataacagtggagttcccaagcagtcctggcaccaagaaatggcatgcatctgtggtggatcctcttggtctcgacatgccgaactgcacttacatcctggacccagaaaagctcaccctgagggctacctatgataactgtaccaggagagtgcatggtggacaccagatgaccatcagagtcatgaacaacagtgctgccttaagacacggagctgtcatgtatcagttcttctgtccagctatgcaagtagaagagacccaggggctttcagcatctacaatctgccagaaggatttcatgtctttttccttgccacgggtcttctctggcttggctgacgacagtaaggggaccaaagttcagatgggatggagcattgaggttggtgatggtgcaagagccaaaactctgaccctgccagaggccatgaaggaaggcttcagcctcttgattgacaaccacaggatgaccttccatgtgccattcaatgccactggagtgactcactatgtgcaaggtaacagtcatctctacatggtgtctctgaagcttacatttatatctcctggacagaaggtgatcttctcttcacaagctatttgtgcaccagatcctgtgacctgcaatgccacacacatgactctcaccataccagagtttcctgggaagcttaagtctgtgagctttgaaaaccagaacattgatgtgagccagctgcatgacaatggaattgatctagaagcaacaaatggcatgaaattgcatttcagcaaaactctgctcaaaacgaaattatctgaaaaatgcctactccatcagttctacttagcttcactcaagctgacctttctccttcggccagagacagtatccatggtgatctatcctgagtgtctctgtgagtcacccgtttctatagttacaggggagctgtgcacccaggatgggtttatggacgtcgaggtctacagctaccaaacacaaccagctcttgacctgggtactctgagggtgggaaactcatcctgccagcctgtctttgaggctcagtctcaggggctggtacggttccacatacccctgaatggatgtggaacgagatataagttcgaagatgataaagtcgtctatgaaaacgaaatacatgctctctggacggattttcctccaagcaaaatatctagagacagtgagttcaggaatgacatgctactaaacatcaacgttgaaagccttactcctccagtggcctcagtgaagttgggtccatttaccttgatcctgcaaagctacccagataattcctaccaacaaccttatggggaaaacgagtaccctctagtgagattcctccgccaaccaatttacatggaagtgagagtcctaaacagggatgaccccaacatcaagctggtcttagatgactgctgggcgacgtccaccatggatccagactctttcccccagtggaacgttgtcgtggatggctgtgcatatgacctggacaactaccagaccaccttccatccagtcggctcctctgtgacccatcctgatcactatcagaggtttgacatgaaggcttttgcctttgtatcagaagcccacgtgctctctagcctggtctacttccactgcagtgccttaatctgtaatcgactctcccctgactccccactgtgttctgtgacctgccctgtgtcctctaggcacaggcgagccacaggggccactgaagcagagaaaatgacagtcagcctcccaggacccattctcctgttgtcagatgactcctcattcagaggtgtcggctcatctgatctaaaagcaagtgggagcagtggggagaagagtaggagtgaaacaggggaggaggttggctcacgaggtgctatggacaccaaagggcacaagactgctggagatgttggttccaaagctgtggctgctgtggctgcctttgcaggtgtggtggcaactctaggcttcatctactacctgtacgagaaaaggactgtgtcaaatcactaaatgggcttctaaataaagcagtcaaaataa

SEQ ID NO: 23773 - DNA, 2749 bp, Homo sapiens
  misc_feature 1..2749: note = ENST00000574002
  source 1..2749: mol_type = unassigned DNA; mol_type = unassigned DNA
gtgtgatgttcccctccctgtgtccatgtgttctcattgttcagctcccacttataagtgagaacagaatgttaagaatcatttttgtaataactttagtttttcctacctcctgataggagacactgttttacggagcagctatttcttcctgtgttcaaagtcagttgctgaacagatggtagcttcctgcttttccggagcagaatcctagacatggatgctcctgggcccagagccatttgttcggtggctgtccccagcacaccacaggtctgggttagggcagctggcagaatacccggcgcaagctgtcaggaatcagaggccacttccttccccaatccttccgtttcagctgggagaatgggacaagattcaggtgcccccaatggggagagggtgtggatgcggctggcttcctgctataaaaacacagagcagcctaccctctacctggttgatctggtagtgtcttctgctatggcgtgcaggcagagaggaggctcttggagtccctcaggctggttcaatgcaggctggagcacctacaggtcgatttctctcttcttcgcccttgtgacttcagggaactccatagatgtttctcagttggtaaatcctgcctttccaggcactgtcacttgcgatgaaagggaaataacagtggagttcccaagcagtcctggcaccaagaaatggcatgcatctgtggtggatcctcttggtctcgacatgccgaactgcacttacatcctggacccagaaaagctcaccctgagggctacctatgataactgtaccaggagagtgcatggtggacaccagatgaccatcagagtcatgaacaacagtgctgccttaagacacggagctgtcatgtatcagttcttctgtccagctatgcaagtagaagagacccaggggctttcagcatctacaatctgccagaaggatttcatgtctttttccttgccacgggtcttctctggcttggctgacgacagtaaggggaccaaagttcagatgggatggagcattgaggttggtgatggtgcaagagccaaaactctgaccctgccagaggccatgaaggaaggcttcagcctcttgattgacaaccacaggatgaccttccatgtgccattcaatgccactggagtgactcactatgtgcaaggtaacagtcatctctacatggtgtctctgaagcttacatttatatctcctggacagaaggtgatcttctcttcacaagctatttgtgcaccagatcctgtgacctgcaatgccacacacatgactctcaccataccagagtttcctgggaagcttaagtctgtgagctttgaaaaccagaacattgatgtgagccagctgcatgacaatggaattgatctagaagcaacaaatggcatgaaattgcatttcagcaaaactctgctcaaaacgaaattatctgaaaaatgcctactccatcagttctacttagcttcactcaagctgacctttctccttcggccagagacagtatccatggtgatctatcctgagtgtctctgtgagtcacccgtttctatagttacaggggagctgtgcacccaggatgggtttatggacgtcgaggtctacagctaccaaacacaaccagctcttgacctgggtactctgagggtgggaaactcatcctgccagcctgtctttgaggctcagtctcaggggctggtacggttccacatacccctgaatggatgtggaacgagatataagttcgaagatgataaagtcgtctatgaaaacgaaatacatgctctctggacggattttcctccaagcaaaatatctagagacagtgagttcagaatgacagtgaagtgttcttatagcaggaatgacatgctactaaacatcaacgttgaaagccttactcctccagtggcctcagtgaagttgggtccatttaccttgatcctgcaaagctacccagataattcctaccaacaaccttatggggaaaacgagtaccctctagtgagattcctccgccaaccaatttacatggaagtgagagtcctaaacagggatgaccccaacatcaagctggtcttagatgactgctgggcgacgtccaccatggatccagactctttcccccagtggaacgttgtcgtggatggctgtgcatatgacctggacaactaccagaccaccttccatccagtcggctcctctgtgacccatcctgatcactatcagaggtttgacatgaaggcttttgcctttgtatcagaagcccacgtgctctctagcctggtctacttccactgcagtgccttaatctgtaatcgactctcccctgactccccactgtgttctgtgacctgccctgtgtcctctaggcacaggcgagccacaggggccactgaagcagagaaaatgacagtcagcctcccaggacccattctcctgttgtcagatgactcctcattcagaggtgtcggctcatctgatctaaaagcaagtgggagcagtggggagaagagtaggagtgaaacaggggaggaggttggctcacgaggtgctatggacaccaaagggcacaagactgctggagatgttggttccaaagctgtggctgctgtggctgcctttgcaggtgtggtggcaactctaggcttcatctactacctgtacgagaaaaggactgtgtcaaatcactaaatgggcttctaaataaagcagtcaaaat

SEQ ID NO: 23774 - DNA, 411 bp, Homo sapiens
  misc_feature 1..411: note = ENST00000573114
  source 1..411: mol_type = unassigned DNA; mol_type = unassigned DNA
acaggggagctgtgcacccaggatgggtttatggacgtcgaggtctacagctaccaaacacaaccagctcttgacctgggtactctgagggtgggaaactcatcctgccagcctgtctttgaggctcagtctcaggggctggtacggttccacatacccctgaatggatgtggaacgagatataaggttagtactggcagatggcacgaggttaagtctcatctttgacataactggctgctaacccactttctctgacatttaagttcgaagatgataaagtcgtctatgaaaacgaaatacatgctctctggacggattttcctccaagcaaaatatctagagacagtgagttcagaatgacagtgaagtgttcttatagcaggaatgacatgctactaaacatcaacg

SEQ ID NO: 23775 - DNA, 1238 bp, Homo sapiens
  misc_feature 1..1238: note = ENST00000576162
  source 1..1238: mol_type = unassigned DNA; mol_type = unassigned DNA
ctggttgatctggtagtgtcttctgctatggcgtgcaggcagagaggaggctcttggagtccctcaggctggttcaatgcaggctggagcacctacaggtcgatttctctcttcttcgcccttgtgacttcagggaactccatagatgtttctcagttggtaaatcctgcctttccaggcactgtcacttgcgatgaaagggaaataacagtggagttcccaagcagtcctggcaccaagaaatggcatgcatctgtggtggatcctcttggtctcgacatgccgaactgcacttacatcctggacccagaaaagctcaccctgagggctacctatgataactgtaccaggagagtgcatggtggacaccagatgaccatcagagtcatgaacaacagtgctgccttaagacacggagctgtcatgtatcagttcttctgtccagctatgcaagtagaagagacccaggggctttcagcatctacaatctgccagaaggatttcatgtctttttccttgccacgggtcttctctggcttggctgacgacagtaaggggaccaaagttcagatgggatggagcattgaggttggtgatggtgcaagagccaaaactctgaccctgccagaggccatgaaggaaggcttcagcctcttgattgacaaccacaggatgaccttccatgtgccattcaatgccactggagtgactcactatgtgcaaggtaacagtcatctctacatggtgtctctgaagcttacatttatatctcctggacagaaggtgatcttctcttcacaagctatttgtgcaccagatcctgtgacctgcaatgccacacacatgactctcaccataccagagtttcctgggaagcttaagtctgtgagctttgaaaaccagaacattgatgtgagccagctgcatgacaatggaattgatctagaagcaacaaatggcatgaaattgcatttcagcaaaactctgctcaaaacgaaagtatgttcaattgtcaaccactgaactccaccgggtcctgacttgaagtatactcttgtgggtagtcctcatacggctgataacttgcccgtgagctctaattgccaacataacagattcaaactccaaaaggcctcatttgatcatcttgtataagtgaaatatcaagtaactaaagttcattctctaacacaaaacctctttaacttctgtcatgaaaaatcgtctaagtctttcta

SEQ ID NO: 23776 - DNA, 942 bp, Homo sapiens
  misc_feature 1..942: note = ENST00000572752
  source 1..942: mol_type = unassigned DNA; mol_type = unassigned DNA
gtgtcttctgctatggcgtgcaggcagagaggaggctcttggagtccctcaggctggttcaatgcaggctggagcacctacaggtcgatttctctcttcttcgcccttgtgacttcagggaactccatagatgtttctcagttggtaaatcctgcctttccaggcactgtcacttgcgatgaaagggaaataacagtggagttcccaagcagtcctggcaccaagaaatggcatgcatctgtggtgggtaggtaacgtgtgttatctcctcatagtcctgattagcagacagcctttggcttaggtcaatcctgtttggggagcagagtacccaaactcctgcagcaacggcatccaactcccatgatgccatggggatacctgatttgcatgaagccacccagcatggaagacctgtctgtcttcgaaagtgtgtcttatgccagcatctctgggaagcctctggctgcaagtcataccatctcaaagctcaagttctatcactgagttggggcggaagtgaagggactgaagtaccttagaaatggactggtggtcttgactctatagctttggactgtcactgaaatgtactcagccatcctgtctaacctgctctggccttggcagatcctcttggtctcgacatgccgaactgcacttacatcctggacccagaaaagctcaccctgagggctacctatgataactgtaccaggagagtgcatggtggacaccagatgaccatcagagtcatgaacaacagtgctgccttaagacacggagctgtcatgtatcagttcttctgtccagctatgcaagtagaagagacccaggggctttcagcatctacaatctgccagaaggatttcatgtctttttccttgccacgggtcttctctggcttggctgacgacagtaaggggaccaaagttcagatgg

SEQ ID NO: 23777 - DNA, 2241 bp, Homo sapiens; identical to SEQ ID NO: 23772
  misc_feature 1..2241: note = ENST00000640487
  source 1..2241: mol_type = unassigned DNA; mol_type = unassigned DNA

SEQ ID NO: 23778 - DNA, 2749 bp, Homo sapiens; identical to SEQ ID NO: 23773
  misc_feature 1..2749: note = ENST00000638300
  source 1..2749: mol_type = unassigned DNA; mol_type = unassigned DNA

SEQ ID NO: 23779 - DNA, 411 bp, Homo sapiens; identical to SEQ ID NO: 23774
  misc_feature 1..411: note = ENST00000639836
  source 1..411: mol_type = unassigned DNA; mol_type = unassigned DNA

SEQ ID NO: 23780 - DNA, 1238 bp, Homo sapiens; identical to SEQ ID NO: 23775
  misc_feature 1..1238: note = ENST00000640213
  source 1..1238: mol_type = unassigned DNA; mol_type = unassigned DNA

SEQ ID NO: 23781 - DNA, 942 bp, Homo sapiens; identical to SEQ ID NO: 23776
  misc_feature 1..942: note = ENST00000640539
  source 1..942: mol_type = unassigned DNA; mol_type = unassigned DNA

SEQ ID NO: 23782 - DNA, 5595 bp, Homo sapiens
  misc_feature 1..5595: note = ENST00000396976
  source 1..5595: mol_type = unassigned DNA; mol_type = unassigned DNA
agtgccatctttctctgccctaggaagaaacacctcttacagtcatctgcaggggattctccaaggacatgggaagatagatgtaagccctggaacccagactcctaagcgaagggaagctgcattctgctattaatgatggccaaatcagctctaagagagaatggcactaactctgagaccttccgacagcgtttcaggagattccattaccaggaggtggctgggccgcgggaggctttcagccaactctgggaactttgctgtcggtggctaaggccggaggtgcgcaccaaggagcagattgtagaactgttggtgctagagcagttcctgaccgtcttacctggggagatccagaattgggtacaggaacaatgtccagaaaatggagaggaggcagtgactctcgtggaagatttagaaagagagcctggaagacctagatcttcggtcacagtctctgtgaaggggcaggaagtgcgcttggagaagatgacacccccgaaatcatcacaagagttattaagtgttcggcaggagtcagtggaaccccagcccaggggtgtacccaagaaagagagggcaagaagcccagacctgggaccacaggagcagatgaacccaaaggagaagctcaaaccttttcaaaggagcggattgccatttcctaaatccggtgtggtctccaggttggagcaaggagagccatggatcccagatctgctgggctctaaggagaaagaacttccaagtggcagccacataggagacagacgagtgcatgctgatctgttaccatccaagaaagatagaagaagctgggtggaacaggatcactggagctttgaagatgagaaggtggcaggtgtgcactggggctatgaagagaccagaacgctcctcgcaattctcagccagactgagttttatgaggctctcagaaactgccataggaacagccaagtgtatggggctgtggctgagcggctcagggaatatggcttcctccggaccctggaacagtgtcggaccaagttcaaaggtctccagaagagctatcggaaagtcaagagcggccacccacctgagacctgccccttctttgaagagatggaagccctgatgagtgctcaggtcattgccctgcccagtaatggcctggaagcagcagcctctcactctggcctggtaggcagcgatgctgagactgaagagccagggcagaggggctggcagcatgaggagggagcagaagaggctgtggctcaggagtctgacagtgatgacatggatctagaggcgaccccccaggaccccaactcagctgcacctgttgtgttcagaagcccaggtggtgtacactggggctatgaagagaccaagacttaccttgcaattcttagtgagacccagttttatgaagccctccggaactgtcaccgcaacagccagctgtatggagcagtggctgagaggttatgggaatatggctttcttaggaccccagaacagtgtcggaccaagtttaaaagcctgcaaaccagctatcggaaagttaagaatggccaggcaccagagacctgtcccttctttgaagagatggatgctttggtgagtgtccgggttgctgccccacccaatgatggccaggaagagactgcttcttgccccgtccaggggaccagtgaggctgaagctcagaagcaagctgaggaagcagacgaggccacagaggaagattctgatgatgatgaagaggatactgagatacccccaggggctgtcataacccgtgctccagtgttattccaaagcccccgtggttttgaagctggatttgagaatgaagataattcaaaacgggatatttctgaggaagtacaactgcataggacattacttgcaagatctgaaaggaaaattccccggtatcttcatcagggtaaaggcaatgagagtgactgtagatcaggaagacagtgggcaaagacctcaggggagaaaagaggaaaactgacactcccggagaagagcttaagtgaagtcctaagtcaacagagaccttgcttgggagagagaccctataaatatctcaaatacagcaaaagctttggtccaaactcccttctcatgcatcaggtatcccaccaggtggaaaatccatataaatgtgctgattgtgggaaaagcttcagtcggagtgcacgactcattagacaccggagaatccacactggagagaaaccttataaatgtcttgactgtggaaaaagtttccgtgacagttcaaatttcatcacccataggagaatccacacaggagagaaaccttatcaatgtggtgagtgtgggaaatgcttcaatcagagctcaagccttatcattcaccagagaacccacacaggagaaaagccctatcaatgtgaagagtgtggaaaaagcttcaataacagttctcattttagtgcacatcggaggatacacacaggagagagaccccatgtgtgtcctgactgtggaaagagtttcagtaagagttctgacttacgtgcacatcatagaacccacacaggagagaaaccctatgggtgtcatgactgtggtaagtgcttcagtaaaagctctgcccttaataagcacggagaaatccatgcacgggaaaagcttctgacacagtcagctcccaagtaagcccctgaggatatataacggaaagaggctcaataaatgtattgtttagaaagtcttccaatagtgagattcatctactattctgtgtccagttagcttaggaaattcactttaggatttatgccactgtttgttccttgtttttcctgatctagactcaaatccccaaggcagtctaaagaatgaaaggaagatttcagtccctctctttgcctgcatctgaattgatggataacatcttttccctctcagtgcctatggtgttcccttaatataagcacagaggacaaggtaatagatcctatgaatttgataagcatccttctttactcattctgtcattcagctgcattttgacaggaaaaacccattacatttcgagaagaagttatgagactttgcccattaggtgggtctagctcttttttttttttttggagacggagttttgctcttgttgcccaggctggagtgcaatggcacgatctcagctcactgcaacctctgcttcccgggttcaagtgattctcctgcctcagcctcccaagtggctggaattacaagcatgcgccaccatgcccagctaattttatatttttagtagagatggggtttctccatgttgggcaggctggtctcaaactcccgacctcaggtgatctgcctgcctcggcctcccaaagtgctgggattacaggcatgagccactgcgccgggcttttttttttcgagatggagtctcactctgtcgtccaggctggagtgcagtggcatgatctcagctcactgcaacctctgccttctgggttcaaacaattttcctgcctcagcctcctgagtagctgggattacagccacctgccaccataccaggctaaattttgcatttttagtagagatggggtttcaccatgttggccaggctggttttgaattgacctcatgatctgcctgcctaggtctcccaaagtgctgggattacaggtgtgagccactgcacccggcccagctcttctttatacaataatggaaatgctaaaatgaatgactcttcctgctcacttaaacctgtgctcaaaatgacatatttgtcaggcaccctcttcatttaccttaaagaaggagagtttaatgtccatcttggttctgccctatgaatcatcttgtcaagaacaggtgttcttatgcagaaacaatgaaaaccttatactgaagtgtgaaccctggatttcttagtttcttctgagtcctagaagaagggttggaatagaataatacatttacaggatttaggttggttttctttctgtccagtctcatctgaatttcgtctgtctcttgtggtccagaagttccacagagcaacgcagctgcatgtggtgacaggtagagcagttaaagctgccaataggaactcgtccatattccacacacctggtatagtgttatgccctccatgggcacttacctgcaataagcagaagccactgccacattcccgtgtattgggaaaatggactactgtgtgcgaacaggccctttaccctaatggcagggaagatggattatctttggccagtggagctgccaatctagacatacacattcaactgaatacaattaaaagcagttctttaaatgcaaatataattactcatctttataatacaatagtattaactgcccatatgctcatagtatgatgagccctgtatagcacaaggtcaacaggtcctctccttgtccttacaatctaaagcagatgacactgacatggacaaacaagtgcacatgcatagttgcggcagttttagagaaatctagaaagctaggtagcaacactatgcataaatgttgtggtccaatgcattagtttgctttaacaaaaatctgggaggtattttttctctttattcaggaaggcttcatgaagcaggaagtggtcaaaggagggaaggttactggttaaattatgataggaagaactttccataactagttgcaaaattgagtgctgggtgggttgaggaatgggaaaaagggggagcaaggtgttttgtgtagatggaacaaagggcaaaggatagactgtaaggaaggccagataaagcttggagtagcatgagaacttgaggaatagtatgatatgggctgtgcagcaggcagagagaatcaccttagctgaaacatgggtgttaggagcagaccatgaggtggtagaaccatcatctatagtaaatcaggtactacgctataactattgataaggaaacagctgactgccactgaaagaataagcagttttaggggactagctcctatgggagataaaggtcagaaatcgtagtatctgatgaagatattttgatgagcaggtgagaagaaagataaacatggccagatggccaaggactgggataagtagccgtttcacattcaattagaattctgtggctggaataagatcagggagagcagtaggaagatatagtattctataattcatagcttgttgtgttagagattaattaggattctgctgttgaatcttagtacaaaaaaatctaatatttattaggaattaagggaagatggtacttctgttatgttgcctaagcagacaggaagctacaagaaacaccagtctgaagcagtgcctcaggatctcagatgatttaggaagtgtgctgtaatgtcaaaaaaaaaaaaaagtattgtctttagtatatctatgtatagtctcgtgggaaaagcattggttgtggtatcaacagatattctggttccagatgtcttgtaagttaacctgcctccatttccctttctgtaaagcaaaataatgtttacacctaatctgtctctcagggataccatattaataaaaatcatgtctataaagtg

SEQ ID NO: 23783 - DNA, 2834 bp, Homo sapiens
  misc_feature 1..2834: note = ENST00000566849
  source 1..2834: mol_type = unassigned DNA; mol_type = unassigned DNA
gtattccttctgatagtgccatctttctctgccctaggaagaaacacctcttacagtcatctgcaggggattctccaaggacatgggaagatagatgtaagccctggaacccagactcctaagcgaagggaagctgcattctgctattaatgatggccaaatcagctctaagagagaatggcactaactctgagaccttccgacagcgtttcaggagattccattaccaggaggtggctgggccgcgggaggctttcagccaactctgggaactttgctgtcggtggctaaggccggaggtgcgcaccaaggagcagattgtagaactgttggtgctagagcagttcctgaccgtcttacctggggagatccagaattgggtacaggaacaatgtccagaaaatggagaggaggcagtgactctcgtggaagatttagaaagagagcctggaagacctagatcttcggtcacagtctctgtgaaggggcaggaagtgcgcttggagaagatgacacccccgaaatcatcacaagagttattaagtgttcggcaggagtcagtggaaccccagcccaggggtgtacccaagaaagagagggcaagaagcccagacctgggaccacaggagcagatgaacccaaaggagaagctcaaaccttttcaaaggagcggttggagcaaggagagccatggatcccagatctgctgggctctaaggagaaagaacttccaagtggcagccacataggagacagacgagtgcatgctgatctgttaccatccaagaaagatagaagaagctgggtggaacaggatcactggagctttgaagatgagaaggtggcaggtgtgcactggggctatgaagagaccagaacgctcctcgcaattctcagccagactgagttttatgaggctctcagaaactgccataggaacagccaagtgtatggggctgtggctgagcggctcagggaatatggcttcctccggaccctggaacagtgtcggaccaagttcaaaggtctccagaagagctatcggaaagtcaagagcggccacccacctgagacctgccccttctttgaagagatggaagccctgatgagtgctcaggtcattgccctgcccagtaatggcctggaagcagcagcctctcactctggcctggtaggcagcgatgctgagactgaagagccagggcagaggggctggcagcatgaggagggagcagaagaggctgtggctcaggagtctgacagtgatgacatggatctagaggcgaccccccaggaccccaactcagctgcacctgttgtgttcagaagcccaggtggagcctgagcttaggtgaattctcatgatgcagatgataggactgaggaattcaggctctaaagctctggattaagtggtgctgaaatttctcttctggtggcaggtgtacactggggctatgaagagaccaagacttaccttgcaattcttagtgagacccagttttatgaagccctccggaactgtcaccgcaacagccagctgtatggagcagtggctgagaggttatgggaatatggctttcttaggaccccagaacagtgtcggaccaagtttaaaagcctgcaaaccagctatcggaaagttaagaatggccaggcaccagagacctgtcccttctttgaagagatggatgctttggtgagtgtccgggttgctgccccacccaatgatggccaggaagagactgcttcttgccccgtccaggggaccagtgaggctgaagctcagaagcaagctgaggaagcagacgaggccacagaggaagattctgatgatgatgaagaggatactgagatacccccaggggctgtcataacccgtgctccagtgttattccaaagcccccgtggttttgaagctggatttgagaatgaagataattcaaaacgggatatttctgaggaagtacaactgcataggacattacttgcaagatctgaaaggaaaattccccggtatcttcatcagggtaaaggcaatgagagtgactgtagatcaggaagacagtgggcaaagacctcaggggagaaaagaggaaaactgacactcccggagaagagcttaagtgaagtcctaagtcaacagagaccttgcttgggagagagaccctataaatatctcaaatacagcaaaagctttggtccaaactcccttctcatgcatcaggtatcccaccaggtggaaaatccatataaatgtgctgattgtgggaaaagcttcagtcggagtgcacgactcattagacaccggagaatccacactggagagaaaccttataaatgtcttgactgtggaaaaagtttccgtgacagttcaaatttcatcacccataggagaatccacacaggagagaaaccttatcaatgtggtgagtgtgggaaatgcttcaatcagagctcaagccttatcattcaccagagaacccacacaggagaaaagccctatcaatgtgaagagtgtggaaaaagcttcaataacagttctcattttagtgcacatcggaggatacacacaggagagagaccccatgtgtgtcctgactgtggaaagagtttcagtaagagttctgacttacgtgcacatcatagaacccacacaggagagaaaccctatgggtgtcatgactgtggtaagtgcttcagtaaaagctctgcccttaataagcacggagaaatccatgcacgggaaaagcttctgacacagtcagctcccaagtaagcccctgaggatatataacggaaagaggctcaataaatgtattgtttagaaagtc

SEQ ID NO: 23784 - DNA, 2345 bp, Homo sapiens
  misc_feature 1..2345: note = ENST00000562072
  source 1..2345: mol_type = unassigned DNA; mol_type = unassigned DNA
atggccaaatcagctctaagagagaatggcactaactctgagaccttccgacagcgtttcaggagattccattaccaggaggtggctgggccgcgggaggctttcagccaactctgggaactttgctgtcggtggctaaggccggaggtgcgcaccaaggagcagattgtagaactgttggtgctagagcagttcctgaccgtcttacctggggagatccagaattgggtacaggaacaatgtccagaaaatggagaggaggcagtgactctcgtggaagatttagaaagagagcctggaagacctagatcttcggtcacagtctctgtgaaggggcaggaagtgcgcttggagaagatgacacccccgaaatcatcacaagagttattaagtgttcggcaggagtcagtggaaccccagcccaggggtgtacccaagaaagagagggcaagaagcccagacctgggaccacaggagcagatgaacccaaaggagaagctcaaaccttttcaaaggagcggattgccatttcctaaatccggtgtggtctccaggttggagcaaggagagccatggatcccagatctgctgggctctaaggagaaagaacttccaagtggcagccacataggagacagacgagtgcatgctgatctgttaccatccaagaaagatagaagaagctgggtggaacaggatcactggagctttgaagatgagaaggtggcaggtgtgcactggggctatgaagagaccagaacgctcctcgcaattctcagccagactgagttttatgaggctctcagaaactgccataggaacagccaagtgtatggggctgtggctgagcggctcagggaatatggcttcctccggaccctggaacagtgtcggaccaagttcaaaggtctccagaagagctatcggaaagtcaagagcggccacccacctgagacctgccccttctttgaagagatggaagccctgatgagtgctcaggtcattgccctgcccagtaatggcctggaagcagcagcctctcactctggcctggtaggcagcgatgctgagactgaagagccagggcagaggggctggcagcatgaggagggagcagaagaggctgtggctcaggagtctgacagtgatgacatggatctagaggcgaccccccaggaccccaactcagctgcacctgttgtgttcagaagcccaggtggtgtacactggggctatgaagagaccaagacttaccttgcaattcttagtgagacccagttttatgaagccctccggaactgtcaccgcaacagccagctgtatggagcagtggctgagaggttatgggaatatggctttcttaggaccccagaacagtgtcggaccaagtttaaaagcctgcaaaccagctatcggaaagttaagaatggccaggcaccagagacctgtcccttctttgaagagatggatgctttggttttgaagctggatttgagaatgaagataattcaaaacgggatatttctgaggaagtacaactgcataggacattacttgcaagatctgaaaggaaaattccccggtatcttcatcagggtaaaggcaatgagagtgactgtagatcaggaagacagtgggcaaagacctcaggggagaaaagaggaaaactgacactcccggagaagagcttaagtgaagtcctaagtcaacagagaccttgcttgggagagagaccctataaatatctcaaatacagcaaaagctttggtccaaactcccttctcatgcatcaggtatcccaccaggtggaaaatccatataaatgtgctgattgtgggaaaagcttcagtcggagtgcacgactcattagacaccggagaatccacactggagagaaaccttataaatgtcttgactgtggaaaaagtttccgtgacagttcaaatttcatcacccataggagaatccacacaggagagaaaccttatcaatgtggtgagtgtgggaaatgcttcaatcagagctcaagccttatcattcaccagagaacccacacaggagaaaagccctatcaatgtgaagagtgtggaaaaagcttcaataacagttctcattttagtgcacatcggaggatacacacaggagagagaccccatgtgtgtcctgactgtggaaagagtttcagtaagagttctgacttacgtgcacatcatagaacccacacaggagagaaaccctatgggtgtcatgactgtggtaagtgcttcagtaaaagctctgcccttaataagcacggagaaatccatgcacgggaaaagcttctgacacagtcagctcccaagtaa

SEQ ID NO: 23785 - DNA, 1389 bp, Homo sapiens
  misc_feature 1..1389: note = ENST00000568898
  source 1..1389: mol_type = unassigned DNA; mol_type = unassigned DNA
atggccaaatcagctctaagagagaatggcactaactctgagaccttccgacagcgtttcaggagattccattaccaggaggtggctgggccgcgggaggctttcagccaactctgggaactttgctgtcggtggctaaggccggaggtgcgcaccaaggagcagattgtagaactgttggtgctagagcagttcctgaccgtcttacctggggagatccagaattgggtacaggaacaatgtccagaaaatggagaggaggcagtgactctcgtggaagatttagaaagagagcctggaagacctagatcttcggtcacagtctctgtgaaggggcaggaagtgcgcttggagaagatgacacccccgaaatcatcacaagagttattaagtgttcggcaggagtcagtggaaccccagcccaggggtgtacccaagaaagagagggcaagaagcccagacctgggaccacaggagcagatgaacccaaaggagaagctcaaaccttttcaaaggagcggttttgaagctggatttgagaatgaagataattcaaaacgggatatttctgaggaagtacaactgcataggacattacttgcaagatctgaaaggaaaattccccggtatcttcatcagggtaaaggcaatgagagtgactgtagatcaggaagacagtgggcaaagacctcaggggagaaaagaggaaaactgacactcccggagaagagcttaagtgaagtcctaagtcaacagagaccttgcttgggagagagaccctataaatatctcaaatacagcaaaagctttggtccaaactcccttctcatgcatcaggtatcccaccaggtggaaaatccatataaatgtgctgattgtgggaaaagcttcagtcggagtgcacgactcattagacaccggagaatccacactggagagaaaccttataaatgtcttgactgtggaaaaagtttccgtgacagttcaaatttcatcacccataggagaatccacacaggagagaaaccttatcaatgtggtgagtgtgggaaatgcttcaatcagagctcaagccttatcattcaccagagaacccacacaggagaaaagccctatcaatgtgaagagtgtggaaaaagcttcaataacagttctcattttagtgcacatcggaggatacacacaggagagagaccccatgtgtgtcctgactgtggaaagagtttcagtaagagttctgacttacgtgcacatcatagaacccacacaggagagaaaccctatgggtgtcatgactgtggtaagtgcttcagtaaaagctctgcccttaataagcacggagaaatccatgcacgggaaaagcttctgacacagtcagctcccaagtaa

SEQ ID NO: 23786 - DNA, 1724 bp, Homo sapiens
  misc_feature 1..1724: note = ENST00000570181
  source 1..1724: mol_type = unassigned DNA; mol_type = unassigned DNA
gaacaatgtccagaaaatggagaggaggcagtgactctcgtggaagatttagaaagagagcctggaagacctagatcttcggtcacagtctctgtgaaggggcaggaagtgcgcttggagaagatgacacccccgaaatcatcacaagagttattaagtgttcggcaggagtcagtggaaccccagcccaggggtgtacccaagaaagagagggcaagaagcccagacctgggaccacaggagcagatgaacccaaaggagaagctcaaaccttttcaaaggagcggattgccatttcctaaatccggtgtggtctccaggttggagcaaggagagccatggatcccagatctgctgggctctaaggagaaagaacttccaagtggcagccacataggagacagacgagtgcatgctgatctgttaccatccaagaaagatagaagaagctgggtggaacaggatcactggagctttgaagatgagaaggtggcaggtgtgcactggggctatgaagagaccagaacgctcctcgcaattctcagccagactgagttttatgaggctctcagaaactgccataggaacagccaagtgtatggggctgtggctgagcggctcagggaatatggcttcctccggaccctggaacagtgtcggaccaagttcaaaggtctccagaagagctatcggaaagtcaagagcggccacccacctgagacctgccccttctttgaagagatggaagccctgatgagtgctcaggtcattgccctgcccagtaatggcctggaagcagcagcctctcactctggcctggtaggcagcgatgctgagactgaagagccagggcagaggggctggcagcatgaggagggagcagaagaggctgtggctcaggagtctgacagtgatgacatggatctagaggcgaccccccaggaccccaactcagctgcacctgttgtgttcagaagcccaggtggagcctgagcttaggtgaattctcatgatgcagatgataggactgaggaattcaggctctaaagctctggattaagtggtgctgaaatttctcttctggtggcaggtgtacactggggctatgaagagaccaagacttaccttgcaattcttagtgagacccagttttatgaagccctccggaactgtcaccgcaacagccagctgtatggagcagtggctgagaggttatgggaatatggctttcttaggaccccagaacagtgtcggaccaagtttaaaagcctgcaaaccagctatcggaaagttaagaatggccaggcaccagagacctgtcccttctttgaagagatggatgctttggtgagtgtccgggttgctgccccacccaatgatggccaggaagagactgcttcttgccccgtccaggggaccagtgaggctgaagctcagaagcaagctgaggaagcagacgaggccacagaggaagattctgatgatgatgaagaggatactgagatacccccaggggctgtcataacccgtgctccagtgttattccaaagcccccgtggtaagattatttcactattatggtataaataacaaagggaagacaatgggacttaggaaaaatatcatctgattgagaactggcctctacacccagctttcatggattcttcttgtgaccacccatatttcttgtctattaaagcagctcactgaggggatataaa

SEQ ID NO: 23787 - DNA, 643 bp, Homo sapiens
  misc_feature 1..643: note = ENST00000561661
  source 1..643: mol_type = unassigned DNA; mol_type = unassigned DNA
gtacttgggaggctggagagccggggccggggccggggccggggccggggtcagggtcggaccccgagtgggtgaggctggcccggaggcaaggatgcgagggggttgaggggcagctcgagagggagacgctcccaggggtgggctggagggcgccctcagggcgccttagccgggtcagaggcctctggagggaccgcacgacggctccgggttacccggccggagggagcggagacaaaagaggccagaatcccgcagccgctgctccttgggctgagagctctgcgtccgcgaaccggcagcacctggagcctctggccgacacccgagcccgtcctcaggaagcccgttactactgctcctcggattccgtctctcctgcccaatgtgactctccccaagcccccatggtcctcgctttggagccaaaaccagcttctctccttgcgcgaggttttccgacaggaagaaacacctcttacagtcatctgcaggggattctccaaggacatgggaagatagatgtaagccctggaacccagactcctaagcgaagggaagctgcattctgctattaatgatggccaaatcagctctaagagagaatggcactaactctgagaccttccgacagcgtttc

SEQ ID NO: 23788 - DNA, 701 bp, Homo sapiens
  misc_feature 1..701: note = ENST00000563508
  source 1..701: mol_type = unassigned DNA; mol_type = unassigned DNA
cgagagggagacgctcccaggggtgggctggagggcgccctcagggcgccttagccgggtcagaggcctctggagggaccgcacgacggctccgggttacccggccggagggagcggagacaaaagaggccagaatcccgcagccgctgctccttgggctgagagctctgcgtccgcgaaccggcagcacctggagcctctggccgacacccgagcccgtcctcaggaagcccgttactactgctcctcggattccgtctctcctgcccaatgtgactctccccaagcccccatggtcctcgctttggagccaaaaccagcttctctccttgcgcgaggttttccgacagcaggatggtgacttgtctttagatcctctcgaactccagctctcctatatggttcggactcactgtgcaacattggccagggaagttaaatgggatcggatttggaggaggtgggagaggggcagacagtacttttattctctgctgcttcctggggctgccctggaagtcaaccagaaaagcagtttttgcaaagtctatttactgaagattgtgctaccttagaaggccactcggagcacatggaaaggcaggccagctctggcaagactttagacatatgaatgtattccttctgatagtgccatctttctctgccctaggaagaaacacctcttacagtcatctgca

SEQ ID NO: 23789 - DNA, 2831 bp, Homo sapiens
  misc_feature 1..2831: note = ENST00000396972
  source 1..2831: mol_type = unassigned DNA; mol_type = unassigned DNA
gtattccttctgatagtgccatctttctctgccctaggaagaaacacctcttacagtcatctgcaggggattctccaaggacatgggaagatagatgtaagccctggaacccagactcctaagcgaagggaagctgcattctgctattaatgatggccaaatcagctctaagagagaatggcactaactctgagaccttccgacagcgtttcaggagattccattaccaggaggtggctgggccgcgggaggctttcagccaactctgggaactttgctgtcggtggctaaggccggaggtgcgcaccaaggagcagattgtagaactgttggtgctagagcagttcctgaccgtcttacctggggagatccagaattgggtacaggaacaatgtccagaaaatggagaggaggcagtgactctcgtggaagatttagaaagagagcctggaagaccatcttcggtcacagtctctgtgaaggggcaggaagtgcgcttggagaagatgacacccccgaaatcatcacaagagttattaagtgttcggcaggagtcagtggaaccccagcccaggggtgtacccaagaaagagagggcaagaagcccagacctgggaccacaggagcagatgaacccaaaggagaagctcaaaccttttcaaaggagcggttggagcaaggagagccatggatcccagatctgctgggctctaaggagaaagaacttccaagtggcagccacataggagacagacgagtgcatgctgatctgttaccatccaagaaagatagaagaagctgggtggaacaggatcactggagctttgaagatgagaaggtggcaggtgtgcactggggctatgaagagaccagaacgctcctcgcaattctcagccagactgagttttatgaggctctcagaaactgccataggaacagccaagtgtatggggctgtggctgagcggctcagggaatatggcttcctccggaccctggaacagtgtcggaccaagttcaaaggtctccagaagagctatcggaaagtcaagagcggccacccacctgagacctgccccttctttgaagagatggaagccctgatgagtgctcaggtcattgccctgcccagtaatggcctggaagcagcagcctctcactctggcctggtaggcagcgatgctgagactgaagagccagggcagaggggctggcagcatgaggagggagcagaagaggctgtggctcaggagtctgacagtgatgacatggatctagaggcgaccccccaggaccccaactcagctgcacctgttgtgttcagaagcccaggtggagcctgagcttaggtgaattctcatgatgcagatgataggactgaggaattcaggctctaaagctctggattaagtggtgctgaaatttctcttctggtggcaggtgtacactggggctatgaagagaccaagacttaccttgcaattcttagtgagacccagttttatgaagccctccggaactgtcaccgcaacagccagctgtatggagcagtggctgagaggttatgggaatatggctttcttaggaccccagaacagtgtcggaccaagtttaaaagcctgcaaaccagctatcggaaagttaagaatggccaggcaccagagacctgtcccttctttgaagagatggatgctttggtgagtgtccgggttgctgccccacccaatgatggccaggaagagactgcttcttgccccgtccaggggaccagtgaggctgaagctcagaagcaagctgaggaagcagacgaggccacagaggaagattctgatgatgatgaagaggatactgagatacccccaggggctgtcataacccgtgctccagtgttattccaaagcccccgtggttttgaagctggatttgagaatgaagataattcaaaacgggatatttctgaggaagtacaactgcataggacattacttgcaagatctgaaaggaaaattccccggtatcttcatcagggtaaaggcaatgagagtgactgtagatcaggaagacagtgggcaaagacctcaggggagaaaagaggaaaactgacactcccggagaagagcttaagtgaagtcctaagtcaacagagaccttgcttgggagagagaccctataaatatctcaaatacagcaaaagctttggtccaaactcccttctcatgcatcaggtatcccaccaggtggaaaatccatataaatgtgctgattgtgggaaaagcttcagtcggagtgcacgactcattagacaccggagaatccacactggagagaaaccttataaatgtcttgactgtggaaaaagtttccgtgacagttcaaatttcatcacccataggagaatccacacaggagagaaaccttatcaatgtggtgagtgtgggaaatgcttcaatcagagctcaagccttatcattcaccagagaacccacacaggagaaaagccctatcaatgtgaagagtgtggaaaaagcttcaataacagttctcattttagtgcacatcggaggatacacacaggagagagaccccatgtgtgtcctgactgtggaaagagtttcagtaagagttctgacttacgtgcacatcatagaacccacacaggagagaaaccctatgggtgtcatgactgtggtaagtgcttcagtaaaagctctgcccttaataagcacggagaaatccatgcacgggaaaagcttctgacacagtcagctcccaagtaagcccctgaggatatataacggaaagaggctcaataaatgtattgtttagaaagtc

SEQ ID NO: 23790 - DNA, 4097 bp, Homo sapiens
  misc_feature 1..4097: note = ENST00000333206
  source 1..4097: mol_type = unassigned DNA; mol_type = unassigned DNA
tgtccctagcagtgccttagccagggacctgcttggccagcgacagatcctttgctgctctgtctgccggttcttgaggtgaatgtcggaatccattatctttcgggaaagctctctggggcagggagcgtcctggggagttggaattcagaaggaatctctcagacgcaaatctccatctcctccctgcctcacctgggcagccttttcagactgtctctgcccagaatgtcaggagaggccacagtcttggcctaccatgctccagaagaacaggaaggacttctagttgtcaaggttgaagaagaaaattatgttttggaccaggactttggccttcaggaaaacccctggagccaagaggtattccggcagaagttcaggcagtttagttactctgactccactggccctcgggaggctctgagccggctgcgagagctttgctgtcagtggttgaggccggaggtgcactccaaggagcagatcctggagctgctgatgttggagcagttcctggccatccttcctgaggagctgcaagcttggctgcgagagcatcggccagagaatggagaggaagctgtgactatgctggaggagctggaaaaagaactggaggagccaaggcaacaggacacaactcatggccaagaaatgttctggcaggaaatgacatccacaggagcactgaagtctctgtctctgaatagcccggtgcagcccttagagaaccagtgcaagactgagactcaggagtcccaggctttccaggagagagatggcaggatggtggctggcaaagtgttgatggcaaagcaagaaattgttgaatgtgtagcctcagcagctatgatatcgccgggaaaacttcctggagaaacacattcccaacggatagctgaagaagctttgggaggtctggacaactctaagaagcaaaagggaaatgctgcagggaacaaaatcagtcagcttccttcccaggacagacatttcagtctggcaaccttcaacagaagaatccccacagaacacagtgtccttgaatctcatgagagtgaaggaagtttcagtatgaattcaaatgatattacacaacagagcgttgacactagggaaaagctctatgagtgctttgactgtgggaaggccttttgccagagctcaaagctgattagacatcagagaattcatactggagagagaccttatgcatgtaaagaatgtggcaaagccttcagtttgagctcagaccttgttagacatcagagaattcatagtggtgaaaaaccctatgaatgttgtgaatgtggaaaagccttcaggggcagttcagagctcatcaggcatcggagaatccacactggagagaagccttatgaatgtggagaatgtgggaaggccttcagccggagctcagcccttattcagcataagaaaattcacactggagataaaagctatgaatgtattgcatgtggtaaggcttttggtaggagttctatccttattgaacatcaaagaattcacactggagagaaaccttatgaatgtaatgaatgtggaaaatccttcaatcagagctcagccctcacccagcaccagagaattcacactggagagaagccttatgaatgtagtgaatgtagaaaaacatttaggcataggtcaggccttatgcagcatcagagaacacacaccagagtttaactctgtgggtaagagttgtacaattgtgaaatgcaaggagttcactgtaggggtgagactccacagaaaagaaaagtttcctgagagcagaacttctgtccttccctcccagttcggtactataagaagacatgcacacaaagatgtttgttatgattattgaagtgttaaatggaagaaaaatgttacccaagtcttctccaaaaagaatggtagatatttccttgaaatgcctaacccatttctggatgagactcatcaatatccccttcactccactctctgccaactcagatataatttccattgggcaccttcacagtaatgccaggattggggcagagatcctgaaagagcttcttataagatggcaaatgtgcctggcaagagcatttgtattttgtcaggtggaggcatgtgctgagagttattcaactatctgaaatgttgaatttggaggttgtgaaaatattgaattatgctattagtttaataatatctgaggcagtaaaatagtacctgaggaatggtgcctcattctgcccccttgccagttgtctcctcaatcctgagcttcctgctgaggttaattcaagtctactagtttattgagcacctgctatgtgctaggcattgaggtagacctggtcattgccctcccagagttaagggctaataggatatgcatatatactaaacagtaattacagtaaagtgtggtaagtgctttggtaggaaaaatgcgggtttccatcaaagtacatggcagggatacctaaatctggtctatgagtcactaaagacttcctggatatgatggtatctcagacataaaggtgggtagaaggtagcaagggcaggggagaagagaacaggatctggagacactccatgaagactcttctctactgcagaaattgtcatagacctaatttttaaaaaaatgaatctgaaggagtaattcaacaaatatttattgccctcaagtataatagctcagggcctgcaagcctggtaaggaggggtgtgggcagggaatggggaatagcagagcctgggaaggcagatcaccgtgttcctttatacttcccactgcctgagtcccagagtcatgggacacaaacactccagtccccactgtctctctagcctctgatatgcattctttccctgtgtatatacatgccttttcccataaaatgcaccagtctctcaccacactaattctgagtacttcagagtctcacaggtcattctgggtctagaataggctccccaactcagtgattataagtaggaagaggaaaagcaacacatggggattctgagccaggctttatgacaactaattcctgctggagagaagagtcctgatgatgggctgtctccagatcctatcttatcttcatgccattgtatgggctataacctctgcctgtaactctctctgctaatttttattttggcagttttaattaacccacaattgctgagggcaattaatacctaaaagaaagtttgattcctcttctaagatatcctaggtagtgtcatttctaaagaagacttggtgatcactgcttgtattagtccattttcacagtgctatgaagatactacctgatactgggtaatttattaaaaaaaaaaaagaggtttaattgactgacagttctgcagggctggggaggcctcaggaaacttaaatcatggtggaaggcgaaggggaagcaagcaccttcttcacaaggtggcaagagagagtgcaggggaaatgctaggcacttatcaatcagccaaatctcatgagaattcactatcatgagaacaagggggaaatctgctcccatgatctaatcacctcccaccacgaccctccctcaacacctggggattactattggagatttgggtggggacacaagagccaaaccatatcactgctgttgtgggtaataggggaggtgaaattggggggacaattcggcctctttgtgtccagaggttgtgcagttatcgagtgaggtcgatcagaagtctaaagggatctttcaaatggatagtgagttgccttttcctataggtgacaatcagagatttaatgttttaagtatcatataataggtttttctcctgattgtgaattgtaagtgttggtaatacagaaaatgagaaagtataaaccacccccaatcccaatgcccatagaaacgttgttaacattttggagtactttctattagtgtttatttttcccaatcctagtatttttagtaaaactactgtttagtaaatgatttttggtaactaatttcaaaatttatacttcaaccgtttattattagaatgtaatgcaagatgtattgcaataaaacttgagtttt

SEQ ID NO: 23791 - DNA, 4323 bp, Homo sapiens
  misc_feature 1..4323: note = ENST00000420878
  source 1..4323: mol_type = unassigned DNA; mol_type = unassigned DNA
attaacccccgaaccgccgcgagctgtccctagcagtgccttagccagggacctgcttggccagcgacagatcctttgctgctctgtctgccggttcttgaggtgaatgtcggaatccattatctttcgggaaagctctctggggcaggcgcgtcaaccgcttgtactctgcgatgcccccgccaggtctgagccggacccgcgcccctcctgcgagacacgacccgcgcctgccacagagctgcggtcctccgggctcctagaggggcactctcccacttccggcgcgcgtgcggccgggcattgttctcgctcccgggggtgggttcccgccgccgccggtagagcgaagggagcgtcctggggagttggaattcagaaggaatctctcagacgcaaatctccatctcctccctgcctcacctgggcagccttttcagactgtctctgcccagaatgtcaggagaggccacagtcttggcctaccatgctccagaagaacaggaaggacttctagttgtcaaggttgaagaagaaaattatgttttggaccaggactttggccttcaggaaaacccctggagccaagaggtattccggcagaagttcaggcagtttagttactctgactccactggccctcgggaggctctgagccggctgcgagagctttgctgtcagtggttgaggccggaggtgcactccaaggagcagatcctggagctgctgatgttggagcagttcctggccatccttcctgaggagctgcaagcttggctgcgagagcatcggccagagaatggagaggaagctgtgactatgctggaggagctggaaaaagaactggaggagccaaggcaacaggacacaactcatggccaagaaatgttctggcaggaaatgacatccacaggagcactgaagtctctgtctctgaatagcccggtgcagcccttagagaaccagtgcaagactgagactcaggagtcccaggctttccaggagagagatggcaggatggtggctggcaaagtgttgatggcaaagcaagaaattgttgaatgtgtagcctcagcagctatgatatcgccgggaaaacttcctggagaaacacattcccaacggatagctgaagaagctttgggaggtctggacaactctaagaagcaaaagggaaatgctgcagggaacaaaatcagtcagcttccttcccaggacagacatttcagtctggcaaccttcaacagaagaatccccacagaacacagtgtccttgaatctcatgagagtgaaggaagtttcagtatgaattcaaatgatattacacaacagagcgttgacactagggaaaagctctatgagtgctttgactgtgggaaggccttttgccagagctcaaagctgattagacatcagagaattcatactggagagagaccttatgcatgtaaagaatgtggcaaagccttcagtttgagctcagaccttgttagacatcagagaattcatagtggtgaaaaaccctatgaatgttgtgaatgtggaaaagccttcaggggcagttcagagctcatcaggcatcggagaatccacactggagagaagccttatgaatgtggagaatgtgggaaggccttcagccggagctcagcccttattcagcataagaaaattcacactggagataaaagctatgaatgtattgcatgtggtaaggcttttggtaggagttctatccttattgaacatcaaagaattcacactggagagaaaccttatgaatgtaatgaatgtggaaaatccttcaatcagagctcagccctcacccagcaccagagaattcacactggagagaagccttatgaatgtagtgaatgtagaaaaacatttaggcataggtcaggccttatgcagcatcagagaacacacaccagagtttaactctgtgggtaagagttgtacaattgtgaaatgcaaggagttcactgtaggggtgagactccacagaaaagaaaagtttcctgagagcagaacttctgtccttccctcccagttcggtactataagaagacatgcacacaaagatgtttgttatgattattgaagtgttaaatggaagaaaaatgttacccaagtcttctccaaaaagaatggtagatatttccttgaaatgcctaacccatttctggatgagactcatcaatatccccttcactccactctctgccaactcagatataatttccattgggcaccttcacagtaatgccaggattggggcagagatcctgaaagagcttcttataagatggcaaatgtgcctggcaagagcatttgtattttgtcaggtggaggcatgtgctgagagttattcaactatctgaaatgttgaatttggaggttgtgaaaatattgaattatgctattagtttaataatatctgaggcagtaaaatagtacctgaggaatggtgcctcattctgcccccttgccagttgtctcctcaatcctgagcttcctgctgaggttaattcaagtctactagtttattgagcacctgctatgtgctaggcattgaggtagacctggtcattgccctcccagagttaagggctaataggatatgcatatatactaaacagtaattacagtaaagtgtggtaagtgctttggtaggaaaaatgcgggtttccatcaaagtacatggcagggatacctaaatctggtctatgagtcactaaagacttcctggatatgatggtatctcagacataaaggtgggtagaaggtagcaagggcaggggagaagagaacaggatctggagacactccatgaagactcttctctactgcagaaattgtcatagacctaatttttaaaaaaatgaatctgaaggagtaattcaacaaatatttattgccctcaagtataatagctcagggcctgcaagcctggtaaggaggggtgtgggcagggaatggggaatagcagagcctgggaaggcagatcaccgtgttcctttatacttcccactgcctgagtcccagagtcatgggacacaaacactccagtccccactgtctctctagcctctgatatgcattctttccctgtgtatatacatgccttttcccataaaatgcaccagtctctcaccacactaattctgagtacttcagagtctcacaggtcattctgggtctagaataggctccccaactcagtgattataagtaggaagaggaaaagcaacacatggggattctgagccaggctttatgacaactaattcctgctggagagaagagtcctgatgatgggctgtctccagatcctatcttatcttcatgccattgtatgggctataacctctgcctgtaactctctctgctaatttttattttggcagttttaattaacccacaattgctgagggcaattaatacctaaaagaaagtttgattcctcttctaagatatcctaggtagtgtcatttctaaagaagacttggtgatcactgcttgtattagtccattttcacagtgctatgaagatactacctgatactgggtaatttattaaaaaaaaaaaagaggtttaattgactgacagttctgcagggctggggaggcctcaggaaacttaaatcatggtggaaggcgaaggggaagcaagcaccttcttcacaaggtggcaagagagagtgcaggggaaatgctaggcacttatcaatcagccaaatctcatgagaattcactatcatgagaacaagggggaaatctgctcccatgatctaatcacctcccaccacgaccctccctcaacacctggggattactattggagatttgggtggggacacaagagccaaaccatatcactgctgttgtgggtaataggggaggtgaaattggggggacaattcggcctctttgtgtccagaggttgtgcagttatcgagtgaggtcgatcagaagtctaaagggatctttcaaatggatagtgagttgccttttcctataggtgacaatcagagatttaatgttttaagtatcatataataggtttttctcctgattgtgaattgtaagtgttggtaatacagaaaatgagaaagtataaaccacccccaatcccaatgcccatagaaacgttgttaacattttggagtactttctattagtgtttatttttcccaatcctagtatttttagtaaaactactgtttagtaaatgatttttggtaactaatttcaaaatttatacttcaaccgtttattattagaatgtaatgcaagatgtattgcaataaaacttgagtt

SEQ ID NO: 23792 - DNA, 2028 bp, Homo sapiens
  misc_feature 1..2028: note = ENST00000590777
  source 1..2028: mol_type = unassigned DNA; mol_type = unassigned DNA
ttccttgttcaccatccctcttctccaatactaattcatttctttgtctaccttactctccaagggggccatatttggctaccccaggccacttctctgaattctagattgggaatctagttttgagaactgtcctcctaataaataaatacctatttcattgagtttgtgttcctgctacaacagtttcttctgtcatgggaagtaaatgatacttacactttctattcacatttttagatggcaggatggtggctggcaaagtgttgatggcaaagcaagaaattgttgaatgtgtagcctcagcagctatgatatcgccgggaaaacttcctggagaaacacattcccaacggatagctgaagaagctttgggaggtctggacaactctaagaagcaaaagggaaatgctgcagggaacaaaatcagtcagcttccttcccaggacagacatttcagtctggcaaccttcaacagaagaatccccacagaacacagtgtccttgaatctcatgagagtgaaggaagtttcagtatgaattcaaatgatattacacaacagagcgttgacactagggaaaagctctatgagtgctttgactgtgggaaggccttttgccagagctcaaagctgattagacatcagagaattcatactggagagagaccttatgcatgtaaagaatgtggcaaagccttcagtttgagctcagaccttgttagacatcagagaattcatagtggtgaaaaaccctatgaatgttgtgaatgtggaaaagccttcaggggcagttcagagctcatcaggcatcggagaatccacactggagagaagccttatgaatgtggagaatgtgggaaggccttcagccggagctcagcccttattcagcataagaaaattcacactggagataaaagctatgaatgtattgcatgtggtaaggcttttggtaggagttctatccttattgaacatcaaagaattcacactggagagaaaccttatgaatgtaatgaatgtggaaaatccttcaatcagagctcagccctcacccagcaccagagaattcacactggagagaagccttatgaatgtagtgaatgtagaaaaacatttaggcataggtcaggccttatgcagcatcagagaacacacaccagagtttaactctgtgggtaagagttgtacaattgtgaaatgcaaggagttcactgtaggggtgagactccacagaaaagaaaagtttcctgagagcagaacttctgtccttccctcccagttcggtactataagaagacatgcacacaaagatgtttgttatgattattgaagtgttaaatggaagaaaaatgttacccaagtcttctccaaaaagaatggtagatatttccttgaaatgcctaacccatttctggatgagactcatcaatatccccttcactccactctctgccaactcagatataatttccattgggcaccttcacagtaatgccaggattggggcagagatcctgaaagagcttcttataagatggcaaatgtgcctggcaagagcatttgtattttgtcaggtggaggcatgtgctgagagttattcaactatctgaaatgttgaatttggaggttgtgaaaatattgaattatgctattagtttaataatatctgaggcagtaaaatagtacctgaggaatggtgcctcattctgcccccttgccagttgtctcctcaatcctgagcttcctgctgaggttaattcaagtctactagtttattgagcacctgctatgtgctaggcattgaggtagacctggtcattgccctcccagagttaagggctaataggatatgcatatatactaaacagtaattacagtaaagtgtggtaagtgctttggtaggaaaaatgcgggtttccatcaaagtacatggcagggatacctaaatctggtctatgagtcactaaagacttcctggatatgatggtatctcagacataaaggtgggtagaaggtagcaagg

SEQ ID NO: 23793 - DNA, 3368 bp, Homo sapiens
  misc_feature 1..3368: note = ENST00000589178
  source 1..3368: mol_type = unassigned DNA; mol_type = unassigned DNA
gtgccttagccagggacctgcttggccagcgacagatcctttgctgctctgtctgccggttcttgaggtgaatgtcggaatccattatctttcgggaaagctctctggggcagggagcgtcctggggagttggaattcagaaggaatctctcagacgcaaatctccatctcctccctgcctcacctgggcagccttttcagactgtctctgcccagaatgtcaggagaggccacagtcttggcctaccatgctccagaagaacaggaaggacttctagttgtcaaggttgaagaagaaaattatgttttggaccaggactttggccttcaggaaaacccctggagccaagaggtattccggcagaagttcaggcagtttagttactctgactccactggccctcgggaggctctgagccggctgcgagagctttgctgtcagtggttgaggccggaggtgcactccaaggagcagatcctggagctgctgatgttggagcagttcctggccatccttcctgaggagctgcaagcttggctgcgagagcatcggccagagaatggagaggaagctgtgactatgctggaggagctggaaaaagaactggaggagccaaggcaacaggacacaactcatggccaagaaatgttctggcaggaaatgacatccacaggagcactgaagtctctgtctctgaatagcccggtgcagcccttagagaaccagtgcaagactgagactcaggagtcccaggctttccaggagagagatggggtctcactctatcacccaggttggagtgcagtggtgcaaccacagctcactgcagcagccttgaacccctgggttaaagtgatcctcctgcctcagcctccagagtagctaggactacagttgtacaccaccatgcctggctaaatatccataatattcaaagctcagtattctgttatttaattttggcttcattggcaagacagtccctaagatggagatgaatacattttcagtaatagaaaccacataatcatttgaacagggaaagtttaatgttaagaattattaactactaagtgttataacaaaaagtgaaactcaaaagaatacagcaataacagatatagagtgtctctagggctgaggcagaacatcaaaggtaagaacaaatttgcaggagggtgccacaacttcccctttcctgccaggtcttagatccaggccttgttggagagggcacagccacagcccactggatggagatgccactgcagtgctgagctggcagaactcactgaggagccacactctggggtgctagaagctccccatggggagctgacctggtacagaacttgctgggaagctacccatagggatggggcctttggaactcattgggatgtgcactgctgggtgtcccatgtgctacagaaacaaacacaaagaacatgccagaaccaggaagaaaagccctttcttccagttcctctgcaaccccctctattgataaagctcacagcatgccagctggcaaatagtccagtatcacagacagggcaatgaagcgtagatttgaaactgaggcaataaattgatagctgtcacagatgccagggattagaactgaaaggactttgattatgttattggcaaaatcatccttatgggcagcagatatatcaggtataccagcttgttctcattaatcttttgttaaatctgactacccttctgattttgtcttcaccaagcaatcttattaacttcctatgaagcttagctgtaataagaaaattgcatttgttcagtctggtccatgtgatggttacattactcattaattctcattctgtttttattactgagtttcacgggcttagttattaagagtctaccccaagagataaatctattttttgtatgatgataaaattaggtatatgaggacctaagcccaaaggccagaccctggacctcggcagttcaccaaaggaatccataccatccatccactgaattcttctgggaaactgcttcccaaccttccccaggcatcataccctgatactaccattagccaagcaggccctcttaagtatcttctgcaccaagcaggtgctacattaaaacgggttttgaaaattcatctcaaggaaatcaagctgtctctatttgcagataatatgatcccatgtctagaaaaccctatcgtctcagccccaaagcttcttaagccaagaagcaactacagcaaagtctcaggatacaaaattaatgtgcaaaaatcataagcattcctatatacagagattcctatatctctgtgtctgtactgcacacctgaacaacaataagacaaccagagagccaaacatgattaactcccattcacaattgctacaaagagaataaaatacctaggaatacagctaacaagggaggtgaagggcctcttcaaggagaactacaaaccactgctcaaggaaatcagagaggacacaaacaaatggagaaacattccatgcttatggataggaagaattaatatcatgaaaatggccatactgcccaaagtaatttatagattcagtgttattcccattaaactaccattgacattcttcacagaattagaaaaaaatactttaaaattcatatggtacaaaaaaaagagcccttatagccaagacaatcctaagcaaaaagaacaaagctggaggcatcatgccacctgccttcaatctgtactacaaggctactataacccaaacagcatggtactggtacaaaaacagacacatagaccaatggaacagaatagagatctgagaaataagactgcacatctacaaccacttgatatttgacaaacctgacacaaacaagcaatggggaaaggattacctatttgataaatggtgctgggaaaactggctagccatatgcagaaaactgaaactggatccctcctttacaccttgtacaaaaataaactcaacatggactaaagacttaaatgtaaaacccaaaactataaaatccctagtaaaaaaatctaggtaataccattcaggacataggcatgggcaaagatttcatgatgaaaatgtcaaaagcaattgcaatagaagcaaaaattgacaaatgggacgtaattaaagagcttttgcacagcaaaagaacctattataagagtgaacagacaatgtacagaatgggagaaaatttttgcaatctatccatctgacaaaggtctaatatccaggatctacaagaaacttaaacaaatttacaagaaaaaaacaaccccattaaaaagtgggcaaaggacatgaacagagacctcaaaagaagacatttatgcacc

SEQ ID NO: 23794 - DNA, 464 bp, Homo sapiens
  misc_feature 1..464: note = ENST00000588448
  source 1..464: mol_type = unassigned DNA; mol_type = unassigned DNA
gagctgcaagcttggctgcgagagcatcggccagagaatggagaggaagctgtgactatgctggaggagctggaaaaagaactggaggagccaaggcaacaggacacaactcatggccaagaaatgttctggcaggaaatgacatccacaggagcactgaagtctctgtctctgaatagcccggtgcagcccttagagaaccagtgcaagactgagactcaggagtcccaggctttccaggagagaggtgagaagccccagtccatgtggggttgaggatggaggtgagagctatcaactgtggcacggttcattttcttaacgacagccacttgtggctatcactaagtattgtggaaaggcttctttgcctagaaatattcttccttaggctctgcctagaatctgaaattccagtatcatttgtaactttgggttaagaattaaagtctttagtaaaattc

SEQ ID NO: 23795 - DNA, 510 bp, Homo sapiens
  misc_feature 1..510: note = ENST00000601405
  source 1..510: mol_type = unassigned DNA; mol_type = unassigned DNA
tgggcagccttttcagactgtctctgcccagaatgtcaggagaggccacagtcttggcctaccatgctccagaagaacaggaaggacttctagttgtcaaggttgaagaagaaaattatgttttggaccaggactttggccttcaggaaaacccctggagccaagagaaatgttctggcaggaaatgacatccacaggagcactgaagtctctgtctctgaatagcccggtgcagcccttagagaaccagtgcaagactgagactcaggagtcccaggctttccaggagagaggtgagaagccccagtccatgtggggttgaggatggaggtgagagctatcaactgtggcacggttcattttcttaacgacagccacttgtggctatcactaagtattgtggaaaggcttctttgcctagaaatattcttccttaggctctgcctagaatctgaaattccagtatcatttgtaactttgggttaagaattaaagtctttagtaaaattc

SEQ ID NO: 23796 - DNA, 731 bp, Homo sapiens
  misc_feature 1..731: note = ENST00000592278
  source 1..731: mol_type = unassigned DNA; mol_type = unassigned DNA
aaccgccgcgagctgtccctagcagtgccttagccagggacctgcttggccagcgacagatcctttgctgctctgtctgccggttcttgaggagcgtcctggggagttggaattcagaaggaatctctcagacgcaaatctccatctcctccctgcctcacctgggcagccttttcagactgtctctgcccagaatgtcaggagaggccacagtcttggcctaccatgctccagaagaacaggaaggacttctagttgtcaaggttgaagaagaaaattatgttttggaccaggactttggccttcaggaaaacccctggagccaagaggtattccggcagaagttcaggcagtttagttactctgactccactggccctcgggaggctctgagccggctgcgagagctttgctgtcagtggttgaggccggaggtgcactccaaggagcagatcctggagctgctgatgttggagcagttcctggccatccttcctgaggagctgcaagcttggctgcgagagcatcggccagagaatggagaggaagctgtgactatgctggaggagctggaaaaagaactggaggagccaaggcaacaggagttttctgcttgtgtatcctcagaatgatagtgctggtacttgattactcctaggacacaactcatggccaagaaatgttctggcaggaaatgacatccacaggagcactgaagtctctgtctctga

SEQ ID NO: 23797 - DNA, 588 bp, Homo sapiens
  misc_feature 1..588: note = ENST00000592598
  source 1..588: mol_type = unassigned DNA; mol_type = unassigned DNA
gcaggacccgtccccgccccagcccttccgcagctcctaggactgtcgtcttcgcagtcagcacgtccgcgcagcgcgtcaaccgcttgtactctgcgatgcccccgccaggtctgagccggacccgcgcccctcctgcgagacacgacccgcgcctgccacagagctgcggtcctccgggctcctagaggggcactctcccacttccggcgcgcgtgcggccgggcattgttctcgctcccgggggtgggttcccgccgccgccggtagagcgaagggagcgtcctggggagttggaattcagaaggaatctctcagacgcaaatctccatctcctccctgcctcacctgggcagccttttcagactgtctctgcccagaatgtcaggagaggccacagtcttggcctaccatgctccagaagaacaggaaggacttctagttgtcaaggttgaagaagaaaattatgttttggaccaggactttggccttcaggaaaacccctggagccaagaggtattccggcagaagttcaggcagtttagttactctgactccactggccctcgggaggctctgagccggctg

SEQ ID NO: 23798 - DNA, 549 bp, Homo sapiens
  misc_feature 1..549: note = ENST00000592211
  source 1..549: mol_type = unassigned DNA; mol_type = unassigned DNA
aacccccgaaccgccgcgagctgtccctagcagtgccttagccagggacctgcttggccagcgacagatcctttgctgctctgtctgccggttcttgagcgcgtcaaccgcttgtactctgcgatgcccccgccaggtctgagccggacccgcgcccctcctgcgagacacgacccgcgcctgccacagagctgcggtcctccgggctcctagaggggcactctcccacttccggcgcgcgtgcggccgggcattgttctcgctcccgggggtgggttcccgccgccgccggtagagcgaagggagcgtcctggggagttggaattcagaaggaatctctcagacgcaaatctccatctcctccctgcctcacctgggcagccttttcagactgtctctgcccagaatgtcaggagaggccacagtcttggcctaccatgctccagaagaacaggaaggacttctagttgtcaaggttgaagaagaaaattatgttttggaccaggactttggccttcaggaaaacccctggagccaagaggtattccg

SEQ ID NO: 23799 - DNA, 581 bp, Homo sapiens
  misc_feature 1..581: note = ENST00000588832
  source 1..581: mol_type = unassigned DNA; mol_type = unassigned DNA
attaacccccgaaccgccgcgagctgtccctagcagtgccttagccagggacctgcttggccagcgacagatcctttgctgctctgtctgccggttcttgaggtgatcctgaagctgttggtcctgggaccacattttgagaaccactgcccaagaaataagtgatgctcagtaattaatccctgaattaacggaaagttggatttttatctactttgcaatctagaaagggtacgaggtctatttaaggtttgcttgctagaacaattctcactgatcagggtgagaaggacccgaaatggagggtgcggggtaatcagggtaggaaaggatattgctgtgttcatggaaatatcttgggaaatgaggagttgggacctcatttctgttgagaccaatgagacgtgtgacttggtttaagctgtccggtggggaaaggaagaggtttgagaaaatggtgggtggctaagtggtagttgaggtggaggaagagggcttcctgtcccagcccaagtccctgttgggatatatgaaatttagggatgtatgactaagcccttaatataaccgtaagaggaaag

SEQ ID NO: 23800 - DNA, 3439 bp, Homo sapiens
  misc_feature 1..3439: note = ENST00000610712
  source 1..3439: mol_type = unassigned DNA; mol_type = unassigned DNA
agggctgccgagaattaacccccgaaccgccgcgagctgtccctagcagtgccttagccagggacctgcttggccagcgacagatcctttgctgctctgtctgccggttcttgagatggcaggatggtggctggcaaagtgttgatggcaaagcaagaaattgttgaatgtgtagcctcagcagctatgatatcgccgggaaaacttcctggagaaacacattcccaacggatagctgaagaagctttgggaggtctggacaactctaagaagcaaaagggaaatgctgcagggaacaaaatcagtcagcttccttcccaggacagacatttcagtctggcaaccttcaacagaagaatccccacagaacacagtgtccttgaatctcatgagagtgaaggaagtttcagtatgaattcaaatgatattacacaacagagcgttgacactagggaaaagctctatgagtgctttgactgtgggaaggccttttgccagagctcaaagctgattagacatcagagaattcatactggagagagaccttatgcatgtaaagaatgtggcaaagccttcagtttgagctcagaccttgttagacatcagagaattcatagtggtgaaaaaccctatgaatgttgtgaatgtggaaaagccttcaggggcagttcagagctcatcaggcatcggagaatccacactggagagaagccttatgaatgtggagaatgtgggaaggccttcagccggagctcagcccttattcagcataagaaaattcacactggagataaaagctatgaatgtattgcatgtggtaaggcttttggtaggagttctatccttattgaacatcaaagaattcacactggagagaaaccttatgaatgtaatgaatgtggaaaatccttcaatcagagctcagccctcacccagcaccagagaattcacactggagagaagccttatgaatgtagtgaatgtagaaaaacatttaggcataggtcaggccttatgcagcatcagagaacacacaccagagtttaactctgtgggtaagagttgtacaattgtgaaatgcaaggagttcactgtaggggtgagactccacagaaaagaaaagtttcctgagagcagaacttctgtccttccctcccagttcggtactataagaagacatgcacacaaagatgtttgttatgattattgaagtgttaaatggaagaaaaatgttacccaagtcttctccaaaaagaatggtagatatttccttgaaatgcctaacccatttctggatgagactcatcaatatccccttcactccactctctgccaactcagatataatttccattgggcaccttcacagtaatgccaggattggggcagagatcctgaaagagcttcttataagatggcaaatgtgcctggcaagagcatttgtattttgtcaggtggaggcatgtgctgagagttattcaactatctgaaatgttgaatttggaggttgtgaaaatattgaattatgctattagtttaataatatctgaggcagtaaaatagtacctgaggaatggtgcctcattctgcccccttgccagttgtctcctcaatcctgagcttcctgctgaggttaattcaagtctactagtttattgagcacctgctatgtgctaggcattgaggtagacctggtcattgccctcccagagttaagggctaataggatatgcatatatactaaacagtaattacagtaaagtgtggtaagtgctttggtaggaaaaatgcgggtttccatcaaagtacatggcagggatacctaaatctggtctatgagtcactaaagacttcctggatatgatggtatctcagacataaaggtgggtagaaggtagcaagggcaggggagaagagaacaggatctggagacactccatgaagactcttctctactgcagaaattgtcatagacctaatttttaaaaaaatgaatctgaaggagtaattcaacaaatatttattgccctcaagtataatagctcagggcctgcaagcctggtaaggaggggtgtgggcagggaatggggaatagcagagcctgggaaggcagatcaccgtgttcctttatacttcccactgcctgagtcccagagtcatgggacacaaacactccagtccccactgtctctctagcctctgatatgcattctttccctgtgtatatacatgccttttcccataaaatgcaccagtctctcaccacactaattctgagtacttcagagtctcacaggtcattctgggtctagaataggctccccaactcagtgattataagtaggaagaggaaaagcaacacatggggattctgagccaggctttatgacaactaattcctgctggagagaagagtcctgatgatgggctgtctccagatcctatcttatcttcatgccattgtatgggctataacctctgcctgtaactctctctgctaatttttattttggcagttttaattaacccacaattgctgagggcaattaatacctaaaagaaagtttgattcctcttctaagatatcctaggtagtgtcatttctaaagaagacttggtgatcactgcttgtattagtccattttcacagtgctatgaagatactacctgatactgggtaatttattaaaaaaaaaaaagaggtttaattgactgacagttctgcagggctggggaggcctcaggaaacttaaatcatggtggaaggcgaaggggaagcaagcaccttcttcacaaggtggcaagagagagtgcaggggaaatgctaggcacttatcaatcagccaaatctcatgagaattcactatcatgagaacaagggggaaatctgctcccatgatctaatcacctcccaccacgaccctccctcaacacctggggattactattggagatttgggtggggacacaagagccaaaccatatcactgctgttgtgggtaataggggaggtgaaattggggggacaattcggcctctttgtgtccagaggttgtgcagttatcgagtgaggtcgatcagaagtctaaagggatctttcaaatggatagtgagttgccttttcctataggtgacaatcagagatttaatgttttaagtatcatataataggtttttctcctgattgtgaattgtaagtgttggtaatacagaaaatgagaaagtataaaccacccccaatcccaatgcccatagaaacgttgttaacattttggagtactttctattagtgtttatttttcccaatcctagtatttttagtaaaactactgtttagtaaatgatttttggtaactaatttcaaaatttatacttcaaccgtttattattagaatgtaatgcaagatgtattgcaataaaacttgagttttaaaagttt

SEQ ID NO: 23801 - DNA, 1305 bp, Homo sapiens
  misc_feature 1..1305: note = ENST00000639929
  source 1..1305: mol_type = unassigned DNA; mol_type = unassigned DNA
caagaggtattccggcagaagttcaggcagtttagttactctgactccactggccctcgggaggctctgagccggctgcgagagctttgctgtcagtggttgaggccggaggtgcactccaaggagcagatcctggagctgctgatgttggagcagttcctggccatccttcctgaggagctgcaagcttggctgcgagagcatcggccagagaatggagaggaagctgtgactatgctggaggagctggaaaaagaactggaggagccaaggcaacaggtaagaaaaataccacttgacccagcaatcccattactggccattatcctcagcaaactaacacaggaacagaaaaccaaacaccacttgtgtcccttcaaaattcatatgttgaagctatggagtctggctctgtcgcccaagctagagtgcagtgcctccaaaagtgctgggattacaggtgtgagccaccgtgcccagtctctacttgacaatatgaattttagaggtgattcaggaacctgtatttcttttctctggcaaaagggaaatgctgcagggaacaaaatcagtcagcttccttcccaggacagacatttcagtctggcaaccttcaacagaagaatccccacagaacacagtgtccttgaatctcatgagagtgaaggaagtttcagtatgaattcaaatgatattacacaacagagcgttgacactagggaaaagctctatgagtgctttgactgtgggaaggccttttgccagagctcaaagctgattagacatcagagaattcatactggagagagaccttatgcatgtaaagaatgtggcaaagccttcagtttgagctcagaccttgttagacatcagagaattcatagtggtgaaaaaccctatgaatgttgtgaatgtggaaaagccttcaggggcagttcagagctcatcaggcatcggagaatccacactggagagaagccttatgaatgtggagaatgtgggaaggccttcagccggagctcagcccttattcagcataagaaaattcacactggagataaaagctatgaatgtattgcatgtggtaaggcttttggtaggagttctatccttattgaacatcaaagaattcacactggagagaaaccttatgaatgtaatgaatgtggaaaatccttcaatcagagctcagccctcacccagcaccagagaattcacactggagagaagccttatgaatgtagtgaatgtagaaaaacatttaggcataggtcaggccttatgcagcatcagagaacacacacc

SEQ ID NO: 23802 - DNA, 5501 bp, Homo sapiens
  misc_feature 1..5501: note = ENST00000252744
  source 1..5501: mol_type = unassigned DNA; mol_type = unassigned DNA
atggcggagcgcggacagcagcctcctcccgcgaaacggctttgctgccggccgggcggcggcggcggcggcgggggcagcagcggcggcggcggcggcgcgggtggcggctacagctctgcctgtcggccaggcccgcgggcgggtggcgcggcggcggcggcggcgtgcgggggcggcgcggcgctggggttgctgccgccgggcaagacccagagccccgagtcgctgctggacatcgcggcgcgcagggtggcggagaagtggccgttccagcgcgtggaggagcgctttgagcgcatcccggagccggtgcagcgccgcatagtctattggtccttcccccgcagcgagcgggagatctgcatgtactcgtccttcaacaccggcggcggcgccgcgggcggccccggcgacgacagcggtggcggcggcggcgcgggcggcggcggcggcggcggctcctcgtcttccccggccgcaacctcggcggccgcaacctcggccgccgccgccgctgccgccgccgccgccgccgccgccgccgccgcgggggccggggccccgtcggtgggggctgccggggcggcggacggcggcgacgagacgcggctgcctttccgccggggcatcgcgctgttggaaagcggctgcgtagacaacgtcctgcaagtcggtttccacttgagcggcacagtgacagaacctgcaatacaatcggagccagaaactgtttgcaacgtggccatcagctttgatcgttgcaagattacctcagtgacctgcagctgtggaaacaaggacatattttattgtgcccatgttgtggcactgtctttataccgcatccgcaagccagatcaggtcaaactgcatcttcctatttcagagactctctttcaaatgaatagagaccaactgcaaaagtttgtacagtatttgatcacagtgcaccacacagaagttttgccaactgctcaaaaattagcagatgaaattctttcccaaaattcagaaatcaaccaagttcatggtgctcctgatccaacagcaggtgctagtatagatgatgaaaactgctggcacttagatgaagagcaggttcaagaacaggttaaactgttcctttcccagggcgggtaccacggatcagggaagcagcttaatttgctctttgcaaaggtgcgggagatgttaaagatgagggactccaatggggcccgcatgttgaccttgataacagagcaattcatggctgaccctcgcctgtcactttggcggcaacaaggcactgcaatgactgacaaatacaggcagctctgggatgagctgggtgctctgtggatgtgtatagttttaaacccccactgcaagttggagcaaaaggccagttggctaaaacagctgaagaaatggaatagtgttgatgtctgtccatgggaagatggaaatcatggcagtgaattacccaacttaaccaatgctctgcctcagggtgcaaatgccaaccaagattcatcgaacaggccacatcggacagtgttcacccgagccatcgaggcatgcgatctccactggcaggatagccacttgcagcacattatcagcagtgacctatacaccaactactgttaccatgacgacactgaaaactccctcttcgactcccgcgggtggcccctctggcatgaacatgttcctacagcctgtgcaagagtggacgcattacgttctcatgggtaccccagagaagcactgagactagcaatagctattgttaatacattaagacgacagcagcagaaacagttggaaatgttccgaacccaaaaaaaagagctaccccataaaaacataacctcgataaccaatctggagggctgggttggacatcccctggaccctgtgggcactctcttcagtagccttatggaagcctgccgcattgatgatgagaacctctctgggttctcagattttacagagaatatgggacagtgcaagtctctggaataccagcatctacctgcacacaaattcttagaagaaggggaatcctatttaacgctggctgtggaagtagccctgatagggctaggacagcagcgtatcatgcctgatgggctgtacacacaagagaaagtttgccggaatgaggagcagctcatttctaagcttcaggaaattgaattggatgacacactggtgaaaatttttcgcaagcaagcagtcttcctattagaagccggaccatatagtggtttaggtgaaataatccatcgggagagcgttccaatgcacacatttgccaagtatctcttcacctctctcctacctcacgatgctgaattggcatacaaaattgcactgagagcaatgcggttactagtattggaatctactgctccatcaggagacctcacccgcccacaccacattgcatcagttgttcccaaccgctaccctcgctggttcactctaagccacattgagtcccagcagtgtgagctggcatccaccatgctaactgcagccaaaggcgatgttcggaggctggaaacagtattagaatccatccagaaaaacattcactcctcatcacacatcttcaagcttgcccaagatgcatttaaaatagcaactctcatggacagtttgccagacatcactcttttgaaagtgtctctggagctgggcctgcaggttatgcgaatgacactgtcaaccttaaattggcgacggcgggagatggtgaggtggctggtaacgtgtgctactgaagtcggggtttatgccctggacagcatcatgcagacctggtttacactctttactcccaccgaggccacaagtatagttgcaactaccgtgatgtccaacagcaccatcgtccgcctccacctggactgccaccagcaggaaaagctggccagcagcgcccggacacttgcactgcagtgtgccatgaaggatccacagaactgtgccctctctgcgctaaccctttgtgaaaaggatcacatagcttttgagacggcgtaccaaattgttctcgacgctgctacgactggcatgagctatacacagctctttacaatagcacggtacatggagcaccgcgggtaccccatgagggcctacaagctggccaccctggccatgacccatctcaacctgagctacaatcaggacacacaccctgccattaatgatgttttgtgggcctgtgcgcttagccactcccttggtaaaaatgagcttgcagctataatacctctggtggtcaagagtgtcaagtgtgcaacggtactgtcagacattttgcgcagatgcactctgaccactcctggcatggtgggacttcatgggaggaggaactctggtaagctcatgtcactggacaaagcccccttgaggcaactcttggatgccacgatcggggcctacatcaacacaacgcactcacggctcacacacatcagtcctcggcactatagtgagtttatagagttcctcagcaaagcccgagagaccttcttaatggcgcatgatggacacattcagtttacacagtttattgacaacctgaaacaaatctacaaaggcaaaaagaaactgatgatgttggttcgggagaggtttggttgatagatcttgtatgaatggggtggggggtggggatgggagggatggtttgtttttacttgagcctgcctttgtaccctttttaacttaaagaacagagccacaccggtattatatgtgtatagttatattgcgtttgcagactaaattgtcatgttgtgaaagtttgtgtgttttttattttttccctatttctttctttcctttattttattattttttttaattttttttttctggttttgtatgagagagaggttaaaaaggtttggtttacactgagtatatgttgtcaagtggcaaaagtccacatagctctcctgttttctgtatacgttcacagcctcaaaaaaaataattgaaatggctttaaaaaccaaacaaaacacctccatcctgtgataagtacctcgaatggattcagctttactcctttgtaactcatctttacattttcagcatatttaaacaaaccaacaaaatgaaatactaatagtaaaaaggctgacccatgtggctttgcagtgctgttcgtccagaagcatggcacacgatgcttgtgcatgtggaaacttagcgactgtcaacatacattctcagggatttatccaaaaaaattaaaaaaagaatgagagcatttattgtactgtatatatattatagtatatgtctgaatattgaaaatataacattaactaatttataaaaaatattctatgtaatgcaaaatacttgaagctgcagtagcttggttttaaacaaaaacaaaaaaaaaactgagagaaaacctatcagaaggactaaaagtacgccttgcttcagggttggctcaggtggtgaacttcatgctgggcatctatgcagagccaccttttggattgcatggttggactgagatctattgggagaaattatatatgtatatatatttatacaacttatgtatacatatatatatgtatacacacagacacacacacacaccaccaacaaccaccactacaccacacatgcttataacaggcactagaataaagagggacaacaaaatacacagccagagcagcaagccttagcattaagaatatacaatatgccggaattggggttcgtgcctcctagcctaggaaacttaaaagaaatatccttttgacacaaaacacaaaatgttttccaaaacaattgacataatgatacattacgcctttgcagtgagctaataataagctaacctttgtgcacaaataacattatatatattatatatctattctgcataggtattttgactttgtgcaggacagaaagttgtgtaggtatgactgttctacttttcagttttctttttttttaatatattttattttctctagaaattactcaaacaaaagcagccttctatcttgccttgtcttaatgctttaaaataaccaaactggagatctaactaccaaactgttcattatattattaaataccaactttggttacagtatagtgtctttactttagctgatggttctgtaaccttgtgctttttaaagcaatttttatgttttggtgcaaaagttgtccagtgtctcttgttcccttcactagagaacatgcttagaggtatgtttgtaggtatttttgtttagaagaactatttcatgcgctccattttatttattataataggtaaaaagaaaaaaaaaggttgtaattcatcacccatgtaaacatgctcatgaagttgaaagtaattaagatttgatacactgatatcaatttatttatgtaactaaatcactgttttataaacttgttaatgatcaacaatttttgttttgattaaaattagttttttgaaagtt

SEQ ID NO: 23803 - DNA, 3942 bp, Homo sapiens
  misc_feature 1..3942: note = ENST00000371532
  source 1..3942: mol_type = unassigned DNA; mol_type = unassigned DNA
gggaatatcctctcaagccctgaggtgcagggctgggaaggagtgggtgagcggctgggtcgtggcaggttggtctggggaggctggggaggctggggaggcgggaggagaacggttggccccggcagcggcgtgtcggagggcggatggggctaggaggccgcccggggggtggggtctgcggcgggccggcccccgcgtgcgcgtcgcctcgccgggcatttcaaaagctcgccggcagggcgcggcgctagctccgtgtgcctcgcaggcgtggtgggcgcgtcctggcagccgcccgcttggttctcgcgggatccgggctccggctcgacgccggctctctttttgacgccccgccgccggggttgccatggttcatttcttgcacccgggccacacgccccggaacatcgtccctcctgacgctcagaaggatgccctgggctgctgcgtggtacaggaagaggcatctccctacactttggtcaacatctgcctgaatgtcctgattgctaacctggagaaattgtgttctgaaagacctgatggaacactgtgccttccggagcattggagtttccctcaggaagtagccgagcgatttctcagggtgatgacttggcaaggttgctggaggagccagtatgagtcagatttcagaagcactgagccgatacaggaacagatcatgttttgtgaaggaagccctccacaggctgttcacagagacattttcaatggaggtaaccatgcctgctattttaaagcttgtggctataggaatgaggaatcacccattggatttgcgagtgcagttcacagccagtgcttgcgctctcaacctaacacgccagggcctggccaaggggatgcctgttcgcctgttgtcagaggtcacctgtctacttttcaaggctctgaaaaatttcccccattaccagcagttacagaagaattgtcttctctccttaaccaattccaggattcttgtggatgttccatttgacaggtttgatgctgccaagtttgtcatgagatggctctgtaagcatgaaaaccccaagatgcaaacaatggcagtgagtgtcacctctattctggctctgcagctctcacctgagcaaacggcacagcttgaagagcttttcatggcagttaaggaacttctagcaatagtaaaacaaaagactactgagaatttagatgatgtcaccttcttgtttactttgaaagcactttggaatcttacagatgggtctccagctgcctgcaagcacttcattgaaaatcaaggattgcaaatcttcatccaagtcttggagaccttttcagagtcagcaatacaaagcaaagtacttggtcttttgaacaacatagcagaagtcagagagctctcttccaagctggtgaccgaagatgtgctgaagcatatcaacagtttactctgtagcagggaaatggaagtcagctattttgctgcaggtatcatagcccacctgacatctgacagacagctttggatatcccgtgacttccagaggcgtactcttctccaagatctgcatgcaaccatacagaattggccaagttcaagttgtaagatgacagcattggtgacctatagatctttcaagacatttttcccgctccttggcaacttctctcaaccagaggttcagctctgggcactatgggctatgtatcatgtctgcagtaaaaatcccagcaaatactgcaaaatgttagttgaagaagaaggattgcagcttttgtgtgatatccaggagcacagtgaggcaacccccaaagcacagcagattgcagcctccattctggatgacttcagaatgcatttcatgaattatcagaggcccactctgtgtcaaatgcccttctgaacctaaggaatttcagaggtgtgtgctcttcctcaatgtcaggtgttctgccctggcagtaattgcacatcagttgtcattggagtttgtgagttggctgtctcattggcctttgattgttgattttatatatgttacaaaaggttggatttgtatgatagctgtaatcccaagtcaagttggactcattctgcagcctttcagcagcaattttgaagactcaaaccgtggactctgggaaggcctgggagcttgtgttggaacagctatgcaagttacttttctctagccttggacaattttttccctttgggagcttgtcatgggagtgggacctgttcactagaagagaaaggaaacctacagggagactttgatatttatattaaatttcctttgttgttatcgtcatgtgaagctatgagaaaagcttgggaagcatatgcttcaaaatgtagtgtttagaaggcagaacccctgttggagagcggggaaaagaatttatttatttatttatttatctatggctgggtatggtggctcacgcctgtaatcccagcactttgggaggccaaggcaggtggattgtctgaactcaggagttcgagatcagccttgccaacgtggtaaaactccgtctctaccaaaaaatacaaaaattagctgagcgtggtggtgtgcacctttactcctagctacttggaggctgaggtgggaggaccacttgagcccaggaggcagaggttgcagtgagctgagattgcaccactgcactccagcctggatgacagagtgagacctcatctcaaatgaatagaggggtggagaaaagagaaatatatttttttacctttttttttttttttttttttgtgacggaatctcgctctgtcgcccaggctggagtgcagtggcacaatctcggctcactgcaacctctgcctcccaggttccagcaattctcctgcctcagcctcctgagtagctgggactacaggcacatgccgccacgcccggctaatttttgtattttttagtagagacagggtttcaccatattggtcaggctggtctcgacctcctgacctcgtgatccacccgtctcggcctcccaaagtgctgggattacaggtgtgagtcactgcacctggcctttttacaattttgggtgtctatctttggcatgtttcctgttatgtgagcatgacatgctgtgtatgtgagtgagcttgtagggcgtggtgggacttaggcatttgcagacagtgtttagatgaaagattacatgtaatgataaatctgaatccctccattttatttgggtggaaccatgaccaaaaatggtaggaagacgaaaggccagaaagagactttgccagagagttcacggagttttcttaccccgcatgctgactaaagaaaacatgggcttttctgaaaccagcttcaactacagtataaactatatcagaagcttacttgataagccttgcggagctgctctgaggaatagtgtgaattccttccttgccttattgttgactgttaatgaacatgttttgtcatttatctgtttaagtttttcagaaaataaaagtaaatttctgttagcacattttaggattagatttttgtgcttttggctggcttggttcagattcttaactagagtaccatgtactgtctttggaaatcaaatgaggaagaagctcattctcttactctaaaccatgttccaaactattaccagagtccaaccagataagcagaatttgtaaccttacttccttccatagtccttaaactgtactgtattttttcacactcttgcatgattccaaaaggatatcttcctgacctgggttctagtacctcagagcattgttatcagatgctagcttattctaatgtgaggatgtgttaggggaactagtgtgttaagtccaattctgtacaagacatcctttcaagttctgtgtcattcacaacaatcctcacgggtaggtgagttttattttcctcacttaacagatgagaaaaa

SEQ ID NO: 23804 - DNA, 4469 bp, Homo sapiens
  misc_feature 1..4469: note = ENST00000371528
  source 1..4469: mol_type = unassigned DNA; mol_type = unassigned DNA
aaaagctcgccggcagggcgcggcgctagctccgtgtgcctcgcaggcgtggtgggcgcgtcctggcagccgcccgcttggttctcgcgggatccgggctccggctcgacgccggctctctttttgacgccccgccgccggggttgccatggttcatttcttgcacccgggccacacgccccggaacatcgtccctcctgacgctcagaaggatgccctgggctgctgcgtggtacaggaagaggcatctccctacactttggtcaacatctgcctgaatgtcctgattgctaacctggagaaattgtgttctgaaagacctgatggaacactgtgccttccggagcattggagtttccctcaggaagtagccgagcgatttctcagggtgatgacttggcaaggcaagctgactgacagaacagccagcattttccgaggcaaccaaatgaaactgaagctggtcaatatccaaaaagctaaaatctctacagctgcattcataaaagccttctgccgtcataagctcattgaactgaatgctactgcagtgcacgctgacctcccagttccagacatcataagtggactctgcagcaataggtggatccagcaaaacctccagtgtctcctgttagactcgacaagcatccctcaaaattcaagattactgttctttagtcagctcactggtcttcgcattttaagtgtttttaatgtttgttttcatactgaagacctggctaatgtttctcagttaccaagactggaaagcttagatatctctaatactctagtcactgatatttctgcactgcttacctgtaaggatcgattgaagtctctcacaatgcactatctgaaatgcctggccatgaccaaatcacaaattcttgcagtcattagagaacttaaatgtctgcttcaccttgatatttctgatcacaggcaactcaaatcagacctagcttttcatttgctacagcagaaggatatcctgcccaatgttgtgtcattggatatttctgggggcaattgcatcactgatgaagctgtagaactgtttatacgactgcggcctgccatgcaatttgtgggactattggccacggatgctggctcttctgacttctttactacaaagcaaggcttgagggttgctggaggagccagtatgagtcagatttcagaagcactgagccgatacaggaacagatcatgttttgtgaaggaagccctccacaggctgttcacagagacattttcaatggaggtaaccatgcctgctattttaaagcttgtggctataggaatgaggaatcacccattggatttgcgagtgcagttcacagccagtgcttgcgctctcaacctaacacgccagggcctggccaaggggatgcctgttcgcctgttgtcagaggtcacctgtctacttttcaaggctctgaaaaatttcccccattaccagcagttacagaagaattgtcttctctccttaaccaattccaggattcttgtggatgttccatttgacaggtttgatgctgccaagtttgtcatgagatggctctgtaagcatgaaaaccccaagatgcaaacaatggcagtgagtgtcacctctattctggctctgcagctctcacctgagcaaacggcacagcttgaagagcttttcatggcagttaaggaacttctagcaatagtaaaacaaaagactactgagaatttagatgatgtcaccttcttgtttactttgaaagcactttggaatcttacagatgggtctccagctgcctgcaagcacttcattgaaaatcaaggattgcaaatcttcatccaagtcttggagaccttttcagagtcagcaatacaaagcaaagtacttggtcttttgaacaacatagcagaagtcagagagctctcttccaagctggtgaccgaagatgtgctgaagcatatcaacagtttactctgtagcagggaaatggaagtcagctattttgctgcaggtatcatagcccacctgacatctgacagacagctttggatatcccgtgacttccagaggcgtactcttctccaagatctgcatgcaaccatacagaattggccaagttcaagttgtaagatgacagcattggtgacctatagatctttcaagacatttttcccgctccttggcaacttctctcaaccagaggttcagctctgggcactatgggctatgtatcatgtctgcagtaaaaatcccagcaaatactgcaaaatgttagttgaagaagaaggattgcagcttttgtgtgatatccaggagcacagtgaggcaacccccaaagcacagcagattgcagcctccattctggatgacttcagaatgcatttcatgaattatcagaggcccactctgtgtcaaatgcccttctgaacctaaggaatttcagaggtgtgtgctcttcctcaatgtcaggtgttctgccctggcagtaattgcacatcagttgtcattggagtttgtgagttggctgtctcattggcctttgattgttgattttatatatgttacaaaaggttggatttgtatgatagctgtaatcccaagtcaagttggactcattctgcagcctttcagcagcaattttgaagactcaaaccgtggactctgggaaggcctgggagcttgtgttggaacagctatgcaagttacttttctctagccttggacaattttttccctttgggagcttgtcatgggagtgggacctgttcactagaagagaaaggaaacctacagggagactttgatatttatattaaatttcctttgttgttatcgtcatgtgaagctatgagaaaagcttgggaagcatatgcttcaaaatgtagtgtttagaaggcagaacccctgttggagagcggggaaaagaatttatttatttatttatttatctatggctgggtatggtggctcacgcctgtaatcccagcactttgggaggccaaggcaggtggattgtctgaactcaggagttcgagatcagccttgccaacgtggtaaaactccgtctctaccaaaaaatacaaaaattagctgagcgtggtggtgtgcacctttactcctagctacttggaggctgaggtgggaggaccacttgagcccaggaggcagaggttgcagtgagctgagattgcaccactgcactccagcctggatgacagagtgagacctcatctcaaatgaatagaggggtggagaaaagagaaatatatttttttacctttttttttttttttttttttgtgacggaatctcgctctgtcgcccaggctggagtgcagtggcacaatctcggctcactgcaacctctgcctcccaggttccagcaattctcctgcctcagcctcctgagtagctgggactacaggcacatgccgccacgcccggctaatttttgtattttttagtagagacagggtttcaccatattggtcaggctggtctcgacctcctgacctcgtgatccacccgtctcggcctcccaaagtgctgggattacaggtgtgagtcactgcacctggcctttttacaattttgggtgtctatctttggcatgtttcctgttatgtgagcatgacatgctgtgtatgtgagtgagcttgtagggcgtggtgggacttaggcatttgcagacagtgtttagatgaaagattacatgtaatgataaatctgaatccctccattttatttgggtggaaccatgaccaaaaatggtaggaagacgaaaggccagaaagagactttgccagagagttcacggagttttcttaccccgcatgctgactaaagaaaacatgggcttttctgaaaccagcttcaactacagtataaactatatcagaagcttacttgataagccttgcggagctgctctgaggaatagtgtgaattccttccttgccttattgttgactgttaatgaacatgttttgtcatttatctgtttaagtttttcagaaaataaaagtaaatttctgttagcacattttaggattagatttttgtgcttttggctggcttggttcagattcttaactagagtaccatgtactgtctttggaaatcaaatgaggaagaagctcattctcttactctaaaccatgttccaaactattaccagagtccaaccagataagcagaatttgtaaccttacttccttccatagtccttaaactgtactgtattttttcacactcttgcatgattccaaaaggatatcttcctgacctgggttctagtacctcagagcattgttatcagatgctagcttattctaatgtgaggatgtgttaggggaactagtgtgttaagtccaattctgtacaagacatcctttcaagttctgtgtcattcacaacaatcctcacgggtaggtgagttttattttcctcacttaacagatgagaaaaa

SEQ ID NO: 23805 - DNA, 3682 bp, Homo sapiens
  misc_feature 1..3682: note = ENST00000612017
  source 1..3682: mol_type = unassigned DNA; mol_type = unassigned DNA
gggaatatcctctcaagccctgaggtgcagggctgggaaggagtgggtgagcggctgggtcgtggcaggttggtctggggaggctggggaggctggggaggcgggaggagaacggttggccccggcagcggcgtgtcggagggcggatggggctaggaggccgcccggggggtggggtctgcggcgggccggcccccgcgtgcgcgtcgcctcgccgggcatttcaaaagctcgccggcagggcgcggcgctagctccgtgtgcctcgcaggcgtggtgggcgcgtcctggcagccgcccgcttggttctcgcgggatccgggctccggctcgacgccggctctctttttgacgccccgccgccggggttgccatggttcatttcttgcacccgggccacacgccccggaacatcgtccctcctgacgctcagaaggatgccctgggctgctgcgtggtacaggaagaggcatctccctacactttggtcaacatctgcctgaatgtcctgattgctaacctggagaaattgtgttctgaaagacctgatggaacactgtgccttccggagcattggagtttccctcaggaagtagccgagcgatttctcagggtgatgacttggcaaggttgctggaggagccagtatgagtcagatttcagaagcactgagccgatacaggaacagatcatgttttgtgaaggaagccctccacaggctgttcacagagacattttcaatggaggtaaccatgcctgctattttaaagcttgtggctataggaatgaggaatcacccattggatttgcgagtgcagttcacagccagtgcttgcgctctcaacctaacacgccagggcctggccaaggggatgcctgttcgcctgttgtcagaggtcacctgtctacttttcaaggctctgaaaaatttcccccattaccagcagttacagaagaattgtcttctctccttaaccaattccaggattcttgtggatgttccatttgacaggtttgatgctgccaagtttgtcatgagatggctctgtaagcatgaaaaccccaagatgcaaacaatggcagtgagtgtcacctctattctggctctgcagctctcacctgagcaaacggcacagcttgaagagcttttcatggcagttaaggaacttctagcaatagtaaaacaaaagactactgagaatttagatgatgtcaccttcttgtttactttgaaagcactttggaatcttacagatgggtctccagctgcctgcaagcacttcattgaaaatcaaggattgcaaatcttcatccaagtcttggagaccttttcagagtcagcaatacaaagcaaagtacttggtcttttgaacaacatagcagaagtcagagagctctcttccaagctggtgaccgaagatgtgctgaagcatatcaacagtttactctgtagcagggaaatggaagtcagctattttgctgcaggtatcatagcccacctgacatctgacagacagctttggatatcccgtgacttccagaggcgtactcttctccaagatctgcatgcaaccatacagaattggccaagttcaagttgtaagatgacagcattggtgacctatagatctttcaagacatttttcccgctccttggcaacttctctcaaccagaggttcagctctgggcactatgggctatgtatcatgtctgcagtaaaaatcccagcaaatactgcaaaatgttagttgaagaagaaggattgcagcttttgtgtgatatccaggagcacagtgaggcaacccccaaagcacagcagattgcagcctccattctggatgacttcagaatgcatttcatgaattatcagaggcccactctgtgtcaaatgcccttctgaacctaaggaatttcagaggtgtgtgctcttcctcaatgtcaggtgttctgccctggcagtaattgcacatcagttgtcattggagtttgtgagttggctgtctcattggcctttgattgttgattttatatatgttacaaaaggttggatttgtatgatagctgtaatcccaagtcaagttggactcattctgcagcctttcagcagcaattttgaagactcaaaccgtggactctgggaaggcctgggagcttgtgttggaacagctatgcaagttacttttctctagccttggacaattttttccctttgggagcttgtcatgggagtgggacctgttcactagaagagaaaggaaacctacagggagactttgatatttatattaaatttcctttgttgttatcgtcatgtgaagctatgagaaaagcttgggaagcatatgcttcaaaatgtagtgtttagaaggcagaacccctgttggagagcggggaaaagaatttatttatttatttatttatctatggctgggtatggtggctcacgcctgtaatcccagcactttgggaggccaaggcaggtggattgtctgaactcaggagttcgagatcagccttgccaacgtggtaaaactccgtctctaccaaaaaatacaaaaattagctgagcgtggtggtgtgcacctttactcctagctacttggaggctgaggtgggaggaccacttgagcccaggaggcagaggttgcagtgagctgagattgcaccactgcactccagcctggatgacagagtgagacctcatctcaaatgaatagaggggtggagaaaagactcgtgatccacccgtctcggcctcccaaagtgctgggattacaggtgtgagtcactgcacctggcctttttacaattttgggtgtctatctttggcatgtttcctgttatgtgagcatgacatgctgtgtatgtgagtgagcttgtagggcgtggtgggacttaggcatttgcagacagtgtttagatgaaagattacatgtaatgataaatctgaatccctccattttatttgggtggaaccatgaccaaaaatggtaggaagacgaaaggccagaaagagactttgccagagagttcacggagttttcttaccccgcatgctgactaaagaaaacatgggcttttctgaaaccagcttcaactacagtataaactatatcagaagcttacttgataagccttgcggagctgctctgaggaatagtgtgaattccttccttgccttattgttgactgttaatgaacatgttttgtcatttatctgtttaagtttttcagaaaataaaagtaaatttctgttagcacattttaggattagatttttgtgcttttggctggcttggttcagattcttaactagagtaccatgtactgtctttggaaatcaaatgaggaagaagctcattctcttactctaaaccatgttccaaactattaccagagtccaaccagataagcagaatttgtaaccttacttccttccatagtccttaaactgtactgtattttttcacactcttgcatgattccaaaaggatatcttcctgacctgggttctagtacctcagagcattgttatcagatgctagcttattctaatgtgaggatgtgttaggggaactagtgtgttaagtccaattctgtacaagacatcctttcaagttctgtgtcattcacaacaatcctcacgggtaggtgagttttattttcctcacttaacagatg

SEQ ID NO: 23806 - DNA, 2493 bp, Homo sapiens
  misc_feature 1..2493: note = ENST00000322764
  source 1..2493: mol_type = unassigned DNA; mol_type = unassigned DNA
ctgagccgggctggggcggcgggggcggcagtgagtggggtgggggcgagcggacctcggcggagcctccggcctgaggcaggatcagggccccttcctgggggagtttcctgcctggtccgcccttccccgctctccccgccccctctccgggccgctccttgtatggtctgggcgccgctctctccccgccccctctcttctccctccctcctccttccgtgtgtccctccccgcccggctggaggctgctccggaccgggacgcagagtctgcggacccggcgccgaggcggccacccgagacgcggcgcgcacgctccggcctgcgcagcccggcccggccatggcggccccccgcccgtctcccgcgatctccgtttcggtctcggctccggctttttacgccccgcagaagaagttcggccctgtggtggccccaaagcccaaagtgaatcccttccggcccggggacagcgagcctcccccggcacccggggcccagcgcgcacagatgggccgggtgggcgagattcccccgccgcccccggaagactttcccctgcctccacctccccttgctggggatggcgacgatgcagagggtgctctgggaggtgccttcccgccgccccctcccccgatcgaggaatcatttccccctgcgcctctggaggaggagatcttcccttccccgccgcctcctccggaggaggagggagggcctgaggcccccataccgcccccaccacagcccagggagaaggtgagcagtattgatttggagatcgactctctgtcctcactgctggatgacatgaccaagaatgatcctttcaaagcccgggtgtcatctggatatgtgcccccaccagtggccactccattcagttccaagtccagtaccaagcctgcagccgggggcacagcacccctgcctccttggaagtccccttccagctcccagcctctgccccaggttccggctccggctcagagccagacacagttccatgttcagccccagccccagcccaagcctcaggtccaactccatgtccagtcccagacccagcctgtgtctttggctaacacccagccccgagggcccccagcctcatctccggctccagcccctaagttttctccagtgactcctaagtttactcctgtggcttccaagttcagtcctggagccccaggtggatctgggtcacaaccaaatcaaaaattggggcaccccgaagctctttctgctggcacaggctcccctcaacctcccagcttcacctatgcccagcagagggagaagccccgagtgcaggagaagcagcaccccgtgcccccaccggctcagaaccaaaaccaggtgcgctcccctggggccccagggcccctgactctgaaggaggtggaggagctggagcagctgacccagcagctaatgcaggacatggagcatcctcagaggcagaatgtggctgtcaacgaactctgcggccgatgccatcaacccctggcccgggcgcagccagccgtccgcgctctagggcagctgttccacatcgcctgcttcacctgccaccagtgtgcgcagcagctccagggccagcagttctacagtctggagggggcgccgtactgcgagggctgttacactgacaccctggagaagtgtaacacctgcggggagcccatcactgaccgcatgctgagggccacgggcaaggcctatcacccgcactgcttcacctgtgtggtctgcgcccgccccctggagggcacctccttcatcgtggaccaggccaaccggccccactgtgtccccgactaccacaagcagtacgccccgaggtgctccgtctgctctgagcccatcatgcctgagcctggccgagatgagactgtgcgagtggtcgccctggacaagaacttccacatgaagtgttacaagtgtgaggactgcgggaagcccctgtcgattgaggcagatgacaatggctgcttccccctggacggtcacgtgctctgtcggaagtgccacactgctagagcccagacctgagtgaggacaggccctcttcagaccgcagtccatgccccattgtggaccacccacactgagaccacctgcccccacctcagttattgttttgatgtctagcccctcccatttccaacccctccctagcatcccaggtgccctgacccaggacccaacatggtctagggatgcaggatccccgccctggggtctggtcctcgcccatcctgcagggattgcccaccgtcttccagacaccccacctgaggggggcaccaggtttagtgctgctgctttcactgctgcacccgcgccctcggccggccccccgagcagcctttgtactctgcttgcggagggctgggagaccctccaggacattcccaccctcccccatgctgccaagttgtagctatagctacaaataaaaaaaaaccttgttttccagaa

SEQ ID NO: 23807 - DNA, 533 bp, Homo sapiens
  misc_feature 1..533: note = ENST00000449630
  source 1..533: mol_type = unassigned DNA; mol_type = unassigned DNA
ccttccgtgtgtccctccccgcccggctggaggctgctccggaccgggacgcagagtctgcggacccggcgccgaggcggccacccgagacgcggcgcgcacgctccggcctgcgactttcccctgcctccacctccccttgctggggatggcgacgatgcagagggtgctctgggaggtgccttcccgccgccccctcccccgatcgaggaatcatttccccctgcgcctctggaggaggagatcttcccttccccgccgcctcctccggaggaggagggagggcctgaggcccccataccgcccccaccacagcccagggagaaggtgagcagtattgatttggagatcgactctctgtcctcactgctggatgacatgaccaagaatgatcctttcaaagcccgggtgtcatctggatatgtgcccccaccagtggccactccattcagttccaagtccagtaccaagcctgcagccgggggcacagcacccctgcctccttggaagtccccttccagctcccagcctct

SEQ ID NO: 23808 - DNA, 1146 bp, Homo sapiens
  misc_feature 1..1146: note = ENST00000468083
  source 1..1146: mol_type = unassigned DNA; mol_type = unassigned DNA
ccggcgccgaggcggccacccgagacgcggcgcgcacgctccggcctgcgcagcccggcccggccatggcggccccccgcccgtctcccgcgatctccgtttcggtctcggctccggctttttacgccccgcagaagaagttcggccctgtggtggccccaaagcccaaagtgaatcccttccggcccggggacagcgagcctcccccggcacccggggcccagcgcgcacagatgggccgggtgggcgagattcccccgccgcccccggaagactttcccctgcctccacctccccttgctggggatggcgacgatgcagagggtgctctgggaggtgccttcccgccgccccctcccccgatcgaggaatcatttccccctgcgcctctggaggaggagatcttcccttccccgccgcctcctccggaggaggagggagggcctgaggcccccataccgcccccaccacaggtacggaggcctgggaggggcggctgcactggacacccccaaggagaggagaagagggccctttcttcttacctcccctgcacctctgccttgggggtggggggatagaggcatggaataggtgctctgacctctgaccctctagcccagggagaaggtgagcagtattgatttggagatcgactctctgtcctcactgctggatgacatgaccaagaatgatcctttcaaagcccgggtgtcatctggatatgtgcccccaccagtggccactccattcagttccaagtccagtaccaagcctgcagccgggggcacagcacccctgcctccttggaagtccccttccagctcccagcctctgccccaggttccggctccggctcagagccagacacagttccatgttcagccccagccccagcccaagcctcaggtccaactccatgtccagtcccagacccagcctgtgtctttggctaacacccagccccgagggcccccagcctcatctccggctccagcccctaagttttctccagtgactcctaagtttactcctgtggcttccaagttcagtcctggagccccaggtggatctgggtcacaaccaaatcaaaaattggggcaccccgaagctctttctgctggcacaggctcccctcaacctccc

SEQ ID NO: 23809 - DNA, 703 bp, Homo sapiens
  misc_feature 1..703: note = ENST00000457235
  source 1..703: mol_type = unassigned DNA; mol_type = unassigned DNA
cggcgccgaggcggccacccgagacgcggcgcgcacgctccggcctgcggtgaggcgcggggagcggcagggcggccccacggggagggggcgcggggcgccgggagggggcgagtgggggtcaccaaggggagctgggaccgcctggggctcctgagcccggctccgcgctgcgtaacccggcgacccaccccagcagcccggcccggccatggcggccccccgcccgtctcccgcgatctccgtttcggtctcggctccggctttttacgccccgcagaagaagttcggccctgtggtggccccaaagcccaaagtgaatcccttccggcccggggacagcgagcctcccccggcacccggggcccagcgcgcacagatgggccgggtgggcgagattcccccgccgcccccggaagactttcccctgcctccacctccccttgctggggatggcgacgatgcagagggtgctctgggaggtgccttcccgccgccccctcccccgatcgaggaatcatttccccctgcgcctctggaggaggagatcttcccttccccgccgcctcctccggaggaggagggagggcctgaggcccccataccgcccccaccacagcccagggagaaggtgagcagtattgatttggagatcgactctctgtcctcactgctggatgacatgaccaagaatgatcctttc

SEQ ID NO: 23810 - DNA, 2050 bp, Homo sapiens
  misc_feature 1..2050: note = ENST00000354434
  source 1..2050: mol_type = unassigned DNA; mol_type = unassigned DNA
gcggccccccgcccgtctcccgcgatctccgtttcggtctcggctccggctttttacgccccgcagaagaagttcggccctgtggtggccccaaagcccaaagtgaatcccttccggcccggggacagcgagcctcccccggcacccggggcccagcgcgcacagatgggccgggtgggcgagattcccccgccgcccccggaagactttcccctgcctccacctccccttgctggggatggcgacgatgcagagggtgctctgggaggtgccttcccgccgccccctcccccgatcgaggaatcatttccccctgcgcctctggaggaggagatcttcccttccccgccgcctcctccggaggaggagggagggcctgaggcccccataccgcccccaccacaggtgtcatctggatatgtgcccccaccagtggccactccattcagttccaagtccagtaccaagcctgcagccgggggcacagcacccctgcctccttggaagtccccttccagctcccagcctctgccccaggttccggctccggctcagagccagacacagttccatgttcagccccagccccagcccaagcctcaggtccaactccatgtccagtcccagacccagcctgtgtctttggctaacacccagccccgagggcccccagcctcatctccggctccagcccctaagttttctccagtgactcctaagtttactcctgtggcttccaagttcagtcctggagccccaggtggatctgggtcacaaccaaatcaaaaattggggcaccccgaagctctttctgctggcacaggctcccctcaacctcccagcttcacctatgcccagcagagggagaagccccgagtgcaggagaagcagcaccccgtgcccccaccggctcagaaccaaaaccaggtgcgctcccctggggccccagggcccctgactctgaaggaggtggaggagctggagcagctgacccagcagctaatgcaggacatggagcatcctcagaggcagaatgtggctgtcaacgaactctgcggccgatgccatcaacccctggcccgggcgcagccagccgtccgcgctctagggcagctgttccacatcgcctgcttcacctgccaccagtgtgcgcagcagctccagggccagcagttctacagtctggagggggcgccgtactgcgagggctgttacactgacaccctggagaagtgtaacacctgcggggagcccatcactgaccgcatgctgagggccacgggcaaggcctatcacccgcactgcttcacctgtgtggtctgcgcccgccccctggagggcacctccttcatcgtggaccaggccaaccggccccactgtgtccccgactaccacaagcagtacgccccgaggtgctccgtctgctctgagcccatcatgcctgagcctggccgagatgagactgtgcgagtggtcgccctggacaagaacttccacatgaagtgttacaagtgtgaggactgcgggaagcccctgtcgattgaggcagatgacaatggctgcttccccctggacggtcacgtgctctgtcggaagtgccacactgctagagcccagacctgagtgaggacaggccctcttcagaccgcagtccatgccccattgtggaccacccacactgagaccacctgcccccacctcagttattgttttgatgtctagcccctcccatttccaacccctccctagcatcccaggtgccctgacccaggacccaacatggtctagggatgcaggatccccgccctggggtctggtcctcgcccatcctgcagggattgcccaccgtcttccagacaccccacctgaggggggcaccaggtttagtgctgctgctttcactgctgcacccgcgccctcggccggccccccgagcagcctttgtactctgcttgcggagggctgggagaccctccaggacattcccaccctcccccatgctgccaagttgtagctatagctacaaataaaaaaaaaccttgttttccag

SEQ ID NO: 23811 - DNA, 2123 bp, Homo sapiens
  misc_feature 1..2123: note = ENST00000392910
  source 1..2123: mol_type = unassigned DNA; mol_type = unassigned DNA
agatgttcttacctcatcgtggagctcgtggctgggagccagggctcctgggaccgttccaagtcccccgcctgggagtgggagtcgggaatgtggggcacgaatcttcccctccgggtccgttttccgaagtgtaacgggagctgcaccactcctcggcagtgcgcccggcctttcctgacctgactttcccctgcctccacctccccttgctggggatggcgacgatgcagagggtgctctgggaggtgccttcccgccgccccctcccccgatcgaggaatcatttccccctgcgcctctggaggaggagatcttcccttccccgccgcctcctccggaggaggagggagggcctgaggcccccataccgcccccaccacagcccagggagaaggtgagcagtattgatttggagatcgactctctgtcctcactgctggatgacatgaccaagaatgatcctttcaaagcccgggtgtcatctggatatgtgcccccaccagtggccactccattcagttccaagtccagtaccaagcctgcagccgggggcacagcacccctgcctccttggaagtccccttccagctcccagcctctgccccaggttccggctccggctcagagccagacacagttccatgttcagccccagccccagcccaagcctcaggtccaactccatgtccagtcccagacccagcctgtgtctttggctaacacccagccccgagggcccccagcctcatctccggctccagcccctaagttttctccagtgactcctaagtttactcctgtggcttccaagttcagtcctggagccccaggtggatctgggtcacaaccaaatcaaaaattggggcaccccgaagctctttctgctggcacaggctcccctcaacctcccagcttcacctatgcccagcagagggagaagccccgagtgcaggagaagcagcaccccgtgcccccaccggctcagaaccaaaaccaggtgcgctcccctggggccccagggcccctgactctgaaggaggtggaggagctggagcagctgacccagcagctaatgcaggacatggagcatcctcagaggcagaatgtggctgtcaacgaactctgcggccgatgccatcaacccctggcccgggcgcagccagccgtccgcgctctagggcagctgttccacatcgcctgcttcacctgccaccagtgtgcgcagcagctccagggccagcagttctacagtctggagggggcgccgtactgcgagggctgttacactgacaccctggagaagtgtaacacctgcggggagcccatcactgaccgcatgctgagggccacgggcaaggcctatcacccgcactgcttcacctgtgtggtctgcgcccgccccctggagggcacctccttcatcgtggaccaggccaaccggccccactgtgtccccgactaccacaagcagtacgccccgaggtgctccgtctgctctgagcccatcatgcctgagcctggccgagatgagactgtgcgagtggtcgccctggacaagaacttccacatgaagtgttacaagtgtgaggactgcgggaagcccctgtcgattgaggcagatgacaatggctgcttccccctggacggtcacgtgctctgtcggaagtgccacactgctagagcccagacctgagtgaggacaggccctcttcagaccgcagtccatgccccattgtggaccacccacactgagaccacctgcccccacctcagttattgttttgatgtctagcccctcccatttccaacccctccctagcatcccaggtgccctgacccaggacccaacatggtctagggatgcaggatccccgccctggggtctggtcctcgcccatcctgcagggattgcccaccgtcttccagacaccccacctgaggggggcaccaggtttagtgctgctgctttcactgctgcacccgcgccctcggccggccccccgagcagcctttgtactctgcttgcggagggctgggagaccctccaggacattcccaccctcccccatgctgccaagttgtagctatagctacaaataaaaaaaaaccttgttttccag

SEQ ID NO: 23812 - DNA, 504 bp, Homo sapiens
  misc_feature 1..504: note = ENST00000477373
  source 1..504: mol_type = unassigned DNA; mol_type = unassigned DNA
gttttccgaagtgtaacgggagctgcaccactcctcggcagtgcgcccggcctttcctgacctggtgtcatctggatatgtgcccccaccagtggccactccattcagttccaagtccagtaccaagcctgcagccgggggcacagcacccctgcctccttggaagtccccttccagctcccagcctctgccccaggttccggctccggctcagagccagacacagttccatgttcagccccagccccagcccaagcctcaggtccaactccatgtccagtcccagacccagcctgtgtctttggctaacacccagccccgagggcccccagcctcatctccggctccagcccctaagttttctccagtgactcctaagtttactcctgtggcttccaagttcagtcctggagccccaggtggatctgggtcacaaccaaatcaaaaattggggcaccccgaagctctttctgctggcacaggctcccctcaacctcccagctt

SEQ ID NO: 23813 - DNA, 632 bp, Homo sapiens
  misc_feature 1..632: note = ENST00000436448
  source 1..632: mol_type = unassigned DNA; mol_type = unassigned DNA
agtccagtaccaagcctgcagccgggggcacagcacccctgcctccttggaagtccccttccagctcccagcctctgccccaggttccggctccggctcagagccagacacagttccatgttcagccccagccccagcccaagcctcaggtccaactccatgtccagtcccagacccagcctgtgtctttggctaacacccagccccgagggcccccagcctcatctccggctccagcccctaagttttctccagtgactcctaagtttactcctgtggcttccaagttcagtcctggagccccaggtggatctgggtcacaaccaaatcaaaaattggggcaccccgaagctctttctgctggcacaggctcccctcaacctcccagcttcacctatgcccagcagagggagaagccccgagtgcaggagaagcagcaccccgtgcccccaccggctcagaaccaaaaccaggggctgctcagcagcaggcaggccgggtgcgctcccctggggccccagggcccctgactctgaaggaggtggaggagctggagcagctgacccagcagctaatgcaggacatggagcatcctcagaggcagaatgtggctgtcaacgaactctgcggcc

SEQ ID NO: 23814 - DNA, 926 bp, Homo sapiens
  misc_feature 1..926: note = ENST00000446634
  source 1..926: mol_type = unassigned DNA; mol_type = unassigned DNA
tccaactccatgtccagtcccagacccagcctgtgtctttggctaacacccagccccgagggcccccagcctcatctccggctccagcccctaagttttctccagtgactcctaagtttactcctgtggcttccaagttcagtcctggagccccaggtggatctgggtcacaaccaaatcaaaaattggggcaccccgaagctctttctgctggcacaggctcccctcaacctcccagcttcacctatgcccagcagagggagaagccccgagtgcaggagaagcagcaccccgtgcccccaccggctcagaaccaaaaccagttcaggaaataagatcgtccaatttctggtgacgaagatgaccctgatggtcatctagtccaagcatccagagtccactgatagtgttgatgtctacctacactcggacacagcataggaagaaatgccaagggccagtgagctttgcagaatcctgggctgctcagcagcaggcaggccgggtgcgctcccctggggccccagggcccctgactctgaaggaggtggaggagctggagcagctgacccagcagctaatgcaggacatggagcatcctcagaggcagaatgtggctgtcaacgaactctgcggccgatgccatcaacccctggcccgggcgcagccagccgtccgcgctctagggcagctgttccacatcgcctgcttcacctgccaccagtgtgcgcagcagctccagggccagcagttctacagtctggagggggcgccgtactgcgagggctgttacactgacaccctggagaagtgtaacacctgcggggagcccatcactgaccgcatgctgagggccacgggcaaggcctatcacccgcactgcttcacctgtgtggtctgcgcccgccccctggagggcacctcct

SEQ ID NO: 23815 - DNA, 560 bp, Homo sapiens
  misc_feature 1..560: note = ENST00000497119
  source 1..560: mol_type = unassigned DNA; mol_type = unassigned DNA
ccggtgcttcagtgacccgagctgctgtgtgcgtggcctccgtccgcccagtcattctggcctgtctgtgactgctcagggggtttgggcagagtgggtggaaatgtcttgctgtacgagatccaggcttaggtcccttcccctgttatttgtgtggtgctggggatggcgggggtagggggacgagggagaagctttaagggtcaagcctgagcatctgggacacgagctgggagctaagcctcatcggaagaagccgggtaggctggcctgggaaggttcttggaggcagcagccctctagagtgtgaggaaaatgttgggattgcaggtgcgctcccctggggccccagggcccctgactctgaaggaggtggaggagctggagcagctgacccagcagctaatgcaggacatggagcatcctcagaggcagaatgtggctgtcaacgaactctgcggccgatgccatcaacccctggcccgggcgcagccagccgtccgcgctctagggcagctgttccacatcgcctgcttcacctgccaccagtgtgcgcagca

SEQ ID NO: 23816 - protein, 1474 aa, Homo sapiens
  REGION 1..1474: note = ENSP00000323929
MGKNKLLHPSLVLLLLVLLPTDASVSGKPQYMVLVPSLLHTETTEKGCVLLSYLNETVTVSASLESVRGNRSLFTDLEAENDVLHCVAFAVPKSSSNEEVMFLTVQVKGPTQEFKKRTTVMVKNEDSLVFVQTDKSIYKPGQTVKFRVVSMDENFHPLNELIPLVYIQDPKGNRIAQWQSFQLEGGLKQFSFPLSSEPFQGSYKVVVQKKSGGRTEHPFTVEEFVLPKFEVQVTVPKIITILEEEMNVSVCGLYTYGKPVPGHVTVSICRKYSDASDCHGEDSQAFCEKFSGQLNSHGCFYQQVKTKVFQLKRKEYEMKLHTEAQIQEEGTVVELTGRQSSEITRTITKLSFVKVDSHFRQGIPFFGQVRLVDGKGVPIPNKVIFIRGNEANYYSNATTDEHGLVQFSINTTNVMGTSLTVRVNYKDRSPCYGYQWVSEEHEEAHHTAYLVFSPSKSFVHLEPMSHELPCGHTQTVQAHYILNGGTLLGLKKLSFYYLIMAKGGIVRTGTHGLLVKQEDMKGHFSISIPVKSDIAPVARLLIYAVLPTGDVIGDSAKYDVENCLANKVDLSFSPSQSLPASHAHLRVTAAPQSVCALRAVDQSVLLMKPDAELSASSVYNLLPEKDLTGFPGPLNDQDNEDCINRHNVYINGITYTPVSSTNEKDMYSFLEDMGLKAFTNSKIRKPKMCPQLQQYEMHGPEGLRVGFYESDVMGRGHARLVHVEEPHTETVRKYFPETWIWDLVVVNSAGVAEVGVTVPDTITEWKAGAFCLSEDAGLGISSTASLRAFQPFFVELTMPYSVIRGEAFTLKATVLNYLPKCIRVSVQLEASPAFLAVPVEKEQAPHCICANGRQTVSWAVTPKSLGNVNFTVSAEALESQELCGTEVPSVPEHGRKDTVIKPLLVEPEGLEKETTFNSLLCPSGGEVSEELSLKLPPNVVEESARASVSVLGDILGSAMQNTQNLLQMPYGCGEQNMVLFAPNIYVLDYLNETQQLTPEIKSKAIGYLNTGYQRQLNYKHYDGSYSTFGERYGRNQGNTWLTAFVLKTFAQARAYIFIDEAHITQALIWLSQRQKDNGCFRSSGSLLNNAIKGGVEDEVTLSAYITIALLEIPLTVTHPVVRNALFCLESAWKTAQEGDHGSHVYTKALLAYAFALAGNQDKRKEVLKSLNEEAVKKDNSVHWERPQKPKAPVGHFYEPQAPSAEVEMTSYVLLAYLTAQPAPTSEDLTSATNIVKWITKQQNAQGGFSSTQDTVVALHALSKYGAATFTRTGKAAQVTIQSSGTFSSKFQVDNNNRLLLQQVSLPELPGEYSMKVTGEGCVYLQTSLKYNILPEKEEFPFALGVQTLPQTCDEPKAHTSFQISLSVSYTGSRSASNMAIVDVKMVSGFIPLKPTVKMLERSNHVSRTEVSSNHVLIYLDKVSNQTLSLFFTVLQDVPVRDLKPAIVKVYDYYETDEFAIAEYNAPCSKDLGNA

SEQ ID NO: 23817 - protein, 73 aa, Homo sapiens
  REGION 1..73: note = ENSP00000438599
NGGTLLGLKKLSFYYLIMAKGGIVRTGTHGLLVKQEDMKGHFSISIPVKSDIAPVARFTTCYQKRTSLASLGL

SEQ ID NO: 23818 - protein, 90 aa, Homo sapiens
  REGION 1..90: note = ENSP00000445717
MGKNKLLHPSLVLLLLVLLPTDASVSGKPQYMVLVPSLLHTETTEKGCVLLSYLNETVTVSASLESVRGNRSLFTDLEAENDVLHCVAFA

SEQ ID NO: 23819 - protein, 168 aa, Homo sapiens
  REGION 1..168: note = ENSP00000385710
MGKNKLLHPSLVLLLLVLLPTDASVSGKPQYMVLVPSLLHTETTEKGCVLLSYLNETVTVSASLESVRGNRSLFTDLEAENDVLHCVAFAVPKSSSNEEVMFLTVQVKGPTQEFKKRTTVMVKNEDSLVFVQTDKSIYKPGQTVKFRVVSMDENFHPLNELIPLVYIQ

SEQ ID NO: 23820 - protein, 926 aa, Homo sapiens
  REGION 1..926: note = ENSP00000377040
MLQVHRTGLGRLGVSLSKGLHHKAVLAVRREDVNAWERRAPLAPKHIKGITNLGYKVLIQPSNRRAIHDKDYVKAGGILQEDISEACLILGVKRPPEEKLMSRKTYAFFSHTIKAQEANMGLLDEILKQEIRLIDYEKMVDHRGVRVVAFGQWAGVAGMINILHGMGLRLLALGHHTPFMHIGMAHNYRNSSQAVQAVRDAGYEISLGLMPKSIGPLTFVFTGTGNVSKGAQAIFNELPCEYVEPHELKEVSQTGDLRKVYGTVLSRHHHLVRKTDAVYDPAEYDKHPERYISRFNTDIAPYTTCLINGIYWEQNTPRLLTRQDAQSLLAPGKFSPAGVEGCPALPHKLVAICDISADTGGSIEFMTECTTIEHPFCMYDADQHIIHDSVEGSGILMCSIDNLPAQLPIEATECFGDMLYPYVEEMILSDATQPLESQNFSPVVRDAVITSNGTLPDKYKYIQTLRESRERAQSLSMGTRRKVLVLGSGYISEPVLEYLSRDGNIEITVGSDMKNQIEQLGKKYNINPVSMDICKQEEKLGFLVAKQDLVISLLPYVLHPLVAKACITNKVNMVTASYITPALKELEKSVEDAGITIIGELGLDPGLDHMLAMETIDKAKEVGATIESYISYCGGLPAPEHSNNPLRYKFSWSPVGVLMNVMQSATYLLDGKVVNVAGGISFLDAVTSMDFFPGLNLEGYPNRDSTKYAEIYGISSAHTLLRGTLRYKGYMKALNGFVKLGLINREALPAFRPEANPLTWKQLLCDLVGISPSSEHDVLKEAVLKKLGGDNTQLEAAEWLGLLGDEQVPQAESILDALSKHLVMKLSYGPEEKDMIVMRDSFGIRHPSGHLEHKTIDLVAYGDINGFSAMAKTVGLPTAMAAKMLLDGEIGAKGLMGPFSKEIYGPILERIKAEGIIYTTQSTIKP

SEQ ID NO: 23821 - protein, 926 aa, Homo sapiens; identical to SEQ ID NO: 23820
  REGION 1..926: note = ENSP00000403768

SEQ ID NO: 23822 - protein, 511 aa, Homo sapiens
  REGION 1..511: note = ENSP00000414001
MLQVHRTGLGRLGVSLSKGLHHKAVLAVRREDVNAWERRAPLAPKHIKGITNLGYKVLIQPSNRRAIHDKDYVKAGGILQEDISEACLILGVKRPPEEKLMSRKTYAFFSHTIKAQEANMGLLDEILKQEIRLIDYEKMVDHRGVRVVAFGQWAGVAGMINILHGMGLRLLALGHHTPFMHIGMAHNYRNSSQAVQAVRDAGYEISLGLMPKSIGPLTFVFTGTGNVSKGAQAIFNELPCEYVEPHELKEVSQTGDLRKVYGTVLSRHHHLVRKTDAVYDPAEYDKHPERYISRFNTDIAPYTTCLINGIYWEQNTPRLLTRQDAQSLLAPGKFSPAGVEGCPALPHKLVAICDISADTGGSIEFMTECTTIEHPFCMYDADQHIIHDSVEGSGILMCSIDNLPAQLPIEATECFGDMLYPYVEEMILSDATQPLESQNFSPVVRDAVITSNGTLPDKYKYIQTLRESRERAQSLSMGTRRKVLVLGSGYISEPVLEYLSRDGNIEITDLT

SEQ ID NO: 23823 - protein, 732 aa, Homo sapiens
  REGION 1..732: note = ENSP00000351834
MLQVHRTGLGRLGVSLSKGLHHKAVLAVRREDVNAWERRAPLAPKHIKGITNLGYKVLIQPSNRRAIHDKDYVKAGGILQEDISEACLILGVKRPPEEKLMSRKTYAFFSHTIKAQEANMGLLDEILKQEIRLIDYEKMVDHRGVRVVAFGQWAGVAGMINILHGMGLRLLALGHHTPFMHIGMAHNYRNSSQAVQAVRDAGYEISLGLMPKSIGPLTFVFTGTGNVSKGAQAIFNELPCEYVEPHELKEVSQTGDLRKVYGTVLSRHHHLVRKTDAVYDPAEYDKHPERYISRFNTDIAPYTTCLINGIYWEQNTPRLLTRQDAQSLLAPGKFSPAGVEGCPALPHKLVAICDISADTGGSIEFMTECTTIEHPFCMYDADQHIIHDSVEGSGILMCSIDNLPAQLPIEATECFGDMLYPYVEEMILSDATQPLESQNFSPVVRDAVITSNGTLPDKYKYIQTLRESRERAQSLSMGTRRKVLVLGSGYISEPVLEYLSRDGNIEITVGSDMKNQIEQLGKKYNINPVSMDICKQEEKLGFLVAKQDLVISLLPYVLHPLVAKACITNKVNMVTASYITPALKELEKSVEDAGITIIGELGLDPGLDHMLAMETIDKAKEVGATIESYISYCGGLPAPEHSNNPLRYKFSWSPVGVLMNVMQSATYLLDGKVVNVAGGISFLDAVTSMDFFPGLNLEGYPNRDSTKYAEIYGISSAHTLLRGTLRYKGLEC

SEQ ID NO: 23824 - protein, 21 aa, Homo sapiens
  REGION 1..21: note = ENSP00000394180
WIGMLNNVEYLPMVSSLTPSP

SEQ ID NO: 23825 - protein, 1374 aa, Homo sapiens
  REGION 1..1374: note = ENSP00000324196
MSSSFFNPSFAFSSHFDPDGAPLSELSWPSSLAVVAVSFSGLFAVIVLMLACLCCKKGGIGFKEFENAEGDEYAADLAQGSPATAAQNGPDVYVLPLTEVSLPMAKQPGRSVQLLKSTDVGRHSLLYLKEIGRGWFGKVFLGEVNSGISSAQVVVKELQASASVQEQMQFLEEVQPYRALKHSNLLQCLAQCAEVTPYLLVMEFCPLGDLKGYLRSCRVAESMAPDPRTLQRMACEVACGVLHLHRNNFVHSDLALRNCLLTADLTVKIGDYGLAHCKYREDYFVTADQLWVPLRWIAPELVDEVHSNLLVVDQTKSGNVWSLGVTIWELFELGTQPYPQHSDQQVLAYTVREQQLKLPKPQLQLTLSDRWYEVMQFCWLQPEQRPTAEEVHLLLSYLCAKGATEAEEEFERRWRSLRPGGGGVGPGPGAAGPMLGGVVELAAASSFPLLEQFAGDGFHADGDDVLTVTETSRGLNFEYKWEAGRGAEAFPATLSPGRTARLQELCAPDGAPPGVVPVLSAHSPSLGSEYFIRLEEAAPAAGHDPDCAGCAPSPPATADQDDDSDGSTAASLAMEPLLGHGPPVDVPWGRGDHYPRRSLARDPLCPSRSPSPSAGPLSLAEGGAEDADWGVAAFCPAFFEDPLGTSPLGSSGAPPLPLTGEDELEEVGARRAAQRGHWRSNVSANNNSGSRCPESWDPVSAGGHAEGCPSPKQTPRASPEPGYPGEPLLGLQAASAQEPGCCPGLPHLCSAQGLAPAPCLVTPSWTETASSGGDHPQAEPKLATEAEGTTGPRLPLPSVPSPSQEGAPLPSEEASAPDAPDALPDSPTPATGGEVSAIKLASALNGSSSSPEVEAPSSEDEDTAEATSGIFTDTSSDGLQARRPDVVPAFRSLQKQVGTPDSLDSLDIPSSASDGGYEVFSPSATGPSGGQPRALDSGYDTENYESPEFVLKEAQEGCEPQAFAELASEGEGPGPETRLSTSLSGLNEKNPYRDSAYFSDLEAEAEATSGPEKKCGGDRAPGPELGLPSTGQPSEQVCLRPGVSGEAQGSGPGEVLPPLLQLEGSSPEPSTCPSGLVPEPPEPQGPAKVRPGPSPSCSQFFLLTPVPLRSEGNSSEFQGPPGLLSGPAPQKRMGGPGTPRAPLRLALPGLPAALEGRPEEEEEDSEDSDESDEELRCYSVQEPSEDSEEEAPAVPVVVAESQSARNLRSLLKMPSLLSETFCEDLERKKKAVSFFDDVTVYLFDQESPTRELGEPFPGAKESPPTFLRGSPGSPSAPNRPQQADGSPNGSTAEEGGGFAWDDDFPLMTAKAAFAMALDPAAPAPAAPTPTPAPFSRFTVSPAPTSRFSITHVSDSDAESKRGPEAGAGGESKEA

SEQ ID NO: 23826 - protein, 105 aa, Homo sapiens
  REGION 1..105: note = ENSP00000460986
SEEASAPDAPDALPDSPTPATGGEVSAIKLASALNGSSSSPEVEAPSSEDEDTAEATSGIFTDTSSDGLQARRPDVVPAFRSLQKQWPQREESLPRLCLLLRPRG

SEQ ID NO: 23827 - protein, 879 aa, Homo sapiens
  REGION 1..879: note = ENSP00000363924
MSSSFFNPSFAFSSHFDPDGAPLSELSWPSSLAVVAVSFSGLFAVIVLMLACLCCKKGGIGFKEFENAEGDEYAADLAQGSPATAAQNGPDVYVLPLTEVSLPMAKQPGRSVQLLKSTDVGRHSLLYLKEIGRGWFGKVFLGEVNSGISSAQVVVKELQASASVQEQMQFLEEVQPYRALKHSNLLQCLAQCAEVTPYLLVMEFCPLGDLKGYLRSCRVAESMAPDPRTLQRMACEVACGVLHLHRNNFVHSDLALRNCLLTADLTVKIGDYGLAHCKYREDYFVTADQLWVPLRWIAPELVDEVHSNLLVVDQTKSGNVWSLGVTIWELFELGTQPYPQHSDQQVLAYTVREQQLKLPKPQLQLTLSDRWYEVMQFCWLQPEQRPTAEEVHLLLSYLCAKGATEAEEEFERRWRSLRPGGGGVGPGPGAAGPMLGGVVELAAASSFPLLEQFAGDGFHADGDDVLTELCAPDGAPPGVVPVLSAHSPSLGSEYFIRLEEAAPAAGHDPDCAGCAPSPPATADQDDDSDGSTAASLAMEPLLGHGPPVDVPWGRGDHYPRRSLARDPLCPSRSPSPSAGPLSLAEGGAEDADWGVAAFCPAFFEDPLGTSPLGSSGAPPLPLTGEDELEEVGARRAAQRGHWRSNVSANNNSGSRCPESWDPVSAGGHAEGCPSPKQTPRASPEPGYPGEPLLGLQAASAQEPGCCPGLPHLCSAQGLAPAPCLVTPSWTETASSGGDHPQAEPKLATEAEGTTGPRLPLPSVPSPSQEGAPLPSEEASAPDAPDALPDSPTPATGGEVSAIKLASALNGSSSSPEVEAPSSEDEDTAEATSGIFTDTSSDGLQARRPDVVPAFRSLQKQWPQREESLPRLCLLLRPRG

SEQ ID NO: 23828 - protein, 1271 aa, Homo sapiens
  REGION 1..1271: note = ENSP00000398796
MAKQPGRSVQLLKSTDVGRHSLLYLKEIGRGWFGKVFLGEVNSGISSAQVVVKELQASASVQEQMQFLEEVQPYRALKHSNLLQCLAQCAEVTPYLLVMEFCPLGDLKGYLRSCRVAESMAPDPRTLQRMACEVACGVLHLHRNNFVHSDLALRNCLLTADLTVKIGDYGLAHCKYREDYFVTADQLWVPLRWIAPELVDEVHSNLLVVDQTKSGNVWSLGVTIWELFELGTQPYPQHSDQQVLAYTVREQQLKLPKPQLQLTLSDRWYEVMQFCWLQPEQRPTAEEVHLLLSYLCAKGATEAEEEFERRWRSLRPGGGGVGPGPGAAGPMLGGVVELAAASSFPLLEQFAGDGFHADGDDVLTVTETSRGLNFEYKWEAGRGAEAFPATLSPGRTARLQELCAPDGAPPGVVPVLSAHSPSLGSEYFIRLEEAAPAAGHDPDCAGCAPSPPATADQDDDSDGSTAASLAMEPLLGHGPPVDVPWGRGDHYPRRSLARDPLCPSRSPSPSAGPLSLAEGGAEDADWGVAAFCPAFFEDPLGTSPLGSSGAPPLPLTGEDELEEVGARRAAQRGHWRSNVSANNNSGSRCPESWDPVSAGGHAEGCPSPKQTPRASPEPGYPGEPLLGLQAASAQEPGCCPGLPHLCSAQGLAPAPCLVTPSWTETASSGGDHPQAEPKLATEAEGTTGPRLPLPSVPSPSQEGAPLPSEEASAPDAPDALPDSPTPATGGEVSAIKLASALNGSSSSPEVEAPSSEDEDTAEATSGIFTDTSSDGLQARRPDVVPAFRSLQKQVGTPDSLDSLDIPSSASDGGYEVFSPSATGPSGGQPRALDSGYDTENYESPEFVLKEAQEGCEPQAFAELASEGEGPGPETRLSTSLSGLNEKNPYRDSAYFSDLEAEAEATSGPEKKCGGDRAPGPELGLPSTGQPSEQVCLRPGVSGEAQGSGPGEVLPPLLQLEGSSPEPSTCPSGLVPEPPEPQGPAKVRPGPSPSCSQFFLLTPVPLRSEGNSSEFQGPPGLLSGPAPQKRMGGPGTPRAPLRLALPGLPAALEGRPEEEEEDSEDSDESDEELRCYSVQEPSEDSEEEAPAVPVVVAESQSARNLRSLLKMPSLLSETFCEDLERKKKAVSFFDDVTVYLFDQESPTRELGEPFPGAKESPPTFLRGSPGSPSAPNRPQQADGSPNGSTAEEGGGFAWDDDFPLMTAKAAFAMALDPAAPAPAAPTPTPAPFSRFTVSPAPTSRFSITHVSDSDAESKRGPEAGAGGESKEA

SEQ ID NO: 23829 - protein, 116 aa, Homo sapiens
  REGION 1..116: note = ENSP00000460202
MLTLCYLIARCIGRTRLAPGQQEFENAEGDEYAADLAQGSPATAAQNGPDVYVLPLTEVSLPMAKQPGRSVQLLKSTDVGRHSLLYLKEIGRGWFGKVFLGEVNSGISSAQVVVKE

SEQ ID NO: 23830 - protein, 500 aa, Homo sapiens
  REGION 1..500: note = ENSP00000268251
MASMLLAQRLACSFQHSYRLLVPGSRHISQAAAKVDVEFDYDGPLMKTEVPGPRSQELMKQLNIIQNAEAVHFFCNYEESRGNYLVDVDGNRMLDLYSQISSVPIGYSHPALLKLIQQPQNASMFVNRPALGILPPENFVEKLRQSLLSVAPKGMSQLITMACGSCSNENALKTIFMWYRSKERGQRGFSQEELETCMINQAPGCPDYSILSFMGAFHGRTMGCLATTHSKAIHKIDIPSFDWPIAPFPRLKYPLEEFVKENQQEEARCLEEVEDLIVKYRKKKKTVAGIIVEPIQSEGGDNHASDDFFRKLRDIARKHGCAFLVDEVQTGGGCTGKFWAHEHWGLDDPADVMTFSKKMMTGGFFHKEEFRPNAPYRIFNTWLGDPSKNLLLAEVINIIKREDLLNNAAHAGKALLTGLLDLQARYPQFISRVRGRGTFCSFDTPDDSIRNKLILIARNKGVVLGGCGDKSIRFRPTLVFRDHHAHLFLNIFSDILADFK

SEQ ID NO: 23831 - protein, 95 aa, Homo sapiens
  REGION 1..95: note = ENSP00000456392
MQLRGWQHAKGVPVPQGVMASMLLAQRLACSFQHSYRLLVPGSRHISQAAAKVDVEFDYDGPLMKTEVPGPRSQELMKQLNIIQNAEAVHFFCNY

SEQ ID NO: 23832 - protein, 31 aa, Homo sapiens
  REGION 1..31: note = ENSP00000455184
MASMLLAQRLACSFQHSYRLLVPGSRHISQA

SEQ ID NO: 23833 - protein, 65 aa, Homo sapiens
  REGION 1..65: note = ENSP00000456267
MASMLLAQRLACSFQHSYRLLVPGSRHISQAAAKVDVEFDYDGPLMKTEVPGPRSQELMKQLNII

SEQ ID NO: 23834 - protein, 53 aa, Homo sapiens
  REGION 1..53: note = ENSP00000455198
MASMLLAQRLACSFQHSYRLLVPGVNETAEYNSECRGCAFFLQLRREPRQLPG

SEQ ID NO: 23835 - protein, 91 aa, Homo sapiens
  REGION 1..91: note = ENSP00000454415
MASMLLAQRLACSFQHSYRLLVPGSNPGSRHISQAAAKVDVEFDYDGPLMKTEVPGPRSQELMKQLNIIQNAEAVHFFCNYEESRGNYLVD

SEQ ID NO: 23836 - protein, 515 aa, Homo sapiens
  REGION 1..515: note = ENSP00000456330
MWWQHAKGVPVPQGVMASMLLAQRLACSFQHSYRLLVPGSRHISQAAAKVDVEFDYDGPLMKTEVPGPRSQELMKQLNIIQNAEAVHFFCNYEESRGNYLVDVDGNRMLDLYSQISSVPIGYSHPALLKLIQQPQNASMFVNRPALGILPPENFVEKLRQSLLSVAPKGMSQLITMACGSCSNENALKTIFMWYRSKERGQRGFSQEELETCMINQAPGCPDYSILSFMGAFHGRTMGCLATTHSKAIHKIDIPSFDWPIAPFPRLKYPLEEFVKENQQEEARCLEEVEDLIVKYRKKKKTVAGIIVEPIQSEGGDNHASDDFFRKLRDIARKHGCAFLVDEVQTGGGCTGKFWAHEHWGLDDPADVMTFSKKMMTGGFFHKEEFRPNAPYRIFNTWLGDPSKNLLLAEVINIIKREDLLNNAAHAGKALLTGLLDLQARYPQFISRVRGRGTFCSFDTPDDSIRNKLILIARNKGVVLGGCGDKSIRFRPTLVFRDHHAHLFLNIFSDILADFK

SEQ ID NO: 23837 - protein, 500 aa, Homo sapiens; identical to SEQ ID NO: 23830
  REGION 1..500: note = ENSP00000411916

SEQ ID NO: 23838 - protein, 515 aa, Homo sapiens
  REGION 1..515: note = ENSP00000454963
MASMLLAQRLACSFQHSYRLLVPGSRHISQAAAKVDVEFDYDGPLMKTEVPGPRSQELMKQLNIIQNAEAVHFFCNYEESRGNYLVDVDGNRMLDLYSQISSVPIGYSHPALLKLIQQPQNASMFVNRPALGILPPENFVEKLRQSLLSVAPKGMSQLITMACGSCSNENALKTIFMWYRSKERGQRGFSQEELETCMINQAPGCPDYSILSFMGAFHGRTMGCLATTHSKAIHKIDIPSFDWPIAPFPRLKYPLEEFVKENQQEEARCLEEVEDLIVKYRKKKKTVAGIIVEPIQSEGGDNHASDDFFRKLRDIARKHGCAFLVDEVQTGGGCTGKFWAHEHWGLDDPADVMTFSKKMMTGGFFHKEEFRPNAPYRIFNTWLGDPSKNLLLAEVINIIKREDLLNNAAHAGKALLTGLLDLQARYPQFISRVRGRGTFCSFDTPDDSIRNKLILIARNKALPACDFEKPRSSPTSCLFQVWCWVAVVTNPFVSVPRWSSGITTLTCSSIFSVTS

SEQ ID NO: 23839 - protein, 117 aa, Homo sapiens
  REGION 1..117: note = ENSP00000455502
MASMLLAQRLACSFQHSYRLLVPGSRHISQAAAKVDVEFDYDGPLMKTEVPGPRSQELMKQLNIIQNAEAVHFFCNYEESRGNYLVDVDGNRMLDLYSQISSVPIESHCHPGWSAVA

SEQ ID NO: 23840 - protein, 500 aa, Homo sapiens; identical to SEQ ID NO: 23830
  REGION 1..500: note = ENSP00000379845

SEQ ID NO: 23841 - protein, 123 aa, Homo sapiens
  REGION 1..123: note = ENSP00000363865
MPSAGTLPWVQGIICNANNPCFRYPTPGEAPGVVGNFNKSIVARLFSDARRLLLYSQKDTSMKDMRKVLRTLQQIKKSSSNLKLQDFLVDNETFSGFLYHNLSLPKSTVDKMLRADVILHKVS

SEQ ID NO: 23842 - protein, 363 aa, Homo sapiens
  REGION 1..363: note = ENSP00000416623
MACWPQLRLLLWKNLTFRRRQTCQLLLEVAWPLFIFLILISVRLSYPPYEQHECHFPNKAMPSAGTLPWVQGIICNANNPCFRYPTPGEAPGVVGNFNKSIVARLFSDARRLLLYSQKDTSMKDMRKVLRTLQQIKKSSSNLKLQDFLVDNETFSGFLYHNLSLPKSTVDKMLRADVILHKVFLQGYQLHLTSLCNGSKSEEMIQLGDQEVSELCGLPREKLAAAERVLRSNMDILKPILMDVTCDDIAHGQLTVPRSAAVAATGDAKPNMMGRETLLSICASVPKVEFHERHILKHFSFCVCVSVSLFPAKGIVSFSWASFRIWVLWKAVFWQHGESMAVWEGQLGLGLNIAFEYFTSIDVG

SEQ ID NO: 23843 - protein, 2261 aa, Homo sapiens
  REGION 1..2261: note = ENSP00000363868
MACWPQLRLLLWKNLTFRRRQTCQLLLEVAWPLFIFLILISVRLSYPPYEQHECHFPNKAMPSAGTLPWVQGIICNANNPCFRYPTPGEAPGVVGNFNKSIVARLFSDARRLLLYSQKDTSMKDMRKVLRTLQQIKKSSSNLKLQDFLVDNETFSGFLYHNLSLPKSTVDKMLRADVILHKVFLQGYQLHLTSLCNGSKSEEMIQLGDQEVSELCGLPREKLAAAERVLRSNMDILKPILRTLNSTSPFPSKELAEATKTLLHSLGTLAQELFSMRSWSDMRQEVMFLTNVNSSSSSTQIYQAVSRIVCGHPEGGGLKIKSLNWYEDNNYKALFGGNGTEEDAETFYDNSTTPYCNDLMKNLESSPLSRIIWKALKPLLVGKILYTPDTPATRQVMAEVNKTFQELAVFHDLEGMWEELSPKIWTFMENSQEMDLVRMLLDSRDNDHFWEQQLDGLDWTAQDIVAFLAKHPEDVQSSNGSVYTWREAFNETNQAIRTISRFMECVNLNKLEPIATEVWLINKSMELLDERKFWAGIVFTGITPGSIELPHHVKYKIRMDIDNVERTNKIKDGYWDPGPRADPFEDMRYVWGGFAYLQDVVEQAIIRVLTGTEKKTGVYMQQMPYPCYVDDIFLRVMSRSMPLFMTLAWIYSVAVIIKGIVYEKEARLKETMRIMGLDNSILWFSWFISSLIPLLVSAGLLVVILKLGNLLPYSDPSVVFVFLSVFAVVTILQCFLISTLFSRANLAAACGGIIYFTLYLPYVLCVAWQDYVGFTLKIFASLLSPVAFGFGCEYFALFEEQGIGVQWDNLFESPVEEDGFNLTTSVSMMLFDTFLYGVMTWYIEAVFPGQYGIPRPWYFPCTKSYWFGEESDEKSHPGSNQKRISEICMEEEPTHLKLGVSIQNLVKVYRDGMKVAVDGLALNFYEGQITSFLGHNGAGKTTTMSILTGLFPPTSGTAYILGKDIRSEMSTIRQNLGVCPQHNVLFDMLTVEEHIWFYARLKGLSEKHVKAEMEQMALDVGLPSSKLKSKTSQLSGGMQRKLSVALAFVGGSKVVILDEPTAGVDPYSRRGIWELLLKYRQGRTIILSTHHMDEADVLGDRIAIISHGKLCCVGSSLFLKNQLGTGYYLTLVKKDVESSLSSCRNSSSTVSYLKKEDSVSQSSSDAGLGSDHESDTLTIDVSAISNLIRKHVSEARLVEDIGHELTYVLPYEAAKEGAFVELFHEIDDRLSDLGISSYGISETTLEEIFLKVAEESGVDAETSDGTLPARRNRRAFGDKQSCLRPFTEDDAADPNDSDIDPESRETDLLSGMDGKGSYQVKGWKLTQQQFVALLWKRLLIARRSRKGFFAQIVLPAVFVCIALVFSLIVPPFGKYPSLELQPWMYNEQYTFVSNDAPEDTGTLELLNALTKDPGFGTRCMEGNPIPDTPCQAGEEEWTTAPVPQTIMDLFQNGNWTMQNPSPACQCSSDKIKKMLPVCPPGAGGLPPPQRKQNTADILQDLTGRNISDYLVKTYVQIIAKSLKNKIWVNEFRYGGFSLGVSNTQALPPSQEVNDAIKQMKKHLKLAKDSSADRFLNSLGRFMTGLDTKNNVKVWFNNKGWHAISSFLNVINNAILRANLQKGENPSHYGITAFNHPLNLTKQQLSEVALMTTSVDVLVSICVIFAMSFVPASFVVFLIQERVSKAKHLQFISGVKPVIYWLSNFVWDMCNYVVPATLVIIIFICFQQKSYVSSTNLPVLALLLLLYGWSITPLMYPASFVFKIPSTAYVVLTSVNLFIGINGSVATFVLELFTDNKLNNINDILKSVFLIFPHFCLGRGLIDMVKNQAMADALERFGENRFVSPLSWDLVGRNLFAMAVEGVVFFLITVLIQYRFFIRPRPVNAKLSPLNDEDEDVRRERQRILDGGGQNDILEIKELTKIYRRKRKPAVDRICVGIPPGECFGLLGVNGAGKSSTFKMLTGDTTVTRGDAFLNKNSILSNIHEVHQNMGYCPQFDAITELLTGREHVEFFALLRGVPEKEVGKVGEWAIRKLGLVKYGEKYAGNYSGGNKRKLSTAMALIGGPPVVFLDEPTTGMDPKARRFLWNCALSVVKEGRSVVLTSHSMEECEALCTRMAIMVNGRFRCLGSVQHLKNRFGDGYTIVVRIAGSNPDLKPVQDFFGLAFPGSVLKEKHRNMLQYQLPSSLSSLARIFSILSQSKKRLHIEDYSVSQTTLDQVFVNFAKDQSDDDHLKDLSLHKNQTVVDVAVLTSFLQDEKVKESYV

SEQ ID NO: 23844 - protein, 1581 aa, Homo sapiens
  REGION 1..1581: note = ENSP00000269080
MRKRKISVCQQTWALLCKNFLKKWRMKRESLMEWLNSLLLLLCLYIYPHSHQVNDFSSLLTMDLGRVDTFNESRFSVVYTPVTNTTQQIMNKVASTPFLAGKEVLGLPDEESIKEFTANYPEEIVRVTFTNTYSYHLKFLLGHGMPAKKEHKDHTAHCYETNEDVYCEVSVFWKEGFVALQAAINAAIIEITTNHSVMEELMSVTGKNMKMHSFIGQSGVITDLYLFSCIISFSSFIYYASVNVTRERKRMKALMTMMGLRDSAFWLSWGLLYAGFIFIMALFLALVIRSTQFIILSGFMVVFSLFLLYGLSLVALAFLMSILVKKSFLTGLVVFLLTVFWGCLGFTSLYRHLPASLEWILSLLSPFAFMLGMAQLLHLDYDLNSNAFPHPSDGSNLIVATNFMLAFDTCLYLALAIYFEKILPNEYGHRRPPLFFLKSSFWSQTQKTDHVALEDEMDADPSFHDSFEQAPPEFQGKEAIRIRNVTKEYKGKPDKIEALKDLVFDIYEGQITAILGHSGAGKSTLLNILSGLSVPTKGSVTIYNNKLSEMADLENLSKLTGVCPQSNVQFDFLTVRENLRLFAKIKGILPQEVDKEIFLLDEPTAGLDPFSRHQVWNLLKERKTDRVILFSTQFMDEADILADRKVFLSQGKLKCAGSSLFLKKKWGIGYHLSLQLNEICVEENITSLVKQHIPDAKLSAKSEGKLIYTLPLERTNKFPELYKDLDSYPDLGIENYGVSMTTLNEVFLKLEGKSTINESDIAILGEVQAEKADDTERLVEMEQVLSSLNKMRKTIGGVALWRQQICAIARVRLLKLKHERKALLALLLILMAGFCPLLVEYTMVKIYQNSYTWELSPHLYFLAPGQQPHDPLTQLLIINKTGASIDDFIQSVEHQNIALEVDAFGTRNGTDDPSYNGAITVCCNEKNYSFSLACNAKRLNCFPVLMDIVSNGLLGMVKPSVHIRTERSTFLENGQDNPIGFLAYIMFWLVLTSSCPPYIAMSSIDDYKNRARSQLRISGLSPSAYWFGQALVDVSLYFLVFVFIYLMSYISNFEDMLLTIIHIIQIPCAVGYSFSLIFMTYVISFIFRKGRKNSGIWSFCFYVVTVFSVAGFAFSIFESDIPFIFTFLIPPATMIGCLFLSSHLLFSSLFSEERMDVQPFLVFLIPFLHFIIFLFTLRCLEWKFGKKSMRKDPFFRISPRSSDVCQNPEEPEGEDEDVQMERVRTANALNSTNFDEKPVIIASCLRKEYAGKRKGCFSKRKNKIATRNVSFCVRKGEVLGLLGHNGAGKSTSIKVITGDTKPTAGQVLLKGSGGGDALEFLGYCPQENALWPNLTVRQHLEVYAAVKGLRKGDAEVAITRLVDALKLQDQLKSPVKTLSEGIKRKLCFVLSILGNPSVVLLDEPSTGMDPEGQQQMWQAIRATFRNTERGALLTTHYMAEAEAVCDRVAIMVSGRLRCIGSIQHLKSKFGKDYLLEMKVKNLAQVEPLHAEILRLFPQAARQERYSSLMVYKLPVEDVQPLAQAFFKLEKVKQSFDLEEYSLSQSTLEQVFLELSKEQELGDFEEDFDPSVKWKLLPQEEP

SEQ ID NO: 23845 - protein, 1621 aa, Homo sapiens
  REGION 1..1621: note = ENSP00000467271
MRKRKISVCQQTWALLCKNFLKKWRMKRESLMEWLNSLLLLLCLYIYPHSHQVNDFSSLLTMDLGRVDTFNESRFSVVYTPVTNTTQQIMNKVASTPFLAGKEVLGLPDEESIKEFTANYPEEIVRVTFTNTYSYHLKFLLGHGMPAKKEHKDHTAHCYETNEDVYCEVSVFWKEGFVALQAAINAAIIEITTNHSVMEELMSVTGKNMKMHSFIGQSGVITDLYLFSCIISFSSFIYYASVNVTRERKRMKALMTMMGLRDSAFWLSWGLLYAGFIFIMALFLALVIRSTQFIILSGFMVVFSLFLLYGLSLVALAFLMSILVKKSFLTGLVVFLLTVFWGCLGFTSLYRHLPASLEWILSLLSPFAFMLGMAQLLHLDYDLNSNAFPHPSDGSNLIVATNFMLAFDTCLYLALAIYFEKILPNEYGHRRPPLFFLKSSFWSQTQKTDHVALEDEMDADPSFHDSFEQAPPEFQGKEAIRIRNVTKEYKGKPDKIEALKDLVFDIYEGQITAILGHSGAGKSTLLNILSGLSVPTKGSVTIYNNKLSEMADLENLSKLTGVCPQSNVQFDFLTVRENLRLFAKIKGILPQEVDKEIQRVLLELEMKNIQDVLAQNLSGGQKRKLTFGIAILGDPQIFLLDEPTAGLDPFSRHQVWNLLKERKTDRVILFSTQFMDEADILADRKVFLSQGKLKCAGSSLFLKKKWGIGYHLSLQLNEICVEENITSLVKQHIPDAKLSAKSEGKLIYTLPLERTNKFPELYKDLDSYPDLGIENYGVSMTTLNEVFLKLEGKSTINESDIAILGEVQAEKADDTERLVEMEQVLSSLNKMRKTIGGVALWRQQICAIARVRLLKLKHERKALLALLLILMAGFCPLLVEYTMVKIYQNSYTWELSPHLYFLAPGQQPHDPLTQLLIINKTGASIDDFIQSVEHQNIALEVDAFGTRNGTDDPSYNGAITVCCNEKNYSFSLACNAKRLNCFPVLMDIVSNGLLGMVKPSVHIRTERSTFLENGQDNPIGFLAYIMFWLVLTSSCPPYIAMSSIDDYKNRARSQLRISGLSPSAYWFGQALVDVSLYFLVFVFIYLMSYISNFEDMLLTIIHIIQIPCAVGYSFSLIFMTYVISFIFRKGRKNSGIWSFCFYVVTVFSVAGFAFSIFESDIPFIFTFLIPPATMIGCLFLSSHLLFSSLFSEERMDVQPFLVFLIPFLHFIIFLFTLRCLEWKFGKKSMRKDPFFRISPRSSDVCQNPEEPEGEDEDVQMERVRTANALNSTNFDEKPVIIASCLRKEYAGKRKGCFSKRKNKIATRNVSFCVRKGEVLGLLGHNGAGKSTSIKVITGDTKPTAGQVLLKGSGGGDALEFLGYCPQENALWPNLTVRQHLEVYAAVKGLRKGDAEVAITRLVDALKLQDQLKSPVKTLSEGIKRKLCFVLSILGNPSVVLLDEPSTGMDPEGQQQMWQAIRATFRNTERGALLTTHYMAEAEAVCDRVAIMVSGRLRCIGSIQHLKSKFGKDYLLEMKVKNLAQVEPLHAEILRLFPQAARQERYSSLMVYKLPVEDVQPLAQAFFKLEKVKQSFDLEEYSLSQSTLEQVFLELSKEQELGDFEEDFDPSVKWKLLPQEEP

SEQ ID NO: 23846 - protein, 702 aa, Homo sapiens
  REGION 1..702: note = ENSP00000467186
  VARIANT 1: note = Any amino acid
XPASLEWILSLLSPFAFMLGMAQLLHLDYDLNSNAFPHPSDGSNLIVATNFMLAFDTCLYLALAIYFEKILPNEYGHRRPPLFFLKSSFWSQTQKTDHVALEDEMDADPSFHDSFEQAPPEFQGKEAIRIRNVTKEYKGKPDKIEALKDLVFDIYEGQITAILGHSGAGKSTLLNILSGLSVPTKGSVTIYNNKLSEMADLENLSKLTGVCPQSNVQFDFLTVRENLRLFAKIKGILPQEVDKEIQRVLLELEMKNIQDVLAQNLSGGQKRKLTFGIAILGDPQIFLLDEPTAGLDPFSRHQVWNLLKERKTDRVILFSTQFMDEADILADRKVFLSQGKLKCAGSSLFLKKKWGIGYHLSLQLNEICVEENITSLVKQHIPDAKLSAKSEGKLIYTLPLERTNKFPELYKDLDSYPDLGIENYGVSMTTLNEVFLKLEGKSTINESDIAILGEVQAEKADDTERLVEMEQVLSSLNKMRKTIGGVALWRQQICAIARVRLLKLKHERKALLALLLILMAGFCPLLVEYTMVKIYQNSYTWELSPHLYFLAPGQQPHDPLTQLLIINKTGASIDDFIQSVEHQNIALEVDAFGTRNGTDDPSYNGAITVCCNEKNYSFSLACNAKRLNCFPVLMDIVSNGLLGMVKPSVHIRTERSTFLEVNIYNLTIPDSPLSGISQITLLSAGILFLLSKPLHNKLTFGL

SEQ ID NO: 23847 - protein, 115 aa, Homo sapiens
  REGION 1..115: note = ENSP00000466126
MRKRKISVCQQTWALLCKNFLKKWRMKRESLMEWLNSLLLLLCLYIYPHSHQVNDFSSLLTMDLGRVDTFNESRFSVVYTPVTNTTQQIMNKVASTPFLAGKEVLGLPDEESIKE

SEQ ID NO: 23848 - protein, 1616 aa, Homo sapiens
  REGION 1..1616: note = ENSP00000402814
MRKRKISVCQQTWALLCKNFLKKWRMKRESLMEWLNSLLLLLCLYIYPHSHQVNDFSSLLTMDLGRVDTFNESRFSVVYTPVTNTTQQIMNKVASTPFLAGKEVLGLPDEESIKEFTANYPEEIVRVTFTNTYSYHLKFLLGHGMPAKKEHKDHTAHCYETNEDVYCEVSVFWKEGFVALQAAINAAIIEITTNHSVMEELMSVTGKNMKMHSFIGQSGVITDLYLFSCIISFSSFIYYASVNVTRERKRMKALMTMMGLRDSAFWLSWGLLYAGFIFIMALFLALVIRSTQFIILSGFMVVFSLFLLYGLSLVALAFLMSILVKKSFLTGLVVFLLTVFWGCLGFTSLYRHLPASLEWILSLLSPFAFMLGMAQLLHLDYDLNSNAFPHPSDGSNLIVATNFMLAFDTCLYLALAIYFEKILPNEYGHRRPPLFFLKSSFWSQTQKTDHVALEDEMDADPSFHDSFEQAPPEFQGKEAIRIRNVTKEYKGKPDKIEALKDLVFDIYEGQITAILGHSGAGKSTLLNILSGLSVPTKGSVTIYNNKLSEMADLENLSKLTGVCPQSNVQFDFLTVRENLRLFAKIKGILPQEVDKEIQRVLLELEMKNIQDVLAQNLSGGQKRKLTFGIAILGDPQIFLLDEPTAGLDPFSRHQVWNLLKERKTDRVILFSTQFMDEADILADRKVFLSQGKLKCAGSSLFLKKKWGIGYHLSLQLNEICVEENITSLVKQHIPDAKLSAKSEGKLIYTLPLERTNKFPELYKDLDSYPDLGIENYGVSMTTLNEVFLKLEGKSTINESDIAILGEVQAEKADDTERLVEMEQVLSSLNKMRKTIGGVALWRQQICAIARVRLLKLKHERKALLALLLILMAGFCPLLVEYTMVKIYQNSYTWELSPHLYFLAPGQQPHDPLTQLLIINKTGASIDDFIQSVEHQNIALEVDAFGTRNGTDDPSYNGAITVCCNEKNYSFSLACNAKRLNCFPVLMDIVSNGLLGMVKPSVHIRTERSTFLENGQDNPIGFLAYIMFWLVLTSSCPPYIAMSSIDDYKNRARSQLRISGLSPSAYWFGQALVDVSLYFLVFVFIYLMSYISNFEDMLLTIIHIIQIPCAVGYSFSLIFMTYVISFIFRKGRKNSGIWSFCFYVVTVFSVAGFAFSIFESDIPFIFTFLIPPATMIGCLFLSSHLLFSSLFSEERMDVQPFLVFLIPFLHFIIFLFTLRCLEWKFGKKSMRKDPFFSSDVCQNPEEPEGEDEDVQMERVRTANALNSTNFDEKPVIIASCLRKEYAGKRKGCFSKRKNKIATRNVSFCVRKGEVLGLLGHNGAGKSTSIKVITGDTKPTAGQVLLKGSGGGDALEFLGYCPQENALWPNLTVRQHLEVYAAVKGLRKGDAEVAITRLVDALKLQDQLKSPVKTLSEGIKRKLCFVLSILGNPSVVLLDEPSTGMDPEGQQQMWQAIRATFRNTERGALLTTHYMAEAEAVCDRVAIMVSGRLRCIGSIQHLKSKFGKDYLLEMKVKNLAQVEPLHAEILRLFPQAARQERYSSLMVYKLPVEDVQPLAQAFFKLEKVKQSFDLEEYSLSQSTLEQVFLELSKEQELGDFEEDFDPSVKWKLLPQEEP

SEQ ID NO: 23849 - protein, 156 aa, Homo sapiens
  REGION 1..156: note = ENSP00000481467
MLGMAQLLHLDYDLNSNAFPHPSDGSNLIVATNFMLAFDTCLYLALAIYFEKILPNEYGHRRPPLFFLKSSFWSQTQKTDHVALEDEMDADPSFHDSFEQAPPEFQGKEAIRIRNVTKEYKGKPDKIEALKDLVFDIYEGQITAILVTVELESQHC

SEQ ID NO: 23850 - protein, 277 aa, Homo sapiens
  REGION 1..277: note = ENSP00000361593
MASNQEMLQHKDARVKLVTELLSGIRVIKFCGWEQALGARVEACRARELGRLRVIKYLDAACVYLWAALPVVISIVIFITYVLMGHQLTATKVFTALALVRMLILPLNNFPWVINGLLEAKVSLDRIQLFLDLPNHNPQAYYSPDPPAEPSTVLELHGALFSWDPVGTSLETFISHLEVKKGMLVGIVGKVGCGKSSLLAAIAGELHRLRGHVAVRGLSKGFGLATQEPWIQFATIRDNILFGKTFDAQLYKEVLEACALNDDLSILPAGDQTEVGE

SEQ ID NO: 23851 - protein, 1492 aa, Homo sapiens
  REGION 1..1492: note = ENSP00000361608
MERLLAQLCGSSAAWPLPLWEGDTTGHCFTQLVLSALPHALLAVLSACYLGTPRSPDYILPCSPGWRLRLAASFLLSVFPLLDLLPVALPPGAGPGPIGLEVLAGCVAAVAWISHSLALWVLAHSPHGHSRGPLALALVALLPAPALVLTVLWHCQRGTLLPPLLPGPMARLCLLILQLAALLAYALGWAAPGGPREPWAQEPLLPEDQEPEVAEDGESWLSRFSYAWLAPLLARGACGELRQPQDICRLPHRLQPTYLARVFQAHWQEGARLWRALYGAFGRCYLALGLLKLVGTMLGFSGPLLLSLLVGFLEEGQEPLSHGLLYALGLAGGAVLGAVLQNQYGYEVYKVTLQARGAVLNILYCKALQLGPSRPPTGEALNLLGTDSERLLNFAGSFHEAWGLPLQLAITLYLLYQQVGVAFVGGLILALLLVPVNKVIATRIMASNQEMLQHKDARVKLVTELLSGIRVIKFCGWEQALGARVEACRARELGRLRVIKYLDAACVYLWAALPVVISIVIFITYVLMGHQLTATKVFTALALVRMLILPLNNFPWVINGLLEAKVSLDRIQLFLDLPNHNPQAYYSPDPPAEPSTVLELHGALFSWDPVGTSLETFISHLEVKKGMLVGIVGKVGCGKSSLLAAIAGELHRLRGHVAVRGLSKGFGLATQEPWIQFATIRDNILFGKTFDAQLYKEVLEACALNDDLSILPAGDQTEVGEKGVTLSGGQRARIALARAVYQEKELYLLDDPLAAVDADVANHLLHRCILGMLSYTTRLLCTHRTEYLERADAVLLMEAGRLIRAGPPSEILPLVQAVPKAWAENGQESDSATAQSVQNPEKTKEGLEEEQSTSGRLLQEESKKEGAVALHVYQAYWKAVGQGLALAILFSLLLMQATRNAADWWLSHWISQLKAENSSQEAQPSTSPASMGLFSPQLLLFSPGNLYIPVFPLPKAAPNGSSDIRFYLTVYATIAGVNSLCTLLRAVLFAAGTLQAAATLHRRLLHRVLMAPVTFFNATPTGRILNRFSSDVACADDSLPFILNILLANAAGLLGLLAVLGSGLPWLLLLLPPLSIMYYHVQRHYRASSRELRRLGSLTLSPLYSHLADTLAGLSVLRATGATYRFEEENLRLLELNQRCQFATSATMQWLDIRLQLMGAAVVSAIAGIALVQHQQGLANPGLVGLSLSYALSLTGLLSGLVSSFTQTEAMLVSVERLEEYTCDLPQEPQGQPLQLGTGWLTQGGVEFQDVVLAYRPGLPNALDGVTFCVQPGEKLGIVGRTGSGKSSLLLVLFRLLEPSSGRVLLDGVDTSQLELAQLRSQLAIIPQEPFLFSGTVRENLDPQGLHKDRALWQALKQCHLSEVITSMGGLDGELGEGGRSLSLGQRQLLCLARALLTDAKILCIDEATASVDQKTDQLLQQTICKRFANKTVLTIAHRLNTILNSDRVLVLQAGRVVELDSPATLRNQPHSLFQQLLQSSQQGVPASLGGP

SEQ ID NO: 23852 - protein, 1464 aa, Homo sapiens
  REGION 1..1464: note = ENSP00000244533
MCLLVFPLVPRSPDYILPCSPGWRLRLAASFLLSVFPLLDLLPVALPPGAGPGPIGLEVLAGCVAAVAWISHSLALWVLAHSPHGHSRGPLALALVALLPAPALVLTVLWHCQRGTLLPPLLPGPMARLCLLILQLAALLAYALGWAAPGGPREPWAQEPLLPEDQEPEVAEDGESWLSRFSYAWLAPLLARGACGELRQPQDICRLPHRLQPTYLARVFQAHWQEGARLWRALYGAFGRCYLALGLLKLVGTMLGFSGPLLLSLLVGFLEEGQEPLSHGLLYALGLAGGAVLGAVLQNQYGYEVYKVTLQARGAVLNILYCKALQLGPSRPPTGEALNLLGTDSERLLNFAGSFHEAWGLPLQLAITLYLLYQQVGVAFVGGLILALLLVPVNKVIATRIMASNQEMLQHKDARVKLVTELLSGIRVIKFCGWEQALGARVEACRARELGRLRVIKYLDAACVYLWAALPVVISIVIFITYVLMGHQLTATKVFTALALVRMLILPLNNFPWVINGLLEAKVSLDRIQLFLDLPNHNPQAYYSPDCGRLGAQIKWLLCSDPPAEPSTVLELHGALFSWDPVGTSLETFISHLEVKKGMLVGIVGKVGCGKSSLLAAIAGELHRLRGHVAVRGLSKGFGLATQEPWIQFATIRDNILFGKTFDAQLYKEVLEACALNDDLSILPAGDQTEVGEKGVTLSGGQRARIALARAVYQEKELYLLDDPLAAVDADVANHLLHRCILGMLSYTTRLLCTHRTEYLERADAVLLMEAGRLIRAGPPSEILPLVQAVPKAWAENGQESDSATAQSVQNPEKTKEGLEEEQSTSGRLLQEESKKEGAVALHVYQAYWKAVGQGLALAILFSLLLMQATRNAADWWLSHWISQLKAENSSQEAQPSTSPASMGLFSPQLLLFSPGNLYIPVFPLPKAAPNGSSDIRFYLTVYATIAGVNSLCTLLRAVLFAAGTLQAAATLHRRLLHRVLMAPVTFFNATPTGRILNRFSSDVACADDSLPFILNILLANAAGLLGLLAVLGSGLPWLLLLLPPLSIMYYHVQRHYRASSRELRRLGSLTLSPLYSHLADTLAGLSVLRATGATYRFEEENLRLLELNQRCQFATSATMQWLDIRLQLMGAAVVSAIAGIALVQHQQGLANPGLVGLSLSYALSLTGLLSGLVSSFTQTEAMLVSVERLEEYTCDLPQEPQGQPLQLGTGWLTQGGVEFQDVVLAYRPGLPNALDGVTFCVQPGEKLGIVGRTGSGKSSLLLVLFRLLEPSSGRVLLDGVDTSQLELAQLRSQLAIIPQEPFLFSGTVRENLDPQGLHKDRALWQALKQCHLSEVITSMGGLDGELGEGGRSLSLGQRQLLCLARALLTDAKILCIDEATASVDQKTDQLLQQTICKRFANKTVLTIAHRLNTILNSDRVLVLQAGRVVELDSPATLRNQPHSLFQQLLQSSQQGVPASLGGP

SEQ ID NO: 23853 - protein, 129 aa, Homo sapiens
  REGION 1..129: note = ENSP00000422699
EEGIARKALYKLTAARADQGAEMEDRMSRQGQRTPSAQILCIDEATASVDQKTDQLLQQTICKRFANKTVLTIAHRLNTILNSDRVLVLQAGRVVELDSPATLRNQPHSLFQQLLQSSQQGVPASLGGP

SEQ ID NO: 23854 - protein, 62 aa, Homo sapiens
  REGION 1..62: note = ENSP00000435378
  VARIANT 1: note = Any amino acid
XLPSSAWWTRSKGTSSLMALTSPNCRCTPCAHASPSSCRTPSSSAAPSGPGSLWKGIPHPWV

SEQ ID NO: 23855 - protein, 1581 aa, Homo sapiens
  REGION 1..1581: note = ENSP00000374467
MPLAFCGSENHSAAYRVDQGVLNNGCFVDALNVVPHVFLLFITFPILFIGWGSQSSKVHIHHSTWLHFPGHNLRWILTFMLLFVLVCEIAEGILSDGVTESHHLHLYMPAGMAFMAAVTSVVYYHNIETSNFPKLLIALLVYWTLAFITKTIKFVKFLDHAIGFSQLRFCLTGLLVILYGMLLLVEVNVIRVRRYIFFKTPREVKPPEDLQDLGVRFLQPFVNLLSKGTYWWMNAFIKTAHKKPIDLRAIGKLPIAMRALTNYQRLCEAFDAQVRKDIQGTQGARAIWQALSHAFGRRLVLSSTFRILADLLGFAGPLCIFGIVDHLGKENDVFQPKTQFLGVYFVSSQEFLANAYVLAVLLFLALLLQRTFLQASYYVAIETGINLRGAIQTKIYNKIMHLSTSNLSMGEMTAGQICNLVAIDTNQLMWFFFLCPNLWAMPVQIIVGVILLYYILGVSALIGAAVIILLAPVQYFVATKLSQAQRSTLEYSNERLKQTNEMLRGIKLLKLYAWENIFRTRVETTRRKEMTSLRAFAIYTSISIFMNTAIPIAAVLITFVGHVSFFKEADFSPSVAFASLSLFHILVTPLFLLSSVVRSTVKALVSVQKLSEFLSSAEIREEQCAPHEPTPQGPASKYQAVPLRVVNRKRPAREDCRGLTGPLQSLVPSADGDADNCCVQIMGGYFTWTPDGIPTLSNITIRIPRGQLTMIVGQVGCGKSSLLLAALGEMQKVSGAVFWSSLPDSEIGEDPSPERETATDLDIRKRGPVAYASQKPWLLNATVEENIIFESPFNKQRYKMVIEACSLQPDIDILPHGDQTQIGERGINLSGGQRQRISVARALYQHANVVFLDDPFSALDIHLSDHLMQAGILELLRDDKRTVVLVTHKLQYLPHADWIIAMKDGTIQREGTLKDFQRSECQLFEHWKTLMNRQDQELEKETVTERKATEPPQGLSRAMSSRDGLLQDEEEEEEEAAESEEDDNLSSMLHQRAEIPWRACAKYLSSAGILLLSLLVFSQLLKHMVLVAIDYWLAKWTDSALTLTPAARNCSLSQECTLDQTVYAMVFTVLCSLGIVLCLVTSVTVEWTGLKVAKRLHRSLLNRIILAPMRFFETTPLGSILNRFSSDCNTIDQHIPSTLECLSRSTLLCVSALAVISYVTPVFLVALLPLAIVCYFIQKYFRVASRDLQQLDDTTQLPLLSHFAETVEGLTTIRAFRYEARFQQKLLEYTDSNNIASLFLTAANRWLEVRMEYIGACVVLIAAVTSISNSLHRELSAGLVGLGLTYALMVSNYLNWMVRNLADMELQLGAVKRIHGLLKTEAESYEGLLAPSLIPKNWPDQGKIQIQNLSVRYDSSLKPVLKHVNALIAPGQKIGICGRTGSGKSSFSLAFFRMVDTFEGHIIIDGIDIAKLPLHTLRSRLSIILQDPVLFSGTIRFNLDPERKCSDSTLWEALEIAQLKLVVKALPGGLDAIITEGGENFSQGQRQLFCLARAFVRKTSIFIMDEATASIDMATENILQKVVMTAFADRTVVTIAHRVHTILSADLVIVLKRGAILEFDKPEKLLSRKDSVFASFVRADK

SEQ ID NO: 23856 - protein, 33 aa, Homo sapiens
  REGION 1..33: note = ENSP00000437233
  VARIANT 1: note = Any amino acid
XRTGSGKSSFSLAFFRMVDTFEGPRPLQRHHPI

SEQ ID NO: 23857 - protein, 204 aa, Homo sapiens
  REGION 1..204: note = ENSP00000433638
  VARIANT 1: note = Any amino acid
XQKYFRVASRDLQQLDDTTQLPLLSHFAETVEGLTTIRAFRYEARFQQKLLEYTDSNNIASLFLTAANRWLEVRMEYIGACVVLIAAVTSISNSLHRELSAGLVGLGLTYALMVSNYLNWMVRNLADMELQLGAVKRIHGLLKTEAESYEGLLARPPAPSLIPKNWPDQGKIQIQNLSVRYDSSLKPVLKHVNALIAPGQKIGI

SEQ ID NO: 23858 - protein, 997 aa, Homo sapiens
  REGION 1..997: note = ENSP00000431653
MPLAFCGSENHSAAYRVDQGVLNNGCFVDALNVVPHVFLLFITFPILFIGWGSQSSKVHIHHSTWLHFPGHNLRWILTFMLLFVLVCEIAEGILSDGVTESHHLHLYMPAGMAFMAAVTSVVYYHNIETSNFPKLLIALLVYWTLAFITKTIKFVKFLDHAIGFSQLRFCLTGLLVILYGMLLLVEVNVIRVRRYIFFKTPREVKPPEDLQDLGVRFLQPFVNLLSKGTYWWMNAFIKTAHKKPIDLRAIGKLPIAMRALTNYQRLCEAFDAQVRKDIQGTQGARAIWQALSHAFGRRLVLSSTFRILADLLGFAGPLCIFGIVDHLGKENDVFQPKTQFLGVYFVSSQEFLANAYVLAVLLFLALLLQRTFLQASYYVAIETGINLRGAIQTKIYNKIMHLSTSNLSMGEMTAGQICNLVAIDTNQLMWFFFLCPNLWAMPVQIIVGVILLYYILGVSALIGAAVIILLAPVQYFVATKLSQAQRSTLEYSNERLKQTNEMLRGIKLLKLYAWENIFRTRVETTRRKEMTSLRAFAIYTSISIFMNTAIPIAAVLITFVGHVSFFKEADFSPSVAFASLSLFHILVTPLFLLSSVVRSTVKALVSAEIREEQCAPHEPTPQGPASKYQAVPLRVVNRKRPAREDCRGLTGPLQSLVPSADGDADNCCVQIMGGYFTWTPDGIPTLSNITIRIPRGQLTMIVGQVGCGKSSLLLAALGEMQKVSGAVFWSSLPDSEIGEDPSPERETATDLDIRKRGPVAYASQKPWLLNATVEENIIFESPFNKQRYKMVIEACSLQPDIDILPHGDQTQIGERGINLSGGQRQRISVARALYQHANVVFLDDPFSALDIHLSDHLMQAGILELLRDDKRTVVLVTHKLQYLPHADWIIAMKDGTIQREGTLKDFQRSECQLFEHWKTLMNRQDQELEKRRQLRARRMTTCRPCCTSVLRSHGEPAPSTCPPPASCSCRCWSSHSCSSTWSWWPSTTGWPSGPTAP

SEQ ID NO: 23859 - protein, 53 aa, Homo sapiens
  REGION 1..53: note = ENSP00000434893
  VARIANT 1: note = Any amino acid
XPSGPSGMRPGSSRSFSNTQTPTTLLPSSSQLPTDGWKSEWSTSVHVWCSSQR

SEQ ID NO: 23860 - protein, 1582 aa, Homo sapiens
  REGION 1..1582: note = ENSP00000303960
MPLAFCGSENHSAAYRVDQGVLNNGCFVDALNVVPHVFLLFITFPILFIGWGSQSSKVHIHHSTWLHFPGHNLRWILTFMLLFVLVCEIAEGILSDGVTESHHLHLYMPAGMAFMAAVTSVVYYHNIETSNFPKLLIALLVYWTLAFITKTIKFVKFLDHAIGFSQLRFCLTGLLVILYGMLLLVEVNVIRVRRYIFFKTPREVKPPEDLQDLGVRFLQPFVNLLSKGTYWWMNAFIKTAHKKPIDLRAIGKLPIAMRALTNYQRLCEAFDAQVRKDIQGTQGARAIWQALSHAFGRRLVLSSTFRILADLLGFAGPLCIFGIVDHLGKENDVFQPKTQFLGVYFVSSQEFLANAYVLAVLLFLALLLQRTFLQASYYVAIETGINLRGAIQTKIYNKIMHLSTSNLSMGEMTAGQICNLVAIDTNQLMWFFFLCPNLWAMPVQIIVGVILLYYILGVSALIGAAVIILLAPVQYFVATKLSQAQRSTLEYSNERLKQTNEMLRGIKLLKLYAWENIFRTRVETTRRKEMTSLRAFAIYTSISIFMNTAIPIAAVLITFVGHVSFFKEADFSPSVAFASLSLFHILVTPLFLLSSVVRSTVKALVSVQKLSEFLSSAEIREEQCAPHEPTPQGPASKYQAVPLRVVNRKRPAREDCRGLTGPLQSLVPSADGDADNCCVQIMGGYFTWTPDGIPTLSNITIRIPRGQLTMIVGQVGCGKSSLLLAALGEMQKVSGAVFWSSSLPDSEIGEDPSPERETATDLDIRKRGPVAYASQKPWLLNATVEENIIFESPFNKQRYKMVIEACSLQPDIDILPHGDQTQIGERGINLSGGQRQRISVARALYQHANVVFLDDPFSALDIHLSDHLMQAGILELLRDDKRTVVLVTHKLQYLPHADWIIAMKDGTIQREGTLKDFQRSECQLFEHWKTLMNRQDQELEKETVTERKATEPPQGLSRAMSSRDGLLQDEEEEEEEAAESEEDDNLSSMLHQRAEIPWRACAKYLSSAGILLLSLLVFSQLLKHMVLVAIDYWLAKWTDSALTLTPAARNCSLSQECTLDQTVYAMVFTVLCSLGIVLCLVTSVTVEWTGLKVAKRLHRSLLNRIILAPMRFFETTPLGSILNRFSSDCNTIDQHIPSTLECLSRSTLLCVSALAVISYVTPVFLVALLPLAIVCYFIQKYFRVASRDLQQLDDTTQLPLLSHFAETVEGLTTIRAFRYEARFQQKLLEYTDSNNIASLFLTAANRWLEVRMEYIGACVVLIAAVTSISNSLHRELSAGLVGLGLTYALMVSNYLNWMVRNLADMELQLGAVKRIHGLLKTEAESYEGLLAPSLIPKNWPDQGKIQIQNLSVRYDSSLKPVLKHVNALIAPGQKIGICGRTGSGKSSFSLAFFRMVDTFEGHIIIDGIDIAKLPLHTLRSRLSIILQDPVLFSGTIRFNLDPERKCSDSTLWEALEIAQLKLVVKALPGGLDAIITEGGENFSQGQRQLFCLARAFVRKTSIFIMDEATASIDMATENILQKVVMTAFADRTVVTIAHRVHTILSADLVIVLKRGAILEFDKPEKLLSRKDSVFASFVRADK

SEQ ID NO: 23861 - protein, 50 aa, Homo sapiens
  REGION 1..50: note = ENSP00000483031
MPLAFCGSENHSAAYRVDQGVLNNGCFVDALNVVPHVFLLFITFPILFIG

SEQ ID NO: 23862 - protein, 611 aa, Homo sapiens
  REGION 1..611: note = ENSP00000426917
MSSSNVEVFIPVSQGNTNGFPATASNDLKAFTEGAVLSFHNICYRVKLKSGFLPCRKPVEKEILSNINGIMKPGLNAILGPTGGGKSSLLDVLAARKDPSGLSGDVLINGAPRPANFKCNSGYVVQDDVVMGTLTVRENLQFSAALRLATTMTNHEKNERINRVIQELGLDKVADSKVGTQFIRGVSGGERKRTSIGMELITDPSILFLDEPTTGLDSSTANAVLLLLKRMSKQGRTIIFSIHQPRYSIFKLFDSLTLLASGRLMFHGPAQEALGYFESAGYHCEAYNNPADFFLDIINGDSTAVALNREEDFKATEIIEPSKQDKPLIEKLAEIYVNSSFYKETKAELHQLSGGEKKKKITVFKEISYTTSFCHQLRWVSKRSFKNLLGNPQASIAQIIVTVVLGLVIGAIYFGLKNDSTGIQNRAGVLFFLTTNQCFSSVSAVELFVVEKKLFIHEYISGYYRVSSYFLGKLLSDLLPMRMLPSIIFTCIVYFMLGLKPKADAFFVMMFTLMMVAYSASSMALAIAAGQSVVSVATLLMTICFVFMMVCWSISQPLHLGCHGFSTSAFHDMDLRLCSIMNFWDKTSAQDSMQQETILVTMQHVLAKNIW

SEQ ID NO: 23863 - protein, 655 aa, Homo sapiens
  REGION 1..655: note = ENSP00000237612
MSSSNVEVFIPVSQGNTNGFPATASNDLKAFTEGAVLSFHNICYRVKLKSGFLPCRKPVEKEILSNINGIMKPGLNAILGPTGGGKSSLLDVLAARKDPSGLSGDVLINGAPRPANFKCNSGYVVQDDVVMGTLTVRENLQFSAALRLATTMTNHEKNERINRVIQELGLDKVADSKVGTQFIRGVSGGERKRTSIGMELITDPSILFLDEPTTGLDSSTANAVLLLLKRMSKQGRTIIFSIHQPRYSIFKLFDSLTLLASGRLMFHGPAQEALGYFESAGYHCEAYNNPADFFLDIINGDSTAVALNREEDFKATEIIEPSKQDKPLIEKLAEIYVNSSFYKETKAELHQLSGGEKKKKITVFKEISYTTSFCHQLRWVSKRSFKNLLGNPQASIAQIIVTVVLGLVIGAIYFGLKNDSTGIQNRAGVLFFLTTNQCFSSVSAVELFVVEKKLFIHEYISGYYRVSSYFLGKLLSDLLPMRMLPSIIFTCIVYFMLGLKPKADAFFVMMFTLMMVAYSASSMALAIAAGQSVVSVATLLMTICFVFMMIFSGLLVNLTTIASWLSWLQYFSIPRYGFTALQHNEFLGQNFCPGLNATGNNPCNYATCTGEEYLVKQGIDLSPWGLWKNHVALACMIVIFLTIAYLKLLFLKKYS

SEQ ID NO: 23864 - protein, 150 aa, Homo sapiens
  REGION 1..150: note = ENSP00000426916
KRFRARRREEAVPATPTEIERRGKEAACGGTGKIKTLQMSSSNVEVFIPVSQGNTNGFPATASNDLKAFTEGAVLSFHNICYRVKLKSGFLPCRKPVEKEILSNINGIMKPGLNAILGPTGGGKSSLLDVLAARKDPSGLSGDVLINGAP

SEQ ID NO: 23865 - protein, 130 aa, Homo sapiens
  REGION 1..130: note = ENSP00000426934
SDGDQTQLGQTRKIKTLQMSSSNVEVFIPVSQGNTNGFPATASNDLKAFTEGAVLSFHNICYRVKLKSGFLPCRKPVEKEILSNINGIMKPGLNAILGPTGGGKSSLLDVLAARKDPSGLSGDVLINGAP

SEQ ID NO: 23866 - protein, 131 aa, Homo sapiens
  REGION 1..131: note = ENSP00000457882
MNAMLETPELPAVFDGVKLAAVAAVLYVIVRCLNLKSPTAPPDLYFQDSGLSRFLLKSCPLLTKEYIPPLIWGKSGHIQTALYGKMGRVRSPHPYGHRKFITMSDGATSTFDLFEPLAEHCVGDDITMVIC

SEQ ID NO: 23867 - protein, 425 aa, Homo sapiens
  REGION 1..425: note = ENSP00000268129
MNAMLETPELPAVFDGVKLAAVAAVLYVIVRCLNLKSPTAPPDLYFQDSGLSRFLLKSCPLLTKEYIPPLIWGKSGHIQTALYGKMGRVRSPHPYGHRKFITMSDGATSTFDLFEPLAEHCVGDDITMVICPGIANHSEKQYIRTFVDYAQKNGYRCAVLNHLGALPNIELTSPRMFTYGCTWEFGAMVNYIKKTYPLTQLVVVGFSLGGNIVCKYLGETQANQEKVLCCVSVCQGYSALRAQETFMQWDQCRRFYNFLMADNMKKIILSHRQALFGDHVKKPQSLEDTDLSRLYTATSLMQIDDNVMRKFHGYNSLKEYYEEESCMRYLHRIYVPLMLVNAADDPLVHESLLTIPKSLSEKRENVMFVLPLHGGHLGFFEGSVLFPEPLTWMDKLVVEYANAICQWERNKLQCSDTEQVEADLE

SEQ ID NO: 23868 - protein, 55 aa, Homo sapiens
  REGION 1..55: note = ENSP00000454645
MNAMLETPELPAVFDGVKLAAVAAVLYVIVRCLNLKSPTAPPDLYFQDSGLSRFL

SEQ ID NO: 23869 - protein, 123 aa, Homo sapiens
  REGION 1..123: note = ENSP00000454531
MNAMLETPELPAVFDGVKLAAVAAVLYVIVRCLNLKSPTAPPDLYFQDSGLSRFLLKSCPLLTKEYIPPLIWGKSGHIQTALYGKMGRVRSPHPYGHRKFITMSDGATSTFDLFEPLAEHCVG

SEQ ID NO: 23870 - protein, 425 aa, Homo sapiens; identical to SEQ ID NO: 23867
  REGION 1..425: note = ENSP00000455639

SEQ ID NO: 23871 - protein, 409 aa, Homo sapiens
  REGION 1..409: note = ENSP00000289119
MQRLAMDLRMLSRELSLYLEHQVRVGFFGSGVGLSLILGFSVAYAFYYLSSIAKKPQLVTGGESFSRFLQDHCPVVTETYYPTVWCWEGRGQTLLRPFITSKPPVQYRNELIKTADGGQISLDWFDNDNSTCYMDASTRPTILLLPGLTGTSKESYILHMIHLSEELGYRCVVFNNRGVAGENLLTPRTYCCANTEDLETVIHHVHSLYPSAPFLAAGVSMGGMLLLNYLGKIGSKTPLMAAATFSVGWNTFACSESLEKPLNWLLFNYYLTTCLQSSVNKHRHMFVKQVDMDHVMKAKSIREFDKRFTSVMFGYQTIDDYYTDASPSPRLKSVGIPVLCLNSVDDVFSPSHAIPIETAKQNPNVALVLTSYGGHIGFLEGIWPRQSTYMDRVFKQFVQAMVEHGHELS

SEQ ID NO: 23872 - protein, 356 aa, Homo sapiens
  REGION 1..356: note = ENSP00000462935
MQRLAMDLRMLSRELSLYLEHQVRVGFFGSGVGLSLILGFSVAYAFYYLSSIAKKPQLVTGGESFSRFLQDHCPVVTETYYPTVWCWEGRGQTLLRPFITSKPPVQYRNELIKTADGGQISLDWFDNDNSTCYMDASTRPTILLLPGLTGTSKESYILHMIHLSEELGYRMLLLNYLGKIGSKTPLMAAATFSVGWNTFACSESLEKPLNWLLFNYYLTTCLQSSVNKHRHMFVKQVDMDHVMKAKSIREFDKRFTSVMFGYQTIDDYYTDASPSPRLKSVGIPVLCLNSVDDVFSPSHAIPIETAKQNPNVALVLTSYGGHIGFLEGIWPRQSTYMDRVFKQFVQAMVEHGHELS

SEQ ID NO: 23873 - protein, 214 aa, Homo sapiens
  REGION 1..214: note = ENSP00000462578
MTFITPVTEIITYCSLQLQWPSKLFFPRMLLLNYLGKIGSKTPLMAAATFSVGWNTFACSESLEKPLNWLLFNYYLTTCLQSSVNKHRHMFVKQVDMDHVMKAKSIREFDKRFTSVMFGYQTIDDYYTDASPSPRLKSVGIPVLCLNSVDDVFSPSHAIPIETAKQNPNVALVLTSYGGHIGFLEGIWPRQSTYMDRVFKQFVQAMVEHGHELS

SEQ ID NO: 23874 - protein, 37 aa, Homo sapiens
  REGION 1..37: note = ENSP00000463996
  VARIANT 1: note = Any amino acid
XYTDASPSPRLKSVGIPVLCLNSVDDVFSPSHGNLRS

SEQ ID NO: 23875 - protein, 136 aa, Homo sapiens
  REGION 1..136: note = ENSP00000463365
MQRLAMDLRMLSRELSLYLEHQVRVGFFGSGVGLSLILGFSVAYAFYYLSSIAKKRTTRRSGAGRVEDRPCLDLSSLRSPRCSTGMNLLKLQMEDRFHWTGLIMITVRVIWMPAPDLLSYCCLASREQARSHISFI

SEQ ID NO: 23876 - protein, 112 aa, Homo sapiens
  REGION 1..112: note = ENSP00000463848
  VARIANT 1: note = Any amino acid
XVVTETYYPTVWCWEGRGQTLLRPFITSKPPVQYRNELIKTADGGQISLDWFDNDNSTCYMDASTRPTILLLPGLTGTSKESYILHMIHLSEELGYRCVVFNNRGVAGENLL

SEQ ID NO: 23877 - protein, 126 aa, Homo sapiens
  REGION 1..126: note = ENSP00000391582
MLKCVPCTYKKEPVRISNGNKIWTLKFSHNISNKTPLVLLHGFGGGLGLWALNFGDLCTNRPVYAFDLLGFGRSSRPRFDSDAEEVENQFVESIEEWRCALGLDKMILLGHNLGGFLAAAYSLKYP

SEQ ID NO: 23878 - protein, 349 aa, Homo sapiens
  REGION 1..349: note = ENSP00000390849
MAAEEEEVDSADTGERSGWLTGWLPTWCPTSISHLKEAEEKMLKCVPCTYKKEPVRISNGNKIWTLKFSHNISNKTPLVLLHGFGGGLGLWALNFGDLCTNRPVYAFDLLGFGRSSRPRFDSDAEEVENQFVESIEEWRCALGLDKMILLGHNLGGFLAAAYSLKYPSRVNHLILVEPWGFPERPDLADQDRPIPVWIRALGAALTPFNPLAGLRIAGPFGLSLVQRLRPDFKRKYSSMFEDDTVTEYIYHCNVQTPSGETAFKNMTIPYGWAKRPMLQRIGKMHPDIPVSVIFGARSCIDGNSGTSIQSLRPHSYVKTIAILGAGHYVYADQPEEFNQKVKEICDTVD

SEQ ID NO: 23879 - protein, 44 aa, Homo sapiens
  REGION 1..44: note = ENSP00000013894
MAAEEEEVDSADTGERSGWLTGWLPTWCPTSISHLKEAEEKMLK

SEQ ID NO: 23880 - protein, 45 aa, Homo sapiens
  REGION 1..45: note = ENSP00000412014
MLKCVPCTYKKEPVRISNGNKIWTLKFSHNISNKTPLVLLHGFGG

SEQ ID NO: 23881 - protein, 155 aa, Homo sapiens
  REGION 1..155: note = ENSP00000392159
RVNHLILVEPWGFPERPDLADQDRPIPVWIRALGAALTPFNPLAGLRIAGPFGLSLVQRLRPDFKRKYSSMFEDDTVTEYIYHCNVQTPSFSDLWRPILHRWQFWHQHPVLTTTFICEDNSYSWGRTLCICRSTRRIQPESKGDLRHCGLNTLKL

SEQ ID NO: 23882 - protein, 366 aa, Homo sapiens
  REGION 1..366: note = ENSP00000225941
MAELQQLQEFEIPTGREALRGNHSALLRVADYCEDNYVQATDKRKALEETMAFTTQALASVAYQVGNLAGHTLRMLDLQGAALRQVEARVSTLGQMVNMHMEKVARREIGTLATVQRLPPGQKVIAPENLPPLTPYCRRPLNFGCLDDIGHGIKDLSTQLSRTGTLSRKSIKAPATPASATLGRPPRIPEPVHLPVVPDGRLSAASSAFSLASAGSAEGVGGAPTPKGQAAPPAPPLPSSLDPPPPPAAVEVFQRPPTLEELSPPPPDEELPLPLDLPPPPPLDGDELGLPPPPPGFGPDEPSWVPASYLEKVVTLYPYTSQKDNELSFSEGTVICVTRRYSDGWCEGVSSEGTGFFPGNYVEPSC

SEQ ID NO: 23883 - protein, 360 aa, Homo sapiens
  REGION 1..360: note = ENSP00000406651
MAELQQLQEFEIPTGREALRGNHSALLRVADYCEDNYVQATDKRKALEETMAFTTQALASVAYQVGNLAGHTLRMLDLQGAALRQVEARMVNMHMEKVARREIGTLATVQRLPPGQKVIAPENLPPLTPYCRRPLNFGCLDDIGHGIKDLSTQLSRTGTLSRKSIKAPATPASATLGRPPRIPEPVHLPVVPDGRLSAASSAFSLASAGSAEGVGGAPTPKGQAAPPAPPLPSSLDPPPPPAAVEVFQRPPTLEELSPPPPDEELPLPLDLPPPPPLDGDELGLPPPPPGFGPDEPSWVPASYLEKVVTLYPYTSQKDNELSFSEGTVICVTRRYSDGWCEGVSSEGTGFFPGNYVEPSC

SEQ ID NO: 23884 - protein, 160 aa, Homo sapiens
  REGION 1..160: note = ENSP00000460776
  VARIANT 1: note = Any amino acid
XTGTLSRKSIKAPATPASATLGRPPRIPEPVHLPVVPDGRLSAASSAFSLASAGSAEGVGGAPTPKGQAAPPAPPLPSSLDPPPPPAAVEVFQRPPTLEELSPPPPAFLLFPQDEELPLPLDLPPPPPLDGDELGLPPPPPGFGPDEPSWVPASYLEKGT

SEQ ID NO: 23885 - protein, 191 aa, Homo sapiens
  REGION 1..191: note = ENSP00000459171
  VARIANT 1: note = Any amino acid
XRPPRIPEPVHLPVVPDGRLSAASSAFSLASAGSAEGVGGAPTPKGQAAPPAPPLPSSLDPPPPPAAVEVFQRPPTLEELSPPPPAFLLFPQDEELPLPLDLPPPPPLDGDELGLPPPPPGFGPDEPSWVPASYLEKVVTLYPYTSQKDNELSFSEGTVICVTRRYSDGWCEGVSSEGTGFFPGNYVEPSC

SEQ ID NO: 23886 - protein, 1777 aa, Homo sapiens
  REGION 1..1777: note = ENSP00000420524
MRGGKCNMLSSLGCLLLCGSITLALGNAQKLPKGKRPNLKVHINTTSDSILLKFLRPSPNVKLEGLLLGYGSNVSPNQYFPLPAEGKFTEAIVDAEPKYLIVVRPAPPPSQKKSCSGKTRSRKPLQLVVGTLTPSSVFLSWGFLINPHHDWTLPSHCPNDRFYTIRYREKDKEKKWIFQICPATETIVENLKPNTVYEFGVKDNVEGGIWSKIFNHKTVVGSKKVNGKIQSTYDQDHTVPAYVPRKLIPITIIKQVIQNVTHKDSAKSPEKAPLGGVILVHLIIPGLNETTVKLPASLMFEISDALKTQLAKNETLALPAESKTPEVEKISARPTTVTPETVPRSTKPTTSSALDVSETTLVLSKRTPETLQTILIPQFELPLSTLAPKSLPEFPEAKTPFPFEKPRGTLASSEKPWIVPTAKISEDSKVLQPQTATYDVFSSPTTSDEPEISDSYTATSDRILDSIPPKTSRTLEQPRATLAPSETPFVPQKLEIFTSPEMQPTTPAPQQTTSIPSTPKRRPRPKPPRTKPERTTSAGTITPKISKSPEPTWTTPAPGKTQFISLKPKIPLSPEVTHTKPAPEPQTLLPSQSTIGPETPGTKPSTTLAPRKTKRPGRRPRPRPRPKTTPSPEVPKSKPALEPATIQPEPLVPTTASKPSERPKTTHRPDAPQIQPGSKPPKQLLPKPQTTAEPDMPPTKSVSEPVPFETEAPSMTIVPTTDIEPVTVRTEATVTTLAPKTSQRTRTRRPRPKHKTTPRPETLQTKLDFGPITPGTSSAPTTTTKRTRRPHPKPKTTPHPEVPQTKLVPATILEPVLRTEASGTTAAPKVPQRTHRPHPKPKTTLSPEELQTELVPATIFEPVSPIKEAPGTTFVPVTDLEPVTFRTEIPATTLATKTSKRTRPPRPRPKTTPSPQAPETKPVPATVLEPVTLRPEASTTLASKTSQRTRRPRLRTKTTPRPEAPESKPVPTAELKPVTLRTETWVTTQAPKTSQRTRRPRPKTKTTPSPEVPQTKLVPSTDLEPGTLRTEAPKTMVVTTVLEPDTFRTKFPETTLAPKTQRTRRPRPRPKTTSSPEVPQNKSVSVTGFEPVVHSTDAPGTTFALTELQTLILKPVTSPSLEMTESQPVSDVLESVTLSTESPKETIAPAKTDYVYPTAKAPLWPEEPKTEVVESITYVSEPPETTLETSPLPSQSITLPSPDEPQTEPAPKQTPRAPPKPKTSPRPRIPQTQPVPKVPQRVTAKPKTSPSPEVSYTTPAPKDVLLPHKPYPEVSQSEPAPLETRGIPFIPMISPSPSQEELQTTLEETDQSTQEPFTTKIPRTTELAKTTQAPHRFYTTVRPRTSDKPHIRPVLNRTTTRPTRPKPSGMPSGNGVGTGVKQAPRPSGADRNVSVDSTHPTKKPGTRRPPLPPRPTHPRRKPLPPNNVTGKPGSAGIISSGPITTPPLRSTPRPTGTPLERIETDIKQPTVPASGEELENITDFSSSPTRETDPLGKPRFKGPHVRYIQKPDNSPCSITDSVKRFPKEEATEGNATSPPQNPPTNLTVVTVEGCPSFVILDWEKPLNDTVTEYEVISRENGSFSGKNKSIQMTNQTFSTVENLKPNTSYEFQVKPKNPLGEGPVSNTVAFSTESADPRVSEPVSAGRDAIWTERPFNSDSYSECKGKQYVKRTWYKKFVGVQLCNSLRYKIYLSDSLTGKFYNIGDQRGHGEDHCQFVDSFLDGRTGQQLTSDQLPIKEGYFRAVRQEPVQFGEIGGHTQINYVQWYECGTTIPGKW

SEQ ID NO: 23887 - protein, 1075 aa, Homo sapiens
  REGION 1..1075: note = ENSP00000284322
MRGGKCNMLSSLGCLLLCGSITLALGNAQKLPKGKRPNLKVHINTTSDSILLKFLRPSPNVKLEGLLLGYGSNVSPNQYFPLPAEGKFTEAIVDAEPKYLIVVRPAPPPSQKKSCSGKTRSRKPLQLVVGTLTPSSVFLSWGFLINPHHDWTLPSHCPNDRFYTIRYREKDKEKKWIFQICPATETIVENLKPNTVYEFGVKDNVEGGIWSKIFNHKTVVGSKKVNGKIQSTYDQDHTVPAYVPRKLIPITIIKQVIQNVTHKDSAKSPEKAPLGGVILVHLIIPGLNETTVKLPASLMFEISDALKTQLAKNETLALPAESKTPEVEKISARPTTVTPETVPRSTKPTTSSALDVSETTLASSEKPWIVPTAKISEDSKVLQPQTATYDVFSSPTTSDEPEISDSYTATSDRILDSIPPKTSRTLEQPRATLAPSETPFVPQKLEIFTSPEMQPTTPAPQQTTSIPSTPKRRPRPKPPRTKPERTTSAGTITPKISKSPEPTWTTPAPGKTQFISLKPKIPLSPEVTHTKPAPKQTPRAPPKPKTSPRPRIPQTQPVPKVPQRVTAKPKTSPSPEVSYTTPAPKDVLLPHKPYPEVSQSEPAPLETRGIPFIPMISPSPSQEELQTTLEETDQSTQEPFTTKIPRTTELAKTTQAPHRFYTTVRPRTSDKPHIRPGVKQAPRPSGADRNVSVDSTHPTKKPGTRRPPLPPRPTHPRRKPLPPNNVTGKPGSAGIISSGPITTPPLRSTPRPTGTPLERIETDIKQPTVPASGEELENITDFSSSPTRETDPLGKPRFKGPHVRYIQKPDNSPCSITDSVKRFPKEEATEGNATSPPQNPPTNLTVVTVEGCPSFVILDWEKPLNDTVTEYEVISRENGSFSGKNKSIQMTNQTFSTVENLKPNTSYEFQVKPKNPLGEGPVSNTVAFSTESADPRVSEPVSAGRDAIWTERPFNSDSYSECKGKQYVKRTWYKKFVGVQLCNSLRYKIYLSDSLTGKFYNIGDQRGHGEDHCQFVDSFLDGRTGQQLTSDQLPIKEGYFRAVRQEPVQFGEIGGHTQINYVQWYECGTTIPGKW

SEQ ID NO: 23888 - protein, 1131 aa, Homo sapiens
  REGION 1..1131: note = ENSP00000418817
  VARIANT 1: note = Any amino acid
XISLKPKIPLSPEVTHTKPAPEPQTLLPSQSTIGPETPGTKPSTTLALEPATIQPEPLVPTTASKPSERPKTTHRPDAPQIQPGSKPPKQLLPKPQTTAEPDMPPTKSVSEPVPFETEAPSMTIVPTTDIEPVTVRTEATVTTLAPKTSQRTRTRRPRPKHKTTPRPETLQTKLDFGPITPGTSSAPTTTTKRTRRPHPKPKTTPHPEVPQTKLVPATILEPVLRTEASGTTAVPATIFEPVSPIKEAPGTTFVPVTDLEPVTFRTEIPATTLATKTSKRTRPPRPRPKTTPSPQAPETKPVPATVLEPVTLRPEASTTLASKTSQRTRRPRLRTKTTPRPEAPESKPVPTAELKPVTLRTETWVTTQAPKTSQRTRRPRPKTKTTPSPEVPQTKLVPSTDLEPGTLRTEAPKTMVVTTVLEPDTFRTKFPETTLAPKTQRTRRPRPRPKTTSSPEVPQNKSVSVTGFEPVVHSTDAPGTTFALTELQTLILKPVTSPSLEMTESQPVSDVLESVTLSTESPKETIAPAKTDYVYPTAKAPLWPEEPKTEVVESITYVSEPPETTLETSPLPSQSITLPSPDEPQTEPAPKQTPRAPPKPKTSPRPRIPQTQPVPKVPQRVTAKPKTSPSPEVSYTTPAPKDVLLPHKPYPEVSQSEPAPLETRGIPFIPMISPSPSQEELQTTLEETDQSTQEPFTTKIPRTTELAKTTQAPHRFYTTVRPRTSDKPHIRPGVKQAPRPSGADRNVSVDSTHPTKKPGTRRPPLPPRPTHPRRKPLPPNNVTGKPGSAGIISSGPITTPPLRSTPRPTGTPLERIETDIKQPTVPASGEELENITDFSSSPTRETDPLGKPRFKGPHVRYIQKPDNSPCSITDSVKRFPKEEATEGNATSPPQNPPTNLTVVTVEGCPSFVILDWEKPLNDTVTEYEVISRENGSFSGKNKSIQMTNQTFSTVENLKPNTSYEFQVKPKNPLGEGPVSNTVAFSTESADPRVSEPVSAGRDAIWTERPFNSDSYSECKGKQYVKRTWYKKFVGVQLCNSLRYKIYLSDSLTGKFYNIGDQRGHGEDHCQFVDSFLDGRTGQQLTSDQLPIKEGYFRAVRQEPVQFGEIGGHTQINYVQWYECGTTIPGKW

SEQ ID NO: 23889 - protein, 233 aa, Homo sapiens
  REGION 1..233: note = ENSP00000419029
QRVTAKPKTSPSPEVSYTTPAPKDVLLPHKPYPEVSQSEPAPLETRGIPFIPMISPSPSQEELQTTLAPHRFYTTVRPRTSDKPHIRPGVKQAPRPSGADRNVSVDSTHPTKKPGTRRPPLPPRPTHPRRKPLPPNNVTGKPGSAGIISSGPITTPPLRSTPRPTGTPLERIETDIKQPTVPASGEELENITDFSSSPTRETDPLGKPRFKGPHVRYIQKPDNSPCSITDSVK

SEQ ID NO: 23890 - protein, 189 aa, Homo sapiens
  REGION 1..189: note = ENSP00000420704
  VARIANT 1: note = Any amino acid
XTAKPKTSPSPEVSYTTPAPLETRGIPFIPMISPSPSQEELQTTLEETDQSTQEPFTTKIPRTTELAKTTQAPHRFYTTVRPRTSDKPHIRPVLNRTTTRPTRPKPSGMPSGNGVGTGVKQAPRPSGADRNVSVDSTHPTKKPGTRRPPLPPRPTHPRRKPLPPNNVTGKPGSAGIISSGPITTPPLRS

SEQ ID NO: 23891 - protein, 307 aa, Homo sapiens
  REGION 1..307: note = ENSP00000418024
  VARIANT 1: note = Any amino acid
XPKPKTTPHPEVPQTKLATKTSKRTRPPRPRPKTTPSPQAPETKPVPATVLEPVTLRPEASTTLASKTSQRTRRPRLRTKTTPRPEAPESKPVPTAELKPVTLRTETWVTTQAPKQTPRAPPKPKTSPRPRIPQTQPVPKVPQRVTAKPKTSPSPEVSYTTPAPKDVLLPHKPYPEVSQSEPAPLETRGIPFIPMISPSPSQEELQTTLEETDQSTQEPFTTKIPRTTELAKTTQAPHRFYTTVRPRTSDKPHIRPVLNRTTTRPTRPKPSGMPSGNGVGTGVKQAPRPSGADRNVSVDSTHPTKKP

SEQ ID NO: 23892 - protein, 151 aa, Homo sapiens
  REGION 1..151: note = ENSP00000431537
  VARIANT 1: note = Any amino acid
XVESITYVSEPPETTLETSPLPSQSITLPSPDEPQTEPAPKQTPRAPPKPKTSPRPRIPQTQPVPKVPQRVTAKPKTSPSPEVSYTTPAPKDVLLPHKPYPEVSQSEPVLQPVTFRFEPPKTTIAPLETRGIPFIPMISPSPSQEELQTTL

SEQ ID NO: 23893 - protein, 158 aa, Homo sapiens
  REGION 1..158: note = ENSP00000418800
VSDVLESVTLSTESPKETIAPAKTDYVYPTAKAPLWPEEPKTEVVESITYVSEPPETTLETSPLPSQSITLPSPDEPQTEPAPKQTPRAPPKPKTSPRPRIPQTQPVPKVPQRVTAKPKTSPSPEVSYTTPAPLETRGIPFIPMISPSPSQEELQTTL

SEQ ID NO: 23894 - protein, 187 aa, Homo sapiens
  REGION 1..187: note = ENSP00000417745
  VARIANT 1: note = Any amino acid
XKTTPHPEVPQTKLAPKVPQRTHRPHPKPKTTLSPEELQTELVPATIFEPVSPIKEAPGTTFVPVTDLEPVTFRTEIPATTLATKTSKRTRPPRPRPKTTPSPQAPETKPAPKQTPRAPPKPKTSPRPRIPQTQPVPKVPQRVTAKPKTSPSPEVSYTTPAPLETRGIPFIPMISPSPSQEELQTTL

SEQ ID NO: 23895 - protein, 187 aa, Homo sapiens
  REGION 1..187: note = ENSP00000418063
  VARIANT 1: note = Any amino acid
XFISLKPKIPLSPEVTHTKPAPKTSQRTRTRRPRPKHKTTPRPETLQTKLDFGPITPGTSSAPTTTTKRTRRPHPKPKTTPHPEVPQTKLAPKQTPRAPPKPKTSPRPRIPQTQPVPKVPQRVTAKPKTSPSPEVSYTTPAPKDVLLPHKPYPEVSQSEPAPLETRGIPFIPMISPSPSQEELQTTL

SEQ ID NO: 23896 - protein, 187 aa, Homo sapiens
  REGION 1..187: note = ENSP00000433981
PRKTKRPGRRPRPRPRPKTTPSPEVPKSKPALEPATIQPEPLVPTTASKPSERPKTTHRPDAPQIQPVSEPVPFETEAPSMTIVPTTDIEPVTVRTEATVTTLAPKTSQRTRTRRPRPKHKTTPRPETLQTKLDFGPITPGTSSAPTTTTKRTRRPHPKPKTTPHPEVPQTKLAPKQTPRAPPKPKT

SEQ ID NO: 23897 - protein, 125 aa, Homo sapiens
  REGION 1..125: note = ENSP00000432069
  VARIANT 1: note = Any amino acid
XKNETLALPAESKTPEVEKISARPTTVTPETVPRSTKPTTSSALDVSETTLAPKSLPEFPEAKTPFPFEKPRGTLASSEKPWIVPTAKISEDSKVLQPQTALTELQTLILKPVTSPSLEMTESQP

SEQ ID NO: 23898 - protein, 1005 aa, Homo sapiens
  REGION 1..1005: note = ENSP00000433993
MRGGKCNMLSSLGCLLLCGSITLALGNAQKLPKGKRPNLKVHINTTSDSILLKFLRPSPNVKLEGLLLGYGSNVSPNQYFPLPAEGKFTEAIVDAEPKYLIVVRPAPPPSQKKSCSGKTRSRKPLQLVVGTLTPSSVFLSWGFLINPHHDWTLPSHCPNDRFYTIRYREKDKEKKWIFQICPATETIVENLKPNTVYEFGVKDNVEGGIWSKIFNHKTVVGSKKVNGKIQSTYDQDHTVPAYVPRKLIPITIIKQVIQNVTHKDSAKSPEKAPLGGVILVHLIIPGLNETTVKLPASLMFEISDALKTQLAKNETLALPAESKTPEVEKISARPTTVTPETVPRSTKPTTSSALDVSETTLVLSKRTPETLQTILIPQFELPLSTLAPKSLPEFPEAKTPFPFEKPRGTLASSEKPWIVPTAKISEDSKVLQPQTATYDVFSSPTTSDEPEISDSYTATSDRILDSIPPKTSRTLEQPRATLAPSETPFVPQKLEIFTSPEMQPTTPAPQQTTSIPSTPKRRPRPKPPRTKPERTTSAGTITPKISKSPEPTWTTPAPGKTQFISLKPKIPLSPEVTHTKPAPEPQTLLPSQSTIGPETPGTKPSTTLAPRKTKRPGRRPRPRPRPKTTPSPEVPKSKPALEPATIQPEPLVPTTASKPSERPKTTHRPDAPQIQPGSKPPKQLLPKPQTTAEPDMPPTKSVSEPVPFETEAPSMTIVPTTDIEPVTVRTEATVTTLAPKTSQRTRTRRPRPKHKTTPRPETLQTKLDFGPITPGTSSAPTTTTKRTRRPHPKPKTTPHPEVPQTKLATKTSKRTRPPRPRPKTTPSPQAPETKPVPATVLEPVTLRPEASTTLASKTSQRTRRPRLRTKTTPRPEAPESKPVPTAELKPVTLRTETWVTTQAPKTSQRTRRPRPKTKTTPSPEVPQTKLVPSTDLEPGTLRTEAPKTMVVTTVLEPDTFRTKFPETTLAPKTQRTRRPRPRPKTTSSPEVPQNKSGKCMNPWLK

SEQ ID NO: 23899 - protein, 187 aa, Homo sapiens
  REGION 1..187: note = ENSP00000436070
  VARIANT 1: note = Any amino acid
XRTTSAGTITPKISKSPEPTWTTPAPGKTQFISLKPKIPLSPEVTHTKPVPTTDIEPVTVRTEATVTTLAPKTSQRTRTRRPRPKHKTTPRPETLQTKLDFGPITPGTSSAPTTTTKRTRRPHPKPKTTPHPEVPQTKLAPKVPQRTHRPHPKPKTTLSPEELQTELVPATIFEPVSPIKEAPGTTF

SEQ ID NO: 23900 - protein, 150 aa, Homo sapiens
  REGION 1..150: note = ENSP00000437308
  VARIANT 1: note = Any amino acid
XPETPGTKPSTTLAPRKTKRPGRRPRPRPRPKTTPSPEVPKSKPALEPATIQPEPLVPTTVPTTDIEPVTVRTEATVTTLAPKTSQRTRTRRPRPKHKTTPRPETLQTKLDFGPITPGTSSAPTTTTKRTRRPHPKPKTTPHPEVPQTKL

SEQ ID NO: 23901 - protein, 87 aa, Homo sapiens
  REGION 1..87: note = ENSP00000434425
  VARIANT 1: note = Any amino acid
XQTLLPSQSTIGPETPGTKPSTTLAPRKTKRPGRRPRPRPRPKTTPSPEVPKSKPALEPATIQPEPLVPTTVSEPVPFETEAPSMTI

SEQ ID NO: 23902 - protein, 303 aa, Homo sapiens
  REGION 1..303: note = ENSP00000437031
  VARIANT 1: note = Any amino acid
XTPEVEKISARPTTVTPETVPRSTKPTTSSALDVSETTLASSEKPWIVPTAKISEDSKVLQPQTATYDVFSSPTTSDEPEISDSYTATSDRILDSIPPKTSRTLEQPRATLAPSETPFVPQKLEIFTSPEMQPTTPAPQQTTSIPSTPKRRPRPKPPRTKPERTTSAGTITPKISKSPEPTWTTPAPGKTQFISLKPKIPLSPEVTHTKPAPEPQTLLPSQSTIGPETPGTKPSTTLAPRKTKRPGRRPRPRPRPKTTPSPEVPKSKPALEPATIQPEPLVPTTASKPSERPKTTHRPDAPQI

SEQ ID NO: 23903 - protein, 84 aa, Homo sapiens
  REGION 1..84: note = ENSP00000417325
  VARIANT 1: note = Any amino acid
XFEKPRGTLASSEKPWIVPTAKISEDSKVLQPQTATSDRILDSIPPKTSRTLEQPRATLAPSETPFVPQKLEIFTSPEMQPTTP

SEQ ID NO: 23904 - protein, 187 aa, Homo sapiens
  REGION 1..187: note = ENSP00000418479
  VARIANT 1: note = Any amino acid
XNGKIQSTYDQDHTVPAYVPRKLIPITIIKQVIQNVTHKDSAKSPEKAPLGGVILVHLIIPGLNETTVKLPASLMFEISDALKTQLAKNETLALPAESKTPEVEKISARPTTVTPETVPRSTKPTTSSALDVSETTLVLSKRTPETLQTILIPQFELPLSTLASSEKPWIVPTAKISEDSKVLQPQT

SEQ ID NO: 23905 - protein, 191 aa, Homo sapiens
  REGION 1..191: note = ENSP00000435319
CIVVLWYGWLHFYAEPKYLIVVRPAPPPSQKKSCSGKTRSRKPLQLVVGTLTPSSVFLSWGFLINPHHDWTLPSHCPNDRFYTIRYREKDKEKKWIFQICPATETIVENLKPNTVYEFGVKDNVEGGIWSKIFNHKTVVGSKKVNGKIQSTYDQDHTVPAYVPRKLIPITIIKQVIQNVTHKDSAKSPEKA

SEQ ID NO: 23906 - protein, 161 aa, Homo sapiens
  REGION 1..161: note = ENSP00000436918
MRGGKCNMLSSLGCLLLCGSITLALGNAQKLPKDAEPKYLIVVRPAPPPSQKKSCSGKTRSRKPLQLVVGTLTPSSVFLSWGFLINPHHDWTLPSHCPNDRFYTIRYREKDKEKKWIFQICPATETIVENLKPNTVYEFGVKDNVEGGIWSKIFNHKTVVG

SEQ ID NO: 23907 - protein, 60 aa, Homo sapiens
  REGION 1..60: note = ENSP00000434256
MRGGKCNMLSSLGCLLLCGSITLALGNAQKLPKANKRTELVIQHGWMSLIKMMLNERSQV

SEQ ID NO: 23908 - protein, 455 aa, Homo sapiens
  REGION 1..455: note = ENSP00000376679
MFTEGEEMYLQGSTVWHPDCKQSTKTEEKLRLPNIRRSSSDFFYSKSLIRRTGRSPSLQPTRTSSESIYSRPGSSIPGSPGHTIYAKVDNEILDYKDLAAIPKVKAIYDIERPDLITYEPFYTSGYDDKQERQSLGESPRTLSPTPSAEGYQDVRDRMIHRSTSQGSINSPVYSRHSYTPTTSRSPQHFHRPDQGINIYRKPPIYKQHAALAAQSKSSEDIIKFSKFPAAQAPDPSETPKIETDHWPGPPSFAVVGPDMKRRSSGREEDDEELLRRRQLQEEQLMKLNSGLGQLILKEEMEKESRERSSLLASRYDSPINSASHIPSSKTASLPGYGRNGLHRPVSTDFAQYNSYGDVSGGVRDYQTLPDGHMPAMRMDRGVSMPNMLEPKIFPYEMLMVTNRGRNKILREVDRTRLERHLAPEVFREIFGMSIQEFDRLPLWRRNDMKKKAKLF

SEQ ID NO: 23909 - protein, 718 aa, Homo sapiens
  REGION 1..718: note = ENSP00000376682
MLMTLEMTELTDPHHTMGDYKVAHPQDPHHPSEKPVIHCHKCGEPCKGEVLRVQTKHFHIKCFTCKVCGCDLAQGGFFIKNGEYLCTLDYQRMYGTRCHGCGEFVEGEVVTALGKTYHPNCFACTICKRPFPPGDRVTFNGRDCLCQLCAQPMSSSPKETTFSSNCAGCGRDIKNGQALLALDKQWHLGCFKCKSCGKVLTGEYISKDGAPYCEKDYQGLFGVKCEACHQFITGKVLEAGDKHYHPSCARCSRCNQMFTEGEEMYLQGSTVWHPDCKQSTKTEEKLRPTRTSSESIYSRPGSSIPGSPGHTIYAKVDNEILDYKDLAAIPKVKAIYDIERPDLITYEPFYTSGYDDKQERQSLGESPRTLSPTPSAEGYQDVRDRMIHRSTSQGSINSPVYSRHSYTPTTSRSPQHFHRPGNEPSSGRNSPLPYRPDSRPLTPTYAQAPKHFHVPDQGINIYRKPPIYKQHAALAAQSKSSEDIIKFSKFPAAQAPDPSETPKIETDHWPGPPSFAVVGPDMKRRSSGREEDDEELLRRRQLQEEQLMKLNSGLGQLILKEEMEKESRERSSLLASRYDSPINSASHIPSSKTASLPGYGRNGLHRPVSTDFAQYNSYGDVSGGVRDYQTLPDGHMPAMRMDRGVSMPNMLEPKIFPYEMLMVTNRGRNKILREVDRTRLERHLAPEVFREIFGMSIQEFDRLPLWRRNDMKKKAKLF

SEQ ID NO: 23910 - protein, 401 aa, Homo sapiens
  REGION 1..401: note = ENSP00000358257
MFTEGEEMYLQGSTVWHPDCKQSTKTEEKLRAKVDNEILDYKDLAAIPKVKAIYDIERPDLITYEPFYTSGYDDKQERQSLGESPRTLSPTPSAEGYQDVRDRMIHRSTSQGSINSPVYSRHSYTPTTSRSPQHFHRPDQGINIYRKPPIYKQHAALAAQSKSSEDIIKFSKFPAAQAPDPSETPKIETDHWPGPPSFAVVGPDMKRRSSGREEDDEELLRRRQLQEEQLMKLNSGLGQLILKEEMEKESRERSSLLASRYDSPINSASHIPSSKTASLPGYGRNGLHRPVSTDFAQYNSYGDVSGGVRDYQTLPDGHMPAMRMDRGVSMPNMLEPKIFPYEMLMVTNRGRNKILREVDRTRLERHLAPEVFREIFGMSIQEFDRLPLWRRNDMKKKAKLF

SEQ ID NO: 23911 - protein, 748 aa, Homo sapiens
  REGION 1..748: note = ENSP00000358260
MLMTLEMTELTDPHHTMGDYKVAHPQDPHHPSEKPVIHCHKCGEPCKGEVLRVQTKHFHIKCFTCKVCGCDLAQGGFFIKNGEYLCTLDYQRMYGTRCHGCGEFVEGEVVTALGKTYHPNCFACTICKRPFPPGDRVTFNGRDCLCQLCAQPMSSSPKETTFSSNCAGCGRDIKNGQALLALDKQWHLGCFKCKSCGKVLTGEYISKDGAPYCEKDYQGLFGVKCEACHQFITGKVLEAGDKHYHPSCARCSRCNQMFTEGEEMYLQGSTVWHPDCKQSTKTEEKLRLPNIRRSSSDFFYSKSLIRRTGRSPSLQPTRTSSESIYSRPGSSIPGSPGHTIYAKVDNEILDYKDLAAIPKVKAIYDIERPDLITYEPFYTSGYDDKQERQSLGESPRTLSPTPSAEGYQDVRDRMIHRSTSQGSINSPVYSRHSYTPTTSRSPQHFHRPGNEPSSGRNSPLPYRPDSRPLTPTYAQAPKHFHVPDQGINIYRKPPIYKQHDAAALAAQSKSSEDIIKFSKFPAAQAPDPSETPKIETDHWPGPPSFAVVGPDMKRRSSGREEDDEELLRRRQLQEEQLMKLNSGLGQLILKEEMEKESRERSSLLASRYDSPINSASHIPSSKTASLPGYGRNGLHRPVSTDFAQYNSYGDVSGGVRDYQTLPDGHMPAMRMDRGVSMPNMLEPKIFPYEMLMVTNRGRNKILREVDRTRLERHLAPEVFREIFGMSIQEFDRLPLWRRNDMKKKAKLF

SEQ ID NO: 23912 - protein, 778 aa, Homo sapiens
  REGION 1..778: note = ENSP00000277895
MPAFLGLKCLGKLCSSEKSKVTSSERTSARGSNRKRLIVEDRRVSGTSFTAHRRATITHLLYLCPKDYCPRGRVCNSVDPFVAHPQDPHHPSEKPVIHCHKCGEPCKGEVLRVQTKHFHIKCFTCKVCGCDLAQGGFFIKNGEYLCTLDYQRMYGTRCHGCGEFVEGEVVTALGKTYHPNCFACTICKRPFPPGDRVTFNGRDCLCQLCAQPMSSSPKETTFSSNCAGCGRDIKNGQALLALDKQWHLGCFKCKSCGKVLTGEYISKDGAPYCEKDYQGLFGVKCEACHQFITGKVLEAGDKHYHPSCARCSRCNQMFTEGEEMYLQGSTVWHPDCKQSTKTEEKLRPTRTSSESIYSRPGSSIPGSPGHTIYAKVDNEILDYKDLAAIPKVKAIYDIERPDLITYEPFYTSGYDDKQERQSLGESPRTLSPTPSAEGYQDVRDRMIHRSTSQGSINSPVYSRHSYTPTTSRSPQHFHRPGNEPSSGRNSPLPYRPDSRPLTPTYAQAPKHFHVPDQGINIYRKPPIYKQHAALAAQSKSSEDIIKFSKFPAAQAPDPSETPKIETDHWPGPPSFAVVGPDMKRRSSGREEDDEELLRRRQLQEEQLMKLNSGLGQLILKEEMEKESRERSSLLASRYDSPINSASHIPSSKTASLPGYGRNGLHRPVSTDFAQYNSYGDVSGGVRDYQTLPDGHMPAMRMDRGVSMPNMLEPKIFPYEMLMVTNRGRNKILREVDRTRLERHLAPEVFREIFGMSIQEFDRLPLWRRNDMKKKAKLF

SEQ ID NO: 23913 - protein, 172 aa, Homo sapiens
  REGION 1..172: note = ENSP00000414154
CKQSTKTEEKLRPTRTSSESIYSRPGSSIPGSPGHTIYAKVDNEILDYKDLAAIPKVKAIYDIERPDLITYEPFYTSGYDDKQERQSLGESPRTLSPTPSAEGYQDVRDRMIHRSTSQGSINSPVYSRHSYTPTTSRSPQHFHRPDQGINIYRKPPIYKQHVLFEVILLLLI

SEQ ID NO: 23914 - protein, 173 aa, Homo sapiens
  REGION 1..173: note = ENSP00000400934
MFTEGEEMYLQGSTVWHPDCKQSTKTEEKLRPTRTSSESIYSRPGSSIPGSPGHTIYAKVDNEILDYKDLAAIPKVKAIYDIERPDLITYEPFYTSGYDDKQERQSLGESPRTLSPTPSAEGYQDVRDRMIHRSTSQGSINSPVYSRHSYTPTTSRSPQHFHRPDQGINIYRK

SEQ ID NO: 23915 - protein, 718 aa, Homo sapiens
  REGION 1..718: note = ENSP00000433629
MLMTLEMTELTDPHHTMGDYKVAHPQDPHHPSEKPVIHCHKCGEPCKGEVLRVQTKHFHIKCFTCKVCGCDLAQGGFFIKNGEYLCTLDYQRMYGTRCHGCGEFVEGEVVTALGKTYHPNCFACTICKRPFPPGDRVTFNGRDCLCQLCAQPMSSSPKETTFSSNCAGCGRDIKNGQALLALDKQWHLGCFKCKSCGKVLTGEYISKDGAPYCEKDYQGLFGVKCEACHQFITGKVLEAGDKHYHPSCARCSRCNQMFTEGEEMYLQGSTVWHPDCKQSTKTEEKLRPTRTSSESIYSRPGSSIPGSPGHTIYAKVDNEILDYKDLAAIPKVKAIYDIERPDLITYEPFYTSGYDDKQERQSLGESPRTLSPTPSAEGYQDVRDRMIHRSTSQGSINSPVYSRHSYTPTTSRSPQHFHRPGNEPSSGRNSPLPYRPDSRPLTPTYAQAPKHFHVPDQGINIYRKPPIYKQHAALAAQSKSSEDIIKFSKFPAAQAPDPSETPKIETDHWPGPPSFAVVGPDMKRRSSGREEDDEELLRRRQLQEEQLMKLNSGLGQLILKEEMEKESRERSSLLASRYDSPINSASHIPSSKTASLPGYGRNGLHRPVSTDFAQYNSYGDVSGGVRDFQTLPDGHMPAMRMDRGVSMPNMLEPKIFPYEMLMVTNRGRNKILREVDRTRLERHLAPEVFREIFGMSIQEFDRLPLWRRNDMKKKAKLF

SEQ ID NO: 23916 - protein, 746 aa, Homo sapiens
  REGION 1..746: note = ENSP00000358256
MLMTLEMTELTDPHHTMGDYKVAHPQDPHHPSEKPVIHCHKCGEPCKGEVLRVQTKHFHIKCFTCKVCGCDLAQGGFFIKNGEYLCTLDYQRMYGTRCHGCGEFVEGEVVTALGKTYHPNCFACTICKRPFPPGDRVTFNGRDCLCQLCAQPMSSSPKETTFSSNCAGCGRDIKNGQALLALDKQWHLGCFKCKSCGKVLTGEYISKDGAPYCEKDYQGLFGVKCEACHQFITGKVLEAGDKHYHPSCARCSRCNQMFTEGEEMYLQGSTVWHPDCKQSTKTEEKLRLPNIRRSSSDFFYSKSLIRRTGRSPSLQPTRTSSESIYSRPGSSIPGSPGHTIYAKVDNEILDYKDLAAIPKVKAIYDIERPDLITYEPFYTSGYDDKQERQSLGESPRTLSPTPSAEGYQDVRDRMIHRSTSQGSINSPVYSRHSYTPTTSRSPQHFHRPGNEPSSGRNSPLPYRPDSRPLTPTYAQAPKHFHVPDQGINIYRKPPIYKQHAALAAQSKSSEDIIKFSKFPAAQAPDPSETPKIETDHWPGPPSFAVVGPDMKRRSSGREEDDEELLRRRQLQEEQLMKLNSGLGQLILKEEMEKESRERSSLLASRYDSPINSASHIPSSKTASLPGYGRNGLHRPVSTDFAQYNSYGDVSGGVRDFQTLPDGHMPAMRMDRGVSMPNMLEPKIFPYEMLMVTNRGRNKILREVDRTRLERHLAPEVFREIFGMSIQEFDRLPLWRRNDMKKKAKLF

SEQ ID NO: 23917 - protein, 401 aa, Homo sapiens [sequence omitted]

SEQ ID NO: 23918 - protein, 531 aa, Homo sapiens
  REGION 1..531: note = ENSP00000354887
MSAVSQPQAAPSPLEKSPSTAILCNTCGNVCKGEVLRVQDKYFHIKCFVCKACGCDLAEGGFFVRQGEYICTLDYQRLYGTRCFSCDQFIEGEVVSALGKTYHPDCFVCAVCRLPFPPGDRVTFNGKECMCQKCSLPVSVGSSAHLSQGLRSCGGCGTEIKNGQALVALDKHWHLGCFKCKSCGKLLNAEYISKDGLPYCEADYHAKFGIRCDSCEKYITGRVLEAGEKHYHPSCALCVRCGQMFAEGEEMYLQGSSIWHPACRQAARTEDRNKETRTSSESIISVPASSTSGSPSRVIYAKLGGEILDYRDLAALPKSKAIYDIDRPDMISYSPYISHSAGDRQSYGESPQLLSPTPTEGDQDDRSYKQCRTSSPSSTGSVSLGRYTPTSRSPQHYSRPAARRSDGEDGSLDQDNRKKSSWLMLKGDADTRTNSPDLDTQSLSHSSGTDRDPLQRMAGDSFHSQYKIYPYDSLIVTNRIRVKLPKDVDRTRLERHLSPEEFQEVFGMSIEEFDRLALWKRNDLKKKALLF

SEQ ID NO: 23919 - protein, 346 aa, Homo sapiens
  REGION 1..346: note = ENSP00000423661
MFAEGEEMYLQGSSIWHPACRQAARTEDRNKETRTSSESIISVPASSTSGSPSRVIYAKLGGEILDYRDLAALPKSKAIYDIDRPDMISYSPYISHSAGDRQSYGESPQLLSPTPTEGDQDDRSYKQCRTSSPSSTGSVSLGRYTPTSRSPQHYSRPDTGVKDNIYRKPPIYRQHAARRSDGEDGSLDQDNRKQKSSWLMLKGDADTRTNSPDLDTQSLSHSSGTDRDPLQRMAGDSFHSRFPYSKSDPLPGHGKNGLDQRNANLAPCGADPDASWGMREYKIYPYDSLIVTNRIRVKLPKDVDRTRLERHLSPEEFQEVFGMSIEEFDRLALWKRNDLKKKALLF

SEQ ID NO: 23920 - protein, 645 aa, Homo sapiens
  REGION 1..645: note = ENSP00000393511
MSAVSQPQAAPSPLEKSPSTAILCNTCGNVCKGEVLRVQDKYFHIKCFVCKACGCDLAEGGFFVRQGEYICTLDYQRLYGTRCFSCDQFIEGEVVSALGKTYHPDCFVCAVCRLPFPPGDRVTFNGKECMCQKCSLPVSVGSSAHLSQGLRSCGGCGTEIKNGQALVALDKHWHLGCFKCKSCGKLLNAEYISKDGLPYCEADYHAKFGIRCDSCEKYITGRVLEAGEKHYHPSCALCVRCGQMFAEGEEMYLQGSSIWHPACRQAARTEDRNKETRTSSESIISVPASSTSGSPSRVIYAKLGGEILDYRDLAALPKSKAIYDIDRPDMISYSPYISHSAGDRQSYGEGDQDDRSYKQCRTSSPSSTGSVSLGRYTPTSRSPQHYSRPAGTVSVGTSSCLSLSQHPSPTSVFRHHYIPYFRGSESGRSTPSLSVLSDSKPPPSTYQQAPRHFHVPDTGVKDNIYRKPPIYRQHAARRSDGEDGSLDQDNRKQKSSWLMLKGDADTRTNSPDLDTQSLSHSSGTDRDPLQRMAGDSFHSRFPYSKSDPLPGHGKNGLDQRNANLAPCGADPDASWGMREYKIYPYDSLIVTNRIRVKLPKDVDRTRLERHLSPEEFQEVFGMSIEEFDRLALWKRNDLKKKALLF

SEQ ID NO: 23921 - protein, 611 aa, Homo sapiens
  REGION 1..611: note = ENSP00000342813
MSAVSQPQAAPSPLEKSPSTAILCNTCGNVCKGEVLRVQDKYFHIKCFVCKACGCDLAEGGFFVRQGEYICTLDYQRLYGTRCFSCDQFIEGEVVSALGKTYHPDCFVCAVCRLPFPPGDRVTFNGKECMCQKCSLPVSVGSSAHLSQGLRSCGGCGTEIKNGQALVALDKHWHLGCFKCKSCGKLLNAEYISKDGLPYCEADYHAKFGIRCDSCEKYITGRVLEAGEKHYHPSCALCVRCGQMFAEGEEMYLQGSSIWHPACRQAARTEDRNKETRTSSESIISVPASSTSGSPSRVIYAKLGGEILDYRDLAALPKSKAIYDIDRPDMISYSPYISHSAGDRQSYGEGDQDDRSYKQCRTSSPSSTGSVSLGRYTPTSRSPQHYSRPGSESGRSTPSLSVLSDSKPPPSTYQQAPRHFHVPDTGVKDNIYRKPPIYRQHAARRSDGEDGSLDQDNRKKSSWLMLKGDADTRTNSPDLDTQSLSHSSGTDRDPLQRMAGDSFHSRFPYSKSDPLPGHGKNGLDQRNANLAPCGADPDASWGMREYKIYPYDSLIVTNRIRVKLPKDVDRTRLERHLSPEEFQEVFGMSIEEFDRLALWKRNDLKKKALLF

SEQ ID NO: 23922 - protein, 572 aa, Homo sapiens
  REGION 1..572: note = ENSP00000355003
MSAVSQPQAAPSPLEKSPSTAILCNTCGNVCKGEVLRVQDKYFHIKCFVCKACGCDLAEGGFFVRQGEYICTLDYQRLYGTRCFSCDQFIEGEVVSALGKTYHPDCFVCAVCRLPFPPGDRVTFNGKECMCQKCSLPVSVGSSAHLSQGLRSCGGCGTEIKNGQALVALDKHWHLGCFKCKSCGKLLNAEYISKDGLPYCEADYHAKFGIRCDSCEKYITGRVLEAGEKHYHPSCALCVRCGQMFAEGEEMYLQGSSIWHPACRQAARTEDRNKETRTSSESIISVPASSTSGSPSRVIYAKLGGEILDYRDLAALPKSKAIYDIDRPDMISYSPYISHSAGDRQSYGEGDQDDRSYKQCRTSSPSSTGSVSLGRYTPTSRSPQHYSRPGSESGRSTPSLSVLSDSKPPPSTYQQAPRHFHVPDTGVKDNIYRKPPIYRQHAARRSDGEDGSLDQDNRKKSSWLMLKGDADTRTNSPDLDTQSLSHSSGTDRDPLQRMAGDSFHSQYKIYPYDSLIVTNRIRVKLPKDVDRTRLERHLSPEEFQEVFGMSIEEFDRLALWKRNDLKKKALLF

SEQ ID NO: 23923 - protein, 521 aa, Homo sapiens
  REGION 1..521: note = ENSP00000384658
MSAVSQPQAAPSPLEKSPSTAILCNTCGNVCKGEVLRVQDKYFHIKCFVCKACGCDLAEGGFFVRQGEYICTLDYQRLYGTRCFSCDQFIEGEVVSALGKTYHPDCFVCAVCRLPFPPGDRVTFNGKECMCQKCSLPVSVGSSAHLSQGLRSCGGCGTEIKNGQALVALDKHWHLGCFKCKSCGKLLNAEYISKDGLPYCEADYHAKFGIRCDSCEKYITGRVLEAGEKHYHPSCALCVRCGQMFAEGEEMYLQGSSIWHPACRQAARTEDRNKETRTSSESIISVPASSTSGSPSRVIYAKLGGEILDYRDLAALPKSKAIYDIDRPDMISYSPYISHSAGDRQSYGEGDQDDRSYKQCRTSSPSSTGSVSLGRYTPTSRSPQHYSRPAARRSDGEDGSLDQDNRKQKSSWLMLKGDADTRTNSPDLDTQSLSHSSGTDRDPLQRMAGDSFHSQYKIYPYDSLIVTNRIRVKLPKDVDRTRLERHLSPEEFQEVFGMSIEEFDRLALWKRNDLKKKALLF

SEQ ID NO: 23924 - protein, 559 aa, Homo sapiens
  REGION 1..559: note = ENSP00000421283
MSAVSQPQAAPSPLEKSPSTAILCNTCGNVCKGEVLRVQDKYFHIKCFVCKACGCDLAEGGFFVRQGEYICTLDYQRLYGTRCFSCDQFIEGEVVSALGKTYHPDCFVCAVCRLPFPPGDRVTFNGKECMCQKCSLPVSVGSSAHLSQGLRSCGGCGTEIKNGQALVALDKHWHLGCFKCKSCGKLLNAEYISKDGLPYCEADYHAKFGIRCDSCEKYITGRVLEAGEKHYHPSCALCVRCGQMFAEGEEMYLQGSSIWHPACRQAARTEDRNKETRTSSESIISVPASSTSGSPSRVIYAKLGGEILDYRDLAALPKSKAIYDIDRPDMISYSPYISHSAGDRQSYGEGDQDDRSYKQCRTSSPSSTGSVSLGRYTPTSRSPQHYSRPAARRSDGEDGSLDQDNRKKSSWLMLKGDADTRTNSPDLDTQSLSHSSGTDRDPLQRMAGDSFHSRFPYSKSDPLPGHGKNGLDQRNANLAPCGADPDASWGMREYKIYPYDSLIVTNRIRVKLPKDVDRTRLERHLSPEEFQEVFGMSIEEFDRLALWKRNDLKKKALLF

SEQ ID NO: 23925 - protein, 470 aa, Homo sapiens
  REGION 1..470: note = ENSP00000389410
MSAVSQPQAAPSPLEKSPSTAILCNTCGNVCKGEVLRVQDKYFHIKCFVCKACGCDLAEGGFFVRQGEYICTLDYQRLYGTRCFSCDQFIEGEVVSALGKTYHPDCFVCAVCRLPFPPGDRVTFNGKECMCQKCSLPVSVGSSAHLSQGLRSCGGCGTEIKNGQALVALDKHWHLGCFKCKSCGKLLNAEYISKDGLPYCEADYHAKFGIRCDSCEKYITGRVLEAGEKHYHPSCALCVRCGQMFAEGEEMYLQGSSIWHPACRQAARTEDRNKETRTSSESIISVPASSTSGSPSRVIYAKLGGEILDYRDLAALPKSKAIYDIDRPDMISYSPYISHSAGDRQSYGESPQLLSPTPTEGDQDDRSYKQCRTSSPSSTGSVSLGRYTPTSRSPQHYSRPAARRSDGEDGSLDQDNRKQKSSWLMLKGDADTRTNSPDLDTQSLSHSSGTDRDPLQRMAGDSFHSREWFF

SEQ ID NO: 23926 - protein, 305 aa, Homo sapiens
  REGION 1..305: note = ENSP00000421718
MFAEGEEMYLQGSSIWHPACRQAARTEDRNKETRTSSESIISVPASSTSGSPSRVIYAKLGGEILDYRDLAALPKSKAIYDIDRPDMISYSPYISHSAGDRQSYGESPQLLSPTPTEGDQDDRSYKQCRTSSPSSTGSVSLGRYTPTSRSPQHYSRPAGTVSVGTSSCLSLSQHPSPTSVFRHHYIPYFRGSESGRSTPSLSVLSDSKPPPSTYQQAPRHFHVPDTGVKDNIYRKPPIYRQHAARRSDGEDGSLDQDNRKKSSWLMLKGDADTRTNSPDLDTQSLSHSSGTDRDPLQRMAGDSFH

SEQ ID NO: 23927 - protein, 646 aa, Homo sapiens [sequence omitted]

SEQ ID NO: 23928 - protein, 588 aa, Homo sapiens
  REGION 1..588: note = ENSP00000315841
MNTSIPYQQNPYNPRGSSNVIQCYRCGDTCKGEVVRVHNNHFHIRCFTCQVCGCGLAQSGFFFKNQEYICTQDYQQLYGTRCDSCRDFITGEVISALGRTYHPKCFVCSLCRKPFPIGDKVTFSGKECVCQTCSQSMASSKPIKIRGPSHCAGCKEEIKHGQSLLALDKQWHVSCFKCQTCSVILTGEYISKDGVPYCESDYHAQFGIKCETCDRYISGRVLEAGGKHYHPTCARCVRCHQMFTEGEEMYLTGSEVWHPICKQAARAEKKLKHRRTSETSISPPGSSIGSPNRVICDIYENLDLRQRRASSPGYIDSPTYSRQGMSPTFSRSPHHYYRSAGDSNIYRKPPIYKRHGDLSTATKSKTSEDISQTSKYSPIYSPDPYYASESEYWTYHGSPKVPRARRFSSGGEEDDFDRSMHKLQSGIGRLILKEEMKARSSSYADPWTPPRSSTSSREALHTAGYEMSLNGSPRSHYLADSDPLISKSASLPAYRRNGLHRTPSADLFHYDSMNAVNWGMREYKIYPYELLLVTTRGRNRLPKDVDRTRLERHLSQEEFYQVFGMTISEFDRLALWKRNELKKQARLF

SEQ ID NO: 23929 - protein, 683 aa, Homo sapiens
  REGION 1..683: note = ENSP00000310309
MNTSIPYQQNPYNPRGSSNVIQCYRCGDTCKGEVVRVHNNHFHIRCFTCQVCGCGLAQSGFFFKNQEYICTQDYQQLYGTRCDSCRDFITGEVISALGRTYHPKCFVCSLCRKPFPIGDKVTFSGKECVCQTCSQSMASSKPIKIRGPSHCAGCKEEIKHGQSLLALDKQWHVSCFKCQTCSVILTGEYISKDGVPYCESDYHAQFGIKCETCDRYISGRVLEAGGKHYHPTCARCVRCHQMFTEGEEMYLTGSEVWHPICKQAARAEKKLKHRRTSETSISPPGSSIGSPNRVICAKVDNEILNYKDLAALPKVKSIYEVQRPDLISYEPHSRYMSDEMLERCGYGESLGTLSPYSQDIYENLDLRQRRASSPGYIDSPTYSRQGMSPTFSRSPHHYYRSGPESGRSSPYHSQLDVRSSTPTSYQAPKHFHIPAGDSNIYRKPPIYKRHGDLSTATKSKTSEDISQTSKYSPIYSPDPYYASESEYWTYHGSPKVPRARRFSSGGEEDDFDRSMHKLQSGIGRLILKEEMKARSSSYADPWTPPRSSTSSREALHTAGYEMSLNGSPRSHYLADSDPLISKSASLPAYRRNGLHRTPSADLFHYDSMNAVNWGMREYKIYPYELLLVTTRGRNRLPKDVDRTRLERHLSQEEFYQVFGMTISEFDRLALWKRNELKKQARLF

SEQ ID NO: 23930 - protein, 683 aa, Homo sapiens; identical to SEQ ID NO: 23929
  REGION 1..683: note = ENSP00000425394

SEQ ID NO: 23931 - protein, 151 aa, Homo sapiens
  REGION 1..151: note = ENSP00000421002
MNTSIPYQQNPYNPRGSSNVIQCYRCGDTCKGEVVRVHNNHFHIRCFTCQVCGCGLAQSGFFFKNQEYICTQDYQQLYGTRCDSCRDFITGEVISALGRTYHPKCFVCSLCRTSPGMESSSLPPALPSASPSLVNSASEAFPHWRQGDLQR

SEQ ID NO: 23932 - protein, 544 aa, Homo sapiens
  REGION 1..544: note = ENSP00000421183
MNTSIPYQQNPYNPRGSSNVIQCYRCGDTCKGEVVRVHNNHFHIRCFTCQVCGCGLAQSGFFFKNQEYICTQDYQQLYGTRCDSCRDFITGEVISALGRTYHPKCFVCSLCRKPFPIGDKVTFSGKECVCQTCSQSMASSKPIKIRGPSHCAGCKEEIKHGQSLLALDKQWHVSCFKCQTCSVILTGEYISKDGVPYCESDYHAQFGIKCETCDRYISGRVLEAGGKHYHPTCARCVRCHQMFTEGEEMYLTGSEVWHPICKQAARAEKKLKHRRTSETSISPPGSSIGSPNRVICDIYENLDLRQRRASSPGYIDSPTYSRQGMSPTFSRSPHHYYRSGDLSTATKSKTSEDISQTSKYSPIYSPDPYYASESEYWTYHGSPKVPRARRFSSGGEEDDFDRSMHKLQSGIGRLILKEEMKARSSSYADPWTPPRSSTSSREALHTAGYEMSLNGSPRSHYLADSDPLISKSASLPAYRRNGLHRTPSADLFHYDSMNAVNWGMREYKIYPYELLLVTTRGRNRLPKDVDRTRLEGNFWKSGCL

SEQ ID NO: 23933 - protein, 650 aa, Homo sapiens
  REGION 1..650: note = ENSP00000420855
MNTSIPYQQNPYNPRGSSNVIQCYRCGDTCKGEVVRVHNNHFHIRCFTCQVCGCGLAQSGFFFKNQEYICTQDYQQLYGTRCDSCRDFITGEVISALGRTYHPKCFVCSLCRKPFPIGDKVTFSGKECVCQTCSQSMASSKPIKIRGPSHCAGCKEEIKHGQSLLALDKQWHVSCFKCQTCSVILTGEYISKDGVPYCESDYHAQFGIKCETCDRYISGRVLEAGGKHYHPTCARCVRCHQMFTEGEEMYLTGSEVWHPICKQAARAEKKLKHRRTSETSISPPGSSIGSPNRVICAKVDNEILNYKDLAALPKVKSIYEVQRPDLISYEPHSRYMSDEMLERCGYGESLGTLSPYSQDIYENLDLRQRRASSPGYIDSPTYSRQGMSPTFSRSPHHYYRSAGDSNIYRKPPIYKRHGDLSTATKSKTSEDISQTSKYSPIYSPDPYYASESEYWTYHGSPKVPRARRFSSGGEEDDFDRSMHKLQSGIGRLILKEEMKARSSSYADPWTPPRSSTSSREALHTAGYEMSLNGSPRSHYLADSDPLISKSASLPAYRRNGLHRTPSADLFHYDSMNAVNWGMREYKIYPYELLLVTTRGRNRLPKDVDRTRLERHLSQEEFYQVFGMTISEFDRLALWKRNELKKQARLF

SEQ ID NO: 23934 - protein, 169 aa, Homo sapiens
  REGION 1..169: note = ENSP00000430150
MHKLQSGIGRLILKEEMKARSSSYADPWTPPRSSTSSREALHTAGYEMSLNGSPRSHYLADSDPLISKSASLPAYRRNGLHRTPSADLFHYDSMNAVNWGMREYKIYPYELLLVTTRGRNRLPKDVDRTRLERHLSQEEFYQVFGMTISEFDRLALWKRNELKKQARLF

SEQ ID NO: 23935 - protein, 170 aa, Homo sapiens [sequence omitted]

SEQ ID NO: 23936 - protein, 381 aa, Homo sapiens
  REGION 1..381: note = ENSP00000311436
MAPGEKESGEGPAKSALRKIRTATLVISLARGWQQWANENSIRQAQEPTGWLPGGTQDSPQAPKPITPPTSHQKAQSAPKSPPRLPEGHGDGQSSEKAPEVSHIKKKEVSKTVVSKTYERGGDVSHLSHRYERDAGVLEPGQPENDIDRILHSHGSPTRRRKCANLVSELTKGWRVMEQEEPTWRSDSVDTEDSGYGGEAEERPEQDGVQVAVVRIKRPLPSQVNRFTEKLNCKAQQKYSPVGNLKGRWQQWADEHIQSQKLNPFSEEFDYELAMSTRLHKGDEGYGRPKEGTKTAERAKRAEEHIYREMMDMCFIICTMARHRRDGKIQVTFGDLFDRYVRISDKVVGILMRARKHGLVDFEGEMLWQGRDDHVVITLLK

SEQ ID NO: 23937 - protein, 1025 aa, Homo sapiens
  REGION 1..1025: note = ENSP00000410157
MAGTYSSTLKTLEDLTLDSGYGAGDSCRSLSLSSSKSNSQALNSSAQQHRGAAWWCYSGSMNSRHNSWDTVNTVLPEDPEVADLFSRCPRLPELEEFPWTEGDVARVLRKGAGGRRLPQFSAEAVRRLAGLLRRALIRVAREAQRLSVLHAKCTRFEVQSAVRLVHSWALAESCALAAVKALSLYSMSAGDGLRRGKSARCGLTFSVGRFFRWMVDTRISVRIHEYAAISLTACMENLVEEIRARVMASHSPDGGGAGGGEVSAEALEMVINNDAELWGVLQPYEHLICGKNANGVLSLPAYFSPYNGGSLGHDERADAYAQLELRTLEQSLLATCVGSISELSDLVSRAMHHMQGRHPLCPGASPARQARQPPQPITWSPDALHTLYYFLRCPQMESMENPNLDPPRMTLNNERPFMLLPPLMEWMRVAITYAEHRRSLTVDSGDIRQAARLLLPGLDCEPRQLKPEHCFSSFRRLDARAATEKFNQDLGFRMLNCGRTDLINQAIEALGPDGVNTMDDQGMTPLMYACAAGDEAMVQMLIDAGANLDIQVPSNSPRHPSIHPDSRHWTSLTFAVLHGHISVVQLLLDAGAHVEGSAVNGGEDSYAETPLQLASAAGNYELVSLLLSRGADPLLSMLEAHGMGSSLHEDMNCFSHSAAHGHRNVLRKLLTQPQQAKADVLSLEEILAEGVEESDASSQGSGSEGPVRLSRTRTKALQEAMYYSAEHGYVDITMELRALGVPWKLHIWIESLRTSFSQSRYSVVQSLLRDFSSIREEEYNEELVTEGLQLMFDILKTSKNDSVIQQLATIFTHCYGSSPIPSIPEIRKTLPARLDPHFLNNKEMSDVTFLVEGKLFYAHKVLLVTASNRFKTLMTNKSEQDGDSSKTIEISDMKYHIFQMMMQYLYYGGTESMEIPTTDILELLSAASLFQLDALQRHCEILCSQTLSMESAVNTYKYAKIHNAPELALFCEGFFLKHMKALLEQDAFRQLIYGRSSKVQGLDPLQDLQNTLAERVHSVYITSRV

SEQ ID NO: 23938 - protein, 415 aa, Homo sapiens
  REGION 1..415: note = ENSP00000281182
MLWSGCRRFGARLGCLPGGLRVLVQTGHRSLTSCIDPSMGLNEEQKEFQKVAFDFAAREMAPNMAEWDQKELFPVDVMRKAAQLGFGGVYIQTDVGGSGLSRLDTSVIFEALATGCTSTTAYISIHNMCAWMIDSFGNEEQRHKFCPPLCTMEKFASYCLTEPGSGSDAASLLTSAKKQGDHYILNGSKAFISGAGESDIYVVMCRTGGPGPKGISCIVVEKGTPGLSFGKKEKKVGWNSQPTRAVIFEDCAVPVANRIGSEGQGFLIAVRGLNGGRINIASCSLGAAHASVILTRDHLNVRKQFGEPLASNQYLQFTLADMATRLVAARLMVRNAAVALQEERKDAVALCSMAKLFATDECFAICNQALQMHGGYGYLKDYAVQQYVRDSRVHQILEGSNEVMRILISRSLLQE

SEQ ID NO: 23939 - protein, 69 aa, Homo sapiens
  REGION 1..69: note = ENSP00000431532
MLWSGCRRFGARLGCLPGGLRVLVQTGHRSLTSCIDRAVPSGCDAEGSPARLRRGLHTNRCGRVWAVTS

SEQ ID NO: 23940 - protein, 76 aa, Homo sapiens
  REGION 1..76: note = ENSP00000431310
MLWSGCRRFGARLGCLPGGLRVLVQTGHRSLTSCIDPSMGLNEEQKEFQKVAFDFAAREMAPNMAEWDQKHVCLDD

SEQ ID NO: 23941 - protein, 288 aa, Homo sapiens
  REGION 1..288: note = ENSP00000363884
MLWSGCRRFGARLGCLPGGLRVLVQTGHRSLTSCIDRSGSDAASLLTSAKKQGDHYILNGSKAFISGAGESDIYVVMCRTGGPGPKGISCIVVEKGTPGLSFGKKEKKVGWNSQPTRAVIFEDCAVPVANRIGSEGQGFLIAVRGLNGGRINIASCSLGAAHASVILTRDHLNVRKQFGEPLASNQYLQFTLADMATRLVAARLMVRNAAVALQEERKDAVALCSMAKLFATDECFAICNQALQMHGGYGYLKDYAVQQYVRDSRVHQILEGSNEVMRILISRSLLQE

SEQ ID NO: 23942 - protein, 834 aa, Homo sapiens
  REGION 1..834: note = ENSP00000346733
MTVEFEECVKDSPRFRATIDEVETDVVEIEAKLDKLVKLCSGMVEAGKAYVSTSRLFVSGVRDLSQQCQGDTVISECLQRFADSLQEVVNYHMILFDQAQRSVRQQLQSFVKEDVRKFKETKKQFDKVREDLELSLVRNAQAPRHRPHEVEEATGALTLTRKCFRHLALDYVLQINVLQAKKKFEILDSMLSFMHAQSSFFQQGYSLLHQLDPYMKKLAAELDQLVIDSAVEKREMERKHAAIQQRTLLQDFSYDESKVEFDVDAPSGVVMEGYLFKRASNAFKTWNRRWFSIQNSQLVYQKKLKDALTVVVDDLRLCSVKPCEDIERRFCFEVLSPTKSCMLQADSEKLRQAWVQAVQASIASAYRESPDSCYSERLDRTASPSTSSIDSATDTRERGVKGESVLQRVQSVAGNSQCGDCGQPDPRWASINLGVLLCIECSGIHRSLGVHCSKVRSLTLDSWEPELLKLMCELGNSAVNQIYEAQCEGAGSRKPTASSSRQDKEAWIKDKYVEKKFLRKAPMAPALEAPRRWRVQKCLRPHSSPRAPTARRKVRLEPVLPCVAALSSVGTLDRKFRRDSLFCPDELDSLFSYFDAGAAGAGPRSLSSDSGLGGSSDGSSDVLAFGSGSVVDSVTEEEGAESEESSGEADGDTEAEAWGLADVRELHPGLLAHRAARARDLPALAAALAHGAEVNWADAEDEGKTPLVQAVLGGSLIVCEFLLQNGADVNQRDSRGRAPLHHATLLGRTGQVCLFLKRGADQHALDQEQRDPLAIAVQAANADIVTLLRLARMAEEMREAEAAPGPPGALAGSPTELQFRRCIQEFISLHLEES

SEQ ID NO: 23943 - protein, 52 aa, Homo sapiens
  REGION 1..52: note = ENSP00000347075
MTVEFEECVKDSPRFRAARGEQAAGAAFKAWGRPLTRWRRTWWRLRPNWTSW

SEQ ID NO: 23944 - protein, 759 aa, Homo sapiens
  REGION 1..759: note = ENSP00000321139
MVEAGKAYVSTSRLFVSGVRDLSQQCQGDTVISECLQRFADSLQEVVNYHMILFDQAQRSVRQQLQSFVKEDVRKFKETKKQFDKVREDLELSLVRNAQAPRHRPHEVEEATGALTLTRKCFRHLALDYVLQINVLQAKKKFEILDSMLSFMHAQSSFFQQGYSLLHQLDPYMKKLAAELDQLVIDSAVEKREMERKHAAIQQRTLLQDFSYDESKVEFDVDAPSGVVMEGYLFKRASNAFKTWNRRWFSIQNSQLVYQKKLKDALTVVVDDLRLCSVKPCEDIERRFCFEVLSPTKSCMLQADSEKLRQAWVQAVQASIASAYRESPDSCYSERLDRTASPSTSSIDSATDTRERGVKGESVLQRVQSVAGNSQCGDCGQPDPRWASINLGVLLCIECSGIHRSLGVHCSKVRSLTLDSWEPELLKLMCELGNSAVNQIYEAQCEGAGSRKPTASSSRQDKEAWIKDKYVEKKFLRKAPMAPALEAPRRWRVQKCLRPHSSPRAPTARRKVRLEPVLPCVAALSSVGTLDRKFRRDSLFCPDELDSLFSYFDAGAAGAGPRKGAESEESSGEADGDTEAEAWGLADVRELHPGLLAHRAARARDLPALAAALAHGAEVNWADAEDEGKTPLVQAVLGGSLIVCEFLLQNGADVNQRDSRGRAPLHHATLLGRTGQVCLFLKRGADQHALDQEQRDPLAIAVQAANADIVTLLRLARMAEEMREAEAAPGPPGALAGSPTELQFRRCIQEFISLHLEES

SEQ ID NO: 23945 - protein, 168 aa, Homo sapiens
  REGION 1..168: note = ENSP00000462995
MGAASGRRGPGLLLPLPLLLLLPPQPALALDPGLQPGNFSADEAGAQLFAQSYNSSAEQVLFQSVAASWAHDTNITAENARRQEEAALLSQEFAEAWGQKAKELYEPIWQNFTDPQLRRIIGAVRTLGSANLPLAKRQQISPTSWLPREATPCSCLPGRAGTTLRASR

SEQ ID NO: 23946 - protein, 1306 aa, Homo sapiens
  REGION 1..1306: note = ENSP00000290866
MGAASGRRGPGLLLPLPLLLLLPPQPALALDPGLQPGNFSADEAGAQLFAQSYNSSAEQVLFQSVAASWAHDTNITAENARRQEEAALLSQEFAEAWGQKAKELYEPIWQNFTDPQLRRIIGAVRTLGSANLPLAKRQQYNALLSNMSRIYSTAKVCLPNKTATCWSLDPDLTNILASSRSYAMLLFAWEGWHNAAGIPLKPLYEDFTALSNEAYKQDGFTDTGAYWRSWYNSPTFEDDLEHLYQQLEPLYLNLHAFVRRALHRRYGDRYINLRGPIPAHLLGDMWAQSWENIYDMVVPFPDKPNLDVTSTMLQQGWNATHMFRVAEEFFTSLELSPMPPEFWEGSMLEKPADGREVVCHASAWDFYNRKDFRIKQCTRVTMDQLSTVHHEMGHIQYYLQYKDLPVSLRRGANPGFHEAIGDVLALSVSTPEHLHKIGLLDRVTNDTESDINYLLKMALEKIAFLPFGYLVDQWRWGVFSGRTPPSRYNFDWWYLRTKYQGICPPVTRNETHFDAGAKFHVPNVTPYIRYFVSFVLQFQFHEALCKEAGYEGPLHQCDIYRSTKAGAKLRKVLQAGSSRPWQEVLKDMVGLDALDAQPLLKYFQPVTQWLQEQNQQNGEVLGWPEYQWHPPLPDNYPEGIDLVTDEAEASKFVEEYDRTSQVVWNEYAEANWNYNTNITTETSKILLQKNMQIANHTLKYGTQARKFDVNQLQNTTIKRIIKKVQDLERAALPAQELEEYNKILLDMETTYSVATVCHPNGSCLQLEPDLTNVMATSRKYEDLLWAWEGWRDKAGRAILQFYPKYVELINQAARLNGYVDAGDSWRSMYETPSLEQDLERLFQELQPLYLNLHAYVRRALHRHYGAQHINLEGPIPAHLLGNMWAQTWSNIYDLVVPFPSAPSMDTTEAMLKQGWTPRRMFKEADDFFTSLGLLPVPPEFWNKSMLEKPTDGREVVCHASAWDFYNGKDFRIKQCTTVNLEDLVVAHHEMGHIQYFMQYKDLPVALREGANPGFHEAIGDVLALSVSTPKHLHSLNLLSSEGGSDEHDINFLMKMALDKIAFIPFSYLVDQWRWRVFDGSITKENYNQEWWSLRLKYQGLCPPVPRTQGDFDPGAKFHIPSSVPYIRYFVSFIIQFQFHEALCQAAGHTGPLHKCDIYQSKEAGQRLATAMKLGFSRPWPEAMQLITGQPNMSASAMLSYFKPLLDWLRTENELHGEKLGWPQYNWTPNSARSEGPLPDSGRVSFLGLDLDAQQARVGQWLLLFLGIALLVATLGLSQRLFSIRHRSLHRHSHGPQFGSEVELRHS

SEQ ID NO: 23947 - protein, 314 aa, Homo sapiens
  REGION 1..314: note = ENSP00000462280
MDEGGCSQAAPAFAEGAGLGSGAPALSGSCLLTSGRCRCHRHRTALSIHPPLARPLFWSQFLLHHSHEADSLQKEEARLPQTKEEAALLSQEFAEAWGQKAKELYEPIWQNFTDPQLRRIIGAVRTLGSANLPLAKRQQYNALLSNMSRIYSTAKVCLPNKTATCWSLDPDLTNILASSRSYAMLLFAWEGWHNAAGIPLKPLYEDFTALSNEAYKQDGFTDTGAYWRSWYNSPTFEDDLEHLYQQLEPLYLNLHAFVRRALHRRYGDRYINLRGPIPAHLLGDMWAQSWENIYDMVVPFPDKPNLDVTSTMLQ

SEQ ID NO: 23948 - protein, 119 aa, Homo sapiens
  REGION 1..119: note = ENSP00000463673
  VARIANT 1: note = Any amino acid
XQAGSSRPWQEVLKDMVGLDALDAQPLLKYFQPVTQWLQEQNQQNGEVLGWPEYQWHPPLPDNYPEGIGDSHPWDKQPGNNQQPDNHPPGDGPPDISPEPKWDHAGEGQGARGGRGGAG

SEQ ID NO: 23949 - protein, 732 aa, Homo sapiens
  REGION 1..732: note = ENSP00000290863
MGQGWATAGLPSLLFLLLCYGHPLLVPSQEASQQVTVTHGTSSQATTSSQTTTHQATAHQTSAQSPNLVTDEAEASKFVEEYDRTSQVVWNEYAEANWNYNTNITTETSKILLQKNMQIANHTLKYGTQARKFDVNQLQNTTIKRIIKKVQDLERAALPAQELEEYNKILLDMETTYSVATVCHPNGSCLQLEPDLTNVMATSRKYEDLLWAWEGWRDKAGRAILQFYPKYVELINQAARLNGYVDAGDSWRSMYETPSLEQDLERLFQELQPLYLNLHAYVRRALHRHYGAQHINLEGPIPAHLLGNMWAQTWSNIYDLVVPFPSAPSMDTTEAMLKQGWTPRRMFKEADDFFTSLGLLPVPPEFWNKSMLEKPTDGREVVCHASAWDFYNGKDFRIKQCTTVNLEDLVVAHHEMGHIQYFMQYKDLPVALREGANPGFHEAIGDVLALSVSTPKHLHSLNLLSSEGGSDEHDINFLMKMALDKIAFIPFSYLVDQWRWRVFDGSITKENYNQEWWSLRLKYQGLCPPVPRTQGDFDPGAKFHIPSSVPYIRYFVSFIIQFQFHEALCQAAGHTGPLHKCDIYQSKEAGQRLATAMKLGFSRPWPEAMQLITGQPNMSASAMLSYFKPLLDWLRTENELHGEKLGWPQYNWTPNSARSEGPLPDSGRVSFLGLDLDAQQARVGQWLLLFLGIALLVATLGLSQRLFSIRHRSLHRHSHGPQFGSEVELRHS

SEQ ID NO: 23950 - protein, 145 aa, Homo sapiens
  REGION 1..145: note = ENSP00000462002
MGQGWATAGLPSLLFLLLCYGHPLLVPSQEASQQVTVTHGTSSQATTSSQTTTHQATAHQTSAQSPNLVTDEAEASKFVEEYDRTSQVVWNEYAEANWNYNTNITTETSKILGLYDTWGSSLLCPCLDMCCLTAGIQGGCRRTCK

SEQ ID NO: 23951 - protein, 36 aa, Homo sapiens
  REGION 1..36: note = ENSP00000462110
MGQGWATAGLPSLLFLLLCYGHPLLVPSQEASQQTW

SEQ ID NO: 23952 - protein, 691 aa, Homo sapiens
  REGION 1..691: note = ENSP00000392247
MGQGWATAGLPSLLFLLLCYGHPLLVPSQEASQQVTVTHGTSSQATTSSQTTTHQATAHQTSAQSPNLVTDEAEASKFVEEYDRTSQVVWNEYAEANWNYNTNITTETSKILLQKNMQIANHTLKYGTQARKFDVNQLQNTTIKRIIKKVQDLERAALPAQELEEYNKILLDMETTYSVATVCHPNGSCLQLEPDLTNVMATSRKYEDLLWAWEGWRDKAGRAILQFYPKYVELINQAARLNGYVDAGDSWRSMYETPSLEQDLERLFQELQPLYLNLHAYVRRALHRHYGAQHINLEGPIPAHLLGNMWAQTWSNIYDLVVPFPSAPSMDTTEAMLKQGWTPRRMFKEADDFFTSLGLLPVPPEFWNKSMLEKPTDGREVVCHASAWDFYNGKDFRIKQCTTVNLEDLVVAHHEMGHIQYFMQYKDLPVALREGANPGFHEAIGDVLALSVSTPKHLHSLNLLSSEGGSDEHDINFLMKMALDKIAFIPFSYLVDQWRWRVFDGSITKENYNQEWWSLRLKYQGLCPPVPRTQGDFDPGAKFHIPSSVPYIRTAMKLGFSRPWPEAMQLITGQPNMSASAMLSYFKPLLDWLRTENELHGEKLGWPQYNWTPNSARSEGPLPDSGRVSFLGLDLDAQQARVGQWLLLFLGIALLVATLGLSQRLFSIRHRSLHRHSHGPQFGSEVELRHS

SEQ ID NO: 23953 - protein, 208 aa, Homo sapiens
  REGION 1..208: note = ENSP00000462599
MGQGWATAGLPSLLFLLLCYGHPLLVPSQEASQQVTVTHGTSSQATTSSQTTTHQATAHQTSAQSPNLVTDEAEASKFVEEYDRTSQVVWNEYAEANWNYNTNITTETSKILLQKNMQIANHTLKYGTQARKFDVNQLQNTTIKRIIKKVQDLERAALPAQELEEYNKILLDMETTYSVATVCHPNGSCLQLEPALKFSELPLQAEVS

SEQ ID NO: 23954 - protein, 36 aa, Homo sapiens; identical to SEQ ID NO: 23951
  REGION 1..36: note = ENSP00000464629

SEQ ID NO: 23955 - protein, 282 aa, Homo sapiens
  REGION 1..282: note = ENSP00000462909
LDMETTYSVATVCHPNGSCLQLEPDLTNVMATSRKYEDLLWAWEGWRDKAGRAILQFYPKYVELINQAARLNGYVDAGDSWRSMYETPSLEQDLERLFQELQPLYLNLHAYVRRALHRHYGAQHINLEGPIPAHLLGNMWAQTWSNIYDLVVPFPSAPSMDTTEAMLKQGWTPRRMFKEADDFFTSLGLLPVPPEFWNKSMLEKPTDGREVVCHASAWDFYNEHDINFLMKMALDKIAFIPFSYLVDQWRWRVFDGSITKENYNQEWWSLRLKYQGLCPPVP

SEQ ID NO: 23956 - protein, 138 aa, Homo sapiens
  REGION 1..138: note = ENSP00000464428
  VARIANT 1: note = Any amino acid
XRTQGDFDPGAKFHIPSSVPYIRYFVSFIIQFQFHEALCQAAGHTGPLHKCDIYQSKEAGQRLATAMKLGFSRPWPEAMQLITGQPNMSASAMLSYFKPLLDWLRTENELHGEKLGWPQYNWTPNSGTATHPTSSLGS

SEQ ID NO: 23957 - protein, 1242 aa, Homo sapiens
  REGION 1..1242: note = ENSP00000397593
MGAASGRRGPGLLLPLPLLLLLPPQPALALDPGLQPGNFSADEAGAQLFAQSYNSSAEQVLFQSVAASWAHDTNITAENARRQEEAALLSQEFAEAWGQKAKELYEPIWQNFTDPQLRRIIGAVRTLGSANLPLAKRQQYNALLSNMSRIYSTAKVCLPNKTATCWSLDPDLTNILASSRSYAMLLFAWEGWHNAAGIPLKPLYEDFTALSNEAYKQDGFTDTGAYWRSWYNSPTFEDDLEHLYQQLEPLYLNLHAFVRRALHRRYGDRYINLRGPIPAHLLGDMWAQSWENIYDMVVPFPDKPNLDVTSTMLQQGWNATHMFRVAEEFFTSLELSPMPPEFWEGSMLEKPADGREVVCHASAWDFYNRKDFRIKQCTRVTMDQLSTVHHEMGHIQYYLQYKDLPVSLRRGANPGFHEAIGDVLALSVSTPEHLHKIGLLDRVTNDTESDINYLLKMALEKIAFLPFGYLVDQWRWGVFSGRTPPSRYNFDWWYLRTKYQGICPPVTRNETHFDAGAKFHVPNVTPYIRYFVSFVLQFQFHEALCKEAGYEGPLHQCDIYRSTKAGAKLRKVLQAGSSRPWQEVLKDMVGLDALDAQPLLKYFQPVTQWLQEQNQQNGEVLGWPEYQWHPPLPDNYPEGIDLVTDEAEASKFVEEYDRTSQVVWNEYAEANWNYNTNITTETSKILLQKNMQIANHTLKYGTQARKFDVNQLQNTTIKRIIKKVQDLERAALPAQELEEYNKILLDMETTYSVATVCHPNGSCLQLEPDLTNVMATSRKYEDLLWAWEGWRDKAGRAILQFYPKYVELINQAARLNGYVDAGDSWRSMYETPSLEQDLERLFQELQPLYLNLHAYVRRALHRHYGAQHINLEGPIPAHLLGNMWAQTWSNIYDLVVPFPSAPSMDTTEAMLKQGWTPRRMFKEADDFFTSLGLLPVPPEFWNKSMLEKPTDGREVVCHASAWDFYNGKDFRIKQCTTVNLEDLVVAHHEMGHIQYFMQYKDLPVALREGANPGFHEAIGDVLALSVSTPKHLHSLNLLSSEGGSDEHDINFLMKMALDKIAFIPFSYLVDQWRWRVFDGSITKENYNQEWWSLRLKYQGLCPPVPRTQGDFDPGAKFHIPSSVPYIRYFVSFIIQFQFHEALCQAAGHTGPLHKCDIYQSKEAGQRLATAMKLGFSRPWPEAMQLITGQPNMSASAMLSYFKPLLDWLRTENELHGEKLGWPQYNWTPNSGTATHPTSSLGS

SEQ ID NO: 23958 - protein, 205 aa, Homo sapiens
  REGION 1..205: note = ENSP00000435733
MIIPPMFGAVQSVRDGLEKRYIASYLALTVVGMGSWCFHMTLKYEMQLLDELPMIYSCCIFVYCMFECFKIKNSVNYHLLFTLVLFSLIVTTVYLKVKEPIFHQVMYGMLVFTLVLRSIYIVTWVYPWLRGLGYTSLGIFLLGFLFWNIDNIFCESLRNFRKKVPPIIGITTQFHAWWHILTGLGSYLHILFSLYTRTLYLRYRP

SEQ ID NO: 23959 - protein, 267 aa, Homo sapiens [sequence omitted]

SEQ ID NO: 23960 - protein, 51 aa, Homo sapiens
  REGION 1..51: note = ENSP00000432109
MAPAADREGYWGPTTSTLDWCEENYSVTWYIAEFCSFLPSSLKSNLKEYSE

SEQ ID NO: 23961 - protein, 80 aa, Homo sapiens
  REGION 1..80: note = ENSP00000432379
MAPAADREGYWGPTTSTLDWCEENYSVTWYIAEFWNTVSNLIMIIPPMFGAVQSVRDGLEKRYIASYLALTDGVSLCRRG

SEQ ID NO: 23962 - protein, 74 aa, Homo sapiens
  REGION 1..74: note = ENSP00000433368
MAPAADREGYWGPTTSTLDWCEENYSVTWYIAEFWNTVSNLIMIIPPMFGAVQSVRDGLEKRYIASYLALTAIG

SEQ ID NO: 23963 - protein, 71 aa, Homo sapiens
  REGION 1..71: note = ENSP00000435048
MAPAADREGYWGPTTSTLDWCEENYSVTWYIAEFCSFLPSSLKSNLKLVSTHQASFLVLGLWAGRGDIPVI

SEQ ID NO: 23964 - protein, 172 aa, Homo sapiens
  REGION 1..172: note = ENSP00000431149
MIYSCCIFVYCMFECFKIKNSVNYHLLFTLVLFSLIVTTVYLKVKEPIFHQVMYGMLVFTLVLRSIYIVTWVYPWLRGLGYTSLGIFLLGFLFWNIDNIFCESLRNFRKKVPPIIGITTQFHAWWHILTGLGSYLHILFSLYTRTLYLRYRPKVKFLFGIWPVILFEPLRKH

SEQ ID NO: 23965 - protein, 230 aa, Homo sapiens
  REGION 1..230: note = ENSP00000436252
MAPAADREGYWGPTTSTLDWCEENYSVTWYIAEFLVGMGSWCFHMTLKYEMQLLDELPMIYSCCIFVYCMFECFKIKNSVNYHLLFTLVLFSLIVTTVYLKVKEPIFHQVMYGMLVFTLVLRSIYIVTWVYPWLRGLGYTSLGIFLLGFLFWNIDNIFCESLRNFRKKVPPIIGITTQFHAWWHILTGLGSYLHILFSLYTRTLYLRYRPKVKFLFGIWPVILFEPLRKH

SEQ ID NO: 23966 - protein, 51 aa, Homo sapiens; identical to SEQ ID NO: 23960
  REGION 1..51: note = ENSP00000431504

SEQ ID NO: 23967 - protein, 76 aa, Homo sapiens
  REGION 1..76: note = ENSP00000278544
MAPAADREGYWGPTTSTLDWCEENYSVTWYIAEFWNTVSNLIMIIPPMFGAVQSVRDGLEKRYIASYLALTEVLQI

SEQ ID NO: 23968 - protein, 526 aa, Homo sapiens
  REGION 1..526: note = ENSP00000403474
MRPPQCLLHTPSLASPLLLLLLWLLGGGVGAEGREDAELLVTVRGGRLRGIRLKTPGGPVSAFLGIPFAEPPMGPRRFLPPEPKQPWSGVVDATTFQSVCYQYVDTLYPGFEGTEMWNPNRELSEDCLYLNVWTPYPRPTSPTPVLVWIYGGGFYSGASSLDVYDGRFLVQAERTVLVSMNYRVGAFGFLALPGSREAPGNVGLLDQRLALQWVQENVAAFGGDPTSVTLFGESAGAASVGMHLLSPPSRGLFHRAVLQSGAPNGPWATVGMGEARRRATQLAHLVGCPPGGTGGNDTELVACLRTRPAQVLVNHEWHVLPQESVFRFSFVPVVDGDFLSDTPEALINAGDFHGLQLAGRLAAQGARVYAYVFEHRASTLSWPLWMGVPHGYEIEFIFGIPLDPSRNYTAEEKIFAQRLMRYWANFARTGDPNEPRDPKAPQWPPYTAGAQQYVSLDLRPLEVRRGLRAQACAFWNRFLPKLLSATDTLDEAERQWKAEFHRWSSYMVHWKNQFDHYSKQDRCSDL

SEQ ID NO: 23969 - protein, 614 aa, Homo sapiens
  REGION 1..614: note = ENSP00000241069
MRPPQCLLHTPSLASPLLLLLLWLLGGGVGAEGREDAELLVTVRGGRLRGIRLKTPGGPVSAFLGIPFAEPPMGPRRFLPPEPKQPWSGVVDATTFQSVCYQYVDTLYPGFEGTEMWNPNRELSEDCLYLNVWTPYPRPTSPTPVLVWIYGGGFYSGASSLDVYDGRFLVQAERTVLVSMNYRVGAFGFLALPGSREAPGNVGLLDQRLALQWVQENVAAFGGDPTSVTLFGESAGAASVGMHLLSPPSRGLFHRAVLQSGAPNGPWATVGMGEARRRATQLAHLVGCPPGGTGGNDTELVACLRTRPAQVLVNHEWHVLPQESVFRFSFVPVVDGDFLSDTPEALINAGDFHGLQVLVGVVKDEGSYFLVYGAPGFSKDNESLISRAEFLAGVRVGVPQVSDLAAEAVVLHYTDWLHPEDPARLREALSDVVGDHNVVCPVAQLAGRLAAQGARVYAYVFEHRASTLSWPLWMGVPHGYEIEFIFGIPLDPSRNYTAEEKIFAQRLMRYWANFARTGDPNEPRDPKAPQWPPYTAGAQQYVSLDLRPLEVRRGLRAQACAFWNRFLPKLLSATDTLDEAERQWKAEFHRWSSYMVHWKNQFDHYSKQDRCSDL

SEQ ID NO: 23970 - protein, 614 aa, Homo sapiens; identical to SEQ ID NO: 23969
  REGION 1..614: note = ENSP00000414858

SEQ ID NO: 23971 - protein, 614 aa, Homo sapiens; identical to SEQ ID NO: 23969
  REGION 1..614: note = ENSP00000394976

SEQ ID NO: 23972 - protein, 397 aa, Homo sapiens
  REGION 1..397: note = ENSP00000397143
MRPPQCLLHTPSLASPLLLLLLWLLGGGVGAEGREDAELLVTVRGGRLRGIRLKTPGGPVSAFLGIPFAEPPMGPRRFLPPEPKQPWSGVVDATTFQSVCYQYVDTLYPGFEGTEMWNPNRELSEDCLYLNVWTPYPRPTSPTPVLVWIYGGGFYSGASSLDVYDGRFLVQAERTVLVSMNYRVGAFGFLALPGSREAPGNVGLLDQRLALQWVQENVAAFGGDPTSVTLFGESAGAASVGMHLLSPPSRGLFHRAVLQSGAPNGPWATVGMGEARRRATQLAHLVGCPPGGTGGNDTELVACLRTRPAQVLVNHEWHVLPQESVFRFSFVPVVDGDFLSDTPEALINAGDFHGLQTRSTRRSASGRPSSTAGAPTWCTGRTSSTTTASRIAAQTCD

SEQ ID NO: 23973 - protein, 403 aa, Homo sapiens
  REGION 1..403: note = ENSP00000390004
MRPPQCLLHTPSLASPLLLLLLWLLGGGVGAEGREDAELLVTVRGGRLRGIRLKTPGGPVSAFLGIPFAEPPMGPRRFLPPEPKQPWSGVVDATTFQSVCYQYVDTLYPGFEGTEMWNPNRELSEDCLYLNVWTPYPRPTSPTPVLVWIYGGGFYSGASSLDVYDGRFLVQAERTVLVSMNYRVGAFGFLALPGSREAPGNVGLLDQRLALQWVQENVAAFGGDPTSVTLFGESAGAASVGMHLLSPPSRGLFHRAVLQSGAPNGPWATVGMGEARRRATQLAHLVGCPPGGTGGNDTELVACLRTRPAQVLVNHEWHVLPQESVFRFSFVPVVDGDFLSDTPEALINAGDFHGLQVLVGVVKDEGSYFLVYGAPGFSKDNESLISRAEFLAGVRVGVPQGSQ

SEQ ID NO: 23974 - protein, 359 aa, Homo sapiens
  REGION 1..359: note = ENSP00000410380
MRPPQCLLHTPSLASPLLLLLLWLLGGGVGAEGREDAELLVTVRGGRLRGIRLKTPGGPVSAFLGIPFAEPPMGPRRFLPPEPKQPWSGVVDATTFQSVCYQYVDTLYPGFEGTEMWNPNRELSEDCLYLNVWTPYPRPTSPTPVLVWIYGGGFYSGASSLDVYDGRFLVQAERTVLVSMNYRVGAFGFLALPGSREAPGNVGLLDQRLALQWVQENVAAFGGDPTSVTLFGESAGAASVGMHLLSPPSRGLFHRAVLQSGAPNGPWATVGMGEARRRATQLAHLVGCPPGGTGGNDTELVACLRTRPAQVLVNHEWHVLPQESVFRFSFVPVVDGDFLSDTPEALINAGDFHGLQGSQ

SEQ ID NO: 23975 - protein, 434 aa, Homo sapiens
  REGION 1..434: note = ENSP00000399725
MRPPQCLLHTPSLASPLLLLLLWLLGGGVGAEGREDAELLVTVRGGRLRGIRLKTPGGPVSAFLGIPFAEPPMGPRRFLPPEPKQPWSGVVDATTFQSVCYQYVDTLYPGFEGTEMWNPNRELSEDCLYLNVWTPYPRPTSPTPVLVWIYGGGFYSGASSLDVYDGRFLVQAERTVLVSMNYRVGAFGFLALPGSREAPGNVGLLDQRLALQWVQENVAAFGGDPTSVTLFGESAGAASVGMHLLSPPSRGLFHRAVLQSGAPNGPWATVGMGEARRRATQLAHLVGCPPGGTGGNDTELVACLRTRPAQVLVNHEWHVLPQESVFRFSFVPVVDGDFLSDTPEALINAGDFHGLQVLVGVVKDEGSYFLVYGAPGFSKDNESLISRAEFLAGTRSTRRSASGRPSSTAGAPTWCTGRTSSTTTASRIAAQTCD

SEQ ID NO: 23976 - protein, 55 aa, Homo sapiens
  REGION 1..55: note = ENSP00000415901
MRPPQCLLHTPSLASPLLLLLLWLLGGGVGAEGREDAELLVTVLRAPRCGTPTVS

SEQ ID NO: 23977 - protein, 617 aa, Homo sapiens
  REGION 1..617: note = ENSP00000404865
MRPPQCLLHTPSLASPLLLLLLWLLGGGVGAEGREDAELLVTVRGGRLRGIRLKTPGGPVSAFLGIPFAEPPMGPRRFLPPEPKQPWSGVVDATTFQSVCYQYVDTLYPGFEGTEMWNPNRELSEDCLYLNVWTPYPRPTSPTPVLVWIYGGGFYSGASSLDVYDGRFLVQAERTVLVSMNYRVGAFGFLALPGSREAPGNVGLLDQRLALQWVQENVAAFGGDPTSVTLFGESAGAASVGMHLLSPPSRGLFHRAVLQSGAPNGPWATVGMGEARRRATQLAHLVGCPPGGTGGNDTELVACLRTRPAQVLVNHEWHVLPQESVFRFSFVPVVDGDFLSDTPEALINAGDFHGLQVLVGVVKDEGSYFLVYGAPGFSKDNESLISRAEFLAGVRVGVPQVSDLAAEAVVLHYTDWLHPEDPARLREALSDVVGDHNVVCPVAQLAGRLAAQGARVYAYVFEHRASTLSWPLWMGVPHGYEIEFIFGIPLDPSRNYTAEEKIFAQRLMRYWANFARTGDPNEPRDPKAPQWPPYTAGAQQYVSLDLRPLEVRRGLRAQACAFWNRFLPKLLSATASEAPSTCPGFTHGEAAPRPGLPLPLLLLHQLLLLFLSHLRRL

SEQ ID NO: 23978 - protein, 158 aa, Homo sapiens
  REGION 1..158: note = ENSP00000396360
MRPPQCLLHTPSLASPLLLLLLWLLGGGVGAEGREDAELLVTVRGGRLRGIRLKTPGGPVSAFLGIPFAEPPMGPRRFLPPEPKQPWSGVVDATTFQSVCYQYVDTLYPGFEGTEMWNPNRELSEDCLYLNVWTPYPRPTSPTPVLVWIYGGGFYSGA

SEQ ID NO: 23979 - protein, 28 aa, Homo sapiens
  REGION 1..28: note = ENSP00000400933
MRPPQCLLHTPSLASPLLLLLLWLLGGG

SEQ ID NO: 23980 - protein, 617 aa, Homo sapiens; identical to SEQ ID NO: 23977
  REGION 1..617: note = ENSP00000303211

SEQ ID NO: 23981 - protein, 780 aa, Homo sapiens
  REGION 1..780: note = ENSP00000216254
MAPYSLLVTRLQKALGVRQYHVASVLCQRAKVAMSHFEPNEYIHYDLLEKNINIVRKRLNRPLTLSEKIVYGHLDDPASQEIERGKSYLRLRPDRVAMQDATAQMAMLQFISSGLSKVAVPSTIHCDHLIEAQVGGEKDLRRAKDINQEVYNFLATAGAKYGVGFWKPGSGIIHQIILENYAYPGVLLIGTDSHTPNGGGLGGICIGVGGADAVDVMAGIPWELKCPKVIGVKLTGSLSGWSSPKDVILKVAGILTVKGGTGAIVEYHGPGVDSISCTGMATICNMGAEIGATTSVFPYNHRMKKYLSKTGREDIANLADEFKDHLVPDPGCHYDQLIEINLSELKPHINGPFTPDLAHPVAEVGKVAEKEGWPLDIRVGLIGSCTNSSYEDMGRSAAVAKQALAHGLKCKSQFTITPGSEQIRATIERDGYAQILRDLGGIVLANACGPCIGQWDRKDIKKGEKNTIVTSYNRNFTGRNDANPETHAFVTSPEIVTALAIAGTLKFNPETDYLTGTDGKKFRLEAPDADELPKGEFDPGQDTYQHPPKDSSGQHVDVSPTSQRLQLLEPFDKWDGKDLEDLQILIKVKGKCTTDHISAAGPWLKFRGHLDNISNNLLIGAINIENGKANSVRNAVTQEFGPVPDTARYYKKHGIRWVVIGDENYGEGSSREHAALEPRHLGGRAIITKSFARIHETNLKKQGLLPLTFADPADYNKIHPVDKLTIQGLKDFTPGKPLKCIIKHPNGTQETILLNHTFNETQIEWFRAGSALNRMKELQQ

SEQ ID NO: 23982 - protein, 805 aa, Homo sapiens
  REGION 1..805: note = ENSP00000379769
MAPYSLLVTRLQKALGVRQYHVASVLCQRAKVAMSHFEPNEYIHYDLLEKNINIVRKRLNRPLTLSEKIVYGHLDDPASQEIERGKSYLRLRPDRVAMQDATAQMAMLQFISSGLSKVAVPSTIHCDHLIEAQVGGEKDLRRAKDINQEVYNFLATAGAKYGVGFWKPGSGIIHQIILENYAYPGVLLIGTDSHTPNGGGLGGICIGVGGADAVDVMAGIPWELKCPKVIGVKLTGSLSGWSSPKDVILKVAGILTVKGGTGAIVEYHGPGVDSISCTGEEGGQATWPLPCAGPDGSPVGSRSGMATICNMGAEIGATTSVFPYNHRMKKYLSKTGREDIANLADEFKDHLVPDPGCHYDQLIEINLSELKPHINGPFTPDLAHPVAEVGKVAEKEGWPLDIRVGLIGSCTNSSYEDMGRSAAVAKQALAHGLKCKSQFTITPGSEQIRATIERDGYAQILRDLGGIVLANACGPCIGQWDRKDIKKGEKNTIVTSYNRNFTGRNDANPETHAFVTSPEIVTALAIAGTLKFNPETDYLTGTDGKKFRLEAPDADELPKGEFDPGQDTYQHPPKDSSGQHVDVSPTSQRLQLLEPFDKWDGKDLEDLQILIKVKGKCTTDHISAAGPWLKFRGHLDNISNNLLIGAINIENGKANSVRNAVTQEFGPVPDTARYYKKHGIRWVVIGDENYGEGSSREHAALEPRHLGGRAIITKSFARIHETNLKKQGLLPLTFADPADYNKIHPVDKLTIQGLKDFTPGKPLKCIIKHPNGTQETILLNHTFNETQIEWFRAGSALNRMKELQQ

SEQ ID NO: 23983 - protein, 594 aa, Homo sapiens
  REGION 1..594: note = ENSP00000340260
MIQNVGNHLRRGLASVFSNRTSRKSALRAGNDSAMADGEGYRNPTEVQMSQLVLPCHTNQRGELSVGQLLKWIDTTACLSAERHAGCPCVTASMDDIYFEHTISVGQVVNIKAKVNRAFNSSMEVGIQVASEDLCSEKQWNVCKALATFVARREITKVKLKQITPRTEEEKMEHSVAAERRRMRLVYADTIKDLLANCAIQGDLESRDCSRMVPAEKTRVESVELVLPPHANHQGNTFGGQIMAWMENVATIAASRLCRAHPTLKAIEMFHFRGPSQVGDRLVLKAIVNNAFKHSMEVGVCVEAYRQEAETHRRHINSAFMTFVVLDADDQPQLLPWIRPQPGDGERRYREASARKKIRLDRKYIVSCKQTEVPLSVPWDPSNQVYLSYNNVSSLKMLVAKDNWVLSSEISQVRLYTLEDDKFLSFHMEMVVHVDAAQAFLLLSDLRQRPEWDKHYRSVELVQQVDEDDAIYHVTSPALGGHTKPQDFVILASRRKPCDNGDPYVIALRSVTLPTHRETPEYRRGETLCSGFCLWREGDQLTKVSYYNQATPGVLNYVTTNVAGLSSEFYTTFKACEQFLLDNRNDLAPSLQTL

SEQ ID NO: 23984 - protein, 607 aa, Homo sapiens
  REGION 1..607: note = ENSP00000360366
MIQNVGNHLRRGLASVFSNRTSRKSALRAGNDSAMADGEGYRNPTEVQMSQLVLPCHTNQRGELSVGQLLKWIDTTACLSAERHAGCPCVTASMDDIYFEHTISVGQVVNIKAKVNRAFNSSMEVGIQVASEDLCSEKQWNVCKALATFVARREITKVKLKQITPRTEEEKMEHSVAAERRRMRLVYADTIKDLLANCAIQGDLESRDCSRMVPAEKTRVESVELVLPPHANHQGNTFGGQIMAWMENVATIAASRLCRAHPTLKAIEMFHFRGPSQVGDRLVLKAIVNNAFKHSMEVGVCVEAYRQEAETHRRHINSAFMTFVVLDADDQPQLLPWIRPQPGDGERRYREASARKKIRLDRKYIVSCKQTEVPLSVPWDPSNQVYLSYNNVSSLKMLVAKDNWVLSSEISQVRLYTLEDDKFLSFHMEMVVHVDAAQAFLLLSDLRQRPEWDKHYRSVELVQQVDEDDAIYHVTSPALGGHTKPQDFVILASRRKPCDNGDPYVIALRSVTLPTHRETPEYRRGETLCSGFCLWREGDQLTKCCWVRVSLTELVSASGFYSWGLESRSKGRRSDGWNGKLAGGHLSTLKAIPVAKINSRFGYLQDT

SEQ ID NO: 23985 - protein, 338 aa, Homo sapiens
  REGION 1..338: note = ENSP00000476610
MSGPDVETPSAIQICRIMRPDDANVAGNVHGGTILKMIEEAGAIISTRHCNSQNGERCVAALARVERTDFLSPMCIGEVAHVSAEITYTSKHSVEVQVNVMSENILTGAKKLTNKATLWYVPLSLKNVDKVLEVPPVVYSRQEQEEEGRKRYEAQKLERMETKWRNGDIVQPVLNPEPNTVSYSQSSLIHLVGPSDCTLHGFVHGGVTMKLMDEVAGIVAARHCKTNIVTASVDAINFHDKIRKGCVITISGRMTFTSNKSMEIEVLVDADPVVDSSQKRYRAASAFFTYVSLSQEGRSLPVPQLVPETEDEKKRFEEGKGRYLQMKAKRQGHAEPQP

SEQ ID NO: 23986 - protein, 329 aa, Homo sapiens
  REGION 1..329: note = ENSP00000367073
MAFQLSRIMRPDDANVAGNVHGGTILKMIEEAGAIISTRHCNSQNGERCVAALARVERTDFLSPMCIGEVAHVSAEITYTSKHSVEVQVNVMSENILTGAKKLTNKATLWYVPLSLKNVDKVLEVPPVVYSRQEQEEEGRKRYEAQKLERMETKWRNGDIVQPVLNPEPNTVSYSQSSLIHLVGPSDCTLHGFVHGGVTMKLMDEVAGIVAARHCKTNIVTASVDAINFHDKIRKGCVITISGRMTFTSNKSMEIEVLVDADPVVDSSQKRYRAASAFFTYVSLSQEGRSLPVPQLVPETEDEKKRFEEGKGRYLQMKAKRQGHAEPQP

SEQ ID NO: 23987 - protein, 350 aa, Homo sapiens
  REGION 1..350: note = ENSP00000367076
MLLLRRSLSLNVLRKEVDRACFGEKAKQIMRPDDANVAGNVHGGTILKMIEEAGAIISTRHCNSQNGERCVAALARVERTDFLSPMCIGEVAHVSAEITYTSKHSVEVQVNVMSENILTGAKKLTNKATLWYVPLSLKNVDKVLEVPPVVYSRQEQEEEGRKRYEAQKLERMETKWRNGDIVQPVLNPEPNTVSYSQSSLIHLVGPSDCTLHGFVHGGVTMKLMDEVAGIVAARHCKTNIVTASVDAINFHDKIRKGCVITISGRMTFTSNKSMEIEVLVDADPVVDSSQKRYRAASAFFTYVSLSQEGRSLPVPQLVPETEDEKKRFEEGKGRYLQMKAKRQGHAEPQP

SEQ ID NO: 23988 - protein, 380 aa, Homo sapiens
  REGION 1..380: note = ENSP00000367086
MKLLARALRLCEFGRQASSRRLVAGQGCVGPRRGCCAPVQVVGPRADLPPCGACITGRIMRPDDANVAGNVHGGTILKMIEEAGAIISTRHCNSQNGERCVAALARVERTDFLSPMCIGEVAHVSAEITYTSKHSVEVQVNVMSENILTGAKKLTNKATLWYVPLSLKNVDKVLEVPPVVYSRQEQEEEGRKRYEAQKLERMETKWRNGDIVQPVLNPEPNTVSYSQSSLIHLVGPSDCTLHGFVHGGVTMKLMDEVAGIVAARHCKTNIVTASVDAINFHDKIRKGCVITISGRMTFTSNKSMEIEVLVDADPVVDSSQKRYRAASAFFTYVSLSQEGRSLPVPQLVPETEDEKKRFEEGKGRYLQMKAKRQGHAEPQP

SEQ ID NO: 23989 - protein, 283 aa, Homo sapiens
  REGION 1..283: note = ENSP00000367091
MSGPDVETPSAIQICRIMRPDDANVAGNVHGGTILKMIEEAGAIISTRHCNSQNGERCVAALARVERTDFLSPMCIGEVAHVSAEITYTSKHSVEVQVNVMSENILTGAKKLTNKATLWYVPLSLKNVDKVLEVPPVVYSRQEQEEEGRKRYEAQKLERMETKWRNGDIVQPVLNPEPNTVSYSQSSLIHLVGPSDCTLHGFVHGGVTMKLMDEVAGIVAARHCKTNIVTASVDAINFHDKIRKAHVMPAGADHTAPSSSPSTGTKCSLLRHHHLGTHDLHEQ

SEQ ID NO: 23990 - protein, 246 aa, Homo sapiens
  REGION 1..246: note = ENSP00000402532
MSGPDVETPSAIQICRIMRPDDANVAGNVHGGTILKMIEEAGAIISTRHCNSQNGERCVAALARVERTDFLSPMCIGEVAHVSAEITYTSKHSVEVQVNVMSENILTGAKKLTNKATLWYVPLSLKNVDKVLEVPPVVYSRQEQEEEGRKRYEAQKLERMETKWRNGDIVQPVLNPEPNTVSYSQSSLIHLVGPSDCTLHGFVHGGVTMKLMDEVAGIVAARHCKTNIVTASVDAINFHDKIRKAP

SEQ ID NO: 23991 - protein, 370 aa, Homo sapiens
  REGION 1..370: note = ENSP00000354615
MARPGLIHSAPGLPDTCALLQPPAASAAAAPSMSGPDVETPSAIQICRIMRPDDANVAGNVHGGTILKMIEEAGAIISTRHCNSQNGERCVAALARVERTDFLSPMCIGEVAHVSAEITYTSKHSVEVQVNVMSENILTGAKKLTNKATLWYVPLSLKNVDKVLEVPPVVYSRQEQEEEGRKRYEAQKLERMETKWRNGDIVQPVLNPEPNTVSYSQSSLIHLVGPSDCTLHGFVHGGVTMKLMDEVAGIVAARHCKTNIVTASVDAINFHDKIRKGCVITISGRMTFTSNKSMEIEVLVDADPVVDSSQKRYRAASAFFTYVSLSQEGRSLPVPQLVPETEDEKKRFEEGKGRYLQMKAKRQGHAEPQP

SEQ ID NO: 23992 - protein, 279 aa, Homo sapiens
  REGION 1..279: note = ENSP00000465719
MRPDDANVAGNVHGGTILKMIEEAGAIISTRHCNSQNGERCVAALARVERTDFLSPMCIGEVAHVSAEITYTSKHSVEVQVNVMSENILTGAKKLTNKATLWYVPLSLKNVDKVLEVPPVVYSRQEQEEEGRKRYEAQKLERMETKWRNGDIVQPVLNPEPNTVSYSQSSLIHLVGPSDCTLHGFVHGGVTMKLMDEVAGIVAARHCKTNIVTASVDAINFHDKIRKGCVITISGRMTFTSNKSMEIEVLVDADPVVDSSQKRYRAASAFFTYVSLSQE

SEQ ID NO: 23993 - protein, 370 aa, Homo sapiens; identical to SEQ ID NO: 23991
  REGION 1..370: note = ENSP00000439218

SEQ ID NO: 23994 - protein, 724 aa, Homo sapiens
  REGION 1..724: note = ENSP00000258873
MPRNSGAGYGCPHGDPSMLDSRETPQESRQDMIVRTTQEKLKTSSLTDRQPLSKESLNHALELSVPEKVNNAQWDAPEEALWTTRADGRVRLRIDPSCPQLPYTVHRMFYEALDKYGDLIALGFKRQDKWEHISYSQYYLLARRAAKGFLKLGLKQAHSVAILGFNSPEWFFSAVGTVFAGGIVTGIYTTSSPEACQYIAYDCCANVIMVDTQKQLEKILKIWKQLPHLKAVVIYKEPPPNKMANVYTMEEFMELGNEVPEEALDAIIDTQQPNQCCVLVYTSGTTGNPKGVMLSQDNITWTARYGSQAGDIRPAEVQQEVVVSYLPLSHIAAQIYDLWTGIQWGAQVCFAEPDALKGSLVNTLREVEPTSHMGVPRVWEKIMERIQEVAAQSGFIRRKMLLWAMSVTLEQNLTCPGSDLKPFTTRLADYLVLAKVRQALGFAKCQKNFYGAAPMMAETQHFFLGLNIRLYAGYGLSETSGPHFMSSPYNYRLYSSGKLVPGCRVKLVNQDAEGIGEICLWGRTIFMGYLNMEDKTCEAIDEEGWLHTGDAGRLDADGFLYITGRLKELIITAGGENVPPVPIEEAVKMELPIISNAMLIGDQRKFLSMLLTLKCTLDPDTSDQTDNLTEQAMEFCQRVGSRATTVSEIIEKKDEAVYQAIEEGIRRVNMNAAARPYHIQKWAILERDFSISGGELGPTMKLKRLTVLEKYKGIIDSFYQEQKM

SEQ ID NO: 23995 - protein, 51 aa, Homo sapiens
  REGION 1..51: note = ENSP00000453605
MPRNSGAGYGCPHGDPSMLDSRETPQESRQDMIVRTTQEKLKTRSGNSCHI

SEQ ID NO: 23996 - protein, 482 aa, Homo sapiens
  REGION 1..482: note = ENSP00000453451
MANVYTMEEFMELGNEVPEEALDAIIDTQQPNQCCVLVYTSGTTGNPKGVMLSQDNITWTARYGSQAGDIRPAEVQQEVVVSYLPLSHIAAQIYDLWTGIQWGAQVCFAEPDALKGSLVNTLREVEPTSHMGVPRVWEKIMERIQEVAAQSGFIRRKMLLWAMSVTLEQNLTCPGSDLKPFTTRLADYLVLAKVRQALGFAKCQKNFYGAAPMMAETQHFFLGLNIRLYAGYGLSETSGPHFMSSPYNYRLYSSGKLVPGCRVKLVNQDAEGIGEICLWGRTIFMGYLNMEDKTCEAIDEEGWLHTGDAGRLDADGFLYITGRLKELIITAGGENVPPVPIEEAVKMELPIISNAMLIGDQRKFLSMLLTLKCTLDPDTSDQTDNLTEQAMEFCQRVGSRATTVSEIIEKKDEAVYQAIEEGIRRVNMNAAARPYHIQKWAILERDFSISGGELGPTMKLKRLTVLEKYKGIIDSFYQEQKM

SEQ ID NO: 23997 - protein, 80 aa, Homo sapiens
  REGION 1..80: note = ENSP00000453447
MPRNSGAGYGCPHGDPSMLDSRETPQESRQDMIVRTTQEKLKTRGGAVDDSGRWAGAPAHRPQLPTASLHCASDVLRGPG

SEQ ID NO: 23998 - protein, 55 aa, Homo sapiens
  REGION 1..55: note = ENSP00000453585
MPRNSGAGYGCPHGDPSMLDSRETPQESRQDMIVRTTQEKLKTRDGVLLHCPGWP

SEQ ID NO: 23999 - protein, 138 aa, Homo sapiens
  REGION 1..138: note = ENSP00000454188
MFYEALDKYGDLIALGFKRQDKWEHISYSQYYLLARRAAKGFLKLGLKQAHSVAILGFNSPEWFFSAVGTVFAGGIVTGIYTTSSPEACQYIAYDCCANVIMVDTQKQLEKILKIWKQLPHLKAVVIYKEPPPNKMAN

SEQ ID NO: 24000 - protein, 243 aa, Homo sapiens
  REGION 1..243: note = ENSP00000453547
MPEVLLLRSASSILRTAFLSRWLPGGPRCVHKLSFVRNLQCRQGVRLNVRSSSLTDRQPLSKESLNHALELSVPEKVNNAQWDAPEEALWTTRADGRVRLRIDPSCPQLPYTVHRMFYEALDKYGDLIALGFKRQDKWEHISYSQYYLLARRAAKGFLKLGLKQAHSVAILGFNSPEWFFSAVGTVFAGGIVTGIYTTSSPEACQYIAYDCCANVIMVDTQKQLEKILKIWKQLPHLKAVVIY

SEQ ID NO: 24001 - protein, 181 aa, Homo sapiens
  REGION 1..181: note = ENSP00000453800
MPRNSGAGYGCPHGDPSMLDSRETPQESRQDMIVRTTQEKLKTSSLTDRQPLSKESLNHALELSVPEKVNNAQWDAPEEALWTTRADGRVRLRIDPSCPQLPYTVHRMFYEALDKYGDLIALGFKRQDKWEHISYSQYYLLARRAAKGFLKQAHSVAILGFNSPEWFFSAVGTVFAGGIVT

SEQ ID NO: 24002 - protein, 208 aa, Homo sapiens
  REGION 1..208: note = ENSP00000460112
MRPWLRHLVLQALRNSRAFCGSHGKPAPLPVPQKIVATWEAISLGRQLVPEYFNFAHDVLDVWSRLEEAGHRPPNPAFWWVNGTGAEIKWSFEELGKQSRKAANVLGGACGLQPGDRMMLVLPRLPEWWLVSVACMRTGTVMIPGVTQLTEKDLKYRLQASRAKSIITSDSLAPRVDAISAECPSLQTKLLVSDSSRPGWLNFRELLR

SEQ ID NO: 24003 - protein, 579 aa, Homo sapiens
  REGION 1..579: note = ENSP00000327916
MRPWLRHLVLQALRNSRAFCGSHGKPAPLPVPQKIVATWEAISLGRQLVPEYFNFAHDVLDVWSRLEEAGHRPPNPAFWWVNGTGAEIKWSFEELGKQSRKAANVLGGACGLQPGDRMMLVLPRLPEWWLVSVACMRTGTVMIPGVTQLTEKDLKYRLQASRAKSIITSDSLAPRVDAISAECPSLQTKLLVSDSSRPGWLNFRELLREASTEHNCMRTKSRDPLAIYFTSGTTGAPKMVEHSQSSYGLGFVASGRRWVALTESDIFWNTTDTGWVKAAWTLFSAWPNGSCIFVHELPRVDAKVILNTLSKFPITTLCCVPTIFRLLVQEDLTRYQFQSLRHCLTGGEALNPDVREKWKHQTGVELYEGYGQSETVVICANPKGMKIKSGSMGKASPPYDVQIVDDEGNVLPPGEEGNVAVRIRPTRPFCFFNCYLDNPEKTAASEQGDFYITGDRARMDKDGYFWFMGRNDDVINSSSYRIGPVEVESALAEHPAVLESAVVSSPDPIRGEVVKAFIVLTPAYSSHDPEALTRELQEHVKRVTAPYKYPRKVAFVSELPKTVSGKIQRSKLRSQEWGK

SEQ ID NO: 24004 - protein, 74 aa, Homo sapiens
  REGION 1..74: note = ENSP00000478073
MRPWLRHLVLQALRNSRAFCGSHGKPAPLPVPQKIVATWEAISLGRQLVPEYFNFAHDVLDVWSRLEEVKPVLS

SEQ ID NO: 24005 - protein, 112 aa, Homo sapiens
  REGION 1..112: note = ENSP00000461752
HNCMRTKSRDPLAIYFTSGTTGAPKMVEHSQSSYGLGFVASGRRWVALTESDIFWNTTDTGWVKAAWTLFSAWPNGSCIFVHELPRVDAKVILNVPVSEPEALSDRRRGPQP

SEQ ID NO: 24006 - protein, 689 aa, Homo sapiens [sequence omitted]

SEQ ID NO: 24007 - protein, 153 aa, Homo sapiens
  REGION 1..153: note = ENSP00000365916
MAARTLGRGVGRLLGSLRGLSGQPARPPCGVSAPRRAASGPSGSAPAVAAAAAQPGSYPALSAQAAREPAAFWGPLARDTLVWDTPYHTVWDCDFSTGKIGWFLGGQLNVSVNCLDQHVRKSPESVALIWERDEPGTEVRITYSPWLQMPCGP

SEQ ID NO: 24008 - protein, 575 aa, Homo sapiens
  REGION 1..575: note = ENSP00000388793
MAARTLGRGVGRLLGSLRGLSGQPARPPCGVSAPRRAASGPSGSAPAVAAAAAQPGSYPALSAQAAREPAAFWGPLARDTLVWDTPYHTVWDCDFSTGKIGWFLGGQLNVSVNCLDQHVRKSPESVALIWERDEPGTEVRITYRELLETTCRLANTLKRHGVHRGDRVAIYMPVSPLAVAAMLACARIGAVHTVIFAGFSAESLAGRINDAKCKVVITFNQGLRGGRVVELKKIVDEAVKHCPTVQHVLVAHRTDNKVHMGDLDVPLEQEMAKEDPVCAPESMGSEDMLFMLYTSGSTGMPKGIVHTQAGYLLYAALTHKLVFDHQPGDIFGCVADIGWITGHSYVVYGPLCNGATSVLFESTPVYPNAGRYWETVERLKINQFYGAPTAVRLLLKYGDAWVKKYDRSSLRTLGSVGEPINCEAWEWLHRVVGDSRCTLVDTWWQTETGGICIAPRPSEEGAEILPAMAMRPFFGIVPVLMDEKGSVVEGSNVSGALCISQAWPGMARTIYGDHQRFVDAYFKAYPGYYFTGDGAYRTEGGYYQITGRMDDVINILQIVGFFREAIRNSGDLLEH

SEQ ID NO: 24009 - protein, 568 aa, Homo sapiens
  REGION 1..568: note = ENSP00000439304
MRRRKERQPWDRFHFLHFAPHGRELLETTCRLANTLKRHGVHRGDRVAIYMPVSPLAVAAMLACARIGAVHTVIFAGFSAESLAGRINDAKCKVVITFNQGLRGGRVVELKKIVDEAVKHCPTVQHVLVAHRTDNKVHMGDLDVPLEQEMAKEDPVCAPESMGSEDMLFMLYTSGSTGMPKGIVHTQAGYLLYAALTHKLVFDHQPGDIFGCVADIGWITGHSYVVYGPLCNGATSVLFESTPVYPNAGRYWETVERLKINQFYGAPTAVRLLLKYGDAWVKKYDRSSLRTLGSVGEPINCEAWEWLHRVVGDSRCTLVDTWWQTETGGICIAPRPSEEGAEILPAMAMRPFFGIVPVLMDEKGSVVEGSNVSGALCISQAWPGMARTIYGDHQRFVDAYFKAYPGYYFTGDGAYRTEGGYYQITGRMDDVINISGHRLGTAEIEDAIADHPAVPESAVIGYPHDIKGEAAFAFIVVKDSAGDSDVVVQELKSMVATKIAKYAVPDEILVVKRLPKTRSGKVMRRLLRKIITSEAQELGDTTTLEDPSIIAEILSVYQKCKDKQAAAK

SEQ ID NO: 24010 - protein, 93 aa, Homo sapiens
  REGION 1..93: note = ENSP00000447748
MLNICYNAVDRHIENGKGDKIAIIYDSPVTNTKATFTYKEVLEQVSKLAGVLVKHGIKKGDTVVIYMPMIPQAMYTMLACARIGAIHSLIFGG

SEQ ID NO: 24011 - protein, 686 aa, Homo sapiens
  REGION 1..686: note = ENSP00000449535
MKPSWLQCRKVTSAGGLGGPLPGSSPARGAGAALRALVVPGPRGGLGGRGCRALSSGSGSEYKTHFAASVTDPERFWGKAAEQISWYKPWTKTLENKHSPSTRWFVEGMLNICYNAVDRHIENGKGDKIAIIYDSPVTNTKATFTYKEVLEQVSKLAGVLVKHGIKKGDTVVIYMPMIPQAMYTMLACARIGAIHSLIFGGFASKELSSRIDHVKPKVVVTASFGIEPGRRVEYVPLVEEALKIGQHKPDKILIYNRPNMEAVPLAPGRDLDWDEEMAKAQSHDCVPVLSEHPLYILYTSGTTGLPKGVIRPTGGYAVMLHWSMSSIYGLQPGEVWWAASDLGWVVGHSYICYGPLLHGNTTVLYEGKPVGTPDAGAYFRVLAEHGVAALFTAPTAIRAIRQQDPGAALGKQYSLTRFKTLFVAGERCDVETLEWSKNVFRVPVLDHWWQTETGSPITASCVGLGNSKTPPPGQAGKSVPGYNVMILDDNMQKLKARCLGNIVVKLPLPPGAFSGLWKNQEAFKHLYFEKFPGYYDTMDAGYMDEEGYLYVMSRVDDVINVAGHRISAGAIEESILSHGTVADCAVVGKEDPLKGHVPLALCVLRKDINATEEQVLEEIVKHVRQNIGPVAAFRNAVFVKQLPKTRSGKIPRSALSAIVNGKPYKITSTIEDPSIFGHVEEMLKQA

SEQ ID NO: 24012 - protein, 685 aa, Homo sapiens
  REGION 1..685: note = ENSP00000261206
MKPSWLQCRKVTSAGGLGGPLPGSSPARGAGAALRALVVPGPRGGLGGRGCRALSSGSGSEYKTHFAASVTDPERFWGKAAEQISWYKPWTKTLENKHSPSTRFVEGMLNICYNAVDRHIENGKGDKIAIIYDSPVTNTKATFTYKEVLEQVSKLAGVLVKHGIKKGDTVVIYMPMIPQAMYTMLACARIGAIHSLIFGGFASKELSSRIDHVKPKVVVTASFGIEPGRRVEYVPLVEEALKIGQHKPDKILIYNRPNMEAVPLAPGRDLDWDEEMAKAQSHDCVPVLSEHPLYILYTSGTTGLPKGVIRPTGGYAVMLHWSMSSIYGLQPGEVWWAASDLGWVVGHSYICYGPLLHGNTTVLYEGKPVGTPDAGAYFRVLAEHGVAALFTAPTAIRAIRQQDPGAALGKQYSLTRFKTLFVAGERCDVETLEWSKNVFRVPVLDHWWQTETGSPITASCVGLGNSKTPPPGQAGKSVPGYNVMILDDNMQKLKARCLGNIVVKLPLPPGAFSGLWKNQEAFKHLYFEKFPGYYDTMDAGYMDEEGYLYVMSRVDDVINVAGHRISAGAIEESILSHGTVADCAVVGKEDPLKGHVPLALCVLRKDINATEEQVLEEIVKHVRQNIGPVAAFRNAVFVKQLPKTRSGKIPRSALSAIVNGKPYKITSTIEDPSIFGHVEEMLKQA

SEQ ID NO: 24013 - protein, 75 aa, Homo sapiens
  REGION 1..75: note = ENSP00000449507
  VARIANT 1: note = Any amino acid
XLAEHGVAALFTAPTAIRAIRQQDPGAALGKQYSLTRFKTLFVAGERCDVETLEWSKNVFRVPVLDHWWQTGIKH

SEQ ID NO: 24014 - protein, 375 aa, Homo sapiens
  REGION 1..375: note = ENSP00000349960
MDDDIAALVVDNGSGMCKAGFAGDDAPRAVFPSIVGRPRHQGVMVGMGQKDSYVGDEAQSKRGILTLKYPIEHGIVTNWDDMEKIWHHTFYNELRVAPEEHPVLLTEAPLNPKANREKMTQIMFETFNTPAMYVAIQAVLSLYASGRTTGIVMDSGDGVTHTVPIYEGYALPHAILRLDLAGRDLTDYLMKILTERGYSFTTTAEREIVRDIKEKLCYVALDFEQEMATAASSSSLEKSYELPDGQVITIGNERFRCPEALFQPSFLGMESCGIHETTFNSIMKCDVDIRKDLYANTVLSGGTTMYPGIADRMQKEITALAPSTMKIKIIAPPERKYSVWIGGSILASLSTFQQMWISKQEYDESGPSIVHRKCF

SEQ ID NO: 24015 - protein, 125 aa, Homo sapiens
  REGION 1..125: note = ENSP00000409264
MDDDIAALVVDNGSGMCKAGFAGDDAPRAVFPSIVGRPRHQGVMVGMGQKDSYVGDEAQSKRGILTLKYPIEHGIVTNWDDMEKIWHHTFYNELRVAPEEHPVLLTEAPLNPKANREKMTQDSLL

SEQ ID NO: 24016 - protein, 163 aa, Homo sapiens
  REGION 1..163: note = ENSP00000407473
MDDDIAALVVDNGSGMCKAGFAGDDAPRAVFPSIVGRPRHQGVMVGMGQKDSYVGDEAQSKRGILTLKYPIEHGIVTNWDDMEKIWHHTFYNELRVAPEEHPVLLTEAPLNPKANREKMTQIMFETFNTPAMYVAIQAVLSLYASGRTTGIVMDSGDGVTHTV

SEQ ID NO: 24017 - protein, 102 aa, Homo sapiens
  REGION 1..102: note = ENSP00000393951
MDDDIAALVVDNGSGMCKAGFAGDDAPRAVFPSIVGRPRHQGVMVGMGQKDSYVGDEAQSKRGILTLKYPIEHGIVTNWDDMEKIWHHTFYNELRVAPEEHP

SEQ ID NO: 24018 - protein, 99 aa, Homo sapiens
  REGION 1..99: note = ENSP00000399487
MLTMDDDIAALVVDNGSGMCKAGFAGDDAPRAVFPSIVGRPRHQGVMVGMGQKDSYVGDEAQSKRGILTLKYPIEHGIVTNWDDMEKIWHHTFYNELRV

SEQ ID NO: 24019 - protein, 80 aa, Homo sapiens
  REGION 1..80: note = ENSP00000401032
MDDDIAALVVDNGSGMCKAGFAGDDAPRAVFPSIVGRPRHQGVMVGMGQKDSYVGDEAQSKRGILTLKYPIEHGIVTNWD

SEQ ID NO: 24020 - protein, 376 aa, Homo sapiens
  REGION 1..376: note = ENSP00000416706
MTDNELSALVVDNGSGMCKAGFGGDDAPRAVFPSMIGRPRHQGVMVGMGQKDCYVGDEAQSKRGVLTLKYPIEHGVVTNWDDMEKIWYHTFYNELRVAPDEHPILLTEAPLNPKINREKMTQIMFEAFNTPAMYVAIQAVLSLYASGRTTGIVMDSGDGVTHIVPIYEGYALPHAILRLDLAGRDLTDYLMKILTERGYNFTTTAEREIVRDVKEKLCYVALDFEQEMVRAAASSSPERSYELPDGQVITIGNERFRCPEAIFQPSFLGIESSGIHETTFNSIMKCDVDIRKDLYANTVLSGGSTMYPGIADRMQKEIITLAPSTMKIKIIAPPERKYSVWIGGSILASLSTFQQMWISKQEYDEAGPPIVHRKCF

SEQ ID NO: 24021 - protein, 377 aa, Homo sapiens
  REGION 1..377: note = ENSP00000290378
MCDDEETTALVCDNGSGLVKAGFAGDDAPRAVFPSIVGRPRHQGVMVGMGQKDSYVGDEAQSKRGILTLKYPIEHGIITNWDDMEKIWHHTFYNELRVAPEEHPTLLTEAPLNPKANREKMTQIMFETFNVPAMYVAIQAVLSLYASGRTTGIVLDSGDGVTHNVPIYEGYALPHAIMRLDLAGRDLTDYLMKILTERGYSFVTTAEREIVRDIKEKLCYVALDFENEMATAASSSSLEKSYELPDGQVITIGNERFRCPETLFQPSFIGMESAGIHETTYNSIMKCDIDIRKDLYANNVLSGGTTMYPGIADRMQKEITALAPSTMKIKIIAPPERKYSVWIGGSILASLSTFQQMWISKQEYDEAGPSIVHRKCF

SEQ ID NO: 24022 - protein, 426 aa, Homo sapiens
  REGION 1..426: note = ENSP00000160382
MSGGVYGGDEVGALVFDIGSFSVRAGYAGEDCPKADFPTTVGLLAAEEGGGLELEGDKEKKGKIFHIDTNALHVPRDGAEVMSPLKNGMIEDWECFRAILDHTYSKHVKSEPNLHPVLMSEAPWNTRAKREKLTELMFEQYNIPAFFLCKTAVLTAFANGRSTGLVLDSGATHTTAIPVHDGYVLQQGIVKSPLAGDFISMQCRELFQEMAIDIIPPYMIAAKEPVREGAPPNWKKKEKLPQVSKSWHNYMCNEVIQDFQASVLQVSDSPYDEQVAAQMPTVHYEMPNGYNTDYGAERLRIPEGLFDPSNVKGLSGNTMLGVGHVVTTSIGMCDIDIRPGLYGSVIVTGGNTLLQGFTDRLNRELSQKTPPSMRLKLIASNSTMERKFSPWIGGSILASLGTFQQMWISKQEYEEGGKQCVERKCP

SEQ ID NO: 24023 - protein, 66 aa, Homo sapiens
  REGION 1..66: note = ENSP00000420151
MSPLKNGMIEDWECFRAILDHTYSKHVKSEPNLHPVLMSEAPWNTRAKREKLTELMFEQYNIPAFF

SEQ ID NO: 24024 - protein, 894 aa, Homo sapiens
  REGION 1..894: note = ENSP00000355537
MNQIEPGVQYNYVYDEDEYMIQEEEWDRDLLLDPAWEKQQRKTFTAWCNSHLRKAGTQIENIEEDFRNGLKLMLLLEVISGERLPKPDRGKMRFHKIANVNKALDYIASKGVKLVSIGAEEIVDGNVKMTLGMIWTIILRFAIQDISVEETSAKEGLLLWCQRKTAPYRNVNIQNFHTSWKDGLGLCALIHRHRPDLIDYSKLNKDDPIGNINLAMEIAEKHLDIPKMLDAEDIVNTPKPDERAIMTYVSCFYHAFAGAEQAETAANRICKVLAVNQENERLMEEYERLASELLEWIRRTIPWLENRTPEKTMQAMQKKLEDFRDYRRKHKPPKVQEKCQLEINFNTLQTKLRISNRPAFMPSEGKMVSDIAGAWQRLEQAEKGYEEWLLNEIRRLERLEHLAEKFRQKASTHETWAYGKEQILLQKDYESASLTEVRALLRKHEAFESDLAAHQDRVEQIAAIAQELNELDYHDAVNVNDRCQKICDQWDRLGTLTQKRREALERMEKLLETIDQLHLEFAKRAAPFNNWMEGAMEDLQDMFIVHSIEEIQSLITAHEQFKATLPEADGERQSIMAIQNEVEKVIQSYNIRISSSNPYSTVTMDELRTKWDKVKQLVPIRDQSLQEELARQHANERLRRQFAAQANAIGPWIQNKMEEIARSSIQITGALEDQMNQLKQYEHNIINYKNNIDKLEGDHQLIQEALVFDNKHTNYTMEHIRVGWELLLTTIARTINEVETQILTRDAKGITQEQMNEFRASFNHFDRRKNGLMDHEDFRACLISMGYDLGEAEFARIMTLVDPNGQGTVTFQSFIDFMTRETADTDTAEQVIASFRILASDKPYILAEELRRELPPDQAQYCIKRMPAYSGPGSVPGALDYAAFSSALYGESDL

SEQ ID NO: 24025 - protein, 686 aa, Homo sapiens
  REGION 1..686: note = ENSP00000438384
MTYVSCFYHAFAGAEQVRQSLKAHSALWKDPPPESSTCSYQEMRRSSVNSSAMAETAANRICKVLAVNQENERLMEEYERLASELLEWIRRTIPWLENRTPEKTMQAMQKKLEDFRDYRRKHKPPKVQEKCQLEINFNTLQTKLRISNRPAFMPSEGKMVSDIAGAWQRLEQAEKGYEEWLLNEIRRLERLEHLAEKFRQKASTHETWAYGKEQILLQKDYESASLTEVRALLRKHEAFESDLAAHQDRVEQIAAIAQELNELDYHDAVNVNDRCQKICDQWDRLGTLTQKRREALERMEKLLETIDQLHLEFAKRAAPFNNWMEGAMEDLQDMFIVHSIEEIQSLITAHEQFKATLPEADGERQSIMAIQNEVEKVIQSYNIRISSSNPYSTVTMDELRTKWDKVKQLVPIRDQSLQEELARQHANERLRRQFAAQANAIGPWIQNKMEEIARSSIQITGALEDQMNQLKQYEHNIINYKNNIDKLEGDHQLIQEALVFDNKHTNYTMEHIRVGWELLLTTIARTINEVETQILTRDAKGITQEQMNEFRASFNHFDRRKNGLMDHEDFRACLISMGYDLGEAEFARIMTLVDPNGQGTVTFQSFIDFMTRETADTDTAEQVIASFRILASDKPYILAEELRRELPPDQAQYCIKRMPAYSGPGSVPGALDYAAFSSALYGESDL

SEQ ID NO: 24026 - protein, 894 aa, Homo sapiens
  REGION 1..894: note = ENSP00000443495
MNQIEPGVQYNYVYDEDEYMIQEEEWDRDLLLDPAWEKQQRKTFTAWCNSHLRKAGTQIENIEEDFRNGLKLMLLLEVISGERLPKPDRGKMRFHKIANVNKALDYIASKGVKLVSIGAEEIVDGNVKMTLGMIWTIILRFAIQDISVEETSAKEGLLLWCQRKTAPYRNVNIQNFHTSWKDGLGLCALIHRHRPDLIDYSKLNKDDPIGNINLAMEIAEKHLDIPKMLDAEDLVYTARPDERAIMTYVSCYYHAFAGAQKAETAANRICKVLAVNQENERLMEEYERLASELLEWIRRTIPWLENRTPEKTMQAMQKKLEDFRDYRRKHKPPKVQEKCQLEINFNTLQTKLRISNRPAFMPSEGKMVSDIAGAWQRLEQAEKGYEEWLLNEIRRLERLEHLAEKFRQKASTHETWAYGKEQILLQKDYESASLTEVRALLRKHEAFESDLAAHQDRVEQIAAIAQELNELDYHDAVNVNDRCQKICDQWDRLGTLTQKRREALERMEKLLETIDQLHLEFAKRAAPFNNWMEGAMEDLQDMFIVHSIEEIQSLITAHEQFKATLPEADGERQSIMAIQNEVEKVIQSYNIRISSSNPYSTVTMDELRTKWDKVKQLVPIRDQSLQEELARQHANERLRRQFAAQANAIGPWIQNKMEEIARSSIQITGALEDQMNQLKQYEHNIINYKNNIDKLEGDHQLIQEALVFDNKHTNYTMEHIRVGWELLLTTIARTINEVETQILTRDAKGITQEQMNEFRASFNHFDRRKNGLMDHEDFRACLISMGYDLGEAEFARIMTLVDPNGQGTVTFQSFIDFMTRETADTDTAEQVIASFRILASDKPYILAEELRRELPPDQAQYCIKRMPAYSGPGSVPGALDYAAFSSALYGESDL

SEQ ID NO: 24027 - protein, 348 aa, Homo sapiens
  REGION 1..348: note = ENSP00000367007
MAGSLPPCVVDCGTGYTKLGYAGNTEPQFIIPSCIAIRESAKVVDQAQRRVLRGVDDLDFFIGDEAIDKPTYATKWPIRHGIIEDWDLMERFMEQVVFKYLRAEPEDHYFLMTEPPLNTPENREYLAEIMFESFNVPGLYIAVQAVLALAASWTSRQVGERTLTGIVIDSGDGVTHVIPVAEGYVIGSCIKHIPIAGRDITYFIQQLLREREVGIPPEQSLETAKAIKEKYCYICPDIVKEFAKYDVDPRKWIKQYTGINAINQKKFVIDVGYERFLGPEIFFHPEFANPDFMESISDVVDEVIQNCPIDVRRPLYKPEFFQVCHTKKDYEEYGPSICRHNPVFGVMS

SEQ ID NO: 24028 - protein, 418 aa, Homo sapiens
  REGION 1..418: note = ENSP00000256001
MAGSLPPCVVDCGTGYTKLGYAGNTEPQFIIPSCIAIRESAKVVDQAQRRVLRGVDDLDFFIGDEAIDKPTYATKWPIRHGIIEDWDLMERFMEQVVFKYLRAEPEDHYFLMTEPPLNTPENREYLAEIMFESFNVPGLYIAVQAVLALAASWTSRQVGERTLTGIVIDSGDGVTHVIPVAEGYVIGSCIKHIPIAGRDITYFIQQLLREREVGIPPEQSLETAKAIKEKYCYICPDIVKEFAKYDVDPRKWIKQYTGINAINQKKFVIDVGYERFLGPEIFFHPEFANPDFMESISDVVDEVIQNCPIDVRRPLYKNVVLSGGSTMFRDFGRRLQRDLKRVVDARLRLSEELSGGRIKPKPVEVQVVTHHMQRYAVWFGGSMLASTPEFFQVCHTKKDYEEYGPSICRHNPVFGVMS

SEQ ID NO: 24029 - protein, 330 aa, Homo sapiens
  REGION 1..330: note = ENSP00000380452
MERFMEQVVFKYLRAEPEDHYFLMTEPPLNTPENREYLAEIMFESFNVPGLYIAVQAVLALAASWTSRQVGERTLTGIVIDSGDGVTHVIPVAEGYVIGSCIKHIPIAGRDITYFIQQLLREREVGIPPEQSLETAKAIKEKYCYICPDIVKEFAKYDVDPRKWIKQYTGINAINQKKFVIDVGYERFLGPEIFFHPEFANPDFMESISDVVDEVIQNCPIDVRRPLYKNVVLSGGSTMFRDFGRRLQRDLKRVVDARLRLSEELSGGRIKPKPVEVQVVTHHMQRYAVWFGGSMLASTPEFFQVCHTKKDYEEYGPSICRHNPVFGVMS

SEQ ID NO: 24030 - protein, 769 aa, Homo sapiens
  REGION 1..769: note = ENSP00000200557
MRLLRRWAFAALLLSLLPTPGLGTQGPAGALRWGGLPQLGGPGAPEVTEPSRLVRESSGGEVRKQQLDTRVRQEPPGGPPVHLAQVSFVIPAFNSNFTLDLELNHHLLSSQYVERHFSREGTTQHSTGAGDHCYYQGKLRGNPHSFAALSTCQGLHGVFSDGNLTYIVEPQEVAGPWGAPQGPLPHLIYRTPLLPDPLGCREPGCLFAVPAQSAPPNRPRLRRKRQVRRGHPTVHSETKYVELIVINDHQLFEQMRQSVVLTSNFAKSVVNLADVIYKEQLNTRIVLVAMETWADGDKIQVQDDLLETLARLMVYRREGLPEPSDATHLFSGRTFQSTSSGAAYVGGICSLSHGGGVNEYGNMGAMAVTLAQTLGQNLGMMWNKHRSSAGDCKCPDIWLGCIMEDTGFYLPRKFSRCSIDEYNQFLQEGGGSCLFNKPLKLLDPPECGNGFVEAGEECDCGSVQECSRAGGNCCKKCTLTHDAMCSDGLCCRRCKYEPRGVSCREAVNECDIAETCTGDSSQCPPNLHKLDGYYCDHEQGRCYGGRCKTRDRQCQVLWGHAAADRFCYEKLNVEGTERGSCGRKGSGWVQCSKQDVLCGFLLCVNISGAPRLGDLVGDISSVTFYHQGKELDCRGGHVQLADGSDLSYVEDGTACGPNMLCLDHRCLPASAFNFSTCPGSGERRICSHHGVCSNEGKCICQPDWTGKDCSIHNPLPTSPPTGETERYKGPSGTNIIIGSIAGAVLVAAIVLGGTGWGFKNIRRGRSGGA

SEQ ID NO: 24031 - protein, 241 aa, Homo sapiens
  REGION 1..241: note = ENSP00000347856
MRLLRRWAFAALLLSLLPTPGLGTQGPAGALRWGGLPQLGGPGAPEVTEPSRLVRESSGGEVRKQQLDTRVRQEPPGGPPVHLAQVSFVIPAFNSNFTLDLELNHHLLSSQYVERHFSREGTTQHSTGAGDHCYYQGKLRGNPHSFAALSTCQGLHGVFSDGNLTYIVEPQEVAGPWGAPQGPLPHLIYRTPLLPDPLGCREPGCLFAVPAQSAPPNRPRLRRKRSAGATLQCTVKPSMWS

SEQ ID NO: 24032 - protein, 569 aa, Homo sapiens
  REGION 1..569: note = ENSP00000443773
MQGTRLPVCCACPVGSSKPAEAEKEKVRRGHPTVHSETKYVELIVINDHQLFEQMRQSVVLTSNFAKSVVNLADVIYKEQLNTRIVLVAMETWADGDKIQVQDDLLETLARLMVYRREGLPEPSDATHLFSGRTFQSTSSGAAYVGGICSLSHGGGVNEYGNMGAMAVTLAQTLGQNLGMMWNKHRSSAGDCKCPDIWLGCIMEDTGFYLPRKFSRCSIDEYNQFLQEGGGSCLFNKPLKLLDPPECGNGFVEAGEECDCGSVQECSRAGGNCCKKCTLTHDAMCSDGLCCRRCKYEPRGVSCREAVNECDIAETCTGDSSQCPPNLHKLDGYYCDHEQGRCYGGRCKTRDRQCQVLWGHAAADRFCYEKLNVEGTERGSCGRKGSGWVQCSKQDVLCGFLLCVNISGAPRLGDLVGDISSVTFYHQGKELDCRGGHVQLADGSDLSYVEDGTACGPNMLCLDHRCLPASAFNFSTCPGSGERRICSHHGVCSNEGKCICQPDWTGKDCSIHNPLPTSPPTGETERYKGPSGTNIIIGSIAGAVLVAAIVLGGTGWGFKNIRRGRSGGA

SEQ ID NO: 24033 - protein, 517 aa, Homo sapiens
  REGION 1..517: note = ENSP00000465537
LLSSQYVERHFSREGTTQHSTGAGDHCYYQGKLRGNPHSFAALSTCQGLHGVFSDGNLTYIVEPQEVAGPWGAPQGPLPHLIYRTPLLPDPLGCREPGCLFAVPAQSAPPNRPRLRRKRQVRRGHPTVHSETKYVELIVINDHQLFEQMRQSVVLTSNFAKSVVNLADVIYKEQLNTRIVLVAMETWADGDKIQVQDDLLETLARLMVYRREGLPEPSDATHLFSGRTFQSTSSGAAYVGGICSLSHGGGVNEYGNMGAMAVTLAQTLGQNLGMMWNKHRSSAGDCKCPDIWLGCIMEDTGFYLPRKFSRCSIDEYNQFLQEGGGSCLFNKPLKLLDPPECGNGFVEAGEECDCGSVQECSRAGGNCCKKCTLTHDAMCSDGLCCRRCKYEPRGVSCREAVNECDIAETCTGDSSQCPPNLHKLDGYYCDHEQGRCYGGRCKTRDRQCQVLWGHAAADRFCYEKLNVEGTERGSCGRKGSGWVQCSKQPQQGRAVWLPPLCQHLWSSSARGPGGRHQ

SEQ ID NO: 24034 - protein, 909 aa, Homo sapiens
  REGION 1..909: note = ENSP00000357668
MAARPLPVSPARALLLALAGALLAPCEARGVSLWNQGRADEVVSASVGSGDLWIPVKSFDSKNHPEVLNIRLQRESKELIINLERNEGLIASSFTETHYLQDGTDVSLARNYTVILGHCYYHGHVRGYSDSAVSLSTCSGLRGLIVFENESYVLEPMKSATNRYKLFPAKKLKSVRGSCGSHHNTPNLAAKNVFPPPSQTWARRHKRETLKATKYVELVIVADNREFQRQGKDLEKVKQRLIEIANHVDKFYRPLNIRIVLVGVEVWNDMDKCSVSQDPFTSLHEFLDWRKMKLLPRKSHDNAQLVSGVYFQGTTIGMAPIMSMCTADQSGGIVMDHSDNPLGAAVTLAHELGHNFGMNHDTLDRGCSCQMAVEKGGCIMNASTGYPFPMVFSSCSRKDLETSLEKGMGVCLFNLPEVRESFGGQKCGNRFVEEGEECDCGEPEECMNRCCNATTCTLKPDAVCAHGLCCEDCQLKPAGTACRDSSNSCDLPEFCTGASPHCPANVYLHDGHSCQDVDGYCYNGICQTHEQQCVTLWGPGAKPAPGICFERVNSAGDPYGNCGKVSKSSFAKCEMRDAKCGKIQCQGGASRPVIGTNAVSIETNIPLQQGGRILCRGTHVYLGDDMPDPGLVLAGTKCADGKICLNRQCQNISVFGVHECAMQCHGRGVCNNRKNCHCEAHWAPPFCDKFGFGGSTDSGPIRQADNQGLTIGILVTILCLLAAGFVVYLKRKTLIRLLFTNKKTTIEKLRCVRPSRPPRGFQPCQAHLGHLGKGLMRKPPDSYPPKDNPRRLLQCQNVDISRPLNGLNVPQPQSTQRVLPPLHRAPRAPSVPARPLPAKPALRQAQGTCKPNPPQKPLPADPLARTTRLTHALARTPGQWETGLRLAPLRPAPQYPHQVPRSTHTAYIK

SEQ ID NO: 24035 - protein, 738 aa, Homo sapiens
  REGION 1..738: note = ENSP00000357665
MAARPLPVSPARALLLALAGALLAPCEARGVSLWNQGRADEVVSASVGSGDLWIPVKSFDSKNHPEVLNIRLQRESKELIINLERNEGLIASSFTETHYLQDGTDVSLARNYTVILGHCYYHGHVRGYSDSAVSLSTCSGLRGLIVFENESYVLEPMKSATNRYKLFPAKKLKSVRGSCGSHHNTPNLAAKNVFPPPSQTWARRHKRETLKATKYVELVIVADNREFQRQGKDLEKVKQRLIEIANHVDKFYRPLNIRIVLVGVEVWNDMDKCSVSQDPFTSLHEFLDWRKMKLLPRKSHDNAQLVSGVYFQGTTIGMAPIMSMCTADQSGGIVMDHSDNPLGAAVTLAHELGHNFGMNHDTLDRGCSCQMAVEKGGCIMNASTGYPFPMVFSSCSRKDLETSLEKGMGVCLFNLPEVRESFGGQKCGNRFVEEGEECDCGEPEECMNRCCNATTCTLKPDAVCAHGLCCEDCQLKPAGTACRDSSNSCDLPEFCTGASPHCPANVYLHDGHSCQDVDGYCYNGICQTHEQQCVTLWGPGAKPAPGICFERVNSAGDPYGNCGKVSKSSFAKCEMRDAKCGKIQCQGGASRPVIGTNAVSIETNIPLQQGGRILCRGTHVYLGDDMPDPGLVLAGTKCADGKICLNRQCQNISVFGVHECAMQCHGRGVCNNRKNCHCEAHWAPPFCDKFGFGGSTDSGPIRQAEARQEAAESNRERGQGQEPVGSQEHASTASLTLI

SEQ ID NO: 24036 - protein, 278 aa, Homo sapiens
  REGION 1..278: note = ENSP00000391268
MAARPLPVSPARALLLALAGALLAPCEARGVSLWNQGRADEVVSASVGSGDLWIPVKSFDSKNHPEVLNIRLQRESKELIINLERNEGLIASSFTETHYLQDGTDVSLARNYTGHCYYHGHVRGYSDSAVSLSTCSGLRGLIVFENESYVLEPMKSATNRYKLFPAKKLKSVRGSCGSHHNTPNLAAKNVFPPPSQTWARRHKRETLKATKYVELVIVADNREFQRQGKDLEKVKQRLIEIANHVDKFYRPLNIRIVLVGVEVWNDMDKCSVSQDPFT

SEQ ID NO: 24037 - protein, 272 aa, Homo sapiens
  REGION 1..272: note = ENSP00000428376
MPGGAGAARLCLLAFALQPLRPRAAREPGWTRGSEEGSPKLQHELIIPQWKTSESPVREKHPLKAELRVMAEGRELILDLEKNEQLFAPSYTETHYTSSGNPQTTTRKLEDHCFYHGTVRETELSSVTLSTCRGIRGLITVSSNLSYVIEPLPDSKGQHLIYRSEHLKPPPGNCGFEHSKPTTRDWALQFTQQTKKRPRRMKREDLNSMKYVELYLVADYLEFQKNRRDQDATKHKLIEIANYVDKVRPVLPILEHPDCSRGLGSVDPREHV

SEQ ID NO: 24038 - protein, 489 aa, Homo sapiens
  REGION 1..489: note = ENSP00000431027
  VARIANT 1: note = Any amino acid
XDCGEEEECNNPCCNASNCTLRPGAECAHGSCCHQCKLLAPGTLCREQARQCDLPEFCTGKSPHCPTNFYQMDGTPCEGGQAYCYNGMCLTYQEQCQQLWGPGARPAPDLCFEKVNVAGDTFGNCGKDMNGEHRKCNMRDAKCGKIQCQSSEARPLESNAVPIDTTIIMNGRQIQCRGTHVYRGPEEEGDMLDPGLVMTGTKCGYNHICFEGQCRNTSFFETEGCGKKCNGHGVCNNNQNCHCLPGWAPPFCNTPGHGGSIDSGPMPPESVGPVVAGVLVAILVLAVLMLMYYCCRQNNKLGQLKPSALPSKLRQQFSCPFRVSQNSGTGHANPTFKLQTPQGKRKVINTPEILRKPSQPPPRPPPDYLRGGSPPAPLPAHLSRAARNSPGPGSQIERTESSRRPPPSRPIPPAPNCIVSQDFSRPRPPQKALPANPVPGRRSLPRPGGASPLRPPGAGPQQSRPLAALAPKRVWKTCNLKTGDQFQSQ

SEQ ID NO: 24039 - protein, 918 aa, Homo sapiens
  REGION 1..918: note = ENSP00000257527
MPGGAGAARLCLLAFALQPLRPRAAREPGWTRGSEEGSPKLQHELIIPQWKTSESPVREKHPLKAELRVMAEGRELILDLEKNEQLFAPSYTETHYTSSGNPQTTTRKLEDHCFYHGTVRETELSSVTLSTCRGIRGLITVSSNLSYVIEPLPDSKGQHLIYRSEHLKPPPGNCGFEHSKPTTRDWALQFTQQTKKRPRRMKREDLNSMKYVELYLVADYLEFQKNRRDQDATKHKLIEIANYVDKFYRSLNIRIALVGLEVWTHGNMCEVSENPYSTLWSFLSWRRKLLAQKYHDNAQLITGMSFHGTTIGLAPLMAMCSVYQSGGVNMDHSENAIGVAATMAHEMGHNFGMTHDSADCCSASAADGGCIMAAATGHPFPKVFNGCNRRELDRYLQSGGGMCLSNMPDTRMLYGGRRCGNGYLEDGEECDCGEEEECNNPCCNASNCTLRPGAECAHGSCCHQCKLLAPGTLCREQARQCDLPEFCTGKSPHCPTNFYQMDGTPCEGGQAYCYNGMCLTYQEQCQQLWGPGARPAPDLCFEKVNVAGDTFGNCGKDMNGEHRKCNMRDAKCGKIQCQSSEARPLESNAVPIDTTIIMNGRQIQCRGTHVYRGPEEEGDMLDPGLVMTGTKCGYNHICFEGQCRNTSFFETEGCGKKCNGHGVCNNNQNCHCLPGWAPPFCNTPGHGGSIDSGPMPPESVGPVVAGVLVAILVLAVLMLMYYCCRQNNKLGQLKPSALPSKLRQQFSCPFRVSQNSGTGHANPTFKLQTPQGKRKVINTPEILRKPSQPPPRPPPDYLRGGSPPAPLPAHLSRAARNSPGPGSQIERTESSRRPPPSRPIPPAPNCIVSQDFSRPRPPQKALPANPVPGRRSLPRPGGASPLRPPGAGPQQSRPLAALAPKFPEYRSQRAGGMISSKI

SEQ ID NO: 24040 - protein, 955 aa, Homo sapiens
  REGION 1..955: note = ENSP00000428654
MPGGAGAARLCLLAFALQPLRPRAAREPGWTRGSEEGSPKLQHELIIPQWKTSESPVREKHPLKAELRVMAEGRELILDLEKNEQLFAPSYTETHYTSSGNPQTTTRKLEDHCFYHGTVRETELSSVTLSTCRGIRGLITVSSNLSYVIEPLPDSKGQHLIYRSEHLKPPPGNCGFEHSKPTTRDWALQFTQQTKKRPRRMKREDLNSMKYVELYLVADYLEFQKNRRDQDATKHKLIEIANYVDKFYRSLNIRIALVGLEVWTHGNMCEVSENPYSTLWSFLSWRRKLLAQKYHDNAQLITGMSFHGTTIGLAPLMAMCSVYQSGGVNMDHSENAIGVAATMAHEMGHNFGMTHDSADCCSASAADGGCIMAAATGHPFPKVFNGCNRRELDRYLQSGGGMCLSNMPDTRMLYGGRRCGNGYLEDGEECDCGEEEECNNPCCNASNCTLRPGAECAHGSCCHQCKLLAPGTLCREQARQCDLPEFCTGKSPHCPTNFYQMDGTPCEGGQAYCYNGMCLTYQEQCQQLWGPGARPAPDLCFEKVNVAGDTFGNCGKDMNGEHRKCNMRDAKCGKIQCQSSEARPLESNAVPIDTTIIMNGRQIQCRGTHVYRGPEEEGDMLDPGLVMTGTKCGYNHICFEGQCRNTSFFETEGCGKKCNGHGVCNNNQNCHCLPGWAPPFCNTPGHGGSIDSGPMPPESVGPVVAGVLVAILVLAVLMLMYYCCRQNNKLGQLKPSALPSKLRQQFSCPFRVSQNSGTGHANPTFKLQTPQGKRKVINTPEILRKPSQPPPRPPPDYLRGGSPPAPLPAHLSRAARNSPGPGSQIERTESSRRPPPSRPIPPAPNCIVSQDFSRPRPPQKALPANPVPGRRSLPRPGGASPLRPPGAGPQQSRPLAALAPKVSPREALKVKAGTRGLQGGRCRVEKTKQFMLLVVWTELPEQKPRAKHSCFLVPA

SEQ ID NO: 24041 - protein, 590 aa, Homo sapiens
  REGION 1..590: note = ENSP00000470501
MGPTSVLRAGLTPSCLPPPSGATNGSVSPLGRAQRVWTEPGGRGLHGATAAGPVAAACPLLAVTATAPGQPSGASTVWVREGGTAPATRMTVPLAPRTSEKCSVLNLTASLSVGNSTSGKRTGEACSLTCLAEGFNFYTERAAAVVDGTPCRPDTVDICVSGECKHVGCDRVLGSDLREDKCRVCGGDGSACETIEGVFSPASPGAGYEDVVWIPKGSVHIFIQDLNLSLSHLALKGDQESLLLEGLPGTPQPHRLPLAGTTFQLRQGPDQVQSLEALGPINASLIVMVLARTELPALRYRFNAPIARDSLPPYSWHYAPWTKCSAQCAGGSQVQAVECRNQLDSSAVAPHYCSAHSKLPKRQRACNTEPCPPDWVVGNWSLCSRSCDAGVRSRSVVCQRRVSAAEEKALDDSACPQPRPPVLEACHGPTCPPEWAALDWSECTPSCGPGLRHRVVLCKSADHRATLPPAHCSPAAKPPATMRCNLRRCPPARWVAGEWGECSAQCGVGQRQRSVRCTSHTGQASHECTEALRPPTTQQCEAKCDSPTPGDGPEECKDVNKVAYCPLVLKFQFCSRAYFRQMCCKTCHGH

SEQ ID NO: 24042 - protein, 289 aa, Homo sapiens
  REGION 1..289: note = ENSP00000469901
MAPACQILRWALALGLGLMFEVTHAFRSQDEFLSSLESYEIAFPTRVDHNGALLAFSPPPPRRQRRGTGATAESRLFYKVASPSTHFLLNLTRSSRLLAGHVSVEYWTREGLAWQRAARPHCLYAGHLQGQASSSHVAISTCGGLHGLIVADEEEYLIEPLHGGPKGSRSPEESGPHVVYKRSSLRHPHLDTACGVRDEKPWKGRPWWLRTLKPPPARPLGNETERGQPGLKRSVSRERYVETLVVADKMMVAYHGRRDVEQYVLAIMNIVRLPNFSRTRVWEAPLTSS

SEQ ID NO: 24043 - protein, 1103 aa, Homo sapiens
  REGION 1..1103: note = ENSP00000471851
MAPACQILRWALALGLGLMFEVTHAFRSQDEFLSSLESYEIAFPTRVDHNGALLAFSPPPPRRQRRGTGATAESRLFYKVASPSTHFLLNLTRSSRLLAGHVSVEYWTREGLAWQRAARPHCLYAGHLQGQASSSHVAISTCGGLHGLIVADEEEYLIEPLHGGPKGSRSPEESGPHVVYKRSSLRHPHLDTACGVRDEKPWKGRPWWLRTLKPPPARPLGNETERGQPGLKRSVSRERYVETLVVADKMMVAYHGRRDVEQYVLAIMNIVAKLFQDSSLGSTVNILVTRLILLTEDQPTLEITHHAGKSLDSFCKWQKSIVNHSGHGNAIPENGVANHDTAVLITRYDICIYKNKPCGTLGLAPVGGMCERERSCSVNEDIGLATAFTIAHEIGHTFGMNHDGVGNSCGARGQDPAKLMAAHITMKTNPFVWSSCSRDYITSFLDSGLGLCLNNRPPRQDFVYPTVAPGQAYDADEQCRFQHGVKSRQCKYGEVCSELWCLSKSNRCITNSIPAAEGTLCQTHTIDKGWCYKRVCVPFGSRPEGVDGAWGPWTPWGDCSRTCGGGVSSSSRHCDSPRPTIGGKYCLGERRRHRSCNTDDCPPGSQDFREVQCSEFDSIPFRGKFYKWKTYRGGGVKACSLTCLAEGFNFYTERAAAVVDGTPCRPDTVDICVSGECKHVGCDRVLGSDLREDKCRVCGGDGSACETIEGVFSPASPGAGYEDVVWIPKGSVHIFIQDLNLSLSHLALKGDQESLLLEGLPGTPQPHRLPLAGTTFQLRQGPDQVQSLEALGPINASLIVMVLARTELPALRYRFNAPIARDSLPPYSWHYAPWTKCSAQCAGGSQVQAVECRNQLDSSAVAPHYCSAHSKLPKRQRACNTEPCPPDWVVGNWSLCSRSCDAGVRSRSVVCQRRVSAAEEKALDDSACPQPRPPVLEACHGPTCPPEWAALDWSECTPSCGPGLRHRVVLCKSADHRATLPPAHCSPAAKPPATMRCNLRRCPPARWVAGEWGECSAQCGVGQRQRSVRCTSHTGQASHECTEALRPPTTQQCEAKCDSPTPGDGPEECKDVNKVAYCPLVLKFQFCSRAYFRQMCCKTCHGH

SEQ ID NO: 24044 - protein, 289 aa, Homo sapiens; identical to SEQ ID NO: 24042
  REGION 1..289: note = ENSP00000469559

SEQ ID NO: 24045 - protein, 126 aa, Homo sapiens
  REGION 1..126: note = ENSP00000469516
MGPTSVLRAGLTPSCLPPPSGATNGSVSPLGRAQRVWTEPGGRGLHGATAAGPVAAACPLLAVTATAPGQPSGASTVWVREGGTAPATRMTVPLAPRTSEKCSVLNLTASLSVGNSTSGKRTGEGA

SEQ ID NO: 24046 - protein, 1103 aa, Homo sapiens; identical to SEQ ID NO: 24043
  REGION 1..1103: note = ENSP00000270328

SEQ ID NO: 24047 - protein, 950 aa, Homo sapiens
  REGION 1..950: note = ENSP00000299164
MLLLGILTLAFAGRTAGGSEPEREVVVPIRLDPDINGRRYYWRGPEDSGDQGLIFQITAFQEDFYLHLTPDAQFLAPAFSTEHLGVPLQGLTGGSSDLRRCFYSGDVNAEPDSFAAVSLCGGLRGAFGYRGAEYVISPLPNASAPAAQRNSQGAHLLQRRGVPGGPSGDPTSRCGVASGWNPAILRALDPYKPRRAGFGESRSRRRSGRAKRFVSIPRYVETLVVADESMVKFHGADLEHYLLTLLATAARLYRHPSILNPINIVVVKVLLLRDRDSGPKVTGNAALTLRNFCAWQKKLNKVSDKHPEYWDTAILFTRQDLCGATTCDTLGMADVGTMCDPKRSCSVIEDDGLPSAFTTAHELGHVFNMPHDNVKVCEEVFGKLRANHMMSPTLIQIDRANPWSACSAAIITDFLDSGHGDCLLDQPSKPISLPEDLPGASYTLSQQCELAFGVGSKPCPYMQYCTKLWCTGKAKGQMVCQTRHFPWADGTSCGEGKLCLKGACVERHNLNKHRVDGSWAKWDPYGPCSRTCGGGVQLARRQCTNPTPANGGKYCEGVRVKYRSCNLEPCPSSASGKSFREEQCEAFNGYNHSTNRLTLAVAWVPKYSGVSPRDKCKLICRANGTGYFYVLAPKVVDGTLCSPDSTSVCVQGKCIKAGCDGNLGSKKRFDKCGVCGGDNKSCKKVTGLFTKPMHGYNFVVAIPAGASSIDIRQRGYKGLIGDDNYLALKNSQGKYLLNGHFVVSAVERDLVVKGSLLRYSGTGTAVESLQASRPILEPLTVEVLSVGKMTPPRVRYSFYLPKEPREDKSSHPKDPRGPSVLHNSVLSLSNQVEQPDDRPPARWVAGSWGPCSASCGSGLQKRAVDCRGSAGQRTVPACDAAHRPVETQACGEPCPTWELSAWSPCSKSCGRGFQRRSLKCVGHGGRLLARDQCNLHRKPQELDFCVLRPC

SEQ ID NO: 24048 - protein, 570 aa, Homo sapiens
  REGION 1..570: note = ENSP00000421631
MKPRARGWRGLAALWMLLAQVAEQAPACAMGPAAAAPGSPSVPRPPPPAERPGWMEKGEYDLVSAYEVDHRGDYVSHEIMHHQRRRRAVPVSEVESLHLRLKGSRHDFHMDLRTSSSLVAPGFIVQTLGKTGTKSVQTLPPEDFCFYQGSLRSHRNSSVALSTCQGLSGMIRTEEADYFLRPLPSHLSWKLGRAAQGSSPSHVLYKRSTEPHAPGASEVLVTSRTWELAHQPLHSSDLRLGLPQKQHFCGRRKKYMPQPPKEDLFILPDEYKSCLRHKRSLLRSHRNEELNVETLVVVDKKMMQNHGHENITTYVLTILNMVSALFKDGTIGGNINIAIVGLILLEDEQPGLVISHHADHTLSSFCQWQSGLMGKDGTRHDHAILLTGLDICSWKNEPCDTLGFAPISGMCSKYRSCTINEDTGLGLAFTIAHESGHNFGMIHDGEGNMCKKSEGNIMSPTLAGRNGVFSWSPCSRQYLHKFLSTAQAICLADQPKPVKEYKYPEKLPGELYDANTQCKWQFGEKAKLCMLDFKKDICKALWCHRIGRKCETKFMPAAEGTICGHDMVRS

SEQ ID NO: 24049 - protein, 1224 aa, Homo sapiens
  REGION 1..1224: note = ENSP00000274181
MKPRARGWRGLAALWMLLAQVAEQAPACAMGPAAAAPGSPSVPRPPPPAERPGWMEKGEYDLVSAYEVDHRGDYVSHEIMHHQRRRRAVPVSEVESLHLRLKGSRHDFHMDLRTSSSLVAPGFIVQTLGKTGTKSVQTLPPEDFCFYQGSLRSHRNSSVALSTCQGLSGMIRTEEADYFLRPLPSHLSWKLGRAAQGSSPSHVLYKRSTEPHAPGASEVLVTSRTWELAHQPLHSSDLRLGLPQKQHFCGRRKKYMPQPPKEDLFILPDEYKSCLRHKRSLLRSHRNEELNVETLVVVDKKMMQNHGHENITTYVLTILNMVSALFKDGTIGGNINIAIVGLILLEDEQPGLVISHHADHTLSSFCQWQSGLMGKDGTRHDHAILLTGLDICSWKNEPCDTLGFAPISGMCSKYRSCTINEDTGLGLAFTIAHESGHNFGMIHDGEGNMCKKSEGNIMSPTLAGRNGVFSWSPCSRQYLHKFLSTAQAICLADQPKPVKEYKYPEKLPGELYDANTQCKWQFGEKAKLCMLDFKKDICKALWCHRIGRKCETKFMPAAEGTICGHDMWCRGGQCVKYGDEGPKPTHGHWSDWSSWSPCSRTCGGGVSHRSRLCTNPKPSHGGKFCEGSTRTLKLCNSQKCPRDSVDFRAAQCAEHNSRRFRGRHYKWKPYTQVEDQDLCKLYCIAEGFDFFFSLSNKVKDGTPCSEDSRNVCIDGICERVGCDNVLGSDAVEDVCGVCNGNNSACTIHRGLYTKHHHTNQYYHMVTIPSGARSIRIYEMNVSTSYISVRNALRRYYLNGHWTVDWPGRYKFSGTTFDYRRSYNEPENLIATGPTNETLIVELLFQGRNPGVAWEYSMPRLGTEKQPPAQPSYTWAIVRSECSVSCGGGQMTVREGCYRDLKFQVNMSFCNPKTRPVTGLVPCKVSACPPSWSVGNWSACSRTCGGGAQSRPVQCTRRVHYDSEPVPASLCPQPAPSSRQACNSQSCPPAWSAGPWAECSHTCGKGWRKRAVACKSTNPSARAQLLPDAVCTSEPKPRMHEACLLQRCHKPKKLQWLVSAWSQCSVTCERGTQKRFLKCAEKYVSGKYRELASKKCSHLPKPSLELERACAPLPCPRHPPFAAAGPSRGSWFASPWSQCTASCGGGVQTRSVQCLAGGRPASGCLLHQKPSASLACNTHFCPIAEKKDAFCKDYFHWCYLVPQHGMCSHKFYGKQCCKTCSKSNL

SEQ ID NO: 24050 - protein, 1095 aa, Homo sapiens
  REGION 1..1095: note = ENSP00000268070
MCDGALLPPLVLPVLLLLVWGLDPGTAVGDAAADVEVVLPWRVRPDDVHLPPLPAAPGPRRRRRPRTPPAAPRARPGERALLLHLPAFGRDLYLQLRRDLRFLSRGFEVEEAGAARRRGRPAELCFYSGRVLGHPGSLVSLSACGAAGGLVGLIQLGQEQVLIQPLNNSQGPFSGREHLIRRKWSLTPSPSAEAQRPEQLCKVLTEKKKPTWGRPSRDWRERRNAIRLTSEHTVETLVVADADMVQYHGAEAAQRFILTVMNMVYNMFQHQSLGIKINIQVTKLVLLRQRPAKLSIGHHGERSLESFCHWQNEEYGGARYLGNNQVPGGKDDPPLVDAAVFVTRTDFCVHKDEPCDTVGIAYLGGVCSAKRKCVLAEDNGLNLAFTIAHELGHNLGMNHDDDHSSCAGRSHIMSGEWVKGRNPSDLSWSSCSRDDLENFLKSKVSTCLLVTDPRSQHTVRLPHKLPGMHYSANEQCQILFGMNATFCRNMEHLMCAGLWCLVEGDTSCKTKLDPPLDGTECGADKWCRAGECVSKTPIPEHVDGDWSPWGAWSMCSRTCGTGARFRQRKCDNPPPGPGGTHCPGASVEHAVCENLPCPKGLPSFRDQQCQAHDRLSPKKKGLLTAVVVDDKPCELYCSPLGKESPLLVADRVLDGTPCGPYETDLCVHGKCQKIGCDGIIGSAAKEDRCGVCSGDGKTCHLVKGDFSHARGTALKDSGKGSINSDWKIELPGEFQIAGTTVRYVRRGLWEKISAKGPTKLPLHLMVLLFHDQDYGIHYEYTVPVNRTAENQSEPEKPQDSLFIWTHSGWEGCSVQCGGGERRTIVSCTRIVNKTTTLVNDSDCPQASRPEPQVRRCNLHPCQSRWVAGPWSPCSATCEKGFQHREVTCVYQLQNGTHVATRPLYCPGPRPAAVQSCEGQDCLSIWEASEWSQCSASCGKGVWKRTVACTNSQGKCDASTRPRAEEACEDYSGCYEWKTGDWSTCSSTCGKGLQSRVVQCMHKVTGRHGSECPALSKPAPYRQCYQEVCNDRINANTITSPRLAALTYKCTRDQWTVYCRVIREKNLCQDMRWYQRCCQTCRDFYANKMRQPPPNS

SEQ ID NO: 24051 - protein, 214 aa, Homo sapiens
  REGION 1..214: note = ENSP00000456161
  VARIANT 1: note = Any amino acid
XELYCSPLGKESPLLVADRVLDGTPCGPYETDLCVHGKCQKIGCDGIIGSAAKEDRCGVCSGDGKTCHLVKGDFSHARGTGYIEAAVIPAGARRIRVVEDKPAHSFLALKDSGKGSINSDWKIELPGEFQIAGTTVRYVRRGLWEKISAKGPTKLPLHLMVLLFHDQDYGIHYEYTVPVNRTAENQSEPEKPQDSLFIWTHSGWEGCSVQCGGG

SEQ ID NO: 24052 - protein, 68 aa, Homo sapiens
  REGION 1..68: note = ENSP00000453604
MCDGALLPPLVLPVLLLLVWGLDPGTGWPHSAWAGAGANPAPQQLPGPIQWTRTSDQAQMVLDPQPFC

SEQ ID NO: 24053 - protein, 120 aa, Homo sapiens
  REGION 1..120: note = ENSP00000458005
  VARIANT 1: note = Any amino acid
XGRPAELCFYSGRVLGHPGSLVSLSACGAAGGLVGLIQLGQEQVLIQPLNNSQGPFSGREHLIRRKWSLTPSPSAEAQRPEQLCKVLTVPQCLGLTWEDLKSGGWSDLEVPHSCVWPGGG

SEQ ID NO: 24054 - protein, 62 aa, Homo sapiens
  REGION 1..62: note = ENSP00000454368
  VARIANT 1: note = Any amino acid
XQGRPSSSCLLHQKPPVLRACNTNFCPAPEKRDSAGSQLPCCDGPQAVHEEGLRFPDNHWAM

SEQ ID NO: 24055 - protein, 1221 aa, Homo sapiens
  REGION 1..1221: note = ENSP00000282849
MECALLLACAFPAAGSGPPRGLAGLGRVAKALQLCCLCCASVAAALASDSSSGASGLNDDYVFVTPVEVDSAGSYISHDILHNGRKKRSAQNARSSLHYRFSAFGQELHLELKPSAILSSHFIVQVLGKDGASETQKPEVQQCFYQGFIRNDSSSSVAVSTCAGLSGLIRTRKNEFLISPLPQLLAQEHNYSSPAGHHPHVLYKRTAEEKIQRYRGYPGSGRNYPGYSPSHIPHASQSRETEYHHRRLQKQHFCGRRKKYAPKPPTEDTYLRFDEYGSSGRPRRSAGKSQKGLNVETLVVADKKMVEKHGKGNVTTYILTVMNMVSGLFKDGTIGSDINVVVVSLILLEQEPGGLLINHHADQSLNSFCQWQSALIGKNGKRHDHAILLTGFDICSWKNEPCDTLGFAPISGMCSKYRSCTINEDTGLGLAFTIAHESGHNFGMIHDGEGNPCRKAEGNIMSPTLTGNNGVFSWSSCSRQYLKKFLSTPQAGCLVDEPKQAGQYKYPDKLPGQIYDADTQCKWQFGAKAKLCSLGFVKDICKSLWCHRVGHRCETKFMPAAEGTVCGLSMWCRQGQCVKFGELGPRPIHGQWSAWSKWSECSRTCGGGVKFQERHCNNPKPQYGGLFCPGSSRIYQLCNINPCNENSLDFRAQQCAEYNSKPFRGWFYQWKPYTKVEEEDRCKLYCKAENFEFFFAMSGKVKDGTPCSPNKNDVCIDGVCELVGCDHELGSKAVSDACGVCKGDNSTCKFYKGLYLNQHKANEYYPVVLIPAGARSIEIQELQVSSSYLAVRSLSQKYYLTGGWSIDWPGEFPFAGTTFEYQRSFNRPERLYAPGPTNETLVFEILMQGKNPGIAWKYALPKVMNGTPPATKRPAYTWSIVQSECSVSCGGGYINVKAICLRDQNTQVNSSFCSAKTKPVTEPKICNAFSCPAYWMPGEWSTCSKACAGGQQSRKIQCVQKKPFQKEEAVLHSLCPVSTPTQVQACNSHACPPQWSLGPWSQCSKTCGRGVRKRELLCKGSAAETLPESQCTSLPRPELQEGCVLGRCPKNSRLQWVASSWSECSATCGLGVRKREMKCSEKGFQGKLITFPERRCRNIKKPNLDLEETCNRRACPAHPVYNMVAGWYSLPWQQCTVTCGGGVQTRSVHCVQQGRPSSSCLLHQKPPVLRACNTNFCPAPEKREDPSCVDFFNWCHLVPQHGVCNHKFYGKQCCKSCTRKI

SEQ ID NO: 24056 - protein, 274 aa, Homo sapiens
  REGION 1..274: note = ENSP00000392540
MECALLLACAFPAAGSGPPRGLAGLGRVAKALQLCCLCCASVAAALASDSSSGASGLNDDYVFVTPVEVDSAGSYISHDILHNGRKKRSAQNARSSLHYRFSAFGQELHLELKPSAILSSHFIVQVLGKDGASETQKPEVQQCFYQGFIRNDSSSSVAVSTCAGLSGLIRTRKNEFLISPLPQLLAQEHNYSSPAGHHPHVLYKRTAEEKIQRYRGYPGSGRNYPGYSPSHIPHASQSRETEYHHRRLQKQHFCGRRKKCICSQASHRGHLSKV

SEQ ID NO: 24057 - protein, 185 aa, Homo sapiens
  REGION 1..185: note = ENSP00000457395
  VARIANT 1: note = Any amino acid
XVDSAGSYISHDILHNGRKKRSAQNARSSLHYRFSAFGQELHLELKPSAILSSHFIVQVLGKDGASETQKPEVQQCFYQGFIRNDSSSSVAVSTCAGLLLAQEHNYSSPAGHHPHVLYKRTAEEKIQRYRGYPGSGRNYPGYSPSHIPHASQSRETEYHHRRLQKQHFCGRRKKCICSQASHRGH

SEQ ID NO: 24058 - protein, 1211 aa, Homo sapiens
  REGION 1..1211: note = ENSP00000251582
MDPPAGAARRLLCPALLLLLLLLPPPLLPPPPPPANARLAAAADPPGGPLGHGAERILAVPVRTDAQGRLVSHVVSAATSRAGVRARRAAPVRTPSFPGGNEEEPGSHLFYNVTVFGRDLHLRLRPNARLVAPGATMEWQGEKGTTRVEPLLGSCLYVGDVAGLAEASSVALSNCDGLAGLIRMEEEEFFIEPLEKGLAAQEAEQGRVHVVYRRPPTSPPLGGPQALDTGASLDSLDSLSRALGVLEEHANSSRRRARRHAADDDYNIEVLLGVDDSVVQFHGKEHVQKYLLTLMNIVNEIYHDESLGAHINVVLVRIILLSYGKSMSLIEIGNPSQSLENVCRWAYLQQKPDTGHDEYHDHAIFLTRQDFGPSGMQGYAPVTGMCHPVRSCTLNHEDGFSSAFVVAHETGHVLGMEHDGQGNRCGDEVRLGSIMAPLVQAAFHRFHWSRCSQQELSRYLHSYDCLLDDPFAHDWPALPQLPGLHYSMNEQCRFDFGLGYMMCTAFRTFDPCKQLWCSHPDNPYFCKTKKGPPLDGTMCAPGKHCFKGHCIWLTPDILKRDGSWGAWSPFGSCSRTCGTGVKFRTRQCDNPHPANGGRTCSGLAYDFQLCSRQDCPDSLADFREEQCRQWDLYFEHGDAQHHWLPHEHRDAKERCHLYCESRETGEVVSMKRMVHDGTRCSYKDAFSLCVRGDCRKVGCDGVIGSSKQEDKCGVCGGDNSHCKVVKGTFTRSPKKHGYIKMFEIPAGARHLLIQEVDATSHHLAVKNLETGKFILNEENDVDASSKTFIAMGVEWEYRDEDGRETLQTMGPLHGTITVLVIPVGDTRVSLTYKYMIHEDSLNVDDNNVLEEDSVVYEWALKKWSPCSKPCGGGSQFTKYGCRRRLDHKMVHRGFCAALSKPKAIRRACNPQECSQPVWVTGEWEPCSQTCGRTGMQVRSVRCIQPLHDNTTRSVHAKHCNDARPESRRACSRELCPGRWRAGPWSQCSVTCGNGTQERPVLCRTADDSFGICQEERPETARTCRLGPCPRNISDPSKKSYVVQWLSRPDPDSPIRKISSKGHCQGDKSIFCRMEVLSRYCSIPGYNKLCCKSCNLYNNLTNVEGRIEPPPGKHNDIDVFMPTLPVPTVAMEVRPSPSTPLEVPLNASSTNATEDHPETNAVDEPYKIHGLEDEVQPPNLIPRRPSPYEKTRNQRIQELIDEMRKKEMLGKF

SEQ ID NO: 24059 - protein, 106 aa, Homo sapiens
  REGION 1..106: note = ENSP00000489888
VTCGNGTQERPVLCRTADDSFGICQEERPETARTCRLGPCPRNISDPSKKSYVVQWLSRPDPDSPIRKISSSNRPVYNSASALQCMPCALWSLPWAPLLSVYGKLP

SEQ ID NO: 24060 - protein, 566 aa, Homo sapiens
  REGION 1..566: note = ENSP00000274609
MDPPAGAARRLLCPALLLLLLLLPPPLLPPPPPPANARLAAAADPPGGPLGHGAERILAVPVRTDAQGRLVSHVVSAATSRAGVRARRAAPVRTPSFPGGNEEEPGSHLFYNVTVFGRDLHLRLRPNARLVAPGATMEWQGEKGTTRVEPLLGSCLYVGDVAGLAEASSVALSNCDGLAGLIRMEEEEFFIEPLEKGLAAQEAEQGRVHVVYRRPPTSPPLGGPQALDTGASLDSLDSLSRALGVLEEHANSSRRRARRHAADDDYNIEVLLGVDDSVVQFHGKEHVQKYLLTLMNIVNEIYHDESLGAHINVVLVRIILLSYGKSMSLIEIGNPSQSLENVCRWAYLQQKPDTGHDEYHDHAIFLTRQDFGPSGMQGYAPVTGMCHPVRSCTLNHEDGFSSAFVVAHETGHVLGMEHDGQGNRCGDEVRLGSIMAPLVQAAFHRFHWSRCSQQELSRYLHSYDCLLDDPFAHDWPALPQLPGLHYSMNEQCRFDFGLGYMMCTAFRTFDPCKQLWCSHPDNPYFCKTKKGPPLDGTMCAPGKFRPGAVAHACYPSTLGGQGRWIA

SEQ ID NO: 24061 - protein, 1211 aa, Homo sapiens; identical to SEQ ID NO: 24058
  REGION 1..1211: note = ENSP00000492346

SEQ ID NO: 24062 - protein, 106 aa, Homo sapiens; identical to SEQ ID NO: 24059
  REGION 1..106: note = ENSP00000491140

SEQ ID NO: 24063 - protein, 566 aa, Homo sapiens; identical to SEQ ID NO: 24060
  REGION 1..566: note = ENSP00000492365

SEQ ID NO: 24064 - protein, 1117 aa, Homo sapiens
  REGION 1..1117: note = ENSP00000370443
MEILWKTLTWILSLIMASSEFHSDHRLSYSSQEEFLTYLEHYQLTIPIRVDQNGAFLSFTVKNDKHSRRRRSMDPIDPQQAVSKLFFKLSAYGKHFHLNLTLNTDFVSKHFTVEYWGKDGPQWKHDFLDNCHYTGYLQDQRSTTKVALSNCVGLHGVIATEDEEYFIEPLKNTTEDSKHFSYENGHPHVIYKKSALQQRHLYDHSHCGVSDFTRSGKPWWLNDTSTVSYSLPINNTHIHHRQKRSVSIERFVETLVVADKMMVGYHGRKDIEHYILSVMNIVAKLYRDSSLGNVVNIIVARLIVLTEDQPNLEINHHADKSLDSFCKWQKSILSHQSDGNTIPENGIAHHDNAVLITRYDICTYKNKPCGTLGLASVAGMCEPERSCSINEDIGLGSAFTIAHEIGHNFGMNHDGIGNSCGTKGHEAAKLMAAHITANTNPFSWSACSRDYITSFLDSGRGTCLDNEPPKRDFLYPAVAPGQVYDADEQCRFQYGATSRQCKYGEVCRELWCLSKSNRCVTNSIPAAEGTLCQTGNIEKGWCYQGDCVPFGTWPQSIDGGWGPWSLWGECSRTCGGGVSSSLRHCDSPAPSGGGKYCLGERKRYRSCNTDPCPLGSRDFREKQCADFDNMPFRGKYYNWKPYTGGGVKPCALNCLAEGYNFYTERAPAVIDGTQCNADSLDICINGECKHVGCDNILGSDAREDRCRVCGGDGSTCDAIEGFFNDSLPRGGYMEVVQIPRGSVHIEVREVAMSKNYIALKSEGDDYYINGAWTIDWPRKFDVAGTAFHYKRPTDEPESLEALGPTSENLIVMVLLQEQNLGIRYKFNVPITRTGSGDNEVGFTWNHQPWSECSATCAGGVQRQEVVCKRLDDNSIVQNNYCDPDSKPPENQRACNTEPCPPEWFIGDWLECSKTCDGGMRTRAVLCIRKIGPSEEETLDYSGCLTHRPVEKEPCNNQSCPPQWVALDWSECTPKCGPGFKHRIVLCKSSDLSKTFPAAQCPEESKPPVRIRCSLGRCPPPRWVTGDWGQCSAQCGLGQQMRTVQCLSYTGQASSDCLETVRPPSMQQCESKCDSTPISNTEECKDVNKVAYCPLVLKFKFCSRAYFRQMCCKTCQGH

SEQ ID NO: 24065 - protein, 292 aa, Homo sapiens
  REGION 1..292: note = ENSP00000424377
MEILWKTLTWILSLIMASSEFHSDHRLSYSSQEEFLTYLEHYQLTIPIRVDQNGAFLSFTVKNDKHSRRRRSMDPIDPQQAVSKLFFKLSAYGKHFHLNLTLNTDFVSKHFTVEYWGKDGPQWKHDFLDNCHYTGYLQDQRSTTKVALSNCVGLHGVIATEDEEYFIEPLKNTTEDSKHFSYENGHPHVIYKKSALQQRHLYDHSHCGVSDFTRSGKPWWLNDTSTVSYSLPINNTHIHHRQKRSVSIERFVETLVVADKMMVGYHGRKDIEHYILSVMNIVRLPNFTVIPA

SEQ ID NO: 24066 - protein, 1686 aa, Homo sapiens
  REGION 1..1686: note = ENSP00000373472
MPGGPSPRSPAPLLRPLLLLLCALAPGAPGPAPGRATEGRAALDIVHPVRVDAGGSFLSYELWPRALRKRDVSVRRDAPAFYELQYRGRELRFNLTANQHLLAPGFVSETRRRGGLGRAHIRAHTPACHLLGEVQDPELEGGLAAISACDGLKGVFQLSNEDYFIEPLDSAPARPGHAQPHVVYKRQAPERLAQRGDSSAPSTCGVQVYPELESRRERWEQRQQWRRPRLRRLHQRSVSKEKWVETLVVADAKMVEYHGQPQVESYVLTIMNMVAGLFHDPSIGNPIHITIVRLVLLEDEEEDLKITHHADNTLKSFCKWQKSINMKGDAHPLHHDTAILLTRKDLCAAMNRPCETLGLSHVAGMCQPHRSCSINEDTGLPLAFTVAHELGHSFGIQHDGSGNDCEPVGKRPFIMSPQLLYDAAPLTWSRCSRQYITRFLDRGWGLCLDDPPAKDIIDFPSVPPGVLYDVSHQCRLQYGAYSAFCEDMDNVCHTLWCSVGTTCHSKLDAAVDGTRCGENKWCLSGECVPVGFRPEAVDGGWSGWSAWSICSRSCGMGVQSAERQCTQPTPKYKGRYCVGERKRFRLCNLQACPAGRPSFRHVQCSHFDAMLYKGQLHTWVPVVNDVNPCELHCRPANEYFAEKLRDAVVDGTPCYQVRASRDLCINGICKNVGCDFEIDSGAMEDRCGVCHGNGSTCHTVSGTFEEAEGLGYVDVGLIPAGAREIRIQEVAEAANFLALRSEDPEKYFLNGGWTIQWNGDYQVAGTTFTYARRGNWENLTSPGPTKEPVWIQLLFQESNPGVHYEYTIHREAGGHDEVPPPVFSWHYGPWTKCTVTCGRGVQRQNVYCLERQAGPVDEEHCDPLGRPDDQQRKCSEQPCPARWWAGEWQLCSSSCGPGGLSRRAVLCIRSVGLDEQSALEPPACEHLPRPPTETPCNRHVPCPATWAVGNWSQCSVTCGEGTQRRNVLCTNDTGVPCDEAQQPASEVTCSLPLCRWPLGTLGPEGSGSGSSSHELFNEADFIPHHLAPRPSPASSPKPGTMGNAIEEEAPELDLPGPVFVDDFYYDYNFINFHEDLSYGPSEEPDLDLAGTGDRTPPPHSHPAAPSTGSPVPATEPPAAKEEGVLGPWSPSPWPSQAGRSPPPPSEQTPGNPLINFLPEEDTPIGAPDLGLPSLSWPRVSTDGLQTPATPESQNDFPVGKDSQSQLPPPWRDRTNEVFKDDEEPKGRGAPHLPPRPSSTLPPLSPVGSTHSSPSPDVAELWTGGTVAWEPALEGGLGPVDSELWPTVGVASLLPPPIAPLPEMKVRDSSLEPGTPSFPTPGPGSWDLQTVAVWGTFLPTTLTGLGHMPEPALNPGPKGQPESLSPEVPLSSRLLSTPAWDSPANSHRVPETQPLAPSLAEAGPPADPLVVRNAGWQAGNWSECSTTCGLGAVWRPVRCSSGRDEDCAPAGRPQPARRCHLRPCATWHSGNWSKCSRSCGGGSSVRDVQCVDTRDLRPLRPFHCQPGPAKPPAHRPCGAQPCLSWYTSSWRECSEACGGGEQQRLVTCPEPGLCEEALRPNTTRPCNTHPCTQWVVGPWGQCSGPCGGGVQRRLVKCVNTQTGLPEEDSDQCGHEAWPESSRPCGTEDCEPVEPPRCERDRLSFGFCETLRLLGRCQLPTIRTQCCRSCSPPSHGAPSRGHQRVARR

SEQ ID NO: 24067 - protein, 1935 aa, Homo sapiens
  REGION 1..1935: note = ENSP00000418735
MQFVSWATLLTLLVRDLAEMGSPDAAAAVRKDRLHPRQVKLLETLSEYEIVSPIRVNALGEPFPTNVHFKRTRRSINSATDPWPAFASSSSSSTSSQAHYRLSAFGQQFLFNLTANAGFIAPLFTVTLLGTPGVNQTKFYSEEEAELKHCFYKGYVNTNSEHTAVISLCSGMLGTFRSHDGDYFIEPLQSMDEQEDEEEQNKPHIIYRRSAPQREPSTGRHACDTSEHKNRHSKDKKKTRARKWGERINLAGDVAALNSGLATEAFSAYGNKTDNTREKRTHRRTKRFLSYPRFVEVLVVADNRMVSYHGENLQHYILTLMSIVASIYKDPSIGNLINIVIVNLIVIHNEQDGPSISFNAQTTLKNFCQWQHSKNSPGGIHHDTAVLLTRQDICRAHDKCDTLGLAELGTICDPYRSCSISEDSGLSTAFTIAHELGHVFNMPHDDNNKCKEEGVKSPQHVMAPTLNFYTNPWMWSKCSRKYITEFLDTGYGECLLNEPESRPYPLPVQLPGILYNVNKQCELIFGPGSQVCPYMMQCRRLWCNNVNGVHKGCRTQHTPWADGTECEPGKHCKYGFCVPKEMDVPVTDGSWGSWSPFGTCSRTCGGGIKTAIRECNRPEPKNGGKYCVGRRMKFKSCNTEPCLKQKRDFRDEQCAHFDGKHFNINGLLPNVRWVPKYSGILMKDRCKLFCRVAGNTAYYQLRDRVIDGTPCGQDTNDICVQGLCRQAGCDHVLNSKARRDKCGVCGGDNSSCKTVAGTFNTVHYGYNTVVRIPAGATNIDVRQHSFSGETDDDNYLALSSSKGEFLLNGNFVVTMAKREIRIGNAVVEYSGSETAVERINSTDRIEQELLLQVLSVGKLYNPDVRYSFNIPIEDKPQQFYWNSHGPWQACSKPCQGERKRKLVCTRESDQLTVSDQRCDRLPQPGHITEPCGTDCDLRWHVASRSECSAQCGLGYRTLDIYCAKYSRLDGKTEKVDDGFCSSHPKPSNREKCSGECNTGGWRYSAWTECSKSCDGGTQRRRAICVNTRNDVLDDSKCTHQEKVTIQRCSEFPCPQWKSGDWSECLVTCGKGHKHRQVWCQFGEDRLNDRMCDPETKPTSMQTCQQPECASWQAGPWGQCSVTCGQGYQLRAVKCIIGTYMSVVDDNDCNAATRPTDTQDCELPSCHPPPAAPETRRSTYSAPRTQWRFGSWTPCSATCGKGTRMRYVSCRDENGSVADESACATLPRPVAKEECSVTPCGQWKALDWSSCSVTCGQGRATRQVMCVNYSDHVIDRSECDQDYIPETDQDCSMSPCPQRTPDSGLAQHPFQNEDYRPRSASPSRTHVLGGNQWRTGPWGACSSTCAGGSQRRVVVCQDENGYTANDCVERIKPDEQRACESGPCPQWAYGNWGECTKLCGGGIRTRLVVCQRSNGERFPDLSCEILDKPPDREQCNTHACPHDAAWSTGPWSSCSVSCGRGHKQRNVYCMAKDGSHLESDYCKHLAKPHGHRKCRGGRCPKWKAGAWSQCSVSCGRGVQQRHVGCQIGTHKIARETECNPYTRPESERDCQGPRCPLYTWRAEEWQECTKTCGEGSRYRKVVCVDDNKNEVHGARCDVSKRPVDRESCSLQPCEYVWITGEWSECSVTCGKGYKQRLVSCSEIYTGKENYEYSYQTTINCPGTQPPSVHPCYLRDCPVSATWRVGNWGSCSVSCGVGVMQRSVQCLTNEDQPSHLCHTDLKPEERKTCRNVYNCELPQNCKEVKRLKGASEDGEYFLMIRGKLLKIFCAGMHSDHPKEYVTLVHGDSENFSEVYGHRLHNPTECPYNGSRRDDCQCRKDYTAAGFSSFQKIRIDLTSMQIITTDLQFARTSEGHPVPFATAGDCYSAAKCPQGRFSINLYGTGLSLTESARWISQGNYAVSDIKKSPDGTRVVGKCGGYCGKCTPSSGTGLEVRVL

SEQ ID NO: 24068 - protein, 1907 aa, Homo sapiens
  REGION 1..1907: note = ENSP00000295903
MQFVSWATLLTLLVRDLAEMGSPDAAAAVRKDRLHPRQVKLLETLSEYEIVSPIRVNALGEPFPTNVHFKRTRRSINSATDPWPAFASSSSSSTSSQAHYRLSAFGQQFLFNLTANAGFIAPLFTVTLLGTPGVNQTKFYSEEEAELKHCFYKGYVNTNSEHTAVISLCSGMLGTFRSHDGDYFIEPLQSMDEQEDEEEQNKPHIIYRRSAPQREPSTGRHACDTSEHKNRHSKDKKKTRARKWGERINLAGDVAALNSGLATEAFSAYGNKTDNTREKRTHRRTKRFLSYPRFVEVLVVADNRMVSYHGENLQHYILTLMSIDGPSISFNAQTTLKNFCQWQHSKNSPGGIHHDTAVLLTRQDICRAHDKCDTLGLAELGTICDPYRSCSISEDSGLSTAFTIAHELGHVFNMPHDDNNKCKEEGVKSPQHVMAPTLNFYTNPWMWSKCSRKYITEFLDTGYGECLLNEPESRPYPLPVQLPGILYNVNKQCELIFGPGSQVCPYMMQCRRLWCNNVNGVHKGCRTQHTPWADGTECEPGKHCKYGFCVPKEMDVPVTDGSWGSWSPFGTCSRTCGGGIKTAIRECNRPEPKNGGKYCVGRRMKFKSCNTEPCLKQKRDFRDEQCAHFDGKHFNINGLLPNVRWVPKYSGILMKDRCKLFCRVAGNTAYYQLRDRVIDGTPCGQDTNDICVQGLCRQAGCDHVLNSKARRDKCGVCGGDNSSCKTVAGTFNTVHYGYNTVVRIPAGATNIDVRQHSFSGETDDDNYLALSSSKGEFLLNGNFVVTMAKREIRIGNAVVEYSGSETAVERINSTDRIEQELLLQVLSVGKLYNPDVRYSFNIPIEDKPQQFYWNSHGPWQACSKPCQGERKRKLVCTRESDQLTVSDQRCDRLPQPGHITEPCGTDCDLRWHVASRSECSAQCGLGYRTLDIYCAKYSRLDGKTEKVDDGFCSSHPKPSNREKCSGECNTGGWRYSAWTECSKSCDGGTQRRRAICVNTRNDVLDDSKCTHQEKVTIQRCSEFPCPQWKSGDWSECLVTCGKGHKHRQVWCQFGEDRLNDRMCDPETKPTSMQTCQQPECASWQAGPWGQCSVTCGQGYQLRAVKCIIGTYMSVVDDNDCNAATRPTDTQDCELPSCHPPPAAPETRRSTYSAPRTQWRFGSWTPCSATCGKGTRMRYVSCRDENGSVADESACATLPRPVAKEECSVTPCGQWKALDWSSCSVTCGQGRATRQVMCVNYSDHVIDRSECDQDYIPETDQDCSMSPCPQRTPDSGLAQHPFQNEDYRPRSASPSRTHVLGGNQWRTGPWGACSSTCAGGSQRRVVVCQDENGYTANDCVERIKPDEQRACESGPCPQWAYGNWGECTKLCGGGIRTRLVVCQRSNGERFPDLSCEILDKPPDREQCNTHACPHDAAWSTGPWSSCSVSCGRGHKQRNVYCMAKDGSHLESDYCKHLAKPHGHRKCRGGRCPKWKAGAWSQCSVSCGRGVQQRHVGCQIGTHKIARETECNPYTRPESERDCQGPRCPLYTWRAEEWQECTKTCGEGSRYRKVVCVDDNKNEVHGARCDVSKRPVDRESCSLQPCEYVWITGEWSECSVTCGKGYKQRLVSCSEIYTGKENYEYSYQTTINCPGTQPPSVHPCYLRDCPVSATWRVGNWGSCSVSCGVGVMQRSVQCLTNEDQPSHLCHTDLKPEERKTCRNVYNCELPQNCKEVKRLKGASEDGEYFLMIRGKLLKIFCAGMHSDHPKEYVTLVHGDSENFSEVYGHRLHNPTECPYNGSRRDDCQCRKDYTAAGFSSFQKIRIDLTSMQIITTDLQFARTSEGHPVPFATAGDCYSAAKCPQGRFSINLYGTGLSLTESARWISQGNYAVSDIKKSPDGTRVVGKCGGYCGKCTPSSGTGLEVRVL

SEQ ID NO: 24069 - protein, 69 aa, Homo sapiens
  REGION 1..69: note = ENSP00000478086
AKCPQGRFSINLYGTGLSLTESARWISQGNYAVSDIKKSPDGTRVVGKCGGYCGKCTPSSGTGLEVRVL

SEQ ID NO: 24070 - protein, 991 aa, Homo sapiens
  REGION 1..991: note = ENSP00000417521
  VARIANT 1: note = Any amino acid
XECSAQCGLGYRTLDIYCAKYSRLDGKTEKVDDGFCSSHPKPSNREKCSGECNTGGWRYSAWTECSKSCDGGTQRRRAICVNTRNDVLDDSKCTHQEKVTIQRCSEFPCPQWKSGDWSECLVTCGKGHKHRQVWCQFGEDRLNDRMCDPETKPTSMQTCQQPECASWQAGPWGQCSVTCGQGYQLRAVKCIIGTYMSVVDDNDCNAATRPTDTQDCELPSCHPPPAAPETRRSTYSAPRTQWRFGSWTPCSATCGKGTRMRYVSCRDENGSVADESACATLPRPVAKEECSVTPCGQWKALDWSSCSVTCGQGRATRQVMCVNYSDHVIDRSECDQDYIPETDQDCSMSPCPQRTPDSGLAQHPFQNEDYRPRSASPSRTHVLGGNQWRTGPWGACSSTCAGGSQRRVVVCQDENGYTANDCVERIKPDEQRACESGPCPQWAYGNWGECTKLCGGGIRTRLVVCQRSNGERFPDLSCEILDKPPDREQCNTHACPHDAAWSTGPWSSCSVSCGRGHKQRNVYCMAKDGSHLESDYCKHLAKPHGHRKCRGGRCPKWKAGAWSQCSVSCGRGVQQRHVGCQIGTHKIARETECNPYTRPESERDCQGPRCPLYTWRAEEWQECTKTCGEGSRYRKVVCVDDNKNEVHGARCDVSKRPVDRESCSLQPCEYVWITGEWSECSVTCGKGYKQRLVSCSEIYTGKENYEYSYQTTINCPGTQPPSVHPCYLRDCPVSATWRVGNWGSCSVSCGVGVMQRSVQCLTNEDQPSHLCHTDLKPEERKTCRNVYNCELPQNCKEVKRLKGASEDGEYFLMIRGKLLKIFCAGMHSDHPKEYVTLVHGDSENFSEVYGHRLHNPTECPYNGSRRDDCQCRKDYTAAGFSSFQKIRIDLTSMQIITTDLQFARTSEGHPVPFATAGDCYSAAKCPQGRFSINLYGTGLSLTESARWISQGNYAVSDIKKSPDGTRVVGKCGGYCGKCTPSSGTGLEVRVL

SEQ ID NO: 24071 - protein, 488 aa, Homo sapiens
  REGION 1..488: note = ENSP00000419217
MQFVSWATLLTLLVRDLAEMGSPDAAAAVRKDRLHPRQVKLLETLSEYEIVSPIRVNALGEPFPTNVHFKRTRRSINSATDPWPAFASSSSSSTSSQAHYRLSAFGQQFLFNLTANAGFIAPLFTVTLLGTPGVNQTKFYSEEEAELKHCFYKGYVNTNSEHTAVISLCSGMLGTFRSHDGDYFIEPLQSMDEQEDEEEQNKPHIIYRRSAPQREPSTGRHACDTSEHKNRHSKDKKKTRARKWGERINLAGDVAALNSGLATEAFSAYGNKTDNTREKRTHRRTKRFLSYPRFVEVLVVADNRMVSYHGENLQHYILTLMSIVASIYKDPSIGNLINIVIVNLIVIHNEQDGPSISFNAQTTLKNFCQWQHSKNSPGGIHHDTAVLLTRQDICRAHDKCDTLGLAELGTICDPYRSCSISEDSGLSTAFTIAHELGHVFNMPHDDNNKCKEEGVKSPQHVMAPTLNFYTNPWMWSKCSRKYITEFLE

SEQ ID NO: 24072 - protein, 1691 aa, Homo sapiens
  REGION 1..1691: note = ENSP00000286744
MASWTSPWWVLIGMVFMHSPLPQTTAEKSPGAYFLPEFALSPQGSFLEDTTGEQFLTYRYDDQTSRNTRSDEDKDGNWDAWGDWSDCSRTCGGGASYSLRRCLTGRNCEGQNIRYKTCSNHDCPPDAEDFRAQQCSAYNDVQYQGHYYEWLPRYNDPAAPCALKCHAQGQNLVVELAPKVLDGTRCNTDSLDMCISGICQAVGCDRQLGSNAKEDNCGVCAGDGSTCRLVRGQSKSHVSPEKREENVIAVPLGSRSVRITVKGPAHLFIESKTLQGSKGEHSFNSPGVFLVENTTVEFQRGSERQTFKIPGPLMADFIFKTRYTAAKDSVVQFFFYQPISHQWRQTDFFPCTVTCGGGYQLNSAECVDIRLKRVVPDHYCHYYPENVKPKPKLKECSMDPCPSSDGFKEIMPYDHFQPLPRWEHNPWTACSVSCGGGIQRRSFVCVEESMHGEILQVEEWKCMYAPKPKVMQTCNLFDCPKWIAMEWSQCTVTCGRGLRYRVVLCINHRGEHVGGCNPQLKLHIKEECVIPIPCYKPKEKSPVEAKLPWLKQAQELEETRIATEEPTFIPEPWSACSTTCGPGVQVREVKCRVLLTFTQTETELPEEECEGPKLPTERPCLLEACDESPASRELDIPLPEDSETTYDWEYAGFTPCTATCVGGHQEAIAVCLHIQTQQTVNDSLCDMVHRPPAMSQACNTEPCPPRWHVGSWGPCSATCGVGIQTRDVYCLHPGETPAPPEECRDEKPHALQACNQFDCPPGWHIEEWQQCSRTCGGGTQNRRVTCRQLLTDGSFLNLSDELCQGPKASSHKSCARTDCPPHLAVGDWSKCSVSCGVGIQRRKQVCQRLAAKGRRIPLSEMMCRDLPGLPLVRSCQMPECSKIKSEMKTKLGEQGPQILSVQRVYIQTREEKRINLTIGSRAYLLPNTSVIIKCPVRRFQKSLIQWEKDGRCLQNSKRLGITKSGSLKIHGLAAPDIGVYRCIAGSAQETVVLKLIGTDNRLIARPALREPMREYPGMDHSEANSLGVTWHKMRQMWNNKNDLYLDDDHISNQPFLRALLGHCSNSAGSTNSWELKNKQFEAAVKQGAYSMDTAQFDELIRNMSQLMETGEVSDDLASQLIYQLVAELAKAQPTHMQWRGIQEETPPAAQLRGETGSVSQSSHAKNSGKLTFKPKGPVLMRQSQPPSISFNKTINSRIGNTVYITKRTEVINILCDLITPSEATYTWTKDGTLLQPSVKIILDGTGKIQIQNPTRKEQGIYECSVANHLGSDVESSSVLYAEAPVILSVERNITKPEHNHLSVVVGGIVEAALGANVTIRCPVKGVPQPNITWLKRGGSLSGNVSLLFNGSLLLQNVSLENEGTYVCIATNALGKAVATSVLHLLERRWPESRIVFLQGHKKYILQATNTRTNSNDPTGEPPPQEPFWEPGNWSHCSATCGHLGARIQRPQCVMANGQEVSEALCDHLQKPLAGFEPCNIRDCPARWFTSVWSQCSVSCGEGYHSRQVTCKRTKANGTVQVVSPRACAPKDRPLGRKPCFGHPCVQWEPGNRCPGRCMGRAVRMQQRHTACQHNSSDSNCDDRKRPTLRRNCTSGACDVCWHTGPWKPCTAACGRGFQSRKVDCIHTRSCKPVAKRHCVQKKKPISWRHCLGPSCDRDCTDTTHYCMFVKHLNLCSLDRYKQRCCQSCQEG

SEQ ID NO: 24073 - protein, 1682 aa, Homo sapiens
  REGION 1..1682: note = ENSP00000456313
MASWTSPWWVLIGMVFMHSPLPQTTAEKSPGAYFLPEFALSPQGSFLEDTTGEQFLTYRYDDQTSRNTRSDEDKDGNWDAWGDWSDCSRTCGGGASYSLRRCLTGRNCEGQNIRYKTCSNHDCPPDAEDFRAQQCSAYNDVQYQGHYYEWLPRYNDPAAPCALKCHAQGQNLVVELAPKVLDGTRCNTDSLDMCISGICQAVGCDRQLGSNAKEDNCGVCAGDGSTCRLVRGQSKSHVSPEKREENVIAVPLGSRSVRITVKGPAHLFIESKTLQGSKGEHSFNSPGVFLVENTTVEFQRGSERQTFKIPGPLMADFIFKTRYTAAKDSVVQFFFYQPISHQWRQTDFFPCTVTCGGGYQLNSAECVDIRLKRVVPDHYCHYYPENVKPKPKLKECSMDPCPSSDGFKEIMPYDHFQPLPRWEHNPWTACSVSCGGGIQRRSFVCVEESMHGEILQVEEWKCMYAPKPKVMQTCNLFDCPKWIAMEWSQCTVTCGRGLRYRVVLCINHRGEHVGGCNPQLKLHIKEECVIPIPCYKPKEKSPVEAKLPWLKQAQELEETRIATEEPTFIPEPWSACSTTCGPGVQVREVKCRVLLTFTQTETELPEEECEGPKLPTERPCLLEACDESPASRELDIPLPEDSETTYDWEYAGFTPCTATCVGGHQEAIAVCLHIQTQQTVNDSLCDMVHRPPAMSQACNTEPCPPRWHVGSWGPCSATCGVGIQTRDVYCLHPGETPAPPEECRDEKPHALQACNQFDCPPGWHIEEWQQCSRTCGGGTQNRRVTCRQLLTDGSFLNLSDELCQGPKASSHKSCARTDCPPHLAVGDWSKCSVSCGVGIQRRKQVCQRLAAKGRRIPLSEMMCRDLPGLPLVRSCQMPECSKIKSEMKTKLGEQGPQILSVQRVYIQTREEKRINLTIGSRAYLLPNTSVIIKCPVRRFQKSLIQWEKDGRCLQNSKRLGITKSGSLKIHGLAAPDIGVYRCIAGSAQETVVLKLIGTDNRLIARPALREPMREYPGMDHSEANSLGVTWHKMRQMWNNKNDLYLDDDHISNQPFLRALLGHCSNSAGSTNSWELKNKQFEAAVKQGAYSMDTAQFDELIRNMSQLMETGEVSDDLASQLIYQLVAELAKAQPTHMQWRGIQEETPPAAQLRGETGSVSQSSHAKNSGKLTFKPKGPVLMRQSQPPSISFNKTINSRIGNTVYITKRTEVINILCDLITPSEATYTWTKDGTLLQPSVKIILDGTGKIQIQNPTRKEQGIYECSVANHLGSDVESSSVLYAEAPVILSVERNITKPEHNHLSVVVGGIVEAALGANVTIRCPVKGVPQPNITWLKRGGSLSGNVSLLFNGSLLLQNVSLENEGTYVCIATNALGKAVATSVLHLLERRWPESRIVFLQGHKKYILQATNTRTNSNDPTGEPPPQEPFWEPGNWSHCSATCGHLGARIQRPQCVMANGQEVSEALCDHLQKPLAGFEPCNIRDCPARWFTSVWSQCSVSCGEGYHSRQVTCKRTKANGTVQVVSPRACAPKDRPLGRKPCFGHPCVQWEPGNRCPGRCMGRAVRMQQRHTACQHNSSDSNCDDRKRPTLRRNCTSGACDVCWHTGPWKPCTAACGRGFQSRKVDCIHTRSCKPVAKRHCVQKKKPISWRHCLGPSCDSTYTSQTATNKGAASHVKRDKPLEGS

SEQ ID NO: 24074 - protein, 877 aa, Homo sapiens
  REGION 1..877: note = ENSP00000358037
MENWTGRPWLYLLLLLSLPQLCLDQEVLSGHSLQTPTEEGQGPEGVWGPWVQWASCSQPCGVGVQRRSRTCQLPTVQLHPSLPLPPRPPRHPEALLPRGQGPRPQTSPETLPLYRTQSRGRGGPLRGPASHLGREETQEIRAARRSRLRDPIKPGMFGYGRVPFALPLHRNRRHPRSPPRSELSLISSRGEEAIPSPTPRAEPFSANGSPQTELPPTELSVHTPSPQAEPLSPETAQTEVAPRTRPAPLRHHPRAQASGTEPPSPTHSLGEGGFFRASPQPRRPSSQGWASPQVAGRRPDPFPSVPRGRGQQGQGPWGTGGTPHGPRLEPDPQHPGAWLPLLSNGPHASSLWSLFAPSSPIPRCSGESEQLRACSQAPCPPEQPDPRALQCAAFNSQEFMGQLYQWEPFTEVQGSQRCELNCRPRGFRFYVRHTEKVQDGTLCQPGAPDICVAGRCLSPGCDGILGSGRRPDGCGVCGGDDSTCRLVSGNLTDRGGPLGYQKILWIPAGALRLQIAQLRPSSNYLALRGPGGRSIINGNWAVDPPGSYRAGGTVFRYNRPPREEGKGESLSAEGPTTQPVDVYMIFQEENPGVFYQYVISSPPPILENPTPEPPVPQLQPEILRVEPPLAPAPRPARTPGTLQRQVRIPQMPAPPHPRTPLGSPAAYWKRVGHSACSASCGKGVWRPIFLCISRESGEELDERSCAAGARPPASPEPCHGTPCPPYWEAGEWTSCSRSCGPGTQHRQLQCRQEFGGGGSSVPPERCGHLPRPNITQSCQLRLCGHWEVGSPWSQCSVRCGRGQRSRQVRCVGNNGDEVSEQECASGPPQPPSREACDMGPCTTAWFHSDWSSKVSPEPPAISCILGNHAQDTSAFPA

SEQ ID NO: 24075 - protein, 1074 aa, Homo sapiens
  REGION 1..1074: note = ENSP00000358034
MENWTGRPWLYLLLLLSLPQLCLDQEVLSGHSLQTPTEEGQGPEGVWGPWVQWASCSQPCGVGVQRRSRTCQLPTVQLHPSLPLPPRPPRHPEALLPRGQGPRPQTSPETLPLYRTQSRGRGGPLRGPASHLGREETQEIRAARRSRLRDPIKPGMFGYGRVPFALPLHRNRRHPRSPPRSELSLISSRGEEAIPSPTPRAEPFSANGSPQTELPPTELSVHTPSPQAEPLSPETAQTEVAPRTRPAPLRHHPRAQASGTEPPSPTHSLGEGGFFRASPQPRRPSSQGWASPQVAGRRPDPFPSVPRGRGQQGQGPWGTGGTPHGPRLEPDPQHPGAWLPLLSNGPHASSLWSLFAPSSPIPRCSGESEQLRACSQAPCPPEQPDPRALQCAAFNSQEFMGQLYQWEPFTEVQGSQRCELNCRPRGFRFYVRHTEKVQDGTLCQPGAPDICVAGRCLSPGCDGILGSGRRPDGCGVCGGDDSTCRLVSGNLTDRGGPLGYQKILWIPAGALRLQIAQLRPSSNYLALRGPGGRSIINGNWAVDPPGSYRAGGTVFRYNRPPREEGKGESLSAEGPTTQPVDVYMIFQEENPGVFYQYVISSPPPILENPTPEPPVPQLQPEILRVEPPLAPAPRPARTPGTLQRQVRIPQMPAPPHPRTPLGSPAAYWKRVGHSACSASCGKGVWRPIFLCISRESGEELDERSCAAGARPPASPEPCHGTPCPPYWEAGEWTSCSRSCGPGTQHRQLQCRQEFGGGGSSVPPERCGHLPRPNITQSCQLRLCGHWEVGSPWSQCSVRCGRGQRSRQVRCVGNNGDEVSEQECASGPPQPPSREACDMGPCTTAWFHSDWSSKCSAECGTGIQRRSVVCLGSGAALGPGQGEAGAGTGQSCPTGSRPPDMRACSLGPCERTWRWYTGPWGECSSECGSGTQRRDIICVSKLGTEFNVTSPSNCSHLPRPPALQPCQGQACQDRWFSTPWSPCSRSCQGGTQTREVQCLSTNQTLSTRCPPQLRPSRKRPCNSQPCSQRPDDQCKDSSPHCPLVVQARLCVYPYYTATCCRSCAHVLERSPQDPS

SEQ ID NO: 24076 - protein, 1097 aa, Homo sapiens
  REGION 1..1097: note = ENSP00000358035
MENWTGRPWLYLLLLLSLPQLCLDQEVLSGHSLQTPTEEGQGPEGVWGPWVQWASCSQPCGVGVQRRSRTCQLPTVQLHPSLPLPPRPPRHPEALLPRGQGPRPQTSPETLPLYRTQSRGRGGPLRGPASHLGREETQEIRAARRSRLRDPIKPGMFGYGRVPFALPLHRNRRHPRSPPRSELSLISSRGEEAIPSPTPRAEPFSANGSPQTELPPTELSVHTPSPQAEPLSPETAQTEVAPRTRPAPLRHHPRAQASGTEPPSPTHSLGEGGFFRASPQPRRPSSQGWASPQVAGRRPDPFPSVPRGRGQQGQGPWGTGGTPHGPRLEPDPQHPGAWLPLLSNGPHASSLWSLFAPSSPIPRCSGESEQLRACSQAPCPPEQPDPRALQCAAFNSQEFMGQLYQWEPFTEAPLLPLRHAFFLLPGAGSGDSTGVQGSQRCELNCRPRGFRFYVRHTEKVQDGTLCQPGAPDICVAGRCLSPGCDGILGSGRRPDGCGVCGGDDSTCRLVSGNLTDRGGPLGYQKILWIPAGALRLQIAQLRPSSNYLALRGPGGRSIINGNWAVDPPGSYRAGGTVFRYNRPPREEGKGESLSAEGPTTQPVDVYMIFQEENPGVFYQYVISSPPPILENPTPEPPVPQLQPEILRVEPPLAPAPRPARTPGTLQRQVRIPQMPAPPHPRTPLGSPAAYWKRVGHSACSASCGKGVWRPIFLCISRESGEELDERSCAAGARPPASPEPCHGTPCPPYWEAGEWTSCSRSCGPGTQHRQLQCRQEFGGGGSSVPPERCGHLPRPNITQSCQLRLCGHWEVGSPWSQCSVRCGRGQRSRQVRCVGNNGDEVSEQECASGPPQPPSREACDMGPCTTAWFHSDWSSKCSAECGTGIQRRSVVCLGSGAALGPGQGEAGAGTGQSCPTGSRPPDMRACSLGPCERTWRWYTGPWGECSSECGSGTQRRDIICVSKLGTEFNVTSPSNCSHLPRPPALQPCQGQACQDRWFSTPWSPCSRSCQGGTQTREVQCLSTNQTLSTRCPPQLRPSRKRPCNSQPCSQRPDDQCKDSSPHCPLVVQARLCVYPYYTATCCRSCAHVLERSPQDPS

SEQ ID NO: 24077 - protein, 1074 aa, Homo sapiens; identical to SEQ ID NO: 24075
  REGION 1..1074: note = ENSP00000271643

SEQ ID NO: 24078 - protein, 701 aa, Homo sapiens
  REGION 1..701: note = ENSP00000436367
MDIEDEENMSSSSTDVKENRNLDNVSPKDGSTPGPGEGSQLSNGGGGGPGRKRPLEEGSNGHSKYRLKKRRKTPGPVLPKNALMQLNEIKPGLQYTLLSQTGPVHAPLFVMSVEVNGQVFEGSGPTKKKAKLHAAEKALRSFVQFPNASEAHLAMGRTLSVNTDFTSDQADFPDTLFNGFETPDKAEPPFYVGSNGDDSFSSSGDLSLSASPVPASLAQPPLPVLPPFPPPSGKNPVMILNELRPGLKYDFLSESGESHAKSFVMSVVVDGQFFEGSGRNKKLAKARAAQSALAAIFNLHLDQTPSRQPIPSEGLQLHLPQVLADAVSRLVLGKFGDLTDNFSSPHARRKVLAGVVMTTGTDVKDAKVISVSTGTKCINGEYMSDRGLALNDCHAEIISRRSLLRFLYTQLELYLNNKDDQKRSIFQKSERGGFRLKENVQFHLYISTSPCGDARIFSPHEPILEEPADRHPNRKARGQLRTKIESGEGTIPVRSNASIQTWDGVLQGERLLTMSCSDKIARWNVVGIQGSLLSIFVEPIYFSSIILGSLYHGDHLSRAMYQRISNIEDLPPLYTLNKPLLSGISNAEARQPGKAPNFSVNWTVGDSAIEVINATTGKDELGRASRLCKHALYCRWMRVHGKVPSHLLRSKITKPNVYHESKLAAKEYQAAKARLFTAFIKAGLGAWVEKPTEQDQFSLTP

SEQ ID NO: 24079 - protein, 741 aa, Homo sapiens
  REGION 1..741: note = ENSP00000435381
MDIEDEENMSSSSTDVKENRNLDNVSPKDGSTPGPGEGSQLSNGGGGGPGRKRPLEEGSNGHSKYRLKKRRKTPGPVLPKNALMQLNEIKPGLQYTLLSQTGPVHAPLFVMSVEVNGQVFEGSGPTKKKAKLHAAEKALRSFVQFPNASEAHLAMGRTLSVNTDFTSDQADFPDTLFNGFETPDKAEPPFYVGSNGDDSFSSSGDLSLSASPVPASLAQPPLPVLPPFPPPSGKNPVMILNELRPGLKYDFLSESGESHAKSFVMSVVVDGQFFEGSGRNKKLAKARAAQSALAAIFNLHLDQTPSRQPIPSEGLQLHLPQVLADAVSRLVLGKFGDLTDNFSSPHARRKVLAGVVMTTGTDVKDAKVISVSTGTKCINGEYMSDRGLALNDCHAEIISRRSLLRFLYTQLELYLNNKDDQKRSIFQKSERGGFRLKENVQFHLYISTSPCGDARIFSPHEPILEGSRSYTQAGVQWCNHGSLQPRPPGLLSDPSTSTFQGAGTTEPADRHPNRKARGQLRTKIESGEGTIPVRSNASIQTWDGVLQGERLLTMSCSDKIARWNVVGIQGSLLSIFVEPIYFSSIILGSLYHGDHLSRAMYQRISNIEDLPPLYTLNKPLLSGISNAEARQPGKAPNFSVNWTVGDSAIEVINATTGKDELGRASRLCKHALYCRWMRVHGKVPSHLLRSKITKPNVYHESKLAAKEYQAAKARLFTAFIKAGLGAWVEKPTEQDQFSLTP

SEQ ID NO: 24080 - protein, 714 aa, Homo sapiens
  REGION 1..714: note = ENSP00000374513
MDIEDEENMSSSSTDVKENRNLDNVSPKDGSTPGPGEGSQLSNGGGGGPGRKRPLEEGSNGHSKYRLKKRRKTPGPVLPKNALMQLNEIKPGLQYTLLSQTGPVHAPLFVMSVEVNGQVFEGSGPTKKKAKLHAAEKALRSFVQFPNASEAHLAMGRTLSVNTDFTSDQADFPDTLFNGFETPDKAEPPFYVGSNGDDSFSSSGDLSLSASPVPASLAQPPLPVLPPFPPPSGKNPVMILNELRPGLKYDFLSESGESHAKSFVMSVVVDGQFFEGSGRNKKLAKARAAQSALAAIFNLHLDQTPSRQPIPSEGLQLHLPQVLADAVSRLVLGKFGDLTDNFSSPHARRKVLAGVVMTTGTDVKDAKVISVSTGTKCINGEYMSDRGLALNDCHAEIISRRSLLRFLYTQLELYLNNKDDQKRSIFQKSERGGFRLKENVQFHLYISTSPCGDARIFSPHEPILEGSRSYTQAGVQWCNHGSLQPRPPGLLSDPSTSTFQGAGTTEPADRHPNRKARGQLRTKIESGEGTIPVRSNASIQTWDGVLQGERLLTMSCSDKIARWNVVGIQGSLLSIFVEPIYFSSIILGSLYHGDHLSRAMYQRISNIEDLPPLYTLNKPLLSGISNAEARQPGKAPNFSVNWTVGDSAIEVINATTGKDELGRASRLCKHALYCRWMRVHGKVPSHLLRSKITKPNVYHESKLAAKEYQAAKVH

SEQ ID NO: 24081 - protein, 701 aa, Homo sapiens; identical to SEQ ID NO: 24078
  REGION 1..701: note = ENSP00000015877

SEQ ID NO: 24082 - protein, 141 aa, Homo sapiens
  REGION 1..141: note = ENSP00000387480
MDIEDEENMSSSSTDVKENRNLDNVSPKDGSTPGPGEGSQLSNGGGGGPGRKRPLEEGSNGHSKYRLKKRRKTPGPVLPKNALMQLNEIKPGLQYTLLSQTGPVHAPLFVMSVEVNGQVFEGSGPTKKKAKLHAAEKALRS

SEQ ID NO: 24083 - protein, 741 aa, Homo sapiens; identical to SEQ ID NO: 24079
  REGION 1..741: note = ENSP00000353920

SEQ ID NO: 24084 - protein, 741 aa, Homo sapiens; identical to SEQ ID NO: 24079
  REGION 1..741: note = ENSP00000414600

SEQ ID NO: 24085 - protein, 52 aa, Homo sapiens
  REGION 1..52: note = ENSP00000478160
MANEHTLIHPASIEDPLEARPMSDEDPEDEDALPARWKKEMGRKRKRTIATL

SEQ ID NO: 24086 - protein, 729 aa, Homo sapiens
  REGION 1..729: note = ENSP00000486475
MKIPRMKTPCQPDRNSLRQSRNPQKYFAMDIEDEENMSSSSTDVKENRNLDNVSPKDGSTPGPGEGSQLSNGGGGGPGRKRPLEEGSNGHSKYRLKKRRKTPGPVLPKNALMQLNEIKPGLQYTLLSQTGPVHAPLFVMSVEVNGQVFEGSGPTKKKAKLHAAEKALRSFVQFPNASEAHLAMGRTLSVNTDFTSDQADFPDTLFNGFETPDKAEPPFYVGSNGDDSFSSSGDLSLSASPVPASLAQPPLPVLPPFPPPSGKNPVMILNELRPGLKYDFLSESGESHAKSFVMSVVVDGQFFEGSGRNKKLAKARAAQSALAAIFNLHLDQTPSRQPIPSEGLQLHLPQVLADAVSRLVLGKFGDLTDNFSSPHARRKVLAGVVMTTGTDVKDAKVISVSTGTKCINGEYMSDRGLALNDCHAEIISRRSLLRFLYTQLELYLNNKDDQKRSIFQKSERGGFRLKENVQFHLYISTSPCGDARIFSPHEPILEEPADRHPNRKARGQLRTKIESGEGTIPVRSNASIQTWDGVLQGERLLTMSCSDKIARWNVVGIQGSLLSIFVEPIYFSSIILGSLYHGDHLSRAMYQRISNIEDLPPLYTLNKPLLSGISNAEARQPGKAPNFSVNWTVGDSAIEVINATTGKDELGRASRLCKHALYCRWMRVHGKVPSHLLRSKITKPNVYHESKLAAKEYQAAKARLFTAFIKAGLGAWVEKPTEQDQFSLTP

SEQ ID NO: 24087 - protein, 739 aa, Homo sapiens
  REGION 1..739: note = ENSP00000370713
MASVLGSGRGSGGLSSQLKCKSKRRRRRRSKRKDKVSILSTFLAPFKHLSPGITNTEDDDTLSTSSAEVKENRNVGNLAARPPPSGDRARGGAPGAKRKRPLEEGNGGHLCKLQLVWKKLSWSVAPKNALVQLHELRPGLQYRTVSQTGPVHAPVFAVAVEVNGLTFEGTGPTKKKAKMRAAELALRSFVQFPNACQAHLAMGGGPGPGTDFTSDQADFPDTLFQEFEPPAPRPGLAGGRPGDAALLSAAYGRRRLLCRALDLVGPTPATPAAPGERNPVVLLNRLRAGLRYVCLAEPAERRARSFVMAVSVDGRTFEGSGRSKKLARGQAAQAALQELFDIQMPGHAPGRARRTPMPQEFADSISQLVTQKFREVTTDLTPMHARHKALAGIVMTKGLDARQAQVVALSSGTKCISGEHLSDQGLVVNDCHAEVVARRAFLHFLYTQLELHLSKRREDSERSIFVRLKEGGYRLRENILFHLYVSTSPCGDARLHSPYEITTDLHSSKHLVRKFRGHLRTKIESGEGTVPVRGPSAVQTWDGVLLGEQLITMSCTDKIARWNVLGLQGALLSHFVEPVYLQSIVVGSLHHTGHLARVMSHRMEGVGQLPASYRHNRPLLSGVSDAEARQPGKSPPFSMNWVVGSADLEIINATTGRRSCGGPSRLCKHVLSARWARLYGRLSTRTPSPGDTPSMYCEAKLGAHTYQSVKQQLFKAFQKAGLGTWVRKPPEQQQFLLTL

SEQ ID NO: 24088 - protein, 248 aa, Homo sapiens
  REGION 1..248: note = ENSP00000370711
MGLWSPVPGNSVPRAPVMAGLGLGHSQGAPQGPHDGKTDRSSGPGRRRTERTRLPGLLGGAPLTAGSPHRWNVLGLQGALLSHFVEPVYLQSIVVGSLHHTGHLARVMSHRMEGVGQLPASYRHNRPLLSGVSDAEARQPGKSPPFSMNWVVGSADLEIINATTGRRSCGGPSRLCKHVLSARWARLYGRLSTRTPSPGDTPSMYCEAKLGAHTYQSVKQQLFKAFQKAGLGTWVRKPPEQQQFLLTL

SEQ ID NO: 24089 - protein, 141 aa, Homo sapiens
  REGION 1..141: note = ENSP00000370706
MSHRMEGVGQLPASYRHNRPLLSGVSDAEARQPGKSPPFSMNWVVGSADLEIINATTGRRSCGGPSRLCKHVLSARWARLYGRLSTRTPSPGDTPSMYCEAKLGAHTYQSVKQQLFKAFQKAGLGTWVRKPPEQQQFLLTL

SEQ ID NO: 24090 - protein, 338 aa, Homo sapiens
  REGION 1..338: note = ENSP00000392721
MYGVFVRILTERSQRKAFLQARSCIEDRLRLEDENEKQERLLMSLLPRNVAMEMKEDFLKPPERIFHKIYIQRHDNVSILFADIVGFTGLASQCTAQELVKLLNELFGKFDELATENHCRRIKILGDCYYCVSGLTQPKTDHAHCCVEMGLDMIDTITSVAEATEVDLNMRVGLHTGRVLCGVLGLRKWQYDVWSNDVTLANVMEAAGLPGKVHITKTTLACLNGDYEVEPGYGHERNSFLKTHNIETFFIVPSHRRKIFPGLILSDIKPAKRMKFKTVCYLLVQLMHCRKMFKAEIPFSNVMTCEDDDKVQIHPSLSGLDVLLGFWSPTLQRGRLCT

SEQ ID NO: 24091 - protein, 1119 aa, Homo sapiens
  REGION 1..1119: note = ENSP00000297323
MAGAPRGGGGGGGGAGEPGGAERAAGTSRRRGLRACDEEFACPELEALFRGYTLRLEQAATLKALAVLSLLAGALALAELLGAPGPAPGLAKGSHPVHCVLFLALLVVTNVRSLQVPQLQQVGQLALLFSLTFALLCCPFALGGPARGSAGAAGGPATAEQGVWQLLLVTFVSYALLPVRSLLAIGFGLVVAASHLLVTATLVPAKRPRLWRTLGANALLFVGVNMYGVFVRILTERSQRKAFLQARSCIEDRLRLEDENEKQERLLMSLLPRNVAMEMKEDFLKPPERIFHKIYIQRHDNVSILFADIVGFTGLASQCTAQELVKLLNELFGKFDELATENHCRRIKILGDCYYCVSGLTQPKTDHAHCCVEMGLDMIDTITSVAEATEVDLNMRVGLHTGRVLCGVLGLRKWQYDVWSNDVTLANVMEAAGLPGKVHITKTTLACLNGDYEVEPGYGHERNSFLKTHNIETFFIVPSHRRKIFPGLILSDIKPAKRMKFKTVCYLLVQLMHCRKMFKAEIPFSNVMTCEDDDKRRALRTASEKLRNRSSFSTNVVYTTPGTRVNRYISRLLEARQTELEMADLNFFTLKYKHVEREQKYHQLQDEYFTSAVVLTLILAALFGLVYLLIFPQSVVVLLLLVFCICFLVACVLYLHITRVQCFPGCLTIQIRTVLCIFIVVLIYSVAQGCVVGCLPWAWSSKPNSSLVVLSSGGQRTALPTLPCESTHHALLCCLVGTLPLAIFFRVSSLPKMILLSGLTTSYILVLELSGYTRTGGGAVSGRSYEPIVAILLFSCALALHARQVDIRLRLDYLWAAQAEEEREDMEKVKLDNRRILFNLLPAHVAQHFLMSNPRNMDLYYQSYSQVGVMFASIPNFNDFYIELDGNNMGVECLRLLNEIIADFDELMEKDFYKDIEKIKTIGSTYMAAVGLAPTSGTKAKKSISSHLSTLADFAIEMFDVLDEINYQSYNDFVLRVGINVGPVVAGVIGARRPQYDIWGNTVNVASRMDSTGVQGRIQVTEEVHRLLRRCPYHFVCRGKVSVKGKGEMLTYFLEGRTDGNGSQIRSLGLDRKMCPFGRAGLQGRRPPVCPMPGVSVRAGLPPHSPGQYLPSAAAGKEA

SEQ ID NO: 24092 - protein, 338 aa, Homo sapiens; identical to SEQ ID NO: 24090
  REGION 1..338: note = ENSP00000479770

SEQ ID NO: 24093 - protein, 468 aa, Homo sapiens
  REGION 1..468: note = ENSP00000306620
MAGVVHVSLAALLLLPMAPAMHSDCIFKKEQAMCLEKIQRANELMGFNDSSPGCPGMWDNITCWKPAHVGEMVLVSCPELFRIFNPDQVWETETIGESDFGDSNSLDLSDMGVVSRNCTEDGWSEPFPHYFDACGFDEYESETGDQDYYYLSVKALYTVGYSTSLVTLTTAMVILCRFRKLHCTRNFIHMNLFVSFMLRAISVFIKDWILYAEQDSNHCFISTVECKAVMVFFHYCVVSNYFWLFIEGLYLFTLLVETFFPERRYFYWYTIIGWGTPTVCVTVWATLRLYFDDTGCWDMNDSTALWWVIKGPVVGSIMVNFVLFIGIIVILVQKLQSPDMGGNESSIYLRLARSTLLLIPLFGIHYTVFAFSPENVSKRERLVFELGLGSFQGFVVAVLYCFLNGEVQAEIKRKWRSWKVNRYFAVDFKHRHPSLASSGVNGGTQLSILSKSSSQIRMSGLPADNLAT

SEQ ID NO: 24094 - protein, 447 aa, Homo sapiens
  REGION 1..447: note = ENSP00000387335
MAGVVHVSLAALLLLPMAPAMHSDCIFKKEQAMCLEKIQRANELMGFNDSSPGCPGMWDNITCWKPAHVGEMVLVSCPELFRIFNPDQDMGVVSRNCTEDGWSEPFPHYFDACGFDEYESETGDQDYYYLSVKALYTVGYSTSLVTLTTAMVILCRFRKLHCTRNFIHMNLFVSFMLRAISVFIKDWILYAEQDSNHCFISTVECKAVMVFFHYCVVSNYFWLFIEGLYLFTLLVETFFPERRYFYWYTIIGWGTPTVCVTVWATLRLYFDDTGCWDMNDSTALWWVIKGPVVGSIMVNFVLFIGIIVILVQKLQSPDMGGNESSIYLRLARSTLLLIPLFGIHYTVFAFSPENVSKRERLVFELGLGSFQGFVVAVLYCFLNGEVQAEIKRKWRSWKVNRYFAVDFKHRHPSLASSGVNGGTQLSILSKSSSQIRMSGLPADNLAT

SEQ ID NO: 24095 - protein, 74 aa, Homo sapiens
  REGION 1..74: note = ENSP00000400893
MAGVVHVSLAALLLLPMAPAMHSDCIFKKEQAMCLEKIQRANELMGFNDSSPGCPGMWDNITCWKPAHVGEMVL

SEQ ID NO: 24096 - protein, 496 aa, Homo sapiens
  REGION 1..496: note = ENSP00000379514
MAGVVHVSLAALLLLPMAPAMHSDCIFKKEQAMCLEKIQRANELMGFNDSSPGCPGMWDNITCWKPAHVGEMVLVSCPELFRIFNPDQVWETETIGESDFGDSNSLDLSDMGVVSRNCTEDGWSEPFPHYFDACGFDEYESETGDQDYYYLSVKALYTVGYSTSLVTLTTAMVILCRFRKLHCTRNFIHMNLFVSFMLRAISVFIKDWILYAEQDSNHCFISTVECKAVMVFFHYCVVSNYFWLFIEGLYLFTLLVETFFPERRYFYWYTIIGWGTPTVCVTVWATLRLYFDDTGCWDMNDSTALWWVIKGPVVGSIMVNFVLFIGIIVILVQKLQSPDMGGNESSIYFSCVQKCYCKPQRAQQHSCKMSELSTITLRLARSTLLLIPLFGIHYTVFAFSPENVSKRERLVFELGLGSFQGFVVAVLYCFLNGEVQAEIKRKWRSWKVNRYFAVDFKHRHPSLASSGVNGGTQLSILSKSSSQIRMSGLPADNLAT

SEQ ID NO: 24097 - protein, 524 aa, Homo sapiens
  REGION 1..524: note = ENSP00000386395
MAGVVHVSLAALLLLPMAPAMHSDCIFKKEQAMCLEKIQRANELMGFNDSSPGCPGMWDNITCWKPAHVGEMVLVSCPELFRIFNPDQVWETETIGESDFGDSNSLDLSDMGVVSRNCTEDGWSEPFPHYFDACGFDEYESETGDQDYYYLSVKALYTVGYSTSLVTLTTAMVILCRFRKLHCTRNFIHMNLFVSFMLRAISVFIKDWILYAEQDSNHCFISTVECKAVMVFFHYCVVSNYFWLFIEGLYLFTLLVETFFPERRYFYWYTIIGWGTPTVCVTVWATLRLYFDDTGCWDMNDSTALWWVIKGPVVGSIMVNFVLFIGIIVILVQKLQSPDMGGNESSIYLTNLSPRVPKKAREDPLPVPSDQHSLPFLSCVQKCYCKPQRAQQHSCKMSELSTITLRLARSTLLLIPLFGIHYTVFAFSPENVSKRERLVFELGLGSFQGFVVAVLYCFLNGEVQAEIKRKWRSWKVNRYFAVDFKHRHPSLASSGVNGGTQLSILSKSSSQIRMSGLPADNLAT

SEQ ID NO: 24098 - protein, 147 aa, Homo sapiens
  REGION 1..147: note = ENSP00000416622
  VARIANT 1: note = Any amino acid
XATLRLYFDDTGCWDMNDSTALWWVIKGPVVGSIMVNFVLFIGIIVILVQKLQSPDMGGNESSIYLTNLSPRVPKKAREDPLPVPSDQHSLPFLRLARSTLLLIPLFGIHYTVFAFSPENVSKRERLVFELGLGSFQGFVVAVLYCF

SEQ ID NO: 24099 - protein, 496 aa, Homo sapiens; identical to SEQ ID NO: 24096
  REGION 1..496: note = ENSP00000483721

SEQ ID NO: 24100 - protein, 726 aa, Homo sapiens
  REGION 1..726: note = ENSP00000384303
MSEETVPEAASPPPPQGQPYFDRFSEDDPEYMRLRNRAADLRQDFNLMEQKKRVTMILQSPSFREELEGLIQEQMKKGNNSSNIWALRQIADFMASTSHAVFPTSSMNVSMMTPINDLHTADSLNLAKGERLMRCKISSVYRLLDLYGWAQLSDTYVTLRVSKEQDHFLISPKGVSCSEVTASSLIKVNILGEVVEKGSSCFPVDTTGFCLHSAIYAARPDVRCIIHLHTPATAAVSAMKWGLLPVSHNALLVGDMAYYDFNGEMEQEADRINLQKCLGPTCKILVLRNHGVVALGDTVEEAFYKIFHLQAACEIQVSALSSAGGVENLILLEQEKHRPHEVGSVQWAGSTFGPMQKSRLGEHEFEALMRMLDNLGYRTGYTYRHPFVQEKTKHKSEVEIPATVTAFVFEEDGAPVPALRQHAQKQQKEKTRWLNTPNTYLRVNVADEVQRSMGSPRPKTTWMKADEVEKSSSGMPIRIENPNQFVPLYTDPQEVLEMRNKIREQNRQDVKSAGPQSQLLASVIAEKSRSPSTESQLMSKGDEDTKDDSEETVPNPFSQLTDQELEEYKKEVERKKLELDGEKETAPEEPGSPAKSAPASPVQSPAKEAETKSPLVSPSKSLEEGTKKTETSKAATTEPETTQPEGVVVNGREEEQTAEEILSKGLSQMTTSADTDVDTSKDKTESVTSGPMSPEGSPSKSPSKKKKKFRTPSFLKKSKKKEKVES

SEQ ID NO: 24101 - protein, 726 aa, Homo sapiens; identical to SEQ ID NO: 24100
  REGION 1..726: note = ENSP00000264436

SEQ ID NO: 24102 - protein, 726 aa, Homo sapiens; identical to SEQ ID NO: 24100
  REGION 1..726: note = ENSP00000384677

SEQ ID NO: 24103 - protein, 643 aa, Homo sapiens
  REGION 1..643: note = ENSP00000347972
MSEETVPEAASPPPPQGQPYFDRFSEDDPEYMRLRNRAADLRQDFNLMEQKKRVTMILQSPSFREELEGLIQEQMKKGNNSSNIWALRQIADFMASTSHAVFPTSSMNVSMMTPINDLHTADSLNLAKGERLMRCKISSVYRLLDLYGWAQLSDTYVTLRVSKEQDHFLISPKGVSCSEVTASSLIKVNILGEVVEKGSSCFPVDTTGFCLHSAIYAARPDVRCIIHLHTPATAAVSAMKWGLLPVSHNALLVGDMAYYDFNGEMEQEADRINLQKCLGPTCKILVLRNHGVVALGDTVEEAFYKIFHLQAACEIQVSALSSAGGVENLILLEQEKHRPHEVGSVQWAGSTFGPMQKSRLGEHEFEALMRMLDNLGYRTGYTYRHPFVQEKTKHKSEVEIPATVTAFVFEEDGAPVPALRQHAQKQQKEKTRWLNTPNTYLRVNVADEVQRSMGSPRPKTTWMKADEVEKSSSGMPIRIENPNQFVPLYTDPQEVLEMRNKIREQNRQDVKSAGPQSQLLASVIAEKSRSPSTESQLMSKGDEDTKDDSEETVPNPFSQLTDQELEEYKKEVERKKLELDETGQEREPGSGPAVCEFFSVALHIWSNILERKKLPQKSLAHLQSLHLLLQCRAQRRRQRQRAL

SEQ ID NO: 24104 - protein, 279 aa, Homo sapiens
  REGION 1..279: note = ENSP00000430243
MSEETVPEAASPPPPQGQPYFDRFSEDDPEYMRLRNRAADLRQDFNLMEQKKRVTMILQSPSFREELEGLIQEQMKKGNNSSNIWALRQIADFMASTSHAVFPTSSMNVSMMTPINDLHTADSLNLAKGERLMRCKISSVYRLLDLYGWAQLSDTYVTLRVSKEQDHFLISPKGVSCSEVTASSLIKEVLEMRNKIREQNRQDVKSAGPQSQLLASVIAEKSRSPSTESQLMSKGDEDTKDDSEETVPNPFSQLTDQELEEYKKEVERKKLELDETGQE

SEQ ID NO: 24105 - protein, 332 aa, Homo sapiens
  REGION 1..332: note = ENSP00000414546
MSEETVPEAASPPPPQGQPYFDRFSEDDPEYMRLRNRAADLRQDFNLMEQKKRVTMILQSPSFREELEGLIQEQMKKGNNSSNIWALRQIADFMASTSHAVFPTSSMNVSMMTPINDLHTADSLNLAKGERLMRCKISSVYRLLDLYGWAQLSDTYVTLRVSKEQDHFLISPKGVSCSEVTASSLIKVNILGEVVEKGSSCFPVDTTGFCLHSAIYAARPDVRCIIHLHTPATAAVSAMKWGLLPVSHNALLVGDMAYYDFNGEMEQEADRINLQKCLGPTCKSTESQLMSKGDEDTKDDSEETVPNPFSQLTDQELEEYKKEVERKKLELD

SEQ ID NO: 24106 - protein, 559 aa, Homo sapiens
  REGION 1..559: note = ENSP00000388072
MSEETVPEAASPPPPQGQPYFDRFSEDDPEYMRLRNRAADLRQDFNLMEQKKRVTMILQSPSFREELEGLIQEQMKKGNNSSNIWALRQIADFMASTSHAVFPTSSMNVSMMTPINDLHTADSLNLAKGERLMRCKISSVYRLLDLYGWAQLSDTYVTLRVSKEQDHFLISPKGVSCSEVTASSLIKVNILGEVVEKGSSCFPVDTTGFCLHSAIYAARPDVRCIIHLHTPATAAVSAMKWGLLPVSHNALLVGDMAYYDFNGEMEQEADRINLQKCLGPTCKILVLRNHGVVALGDTVEEAFYKIFHLQAACEIQVSALSSAGGVENLILLEQEKHRPHEVGSVQWAGSTFGPMQKSRLGEHEFEALMRMLDNLGYRTGYTYRHPFVQEKTKHKSEVEIPATVTAFVFEEDGAPVPALRQHAQKQQKEKTRWLNTPNTYLRVNVADEVQRSMGSPRPKTTWMKADEVEKSSSGMPIRIENPNQFVPLYTDPQEVLEMRNKIREQNRQDVKSAGPQSQLLASVIAEKSRSPVEQRLPLTGGETCLPSGSSVPGAGLQDP

SEQ ID NO: 24107 - protein, 575 aa, Homo sapiens
  REGION 1..575: note = ENSP00000398112
MPRRRVPGANCKPTGKMSEETVPEAASPPPPQGQPYFDRFSEDDPEYMRLRNRAADLRQDFNLMEQKKRVTMILQSPSFREELEGLIQEQMKKGNNSSNIWALRQIADFMASTSHAVFPTSSMNVSMMTPINDLHTADSLNLAKGERLMRCKISSVYRLLDLYGWAQLSDTYVTLRVSKEQDHFLISPKGVSCSEVTASSLIKVNILGEVVEKGSSCFPVDTTGFCLHSAIYAARPDVRCIIHLHTPATAAVSAMKWGLLPVSHNALLVGDMAYYDFNGEMEQEADRINLQKCLGPTCKILVLRNHGVVALGDTVEEAFYKIFHLQAACEIQVSALSSAGGVENLILLEQEKHRPHEVGSVQWAGSTFGPMQKSRLGEHEFEALMRMLDNLGYRTGYTYRHPFVQEKTKHKSEVEIPATVTAFVFEEDGAPVPALRQHAQKQQKEKTRWLNTPNTYLRVNVADEVQRSMGSPRPKTTWMKADEVEKSSSGMPIRIENPNQFVPLYTDPQEVLEMRNKIREQNRQDVKSAGPQSQLLASVIAEKSRSPVEQRLPLTGGETCLPSGSSVPGAGLQDP

SEQ ID NO: 24108 - protein, 226 aa, Homo sapiens
  REGION 1..226: note = ENSP00000412357
MSEETVPEAASPPPPQGQPYFDRFSEDDPEYMRLRNRAADLRQDFNLMEQKKRVTMILQSPSFREELEGLIQEQMKKGNNSSNIWALRQIADFMASTSHAVFPTSSMNVSMMTPINDLHTADSLNLAKGERLMRCKISSVYRLLDLYGWAQLSDTYVTLRVSKEQDHFLISPKGVSCSEVTASSLIKVNILGEVVEKGSSCFPVDTTGFCLHSAIYAARPDVRCII

SEQ ID NO: 24109 - protein, 142 aa, Homo sapiens
  REGION 1..142: note = ENSP00000412681
MSEETVPEAASPPPPQGQPYFDRFSEDDPEYMRLRNRAADLRQDFNLMEQKKRVTMILQSPSFREELEGLIQEQMKKGNNSSNIWALRQIADFMASTSHAVFPTSSMNVSMMTPINDLHTADSLNLAKGERLMRCKISSVYR

SEQ ID NO: 24110 - protein, 17 aa, Homo sapiens
  REGION 1..17: note = ENSP00000403722
MSEETVPEAASPPPPQG

SEQ ID NO: 24111 - protein, 1279 aa, Homo sapiens
  REGION 1..1279: note = ENSP00000475778
MRGHGNHSRLKSRCASLGNVHHHQAQMAHGAHCRGGRTPQSPDSRGPTAGGHTRGRWTYRPIEALINVSFPGAKGGRTAEGEPSWAWVFRSGYLQRQALPGLPVSTRVAACWWQHHPGRDSGFLGPGFIDLLREEPSGRADGKAAAQKTGRLYLFPTFLGNKLPEAADSFGEIASGNSVIFTSVLQSSHPPGTPPPSARKPSPGAAMLVCEETLELGAQGCWGSTSPRGQAVSLVGGPTAGGSRLGGAGCTMGLLMALQARRPRDGTWADPRRCSRAVEGSGLTRAALVSPGPSGVEEDTRREGCVLVGSWRSSTHRSRVLIINTPSGRTPWSQGSLGSTGRYNQTRAPGSQQQGLCSDAALHEDFVPEPTPAFFQYPPQAFSKTKVRDLGRGGLYAFSKEEKVSEAQRVEAYETHGLGLSTGRQNPVPSPCKPGCVCQGLALDAEAWPRHPGRRPCAAKEACLGPPGCSGELSLPEEEGIAPGAATAAPAWVPHGRVSRFLTVKLFTYVTMYQCKQERILRLCISGESGRYVRRSRFRNFAALMVSTGVPGVLQLGARPLRGGGHPYGDSQAGKVVEWRAGDRASGLSAGERRFLSQSELQTWPRTPHCVGKKVPQPVGAADLAPDTSLCRKEGSSASRSCRPGPGHLTRREEDSFRQLAFPRFEEVTFPPLTAAERAPSVHGGHSLASQGLVLAGRTRSVASGGKQELSGPLAACIPTQDLKTVLSLPRYPGEFLHPVVYACTAVMLLCLLASFVTYIVHQSAIRISRKGRHTLLNFCFHAALTFTVFAGGINRTKYPILCQAVGIVLHYSTLSTMLWIGVTARNIYKQVTKKAPLCLDTDQPPYPRQPLLRFYLVSGGVPFIICGVTAATNIRNYGTEDEDTACWMAWEPSLGAFYGPAAIITLVTCVYFLGTYVQLRRHPGRRYELRTQPEEQRRLATPEGGRGIRPGTPPAHDAPGASVLQNEHSFQAQLRAAAFTLFLFTATWAFGALAVSQGHFLDMVFSCLYGAFCVTLGLFVLIHHCAKREDVWQCWWACCPPRKDAHPALDANGAALGRAACLHSPGLGQPRGFAHPPGPCKMTNLQAAQGHASCLSPATPCCAKMHCEPLTADEAHVHLQEEGAFGHDPHLHGCLQGRTKPPYFSRHPAEEPEYAYHIPSSLDGSPRSSRTDSPPSSLDGPAGTHTLACCTQGDPFPMVTQPEGSDGSPALYSCPTQPGREAALGPGHLEMLRRTQSLPFGGPSQNGLPKGKLLEGLPFGTDGTGNIRTGPWKNETTV

SEQ ID NO: 24112 - protein, 560 aa, Homo sapiens
  REGION 1..560: note = ENSP00000376384
MDLKTVLSLPRYPGEFLHPVVYACTAVMLLCLLASFVTYIVHQSAIRISRKGRHTLLNFCFHAALTFTVFAGGINRTKYPILCQAVGIVLHYSTLSTMLWIGVTARNIYKQVTKKAPLCLDTDQPPYPRQPLLRFYLVSGGVPFIICGVTAATNIRNYGTEDEDTAYCWMAWEPSLGAFYGPAAIITLVTCVYFLGTYVQLRRHPGRRYELRTQPEEQRRLATPEGGRGIRPGTPPAHDAPGASVLQNEHSFQAQLRAAAFTLFLFTATWAFGALAVSQGHFLDMVFSCLYGAFCVTLGLFVLIHHCAKREDVWQCWWACCPPRKDAHPALDANGAALGRAACLHSPGLGQPRGFAHPPGPCKMTNLQAAQGHASCLSPATPCCAKMHCEPLTADEAHVHLQEEGAFGHDPHLHGCLQGRTKPPYFSRHPAEEPEYAYHIPSSLDGSPRSSRTDSPPSSLDGPAGTHTLACCTQGDPFPMVTQPEGSDGSPALYSCPTQPGREAALGPGHLEMLRRTQSLPFGGPSQNGLPKGKLLEGLPFGTDGTGNIRTGPWKNETTV

SEQ ID NO: 24113 - protein, 463 aa, Homo sapiens
  REGION 1..463: note = ENSP00000376383
MLWIGVTARNIYKQVTKKAPLCLDTDQPPYPRQPLLRFYLVSGGVPFIICGVTAATNIRNYGTEDEDTAYCWMAWEPSLGAFYGPAAIITLVTCVYFLGTYVQLRRHPGRRYELRTQPEEQRRLATPEGGRGIRPGTPPAHDAPGASVLQNEHSFQAQLRAAAFTLFLFTATWAFGALAVSQGHFLDMVFSCLYGAFCVTLGLFVLIHHCAKREDVWQCWWACCPPRKDAHPALDANGAALGRAACLHSPGLGQPRGFAHPPGPCKMTNLQAAQGHASCLSPATPCCAKMHCEPLTADEAHVHLQEEGAFGHDPHLHGCLQGRTKPPYFSRHPAEEPEYAYHIPSSLDGSPRSSRTDSPPSSLDGPAGTHTLACCTQGDPFPMVTQPEGSDGSPALYSCPTQPGREAALGPGHLEMLRRTQSLPFGGPSQNGLPKGKLLEGLPFGTDGTGNIRTGPWKNETTV

SEQ ID NO: 24114 - protein, 34 aa, Homo sapiens
  REGION 1..34: note = ENSP00000424927
MLRFYLIGGGIPIIVCGITAAANIKNYGSRPNAP

SEQ ID NO: 24115 - protein, 1321 aa, Homo sapiens
  REGION 1..1321: note = ENSP00000334952
MEPPGRRRGRAQPPLLLPLSLLALLALLGGGGGGGAAALPAGCKHDGRPRGAGRAAGAAEGKVVCSSLELAQVLPPDTLPNRTVTLILSNNKISELKNGSFSGLSLLERLDLRNNLISSIDPGAFWGLSSLKRLDLTNNRIGCLNADIFRGLTNLVRLNLSGNLFSSLSQGTFDYLASLRSLEFQTEYLLCDCNILWMHRWVKEKNITVRDTRCVYPKSLQAQPVTGVKQELLTCDPPLELPSFYMTPSHRQVVFEGDSLPFQCMASYIDQDMQVLWYQDGRIVETDESQGIFVEKNMIHNCSLIASALTISNIQAGSTGNWGCHVQTKRGNNTRTVDIVVLESSAQYCPPERVVNNKGDFRWPRTLAGITAYLQCTRNTHGSGIYPGNPQDERKAWRRCDRGGFWADDDYSRCQYANDVTRVLYMFNQMPLNLTNAVATARQLLAYTVEAANFSDKMDVIFVAEMIEKFGRFTKEEKSKELGDVMVDIASNIMLADERVLWLAQREAKACSRIVQCLQRIATYRLAGGAHVYSTYSPNIALEAYVIKSTGFTGMTCTVFQKVAASDRTGLSDYGRRDPEGNLDKQLSFKCNVSNTFSSLALKNTIVEASIQLPPSLFSPKQKRELRPTDDSLYKLQLIAFRNGKLFPATGNSTNLADDGKRRTVVTPVILTKIDGVNVDTHHIPVNVTLRRIAHGADAVAARWDFDLLNGQGGWKSDGCHILYSDENITTIQCYSLSNYAVLMDLTGSELYTQAASLLHPVVYTTAIILLLCLLAVIVSYIYHHSLIRISLKSWHMLVNLCFHIFLTCVVFVGGITQTRNASICQAVGIILHYSTLATVLWVGVTARNIYKQVTKKAKRCQDPDEPPPPPRPMLRFYLIGGGIPIIVCGITAAANIKNYGSRPNAPYCWMAWEPSLGAFYGPASFITFVNCMYFLSIFIQLKRHPERKYELKEPTEEQQRLAANENGEINHQDSMSLSLISTSALENEHTFHSQLLGASLTLLLYVALWMFGALAVSLYYPLDLVFSFVFGATSLSFSAFFVVHHCVNREDVRLAWIMTCCPGRSSYSVQVNVQPPNSNGTNGEAPKCPNSSAESSCTNKSASSFKNSSQGCKLTNLQAAAAQCHANSLPLNSTPQLDNSLTEHSMDNDIKMHVAPLEVQFRTNVHSSRHHKNRSKGHRASRLTVLREYAYDVPTSVEGSVQNGLPKSRLGNNEGHSRSRRAYLAYRERQYNPPQQDSSDACSTLPKSSRNFEKPVSTTSKKDALRKPAVVELENQQKSYGLNLAIQNGPIKSNGQEGPLLGTDSTGNVRTGLWKHETTV

SEQ ID NO: 24116 - protein, 381 aa, Homo sapiens
  REGION 1..381: note = ENSP00000422606
MPLKRNNSKYPPLELPSFYMTPSHRQVVFEGDSLPFQCMASYIDQDMQVLWYQDGRIVETDESQGIFVEKNMIHNCSLIASALTISNIQAGSTGNWGCHVQTKRGNNTRTVDIVVLESSAQYCPPERVVNNKGDFRWPRTLAGITAYLQCTRNTHGSGIYPGNPQDERKAWRRCDRGGFWADDDYSRCQYANDVTRVLYMFNQMPLNLTNAVATARQLLAYTVEAANFSDKMDVIFVAEMIEKFGRFTKEEKSKELGDVMVDIASNIMLADERVLWLAQREAKACSRIVQCLQRIATYRLAGGAHVYSTYSPNIALEAYVIKSTGFTGMTCTVFQKVAASDRTGLSDYGRRDPEGNLDKQLSFKCNVSNTFSSLALKGKFR

SEQ ID NO: 24117 - protein, 616 aa, Homo sapiens
  REGION 1..616: note = ENSP00000421006
MEPPGRRRGRAQPPLLLPLSLLALLALLGGGGGGGAAALPAGCKHDGRPRGAGRAAGAAEGKVVCSSLELAQVLPPDTLPNRTVTLILSNNKISELKNGSFSGLSLLERLDLRNNLISSIDPGAFWGLSSLKRLDLTNNRIGCLNADIFRGLTNLVRLNLSGNLFSSLSQGTFDYLASLRSLEFQTEYLLCDCNILWMHRWVKEKNITVRDTRCVYPKSLQAQPVTGVKQELLTCDPPLELPSFYMTPSHRQVVFEGDSLPFQCMASYIDQDMQVLWYQDGRIVETDESQGIFVEKNMIHNCSLIASALTISNIQAGSTGNWGCHVQTKRGNNTRTVDIVVLESSAQYCPPERVVNNKGDFRWPRTLAGITAYLQCTRNTHGSGIYPGNPQDERKAWRRCDRGGFWADDDYSRCQYANDVTRVLYMFNQMPLNLTNAVATARQLLAYTVEAANFSDKMDVIFVAEMIEKFGRFTKEEKSKELGDVMVDIASNIMLADERVLWLAQREAKACSRIVQCLQRIATYRLAGGAHVYSTYSPNIALEAYVIKSTGFTGMTCTVFQKVAASDRTGLSDYGRRDPEGNLDKQLSFKCNVSNTFSSLALKVCYILQSFKTIYS

SEQ ID NO: 24118 - protein, 97 aa, Homo sapiens
  REGION 1..97: note = ENSP00000425223
MASYIDQDMQVLWYQDGRIVETDESQGIFVEKNMIHNCSLIASALTISNIQAGSTGNWGCHVQTKRGNNTRTVDIVVLESSAQYCPPERVVNNKGDF

SEQ ID NO: 24119 - protein, 49 aa, Homo sapiens
  REGION 1..49: note = ENSP00000456781
MTPQSLLQTTLFLLSLLFLVQGAHGRGHREDFRFCSQRNQTHRSSLHYK

SEQ ID NO: 24120 - protein, 81 aa, Homo sapiens
  REGION 1..81: note = ENSP00000454321
MTPQSLLQTTLFLLSLLFLVQGRCPRQGPQGRLSLLQPAEPDTQEQPPLQTHTRPAHLHRELRRGPHSPCPFPCSPPCFPI

SEQ ID NO: 24121 - protein, 70 aa, Homo sapiens
  REGION 1..70: note = ENSP00000456166
MTPQSLLQTTLFLLSLLFLVQGAHGRGHREDFRFCSQRNQTHRSSLHYKPTPDLRISIENSEEALTVHAP

SEQ ID NO: 24122 - protein, 90 aa, Homo sapiens
  REGION 1..90: note = ENSP00000455812
MTPQSLLQTTLFLLSLLFLVQASASSGAHGRGHREDFRFCSQRNQTHRSSLHYKPTPDLRISIENSEEALTVHAPFPAAHPASRSFPDPR

SEQ ID NO: 24123 - protein, 140 aa, Homo sapiens
  REGION 1..140: note = ENSP00000456469
MTPQSLLQTTLFLLSLLFLVQGAHGRGHREDFRFCSQRNQTHRSSLHYKPTPDLRISIENSEEALTVHAPFPAAHPASRSFPDPRGLYHFCLYWNRHAGRLHLLYGKRDFLLSDKASSLLCFQHQEESLAQGPPLLATSV

SEQ ID NO: 24124 - protein, 97 aa, Homo sapiens
  REGION 1..97: note = ENSP00000455245
MTPQSLLQTTLFLLSLLFLVQGSGTRHTGAASTTNPHQTCASPSRTPKRPSQSMPLSLQPTLLPDPSLTPGASTTSASTGTDMLGDYIFSMASVTSC

SEQ ID NO: 24125 - protein, 687 aa, Homo sapiens
  REGION 1..687: note = ENSP00000457456
MTPQSLLQTTLFLLSLLFLVQGAHGRGHREDFRFCSQRNQTHRSSLHYKPTPDLRISIENSEEALTVHAPFPAAHPASRSFPDPRGLYHFCLYWNRHAGRLHLLYGKRDFLLSDKASSLLCFQHQEESLAQGPPLLATSVTSWWSPQNISLPSAASFTFSFHSPPHTAAHNASVDMCELKRDLQLLSQFLKHPQKASRRPSAAPASQQLQSLESKLTSVRFMGDMVSFEEDRINATVWKLQPTAGLQDLHIHSRQEEEQSEIMEYSVLLPRTLFQRTKGRSGEAEKRLLLVDFSSQALFQDKNSSQVLGEKVLGIVVQNTKVANLTEPVVLTFQHQLQPKNVTLQCVFWVEDPTLSSPGHWSSAGCETVRRETQTSCFCNHLTYFAVLMVSSVEVDAVHKHYLSLLSYVGCVVSALACLVTIAAYLCSRRKPRDYTIKVHMNLLLAVFLLDTSFLLSEPVALTGSEAGCRASAIFLHFSLLTCLSWMGLEGYNLYRLVVEVFGTYVPGYLLKLSAMGWGFPIFLVTLVALVDVDNYGPIILAVHRTPEGVIYPSMCWIRDSLVSYITNLGLFSLVFLFNMAMLATMVVQILRLRPHTQKWSHVLTLLGLSLVLGLPWALIFFSFASGTFQLVVLYLFSIITSFQGFLIFIWYWSMRLQARGGPSPLKSNSDSARLPISSGSTSSSRI

SEQ ID NO: 24126 - protein, 693 aa, Homo sapiens
  REGION 1..693: note = ENSP00000455215
MTPQSLLQTTLFLLSLLFLVQGAHGRGHREDFRFCSQRNQTHRSSLHYKPTPDLRISIENSEEALTVHAPFPAAHPASRSFPDPRGLYHFCLYWNRHAGRLHLLYGKRDFLLSDKASSLLCFQHQEESLAQGPPLLATSVTSWWSPQNISLPSAASFTFSFHSPPHTAAHNASVDMCELKRDLQLLSQFLKHPQKASRRPSAAPASQQLQSLESKLTSVRFMGDMVSFEEDRINATVWKLQPTAGLQDLHIHSRQEEEQSEIMEYSVLLPRTLFQRTKGRSGEAEKRLLLVDFSSQALFQDKNSSQVLGEKVLGIVVQNTKVANLTEPVVLTFQHQLQPKNVTLQCVFWVEDPTLSSPGHWSSAGCETVRRETQTSCFCNHLTYFAVLMVSSVEVDAVHKHYLSLLSYVGCVVSALACLVTIAAYLCSRVPLPCRRKPRDYTIKVHMNLLLAVFLLDTSFLLSEPVALTGSEAGCRASAIFLHFSLLTCLSWMGLEGYNLYRLVVEVFGTYVPGYLLKLSAMGWGFPIFLVTLVALVDVDNYGPIILAVHRTPEGVIYPSMCWIRDSLVSYITNLGLFSLVFLFNMAMLATMVVQILRLRPHTQKWSHVLTLLGLSLVLGLPWALIFFSFASGTFQLVVLYLFSIITSFQGFLIFIWYWSMRLQARGGPSPLKSNSDSARLPISSGSTSSSRI

SEQ ID NO: 24127 - protein, 103 aa, Homo sapiens
  REGION 1..103: note = ENSP00000456796
MTPQSLLQTTLFLLSLLFLVQASASSGAHGRGHREDFRFCSQRNQTHRSSLHYKPTPDLRISIENSEEALTVHAPFPAAHPASRSFPDPRGLYHFCLYWNRHA

SEQ ID NO: 24128 - protein, 256 aa, Homo sapiens
  REGION 1..256: note = ENSP00000456238
MTPQSLLQTTLFLLSLLFLVQGAHGRGHREDFRFCSQRNQTHRSSLHYKPTPDLRISIENSEEALTVHAPFPAAHPASRSFPDPRGLYHFCLYWNRHAGRLHLLYGKRDFLLSDKASSLLCFQHQEESLAQGPPLLATSVTSWWSPQNISLPSAASFTFSFHSPPHTAAHNASVDMCELKRDLQLLSQFLKHPQKASRRPSAAPASQQLQSLESKLTSVRFMGDMVSFEEDRINATVWKLQPTAGLQDLHIHSRQE

SEQ ID NO: 24129 - protein, 693 aa, Homo sapiens; identical to SEQ ID NO: 24126
  REGION 1..693: note = ENSP00000456794

SEQ ID NO: 24130 - protein, 110 aa, Homo sapiens
  REGION 1..110: note = ENSP00000457979
MTPQSLLQTTLFLLSLLFLVQGAHGRGHREDFRFCSQRNQTHRSSLHYKPTPDLRISIENSEEALTVHAPFPAAHPASRSFPDPRGLYHFCLYWNRHAGRLHLLYGKRDF

SEQ ID NO: 24131 - protein, 125 aa, Homo sapiens
  REGION 1..125: note = ENSP00000454263
MTPQSLLQTTLFLLSLLFLVQASASSGAHGRGHREDFRFCSQRNQTHRSSLHYKPTPDLRISIENSEEALTVHAPFPAAHPASRSFPDPRGLYHFCLYWNRHAGRLHLLYGKRDFLLSDKASSLL

SEQ ID NO: 24132 - protein, 146 aa, Homo sapiens
  REGION 1..146: note = ENSP00000454607
MTPQSLLQTTLFLLSLLFLVQASASSGAHGRGHREDFRFCSQRNQTHRSSLHYKPTPDLRISIENSEEALTVHAPFPAAHPASRSFPDPRGLYHFCLYWNRHAGRLHLLYGKRDFLLSDKASSLLCFQHQEESLAQGPPLLATSVT

SEQ ID NO: 24133 - protein, 162 aa, Homo sapiens
  REGION 1..162: note = ENSP00000458063
MTPQSLLQTTLFLLSLLFLVQGAHGRGHREDFRFCSQRNQTHRSSLHYKPTPDLRISIENSEEALTVHAPFPAAHPASRSFPDPRGLYHFCLYWNRHAGRLHLLYGKRDFLLSDKASSLLCFQHQEESLAQGPPLLATSVTSWWSPQNISLPSAASFTFSFH

SEQ ID NO: 24134 - protein, 118 aa, Homo sapiens
  REGION 1..118: note = ENSP00000457307
MTPQSLLQTTLFLLSLLFLVQGAHGRGHREDFRFCSQRNQTHRSSLHYKPTPDLRISIENSEEALTVHAPFPAAHPASRSFPDPRGLYHFCLYWNRHAGRLHLLYGKRDFLLSDKASS

SEQ ID NO: 24135 - protein, 119 aa, Homo sapiens
  REGION 1..119: note = ENSP00000454364
MTPQSLLQTTLFLLSLLFLVQGAHGRGHREDFRFCSQRNQTHRSSLHYKPTPDLRISIENSEEALTVHAPFPAAHPASRSFPDPRGLYHFCLYWNRHAGRLHLLYGKRDFLLSDKASSL

SEQ ID NO: 24136 - protein, 167 aa, Homo sapiens
  REGION 1..167: note = ENSP00000455600
MTPQSLLQTTLFLLSLLFLVQGAHGRGHREDFRFCSQRNQTHRSSLHYKPTPDLRISIENSEEALTVHAPFPAAHPASRSFPDPRGLYHFCLYWNRHAGRLHLLYGKRDFLLSDKASSLLCFQHQEESLAQGPPLLATSVTSWWSPQNISLPSAASFTFSFHSPPHT

SEQ ID NO: 24137 - protein, 42 aa, Homo sapiens
  REGION 1..42: note = ENSP00000456494
MTPQSLLQTTLFLLSLLFLVQGAHGRGHREDFRFCSQRNQTH

SEQ ID NO: 24138 - protein, 159 aa, Homo sapiens
  REGION 1..159: note = ENSP00000456002
MTPQSLLQTTLFLLSLLFLVQGAHGRGHREDFRFCSQRNQTHRSSLHYKPTPDLRISIENSEEALTVHAPFPAAHPASRSFPDPRGLYHFCLYWNRHAGRLHLLYGKRDFLLSDKASSLLCFQHQEESLAQGPPLLATSVTSWWSPQNISLPSAASFTF

SEQ ID NO: 24139 - protein, 687 aa, Homo sapiens; identical to SEQ ID NO: 24125
  REGION 1..687: note = ENSP00000455351

SEQ ID NO: 24140 - protein, 113 aa, Homo sapiens
  REGION 1..113: note = ENSP00000457073
MTPQSLLQTTLFLLSLLFLVQGAHGRGHREDFRFCSQRNQTHRSSLHYKPTPDLRISIENSEEALTVHAPFPAAHPASRSFPDPRGLYHFCLYWNRHAGRLHLLYGKRDFLLS

SEQ ID NO: 24141 - protein, 56 aa, Homo sapiens
  REGION 1..56: note = ENSP00000457122
MTPQSLLQTTLFLLSLLFLVQGAHGRGHREDFRFCSQRNQTHRSSLHYKPTPDLRI

SEQ ID NO: 24142 - protein, 107 aa, Homo sapiens
  REGION 1..107: note = ENSP00000456787
MTPQSLLQTTLFLLSLLFLVQGAHGRGHREDFRFCSQRNQTHRSSLHYKPTPDLRISIENSEEALTVHAPFPAAHPASRSFPDPRGLYHFCLYWNRHAGRLHLLYGK

SEQ ID NO: 24143 - protein, 116 aa, Homo sapiens
  REGION 1..116: note = ENSP00000456632
MTPQSLLQTTLFLLSLLFLVQGAHGRGHREDFRFCSQRNQTHRSSLHYKPTPDLRISIENSEEALTVHAPFPAAHPASRSFPDPRGLYHFCLYWNRHAGRLHLLYGKRDFLLSDKA

SEQ ID NO: 24144 - protein, 687 aa, Homo sapiens; identical to SEQ ID NO: 24125
  REGION 1..687: note = ENSP00000373465

SEQ ID NO: 24145 - protein, 97 aa, Homo sapiens
  REGION 1..97: note = ENSP00000454574
MTPQSLLQTTLFLLSLLFLVQASGTRHTGAASTTNPHQTCASPSRTPKRPSQSMPLSLQPTLLPDPSLTPGASTTSASTGTDMLGDYIFSMASVTSC

SEQ ID NO: 24146 - protein, 687 aa, Homo sapiens; identical to SEQ ID NO: 24125
  REGION 1..687: note = ENSP00000456620

SEQ ID NO: 24147 - protein, 198 aa, Homo sapiens
  REGION 1..198: note = ENSP00000454855
MTPQSLLQTTLFLLSLLFLVQASASSGAHGRGHREDFRFCSQRNQTHRSSLHYKPTPDLRISIENSEEALTVHAPFPAAHPASRSFPDPRGLYHFCLYWNRHAGRLHLLYGKRDFLLSDKASSLLCFQHQEESLAQGPPLLATSVTSWWSPQNISLPSAASFTFSFHSPPHTAAHNASVDMCELKRDLQLLSQFLKHP

SEQ ID NO: 24148 - protein, 97 aa, Homo sapiens; identical to SEQ ID NO: 24145
  REGION 1..97: note = ENSP00000454879

SEQ ID NO: 24149 - protein, 78 aa, Homo sapiens
  REGION 1..78: note = ENSP00000455209
MTPQSLLQTTLFLLSLLFLVQGRCPRQGPQGRLSLLQPAEPDTQEQPPLQTHTRPAHLHRELRRGPHSPCPFPCSPPC

SEQ ID NO: 24150 - protein, 144 aa, Homo sapiens
  REGION 1..144: note = ENSP00000458014
MTPQSLLQTTLFLLSLLFLVQASASSGAHGRGHREDFRFCSQRNQTHRSSLHYKPTPDLRISIENSEEALTVHAPFPAAHPASRSFPDPRGLYHFCLYWNRHAGRLHLLYGKRDFLLSDKASSLLCFQHQEESLAQGPPLLATS

SEQ ID NO: 24151 - protein, 90 aa, Homo sapiens
  REGION 1..90: note = ENSP00000456603
MTPQSLLQTTLFLLSLLFLVQAPATGSHLQPLPPQVPTAGATGKTFASAASGTRHTGAASTTNPHQTCASPSRTPKRPSQSMPLSLQPTL

SEQ ID NO: 24152 - protein, 114 aa, Homo sapiens
  REGION 1..114: note = ENSP00000457657
MTPQSLLQTTLFLLSLLFLVQASASSGAHGRGHREDFRFCSQRNQTHRSSLHYKPTPDLRISIENSEEALTVHAPFPAAHPASRSFPDPRGLYHFCLYWNRHAGRLHLLYGKRD

SEQ ID NO: 24153 - protein, 116 aa, Homo sapiens; identical to SEQ ID NO: 24143
  REGION 1..116: note = ENSP00000455074

SEQ ID NO: 24154 - protein, 98 aa, Homo sapiens
  REGION 1..98: note = ENSP00000455226
MTPQSLLQTTLFLLSLLFLVQASASSGAHGRGHREDFRFCSQRNQTHRSSLHYKPTPDLRISIENSEEALTVHAPFPAAHPASRSFPDPRGLYHFCLY

SEQ ID NO: 24155 - protein, 95 aa, Homo sapiens
  REGION 1..95: note = ENSP00000455553
MTPQSLLQTTLFLLSLLFLVQAHPASRSFPDPRGLYHFCLYWNRHAGRLHLLYGKRDFLLSDKASSLLCFQHQEESLAQGPPLLATSVTSWWSPQ

SEQ ID NO: 24156 - protein, 84 aa, Homo sapiens
  REGION 1..84: note = ENSP00000457143
MTPQSLLQTTLFLLSLLFLVQGAHGRGHREDFRFCSQRNQTHRSSLHYKPTPDLRISIENSEEALTVHAPFPAAHPASRSFPDP

SEQ ID NO: 24157 - protein, 77 aa, Homo sapiens
  REGION 1..77: note = ENSP00000456819
MTPQSLLQTTLFLLSLLFLVQGAHGRGHREDFRFCSQRNQTHRSSLHYKPTPDLRISIENSEEALTVHAPFPAAHPA

SEQ ID NO: 24158 - protein, 168 aa, Homo sapiens
  REGION 1..168: note = ENSP00000455176
MTPQSLLQTTLFLLSLLFLVQASASSGAHGRGHREDFRFCSQRNQTHRSSLHYKPTPDLRISIENSEEALTVHAPFPAAHPASRSFPDPRGLYHFCLYWNRHAGRLHLLYGKRDFLLSDKASSLLCFQHQEESLAQGPPLLATSVTSWWSPQNISLPSAASFTFSFHS

SEQ ID NO: 24159 - protein, 6 aa, Homo sapiens
  REGION 1..6: note = ENSP00000454490
MTPQSL

SEQ ID NO: 24160 - protein, 54 aa, Homo sapiens
  REGION 1..54: note = ENSP00000455965
MTPQSLLQTTLFLLSLLFLVQGAHGRGHREDFRFCSQRNQTHRSSLHYKPTPDL

SEQ ID NO: 24161 - protein, 94 aa, Homo sapiens
  REGION 1..94: note = ENSP00000454933
MTPQSLLQTTLFLLSLLFLVQGAHGRGHREDFRFCSQRNQTHRSSLHYKPTPDLRISIENSEEALTVHAPFPAAHPASRSFPDPRGLYHFCLYW

SEQ ID NO: 24162 - protein, 97 aa, Homo sapiens; identical to SEQ ID NO: 24124
  REGION 1..97: note = ENSP00000454779

SEQ ID NO: 24163 - protein, 97 aa, Homo sapiens; identical to SEQ ID NO: 24145
  REGION 1..97: note = ENSP00000457612

SEQ ID NO: 24164 - protein, 118 aa, Homo sapiens
  REGION 1..118: note = ENSP00000457063
MTPQSLLQTTLFLLSLLFLVQASASSGAHGRGHREDFRFCSQRNQTHRSSLHYKPTPDLRISIENSEEALTVHAPFPAAHPASRSFPDPRGLYHFCLYWNRHAGRLHLLYGKRDFLLS

SEQ ID NO: 24165 - protein, 68 aa, Homo sapiens
  REGION 1..68: note = ENSP00000457994
MTPQSLLQTTLFLLSLLFLVQASSLLCFQHQEESLAQGPPLLATSVTSWWSPQNISLPSAASFTFSFH

SEQ ID NO: 24166 - protein, 118 aa, Homo sapiens; identical to SEQ ID NO: 24164
  REGION 1..118: note = ENSP00000456256

SEQ ID NO: 24167 - protein, 687 aa, Homo sapiens; identical to SEQ ID NO: 24125
  REGION 1..687: note = ENSP00000444911

SEQ ID NO: 24168 - protein, 125 aa, Homo sapiens
  REGION 1..125: note = ENSP00000456682
MTPQSLLQTTLFLLSLLFLVQAHPASRSFPDPRGLYHFCLYWNRHAGRLHLLYGKRDFLLSDKASSLLCFQHQEESLAQGPPLLATSVTSWWSPQNISLPSAASFTFSFHSPPHTAAHNASVDMC

SEQ ID NO: 24169 - protein, 100 aa, Homo sapiens
  REGION 1..100: note = ENSP00000457223
MTPQSLLQTTLFLLSLLFLVQGAHGRGHREDFRFCSQRNQTHRSSLHYKPTPDLRISIENSEEALTVHAPFPAAHPASRSFPDPRGLYHFCLYWNRHAGR

SEQ ID NO: 24170 - protein, 84 aa, Homo sapiens; identical to SEQ ID NO: 24156
  REGION 1..84: note = ENSP00000458087

SEQ ID NO: 24171 - protein, 111 aa, Homo sapiens
  REGION 1..111: note = ENSP00000456147
MTPQSLLQTTLFLLSLLFLVQGAHGRGHREDFRFCSQRNQTHRSSLHYKPTPDLRISIENSEEALTVHAPFPAAHPASRSFPDPRGLYHFCLYWNRHAGRLHLLYGKRDFL

SEQ ID NO: 24172 - protein, 94 aa, Homo sapiens; identical to SEQ ID NO: 24161
  REGION 1..94: note = ENSP00000454233

SEQ ID NO: 24173 - protein, 167 aa, Homo sapiens; identical to SEQ ID NO: 24136
  REGION 1..167: note = ENSP00000456362

SEQ ID NO: 24174 - protein, 154 aa, Homo sapiens
  REGION 1..154: note = ENSP00000456263
MTPQSLLQTTLFLLSLLFLVQGAHGRGHREDFRFCSQRNQTHRSSLHYKPTPDLRISIENSEEALTVHAPFPAAHPASRSFPDPRGLYHFCLYWNRHAGRLHLLYGKRDFLLSDKASSLLCFQHQEESLAQGPPLLATSVTSWWSPQNISLPSA

SEQ ID NO: 24175 - protein, 131 aa, Homo sapiens
  REGION 1..131: note = ENSP00000454289
MTPQSLLQTTLFLLSLLFLVQGAHGRGHREDFRFCSQRNQTHRSSLHYKPTPDLRISIENSEEALTVHAPFPAAHPASRSFPDPRGLYHFCLYWNRHAGRLHLLYGKRDFLLSDKASSLLCFQHQEESLAQ

SEQ ID NO: 24176 - protein, 118 aa, Homo sapiens
  REGION 1..118: note = ENSP00000456544
MTPQSLLQTTLFLLSLLFLVQAPATGSHLQPLPPQVPTAGATGKTFASAASGTRHTGAASTTNPHQTCASPSRTPKRPSQSMPLSLQPTLLPDPSLTPGASTTSASTGTDMLGDYIFS

SEQ ID NO: 24177 - protein, 199 aa, Homo sapiens
  REGION 1..199: note = ENSP00000457953
MTPQSLLQTTLFLLSLLFLVQGAHGRGHREDFRFCSQRNQTHRSSLHYKPTPDLRISIENSEEALTVHAPFPAAHPASRSFPDPRGLYHFCLYWNRHAGRLHLLYGKRDFLLSDKASSLLCFQHQEESLAQGPPLLATSVTSWWSPQNISLPSAASFTFSFHSPPHTAAHNASVDMCELKRDLQLLSQFLKHPQKASRR

SEQ ID NO: 24178 - protein, 164 aa, Homo sapiens
  REGION 1..164: note = ENSP00000457806
MTPQSLLQTTLFLLSLLFLVQASASSGAHGRGHREDFRFCSQRNQTHRSSLHYKPTPDLRISIENSEEALTVHAPFPAAHPASRSFPDPRGLYHFCLYWNRHAGRLHLLYGKRDFLLSDKASSLLCFQHQEESLAQGPPLLATSVTSWWSPQNISLPSAASFTF

SEQ ID NO: 24179 - protein, 131 aa, Homo sapiens; identical to SEQ ID NO: 24175
  REGION 1..131: note = ENSP00000456599

SEQ ID NO: 24180 - protein, 122 aa, Homo sapiens
  REGION 1..122: note = ENSP00000457635
MTPQSLLQTTLFLLSLLFLVQGAHGRGHREDFRFCSQRNQTHRSSLHYKPTPDLRISIENSEEALTVHAPFPAAHPASRSFPDPRGLYHFCLYWNRHAGRLHLLYGKRDFLLSDKASSLLCF

SEQ ID NO: 24181 - protein, 153 aa, Homo sapiens
  REGION 1..153: note = ENSP00000457178
MTPQSLLQTTLFLLSLLFLVQGAHGRGHREDFRFCSQRNQTHRSSLHYKPTPDLRISIENSEEALTVHAPFPAAHPASRSFPDPRGLYHFCLYWNRHAGRLHLLYGKRDFLLSDKASSLLCFQHQEESLAQGPPLLATSVTSWWSPQNISLPS

SEQ ID NO: 24182 - protein, 187 aa, Homo sapiens
  REGION 1..187: note = ENSP00000456731
  VARIANT 1: note = Any amino acid
XSVDMCELKRDLQLLSQFLKHPQKASRRPSAAPASQQLQSLESKLTSVRFMGDMVSFEEDRINATVWKLQPTAGLQDLHIHSRQEEEQSEIMEYSVLLPRTLFQRTKGRSGEAEKRLLLVDFSSQALFQDKNSSQVLGEKVFGTYVPGYLLKLSAMGWGFPIFLVTLVALVDVDNYGPIILAVHRTP

SEQ ID NO: 24183 - protein, 692 aa, Homo sapiens
  REGION 1..692: note = ENSP00000398034
MTPQSLLQTTLFLLSLLFLVQASASSGAHGRGHREDFRFCSQRNQTHRSSLHYKPTPDLRISIENSEEALTVHAPFPAAHPASRSFPDPRGLYHFCLYWNRHAGRLHLLYGKRDFLLSDKASSLLCFQHQEESLAQGPPLLATSVTSWWSPQNISLPSAASFTFSFHSPPHTAAHNASVDMCELKRDLQLLSQFLKHPQKASRRPSAAPASQQLQSLESKLTSVRFMGDMVSFEEDRINATVWKLQPTAGLQDLHIHSRQEEEQSEIMEYSVLLPRTLFQRTKGRSGEAEKRLLLVDFSSQALFQDKNSSQVLGEKVLGIVVQNTKVANLTEPVVLTFQHQLQPKNVTLQCVFWVEDPTLSSPGHWSSAGCETVRRETQTSCFCNHLTYFAVLMVSSVEVDAVHKHYLSLLSYVGCVVSALACLVTIAAYLCSRRKPRDYTIKVHMNLLLAVFLLDTSFLLSEPVALTGSEAGCRASAIFLHFSLLTCLSWMGLEGYNLYRLVVEVFGTYVPGYLLKLSAMGWGFPIFLVTLVALVDVDNYGPIILAVHRTPEGVIYPSMCWIRDSLVSYITNLGLFSLVFLFNMAMLATMVVQILRLRPHTQKWSHVLTLLGLSLVLGLPWALIFFSFASGTFQLVVLYLFSIITSFQGFLIFIWYWSMRLQARGGPSPLKSNSDSARLPISSGSTSSSRI

SEQ ID NO: 24184 - protein, 1240 aa, Homo sapiens
  REGION 1..1240: note = ENSP00000423388
MWPSQLLIFMMLLAPIIHAFSRAPIPMAVVRRELSCESYPIELRCPGTDVIMIESANYGRTDDKICDSDPAQMENIRCYLPDAYKIMSQRCNNRTQCAVVAGPDVFPDPCPGTYKYLEVQYECVPYKVEQKVFLCPGLLKGVYQSEHLFESDHQSGAWCKDPLQASDKIYYMPWTPYRTDTLTEYSSKDDFIAGRPTTTYKLPHRVDGTGFVVYDGALFFNKERTRNIVKFDLRTRIKSGEAIIANANYHDTSPYRWGGKSDIDLAVDENGLWVIYATEQNNGKIVISQLNPYTLRIEGTWDTAYDKRSASNAFMICGILYVVKSVYEDDDNEATGNKIDYIYNTDQSKDSLVDVPFPNSYQYIAAVDYNPRDNLLYVWNNYHVVKYSLDFGPLDSRSGQAHHGQVSYISPPIHLDSELERPSVKDISTTGPLGMGSTTTSTTLRTTTLSPGRSTTPSVSGRRNRSTSTPSPAVEVLDDMTTHLPSASSQIPALEESCEAVEAREIMWFKTRQGQIAKQPCPAGTIGVSTYLCLAPDGIWDPQGPDLSNCSSPWVNHITQKLKSGETAANIARELAEQTRNHLNAGDITYSVRAMDQLVGLLDVQLRNLTPGGKDSAARSLNKLQKRERSCRAYVQAMVETVNNLLQPQALNAWRDLTTSDQLRAATMLLHTVEESAFVLADNLLKTDIVRENTDNIKLEVARLSTEGNLEDLKFPENMGHGSTIQLSANTLKQNGRNGEIRVAFVLYNNLGPYLSTENASMKLGTEALSTNHSVIVNSPVITAAINKEFSNKVYLADPVVFTVKHIKQSEENFNPNCSFWSYSKRTMTGYWSTQGCRLLTTNKTHTTCSCNHLTNFAVLMAHVEVKHSDAVHDLLLDVITWVGILLSLVCLLICIFTFCFFRGLQSDRNTIHKNLCISLFVAELLFLIGINRTDQPIACAVFAALLHFFFLAAFTWMFLEGVQLYIMLVEVFESEHSRRKYFYLVGYGMPALIVAVSAAVDYRSYGTDKVCWLRLDTYFIWSFIGPATLIIMLNVIFLGIALYKMFHHTAILKPESGCLDNINYEDNRPFIKSWVIGAIALLCLLGLTWAFGLMYINESTVIMAYLFTIFNSLQGMFIFIFHCVLQKKVRKEYGKCLRTHCCSGKSTESSIGSGKTSGSRTPGRYSTGSQSRIRRMWNDTVRKQSESSFITGDINSSASLNREPYRETSMGVKLNIAYQIGASEQCQGYKCHGYSTTEW

SEQ ID NO: 24185 - protein, 1469 aa, Homo sapiens
  REGION 1..1469: note = ENSP00000422533
MWPSQLLIFMMLLAPIIHAFSRAPIPMAVVRRELSCESYPIELRCPGTDVIMIESANYGRTDDKICDSDPAQMENIRCYLPDAYKIMSQRCNNRTQCAVVAGPDVFPDPCPGTYKYLEVQYECVPYKVEQKVFLCPGLLKGVYQSEHLFESDHQSGAWCKDPLQASDKIYYMPWTPYRTDTLTEYSSKDDFIAGRPTTTYKLPHRVDGTGFVVYDGALFFNKERTRNIVKFDLRTRIKSGEAIIANANYHDTSPYRWGGKSDIDLAVDENGLWVIYATEQNNGKIVISQLNPYTLRIEGTWDTAYDKRSASNAFMICGILYVVKSVYEDDDNEATGNKIDYIYNTDQSKDSLVDVPFPNSYQYIAAVDYNPRDNLLYVWNNYHVVKYSLDFGPLDSRSGQAHHGQVSYISPPIHLDSELERPSVKDISTTGPLGMGSTTTSTTLRTTTLSPGRSTTPSVSGRRNRSTSTPSPAVEVLDDMTTHLPSASSQIPALEESCEAVEAREIMWFKTRQGQIAKQPCPAGTIGVSTYLCLAPDGIWDPQGPDLSNCSSPWVNHITQKLKSGETAANIARELAEQTRNHLNAGDITYSVRAMDQLVGLLDVQLRNLTPGGKDSAARSLNKLQKRERSCRAYVQAMVETVNNLLQPQALNAWRDLTTSDQLRAATMLLHTVEESAFVLADNLLKTDIVRENTDNIKLEVARLSTEGNLEDLKFPENMGHGSTIQLSANTLKQNGRNGEIRVAFVLYNNLGPYLSTENASMKLGTEALSTNHSVIVNSPVITAAINKEFSNKVYLADPVVFTVKHIKQSEENFNPNCSFWSYSKRTMTGYWSTQGCRLLTTNKTHTTCSCNHLTNFAVLMAHVEVKHSDAVHDLLLDVITWVGILLSLVCLLICIFTFCFFRGLQSDRNTIHKNLCISLFVAELLFLIGINRTDQPIACAVFAALLHFFFLAAFTWMFLEGVQLYIMLVEVFESEHSRRKYFYLVGYGMPALIVAVSAAVDYRSYGTDKVCWLRLDTYFIWSFIGPATLIIMLNVIFLGIALYKMFHHTAILKPESGCLDNINYEDNRPFIKSWVIGAIALLCLLGLTWAFGLMYINESTVIMAYLFTIFNSLQGMFIFIFHCVLQKKVRKEYGKCLRTHCCSGKSTESSIGSGKTSGSRTPGRYSTGSQSRIRRMWNDTVRKQSESSFITGDINSSASLNREGLLNNARDTSVMDTLPLNGNHGNSYSIASGEYLSNCVQIIDRGYNHNETALEKKILKELTSNYIPSYLNNHERSSEQNRNLMNKLVNNLGSGREDDAIVLDDATSFNHEESLGLELIHEESDAPLLPPRVYSTENHQPHHYTRRRIPQDHSESFFPLLTNEHTEDLQSPHRDSLYTSMPTLAGVAATESVTTSTQTEPPPAKCGDAEDVYYKSMPNLGSRNHVHQLHTYYQLGRGSSDGFIVPPNKDGTPPEGSSKGPAHLVTSL

SEQ ID NO: 24186 - protein, 1308 aa, Homo sapiens
  REGION 1..1308: note = ENSP00000423787
MWPSQLLIFMMLLAPIIHGGKHSERHPALAAPLRHAERSPGGALPPRHLLQQPAAERTAAHRGQGPRGATRGVRGPGAQGAQIAAQAFSRAPIPMAVVRRELSCESYPIELRCPGTDVIMIESANYGRTDDKICDSDPAQMENIRCYLPDAYKIMSQRCNNRTQCAVVAGPDVFPDPCPGTYKYLEVQYECVPYKVEQKVFLCPGLLKGVYQSEHLFESDHQSGAWCKDPLQASDKIYYMPWTPYRTDTLTEYSSKDDFIAGRPTTTYKLPHRVDGTGFVVYDGALFFNKERTRNIVKFDLRTRIKSGEAIIANANYHDTSPYRWGGKSDIDLAVDENGLWVIYATEQNNGKIVISQLNPYTLRIEGTWDTAYDKRSASNAFMICGILYVVKSVYEDDDNEATGNKIDYIYNTDQSKDSLVDVPFPNSYQYIAAVDYNPRDNLLYVWNNYHVVKYSLDFGPLDSRSGQAHHGQVSYISPPIHLDSELERPSVKDISTTGPLGMGSTTTSTTLRTTTLSPGRSTTPSVSGRRNRSTSTPSPAVEVLDDMTTHLPSASSQIPALEESCEAVEAREIMWFKTRQGQIAKQPCPAGTIGVSTYLCLAPDGIWDPQGPDLSNCSSPWVNHITQKLKSGETAANIARELAEQTRNHLNAGDITYSVRAMDQLVGLLDVQLRNLTPGGKDSAARSLNKLQKRERSCRAYVQAMVETVNNLLQPQALNAWRDLTTSDQLRAATMLLHTVEESAFVLADNLLKTDIVRENTDNIKLEVARLSTEGNLEDLKFPENMGHGSTIQLSANTLKQNGRNGEIRVAFVLYNNLGPYLSTENASMKLGTEALSTNHSVIVNSPVITAAINKEFSNKVYLADPVVFTVKHIKQSEENFNPNCSFWSYSKRTMTGYWSTQGCRLLTTNKTHTTCSCNHLTNFAVLMAHVEVKHSDAVHDLLLDVITWVGILLSLVCLLICIFTFCFFRGLQSDRNTIHKNLCISLFVAELLFLIGINRTDQPIACAVFAALLHFFFLAAFTWMFLEGVQLYIMLVEVFESEHSRRKYFYLVGYGMPALIVAVSAAVDYRSYGTDKVCWLRLDTYFIWSFIGPATLIIMLNVIFLGIALYKMFHHTAILKPESGCLDNINYEDNRPFIKSWVIGAIALLCLLGLTWAFGLMYINESTVIMAYLFTIFNSLQGMFIFIFHCVLQKKVRKEYGKCLRTHCCSGKSTESSIGSGKTSGSRTPGRYSTGSQSRIRRMWNDTVRKQSESSFITGDINSSASLNREPYRETSMGVKLNIAYQIGASEQCQGYKCHGYSTTEW

SEQ ID NO: 24187 - protein, 1299 aa, Homo sapiens
  REGION 1..1299: note = ENSP00000425033
MWPSQLLIFMMLLAPIIHGGKHSERHPALAAPLRHAERSPGGALPPRHLLQQPAAERTAAHRGQGPRGATRGVRGPGAQGAQIAAQAFSRAPIPMAVVRRELSCESYPIELRCPGTDVIMIESANYGRTDDKICDSDPAQMENIRCYLPDAYKIMSQRCNNRTQCAVVAGPDVFPDPCPGTYKYLEVQYECVPYKVEQKVFLCPGLLKGVYQSEHLFESDHQSGAWCKDPLQASDKIYYMPWTPYRTDTLTEYSSKDDFIAGRPTTTYKLPHRVDGTGFVVYDGALFFNKERTRNIVKFDLRTRIKSGEAIIANANYHDTSPYRWGGKSDIDLAVDENGLWVIYATEQNNGKIVISQLNPYTLRIEGTWDTAYDKRSASNAFMICGILYVVKSVYEDDDNEATGNKIDYIYNTDQSKDSLVDVPFPNSYQYIAAVDYNPRDNLLYVWNNYHVVKYSLDFGPLDSRSGQAHHGQVSYISPPIHLDSELERPSVKDISTTGPLGMGSTTTSTTLRTTTLSPGRSTTPSVSGRRNRSTSTPSPAVEVLDDMTTHLPSASSQIPALEESCEAVEAREIMWFKTRQGQIAKQPCPAGTIGVSTYLCLAPDGIWDPQGPDLSNCSSPWVNHITQKLKSGETAANIARELAEQTRNHLNAGDITYSVRAMDQLVGLLDVQLRNLTPGGKDSAARSLNKLQKRERSCRAYVQAMVETVNNLLQPQALNAWRDLTTSDQLRAATMLLHTVEESAFVLADNLLKTDIVRENTDNIKLEVARLSTEGNLEDLKFPENMGHGSTIQLSANTLKQNGRNGEIRVAFVLYNNLGPYLSTENASMKLGTEALSTNHSVIVNSPVITAAINKEFSNKVYLADPVVFTVKHIKQSEENFNPNCSFWSYSKRTMTGYWSTQGCRLLTTNKTHTTCSCNHLTNFAVLMAHVEVKHSDAVHDLLLDVITWVGILLSLVCLLICIFTFCFFRGLQSDRNTIHKNLCISLFVAELLFLIGINRTDQPIACAVFAALLHFFFLAAFTWMFLEGVQLYIMLVEVFESEHSRRKYFYLVGYGMPALIVAVSAAVDYRSYGTDKVCWLRLDTYFIWSFIGPATLIIMLNVIFLGIALYKMFHHTAILKPESGCLDNIKSWVIGAIALLCLLGLTWAFGLMYINESTVIMAYLFTIFNSLQGMFIFIFHCVLQKKVRKEYGKCLRTHCCSGKSTESSIGSGKTSGSRTPGRYSTGSQSRIRRMWNDTVRKQSESSFITGDINSSASLNREPYRETSMGVKLNIAYQIGASEQCQGYKCHGYSTTEW

SEQ ID NO: 24188 - protein, 1231 aa, Homo sapiens
  REGION 1..1231: note = ENSP00000424120
MWPSQLLIFMMLLAPIIHAFSRAPIPMAVVRRELSCESYPIELRCPGTDVIMIESANYGRTDDKICDSDPAQMENIRCYLPDAYKIMSQRCNNRTQCAVVAGPDVFPDPCPGTYKYLEVQYECVPYKVEQKVFLCPGLLKGVYQSEHLFESDHQSGAWCKDPLQASDKIYYMPWTPYRTDTLTEYSSKDDFIAGRPTTTYKLPHRVDGTGFVVYDGALFFNKERTRNIVKFDLRTRIKSGEAIIANANYHDTSPYRWGGKSDIDLAVDENGLWVIYATEQNNGKIVISQLNPYTLRIEGTWDTAYDKRSASNAFMICGILYVVKSVYEDDDNEATGNKIDYIYNTDQSKDSLVDVPFPNSYQYIAAVDYNPRDNLLYVWNNYHVVKYSLDFGPLDSRSGQAHHGQVSYISPPIHLDSELERPSVKDISTTGPLGMGSTTTSTTLRTTTLSPGRSTTPSVSGRRNRSTSTPSPAVEVLDDMTTHLPSASSQIPALEESCEAVEAREIMWFKTRQGQIAKQPCPAGTIGVSTYLCLAPDGIWDPQGPDLSNCSSPWVNHITQKLKSGETAANIARELAEQTRNHLNAGDITYSVRAMDQLVGLLDVQLRNLTPGGKDSAARSLNKLQKRERSCRAYVQAMVETVNNLLQPQALNAWRDLTTSDQLRAATMLLHTVEESAFVLADNLLKTDIVRENTDNIKLEVARLSTEGNLEDLKFPENMGHGSTIQLSANTLKQNGRNGEIRVAFVLYNNLGPYLSTENASMKLGTEALSTNHSVIVNSPVITAAINKEFSNKVYLADPVVFTVKHIKQSEENFNPNCSFWSYSKRTMTGYWSTQGCRLLTTNKTHTTCSCNHLTNFAVLMAHVEVKHSDAVHDLLLDVITWVGILLSLVCLLICIFTFCFFRGLQSDRNTIHKNLCISLFVAELLFLIGINRTDQPIACAVFAALLHFFFLAAFTWMFLEGVQLYIMLVEVFESEHSRRKYFYLVGYGMPALIVAVSAAVDYRSYGTDKVCWLRLDTYFIWSFIGPATLIIMLNVIFLGIALYKMFHHTAILKPESGCLDNIKSWVIGAIALLCLLGLTWAFGLMYINESTVIMAYLFTIFNSLQGMFIFIFHCVLQKKVRKEYGKCLRTHCCSGKSTESSIGSGKTSGSRTPGRYSTGSQSRIRRMWNDTVRKQSESSFITGDINSSASLNREPYRETSMGVKLNIAYQIGASEQCQGYKCHGYSTTEW

SEQ ID NO: 24189 - protein, 1342 aa, Homo sapiens
  REGION 1..1342: note = ENSP00000421476
MWPSQLLIFMMLLAPIIHGGKHSERHPALAAPLRHAERSPGGALPPRHLLQQPAAERTAAHRGQGPRGATRGVRGPGAQGAQIAAQAFSRAPIPMAVVRRELSCESYPIELRCPGTDVIMIESANYGRTDDKICDSDPAQMENIRCYLPDAYKIMSQRCNNRTQCAVVAGPDVFPDPCPGTYKYLEVQYECVPYKVEQKVFLCPGLLKGVYQSEHLFESDHQSGAWCKDPLQASDKIYYMPWTPYRTDTLTEYSSKDDFIAGRPTTTYKLPHRVDGTGFVVYDGALFFNKERTRNIVKFDLRTRIKSGEAIIANANYHDTSPYRWGGKSDIDLAVDENGLWVIYATEQNNGKIVISQLNPYTLRIEGTWDTAYDKRSASNAFMICGILYVVKSVYEDDDNEATGNKIDYIYNTDQSKDSLVDVPFPNSYQYIAAVDYNPRDNLLYVWNNYHVVKYSLDFGPLDSRSGQAHHGQVSYISPPIHLDSELERPSVKDISTTGPLGMGSTTTSTTLRTTTLSPGRSTTPSVSGRRNRSTSTPSPAVEVLDDMTTHLPSASSQIPALEESCEAVEAREIMWFKTRQGQIAKQPCPAGTIGVSTYLCLAPDGIWDPQGPDLSNCSSPWVNHITQKLKSGETAANIARELAEQTRNHLNAGDITYSVRAMDQLVGLLDVQLRNLTPGGKDSAARSLNKLQKRERSCRAYVQAMVETVNNLLQPQALNAWRDLTTSDQLRAATMLLHTVEESAFVLADNLLKTDIVRENTDNIKLEVARLSTEGNLEDLKFPENMGHGSTIQLSANTLKQNGRNGEIRVAFVLYNNLGPYLSTENASMKLGTEALSTNHSVIVNSPVITAAINKEFSNKVYLADPVVFTVKHIKQSEENFNPNCSFWSYSKRTMTGYWSTQGCRLLTTNKTHTTCSCNHLTNFAVLMAHVEVKHSDAVHDLLLDVITWVGILLSLVCLLICIFTFCFFRGLQSDRNTIHKNLCISLFVAELLFLIGINRTDQPIACAVFAALLHFFFLAAFTWMFLEGVQLYIMLVEVFESEHSRRKYFYLVGYGMPALIVAVSAAVDYRSYGTDKVCWLRLDTYFIWSFIGPATLIIMLNVIFLGIALYKMFHHTAILKPESGCLDNIKSWVIGAIALLCLLGLTWAFGLMYINESTVIMAYLFTIFNSLQGMFIFIFHCVLQKKVRKEYGKCLRTHCCSGKSTESSIGSGKTSGSRTPGRYSTGSQSRIRRMWNDTVRKQSESSFITGDINSSASLNRGAMANHLISNALLRPHGTNNPYNTLLGEPAVCNNPSVSMYNAQEPYRETSMGVKLNIAYQIGASEQCQGYKCHGYSTTEW

SEQ ID NO: 24190 - protein, 1351 aa, Homo sapiens
  REGION 1..1351: note = ENSP00000424030
MWPSQLLIFMMLLAPIIHGGKHSERHPALAAPLRHAERSPGGALPPRHLLQQPAAERTAAHRGQGPRGATRGVRGPGAQGAQIAAQAFSRAPIPMAVVRRELSCESYPIELRCPGTDVIMIESANYGRTDDKICDSDPAQMENIRCYLPDAYKIMSQRCNNRTQCAVVAGPDVFPDPCPGTYKYLEVQYECVPYKVEQKVFLCPGLLKGVYQSEHLFESDHQSGAWCKDPLQASDKIYYMPWTPYRTDTLTEYSSKDDFIAGRPTTTYKLPHRVDGTGFVVYDGALFFNKERTRNIVKFDLRTRIKSGEAIIANANYHDTSPYRWGGKSDIDLAVDENGLWVIYATEQNNGKIVISQLNPYTLRIEGTWDTAYDKRSASNAFMICGILYVVKSVYEDDDNEATGNKIDYIYNTDQSKDSLVDVPFPNSYQYIAAVDYNPRDNLLYVWNNYHVVKYSLDFGPLDSRSGQAHHGQVSYISPPIHLDSELERPSVKDISTTGPLGMGSTTTSTTLRTTTLSPGRSTTPSVSGRRNRSTSTPSPAVEVLDDMTTHLPSASSQIPALEESCEAVEAREIMWFKTRQGQIAKQPCPAGTIGVSTYLCLAPDGIWDPQGPDLSNCSSPWVNHITQKLKSGETAANIARELAEQTRNHLNAGDITYSVRAMDQLVGLLDVQLRNLTPGGKDSAARSLNKLQKRERSCRAYVQAMVETVNNLLQPQALNAWRDLTTSDQLRAATMLLHTVEESAFVLADNLLKTDIVRENTDNIKLEVARLSTEGNLEDLKFPENMGHGSTIQLSANTLKQNGRNGEIRVAFVLYNNLGPYLSTENASMKLGTEALSTNHSVIVNSPVITAAINKEFSNKVYLADPVVFTVKHIKQSEENFNPNCSFWSYSKRTMTGYWSTQGCRLLTTNKTHTTCSCNHLTNFAVLMAHVEVKHSDAVHDLLLDVITWVGILLSLVCLLICIFTFCFFRGLQSDRNTIHKNLCISLFVAELLFLIGINRTDQPIACAVFAALLHFFFLAAFTWMFLEGVQLYIMLVEVFESEHSRRKYFYLVGYGMPALIVAVSAAVDYRSYGTDKVCWLRLDTYFIWSFIGPATLIIMLNVIFLGIALYKMFHHTAILKPESGCLDNINYEDNRPFIKSWVIGAIALLCLLGLTWAFGLMYINESTVIMAYLFTIFNSLQGMFIFIFHCVLQKKVRKEYGKCLRTHCCSGKSTESSIGSGKTSGSRTPGRYSTGSQSRIRRMWNDTVRKQSESSFITGDINSSASLNRGAMANHLISNALLRPHGTNNPYNTLLGEPAVCNNPSVSMYNAQEPYRETSMGVKLNIAYQIGASEQCQGYKCHGYSTTEW

SEQ ID NO: 24191 - protein, 1528 aa, Homo sapiens
  REGION 1..1528: note = ENSP00000421372
MWPSQLLIFMMLLAPIIHGGKHSERHPALAAPLRHAERSPGGALPPRHLLQQPAAERTAAHRGQGPRGATRGVRGPGAQGAQIAAQAFSRAPIPMAVVRRELSCESYPIELRCPGTDVIMIESANYGRTDDKICDSDPAQMENIRCYLPDAYKIMSQRCNNRTQCAVVAGPDVFPDPCPGTYKYLEVQYECVPYKVEQKVFLCPGLLKGVYQSEHLFESDHQSGAWCKDPLQASDKIYYMPWTPYRTDTLTEYSSKDDFIAGRPTTTYKLPHRVDGTGFVVYDGALFFNKERTRNIVKFDLRTRIKSGEAIIANANYHDTSPYRWGGKSDIDLAVDENGLWVIYATEQNNGKIVISQLNPYTLRIEGTWDTAYDKRSASNAFMICGILYVVKSVYEDDDNEATGNKIDYIYNTDQSKDSLVDVPFPNSYQYIAAVDYNPRDNLLYVWNNYHVVKYSLDFGPLDSRSGQAHHGQVSYISPPIHLDSELERPSVKDISTTGPLGMGSTTTSTTLRTTTLSPGRSTTPSVSGRRNRSTSTPSPAVEVLDDMTTHLPSASSQIPALEESCEAVEAREIMWFKTRQGQIAKQPCPAGTIGVSTYLCLAPDGIWDPQGPDLSNCSSPWVNHITQKLKSGETAANIARELAEQTRNHLNAGDITYSVRAMDQLVGLLDVQLRNLTPGGKDSAARSLNKLQKRERSCRAYVQAMVETVNNLLQPQALNAWRDLTTSDQLRAATMLLHTVEESAFVLADNLLKTDIVRENTDNIKLEVARLSTEGNLEDLKFPENMGHGSTIQLSANTLKQNGRNGEIRVAFVLYNNLGPYLSTENASMKLGTEALSTNHSVIVNSPVITAAINKEFSNKVYLADPVVFTVKHIKQSEENFNPNCSFWSYSKRTMTGYWSTQGCRLLTTNKTHTTCSCNHLTNFAVLMAHVEVKHSDAVHDLLLDVITWVGILLSLVCLLICIFTFCFFRGLQSDRNTIHKNLCISLFVAELLFLIGINRTDQPIACAVFAALLHFFFLAAFTWMFLEGVQLYIMLVEVFESEHSRRKYFYLVGYGMPALIVAVSAAVDYRSYGTDKVCWLRLDTYFIWSFIGPATLIIMLNVIFLGIALYKMFHHTAILKPESGCLDNIKSWVIGAIALLCLLGLTWAFGLMYINESTVIMAYLFTIFNSLQGMFIFIFHCVLQKKVRKEYGKCLRTHCCSGKSTESSIGSGKTSGSRTPGRYSTGSQSRIRRMWNDTVRKQSESSFITGDINSSASLNREGLLNNARDTSVMDTLPLNGNHGNSYSIASGEYLSNCVQIIDRGYNHNETALEKKILKELTSNYIPSYLNNHERSSEQNRNLMNKLVNNLGSGREDDAIVLDDATSFNHEESLGLELIHEESDAPLLPPRVYSTENHQPHHYTRRRIPQDHSESFFPLLTNEHTEDLQSPHRDSLYTSMPTLAGVAATESVTTSTQTEPPPAKCGDAEDVYYKSMPNLGSRNHVHQLHTYYQLGRGSSDGFIVPPNKDGTPPEGSSKGPAHLVTSL

SEQ ID NO: 24192 - protein, 1274 aa, Homo sapiens
  REGION 1..1274: note = ENSP00000425201
MWPSQLLIFMMLLAPIIHAFSRAPIPMAVVRRELSCESYPIELRCPGTDVIMIESANYGRTDDKICDSDPAQMENIRCYLPDAYKIMSQRCNNRTQCAVVAGPDVFPDPCPGTYKYLEVQYECVPYKVEQKVFLCPGLLKGVYQSEHLFESDHQSGAWCKDPLQASDKIYYMPWTPYRTDTLTEYSSKDDFIAGRPTTTYKLPHRVDGTGFVVYDGALFFNKERTRNIVKFDLRTRIKSGEAIIANANYHDTSPYRWGGKSDIDLAVDENGLWVIYATEQNNGKIVISQLNPYTLRIEGTWDTAYDKRSASNAFMICGILYVVKSVYEDDDNEATGNKIDYIYNTDQSKDSLVDVPFPNSYQYIAAVDYNPRDNLLYVWNNYHVVKYSLDFGPLDSRSGQAHHGQVSYISPPIHLDSELERPSVKDISTTGPLGMGSTTTSTTLRTTTLSPGRSTTPSVSGRRNRSTSTPSPAVEVLDDMTTHLPSASSQIPALEESCEAVEAREIMWFKTRQGQIAKQPCPAGTIGVSTYLCLAPDGIWDPQGPDLSNCSSPWVNHITQKLKSGETAANIARELAEQTRNHLNAGDITYSVRAMDQLVGLLDVQLRNLTPGGKDSAARSLNKLQKRERSCRAYVQAMVETVNNLLQPQALNAWRDLTTSDQLRAATMLLHTVEESAFVLADNLLKTDIVRENTDNIKLEVARLSTEGNLEDLKFPENMGHGSTIQLSANTLKQNGRNGEIRVAFVLYNNLGPYLSTENASMKLGTEALSTNHSVIVNSPVITAAINKEFSNKVYLADPVVFTVKHIKQSEENFNPNCSFWSYSKRTMTGYWSTQGCRLLTTNKTHTTCSCNHLTNFAVLMAHVEVKHSDAVHDLLLDVITWVGILLSLVCLLICIFTFCFFRGLQSDRNTIHKNLCISLFVAELLFLIGINRTDQPIACAVFAALLHFFFLAAFTWMFLEGVQLYIMLVEVFESEHSRRKYFYLVGYGMPALIVAVSAAVDYRSYGTDKVCWLRLDTYFIWSFIGPATLIIMLNVIFLGIALYKMFHHTAILKPESGCLDNIKSWVIGAIALLCLLGLTWAFGLMYINESTVIMAYLFTIFNSLQGMFIFIFHCVLQKKVRKEYGKCLRTHCCSGKSTESSIGSGKTSGSRTPGRYSTGSQSRIRRMWNDTVRKQSESSFITGDINSSASLNRGAMANHLISNALLRPHGTNNPYNTLLGEPAVCNNPSVSMYNAQEPYRETSMGVKLNIAYQIGASEQCQGYKCHGYSTTEW

SEQ ID NO: 24193 - protein, 1283 aa, Homo sapiens
  REGION 1..1283: note = ENSP00000423434
MWPSQLLIFMMLLAPIIHAFSRAPIPMAVVRRELSCESYPIELRCPGTDVIMIESANYGRTDDKICDSDPAQMENIRCYLPDAYKIMSQRCNNRTQCAVVAGPDVFPDPCPGTYKYLEVQYECVPYKVEQKVFLCPGLLKGVYQSEHLFESDHQSGAWCKDPLQASDKIYYMPWTPYRTDTLTEYSSKDDFIAGRPTTTYKLPHRVDGTGFVVYDGALFFNKERTRNIVKFDLRTRIKSGEAIIANANYHDTSPYRWGGKSDIDLAVDENGLWVIYATEQNNGKIVISQLNPYTLRIEGTWDTAYDKRSASNAFMICGILYVVKSVYEDDDNEATGNKIDYIYNTDQSKDSLVDVPFPNSYQYIAAVDYNPRDNLLYVWNNYHVVKYSLDFGPLDSRSGQAHHGQVSYISPPIHLDSELERPSVKDISTTGPLGMGSTTTSTTLRTTTLSPGRSTTPSVSGRRNRSTSTPSPAVEVLDDMTTHLPSASSQIPALEESCEAVEAREIMWFKTRQGQIAKQPCPAGTIGVSTYLCLAPDGIWDPQGPDLSNCSSPWVNHITQKLKSGETAANIARELAEQTRNHLNAGDITYSVRAMDQLVGLLDVQLRNLTPGGKDSAARSLNKLQKRERSCRAYVQAMVETVNNLLQPQALNAWRDLTTSDQLRAATMLLHTVEESAFVLADNLLKTDIVRENTDNIKLEVARLSTEGNLEDLKFPENMGHGSTIQLSANTLKQNGRNGEIRVAFVLYNNLGPYLSTENASMKLGTEALSTNHSVIVNSPVITAAINKEFSNKVYLADPVVFTVKHIKQSEENFNPNCSFWSYSKRTMTGYWSTQGCRLLTTNKTHTTCSCNHLTNFAVLMAHVEVKHSDAVHDLLLDVITWVGILLSLVCLLICIFTFCFFRGLQSDRNTIHKNLCISLFVAELLFLIGINRTDQPIACAVFAALLHFFFLAAFTWMFLEGVQLYIMLVEVFESEHSRRKYFYLVGYGMPALIVAVSAAVDYRSYGTDKVCWLRLDTYFIWSFIGPATLIIMLNVIFLGIALYKMFHHTAILKPESGCLDNINYEDNRPFIKSWVIGAIALLCLLGLTWAFGLMYINESTVIMAYLFTIFNSLQGMFIFIFHCVLQKKVRKEYGKCLRTHCCSGKSTESSIGSGKTSGSRTPGRYSTGSQSRIRRMWNDTVRKQSESSFITGDINSSASLNRGAMANHLISNALLRPHGTNNPYNTLLGEPAVCNNPSVSMYNAQEPYRETSMGVKLNIAYQIGASEQCQGYKCHGYSTTEW

SEQ ID NO: 24194 - protein, 1512 aa, Homo sapiens
  REGION 1..1512: note = ENSP00000421627
MWPSQLLIFMMLLAPIIHAFSRAPIPMAVVRRELSCESYPIELRCPGTDVIMIESANYGRTDDKICDSDPAQMENIRCYLPDAYKIMSQRCNNRTQCAVVAGPDVFPDPCPGTYKYLEVQYECVPYKVEQKVFLCPGLLKGVYQSEHLFESDHQSGAWCKDPLQASDKIYYMPWTPYRTDTLTEYSSKDDFIAGRPTTTYKLPHRVDGTGFVVYDGALFFNKERTRNIVKFDLRTRIKSGEAIIANANYHDTSPYRWGGKSDIDLAVDENGLWVIYATEQNNGKIVISQLNPYTLRIEGTWDTAYDKRSASNAFMICGILYVVKSVYEDDDNEATGNKIDYIYNTDQSKDSLVDVPFPNSYQYIAAVDYNPRDNLLYVWNNYHVVKYSLDFGPLDSRSGQAHHGQVSYISPPIHLDSELERPSVKDISTTGPLGMGSTTTSTTLRTTTLSPGRSTTPSVSGRRNRSTSTPSPAVEVLDDMTTHLPSASSQIPALEESCEAVEAREIMWFKTRQGQIAKQPCPAGTIGVSTYLCLAPDGIWDPQGPDLSNCSSPWVNHITQKLKSGETAANIARELAEQTRNHLNAGDITYSVRAMDQLVGLLDVQLRNLTPGGKDSAARSLNKLQKRERSCRAYVQAMVETVNNLLQPQALNAWRDLTTSDQLRAATMLLHTVEESAFVLADNLLKTDIVRENTDNIKLEVARLSTEGNLEDLKFPENMGHGSTIQLSANTLKQNGRNGEIRVAFVLYNNLGPYLSTENASMKLGTEALSTNHSVIVNSPVITAAINKEFSNKVYLADPVVFTVKHIKQSEENFNPNCSFWSYSKRTMTGYWSTQGCRLLTTNKTHTTCSCNHLTNFAVLMAHVEVKHSDAVHDLLLDVITWVGILLSLVCLLICIFTFCFFRGLQSDRNTIHKNLCISLFVAELLFLIGINRTDQPIACAVFAALLHFFFLAAFTWMFLEGVQLYIMLVEVFESEHSRRKYFYLVGYGMPALIVAVSAAVDYRSYGTDKVCWLRLDTYFIWSFIGPATLIIMLNVIFLGIALYKMFHHTAILKPESGCLDNINYEDNRPFIKSWVIGAIALLCLLGLTWAFGLMYINESTVIMAYLFTIFNSLQGMFIFIFHCVLQKKVRKEYGKCLRTHCCSGKSTESSIGSGKTSGSRTPGRYSTGSQSRIRRMWNDTVRKQSESSFITGDINSSASLNRGAMANHLISNALLRPHGTNNPYNTLLGEPAVCNNPSVSMYNAQEGLLNNARDTSVMDTLPLNGNHGNSYSIASGEYLSNCVQIIDRGYNHNETALEKKILKELTSNYIPSYLNNHERSSEQNRNLMNKLVNNLGSGREDDAIVLDDATSFNHEESLGLELIHEESDAPLLPPRVYSTENHQPHHYTRRRIPQDHSESFFPLLTNEHTEDLQSPHRDSLYTSMPTLAGVAATESVTTSTQTEPPPAKCGDAEDVYYKSMPNLGSRNHVHQLHTYYQLGRGSSDGFIVPPNKDGTPPEGSSKGPAHLVTSL

SEQ ID NO: 24195 - protein, 1580 aa, Homo sapiens
  REGION 1..1580: note = ENSP00000420931
MWPSQLLIFMMLLAPIIHGGKHSERHPALAAPLRHAERSPGGALPPRHLLQQPAAERTAAHRGQGPRGATRGVRGPGAQGAQIAAQAFSRAPIPMAVVRRELSCESYPIELRCPGTDVIMIESANYGRTDDKICDSDPAQMENIRCYLPDAYKIMSQRCNNRTQCAVVAGPDVFPDPCPGTYKYLEVQYECVPYKVEQKVFLCPGLLKGVYQSEHLFESDHQSGAWCKDPLQASDKIYYMPWTPYRTDTLTEYSSKDDFIAGRPTTTYKLPHRVDGTGFVVYDGALFFNKERTRNIVKFDLRTRIKSGEAIIANANYHDTSPYRWGGKSDIDLAVDENGLWVIYATEQNNGKIVISQLNPYTLRIEGTWDTAYDKRSASNAFMICGILYVVKSVYEDDDNEATGNKIDYIYNTDQSKDSLVDVPFPNSYQYIAAVDYNPRDNLLYVWNNYHVVKYSLDFGPLDSRSGQAHHGQVSYISPPIHLDSELERPSVKDISTTGPLGMGSTTTSTTLRTTTLSPGRSTTPSVSGRRNRSTSTPSPAVEVLDDMTTHLPSASSQIPALEESCEAVEAREIMWFKTRQGQIAKQPCPAGTIGVSTYLCLAPDGIWDPQGPDLSNCSSPWVNHITQKLKSGETAANIARELAEQTRNHLNAGDITYSVRAMDQLVGLLDVQLRNLTPGGKDSAARSLNKLQKRERSCRAYVQAMVETVNNLLQPQALNAWRDLTTSDQLRAATMLLHTVEESAFVLADNLLKTDIVRENTDNIKLEVARLSTEGNLEDLKFPENMGHGSTIQLSANTLKQNGRNGEIRVAFVLYNNLGPYLSTENASMKLGTEALSTNHSVIVNSPVITAAINKEFSNKVYLADPVVFTVKHIKQSEENFNPNCSFWSYSKRTMTGYWSTQGCRLLTTNKTHTTCSCNHLTNFAVLMAHVEVKHSDAVHDLLLDVITWVGILLSLVCLLICIFTFCFFRGLQSDRNTIHKNLCISLFVAELLFLIGINRTDQPIACAVFAALLHFFFLAAFTWMFLEGVQLYIMLVEVFESEHSRRKYFYLVGYGMPALIVAVSAAVDYRSYGTDKVCWLRLDTYFIWSFIGPATLIIMLNVIFLGIALYKMFHHTAILKPESGCLDNINYEDNRPFIKSWVIGAIALLCLLGLTWAFGLMYINESTVIMAYLFTIFNSLQGMFIFIFHCVLQKKVRKEYGKCLRTHCCSGKSTESSIGSGKTSGSRTPGRYSTGSQSRIRRMWNDTVRKQSESSFITGDINSSASLNRGAMANHLISNALLRPHGTNNPYNTLLGEPAVCNNPSVSMYNAQEGLLNNARDTSVMDTLPLNGNHGNSYSIASGEYLSNCVQIIDRGYNHNETALEKKILKELTSNYIPSYLNNHERSSEQNRNLMNKLVNNLGSGREDDAIVLDDATSFNHEESLGLELIHEESDAPLLPPRVYSTENHQPHHYTRRRIPQDHSESFFPLLTNEHTEDLQSPHRDSLYTSMPTLAGVAATESVTTSTQTEPPPAKCGDAEDVYYKSMPNLGSRNHVHQLHTYYQLGRGSSDGFIVPPNKDGTPPEGSSKGPAHLVTSL

SEQ ID NO: 24196 - protein, 1571 aa, Homo sapiens
  REGION 1..1571: note = ENSP00000425884
MWPSQLLIFMMLLAPIIHGGKHSERHPALAAPLRHAERSPGGALPPRHLLQQPAAERTAAHRGQGPRGATRGVRGPGAQGAQIAAQAFSRAPIPMAVVRRELSCESYPIELRCPGTDVIMIESANYGRTDDKICDSDPAQMENIRCYLPDAYKIMSQRCNNRTQCAVVAGPDVFPDPCPGTYKYLEVQYECVPYKVEQKVFLCPGLLKGVYQSEHLFESDHQSGAWCKDPLQASDKIYYMPWTPYRTDTLTEYSSKDDFIAGRPTTTYKLPHRVDGTGFVVYDGALFFNKERTRNIVKFDLRTRIKSGEAIIANANYHDTSPYRWGGKSDIDLAVDENGLWVIYATEQNNGKIVISQLNPYTLRIEGTWDTAYDKRSASNAFMICGILYVVKSVYEDDDNEATGNKIDYIYNTDQSKDSLVDVPFPNSYQYIAAVDYNPRDNLLYVWNNYHVVKYSLDFGPLDSRSGQAHHGQVSYISPPIHLDSELERPSVKDISTTGPLGMGSTTTSTTLRTTTLSPGRSTTPSVSGRRNRSTSTPSPAVEVLDDMTTHLPSASSQIPALEESCEAVEAREIMWFKTRQGQIAKQPCPAGTIGVSTYLCLAPDGIWDPQGPDLSNCSSPWVNHITQKLKSGETAANIARELAEQTRNHLNAGDITYSVRAMDQLVGLLDVQLRNLTPGGKDSAARSLNKLQKRERSCRAYVQAMVETVNNLLQPQALNAWRDLTTSDQLRAATMLLHTVEESAFVLADNLLKTDIVRENTDNIKLEVARLSTEGNLEDLKFPENMGHGSTIQLSANTLKQNGRNGEIRVAFVLYNNLGPYLSTENASMKLGTEALSTNHSVIVNSPVITAAINKEFSNKVYLADPVVFTVKHIKQSEENFNPNCSFWSYSKRTMTGYWSTQGCRLLTTNKTHTTCSCNHLTNFAVLMAHVEVKHSDAVHDLLLDVITWVGILLSLVCLLICIFTFCFFRGLQSDRNTIHKNLCISLFVAELLFLIGINRTDQPIACAVFAALLHFFFLAAFTWMFLEGVQLYIMLVEVFESEHSRRKYFYLVGYGMPALIVAVSAAVDYRSYGTDKVCWLRLDTYFIWSFIGPATLIIMLNVIFLGIALYKMFHHTAILKPESGCLDNIKSWVIGAIALLCLLGLTWAFGLMYINESTVIMAYLFTIFNSLQGMFIFIFHCVLQKKVRKEYGKCLRTHCCSGKSTESSIGSGKTSGSRTPGRYSTGSQSRIRRMWNDTVRKQSESSFITGDINSSASLNRGAMANHLISNALLRPHGTNNPYNTLLGEPAVCNNPSVSMYNAQEGLLNNARDTSVMDTLPLNGNHGNSYSIASGEYLSNCVQIIDRGYNHNETALEKKILKELTSNYIPSYLNNHERSSEQNRNLMNKLVNNLGSGREDDAIVLDDATSFNHEESLGLELIHEESDAPLLPPRVYSTENHQPHHYTRRRIPQDHSESFFPLLTNEHTEDLQSPHRDSLYTSMPTLAGVAATESVTTSTQTEPPPAKCGDAEDVYYKSMPNLGSRNHVHQLHTYYQLGRGSSDGFIVPPNKDGTPPEGSSKGPAHLVTSL

SEQ ID NO: 24197 - protein, 1503 aa, Homo sapiens
  REGION 1..1503: note = ENSP00000424258
MWPSQLLIFMMLLAPIIHAFSRAPIPMAVVRRELSCESYPIELRCPGTDVIMIESANYGRTDDKICDSDPAQMENIRCYLPDAYKIMSQRCNNRTQCAVVAGPDVFPDPCPGTYKYLEVQYECVPYKVEQKVFLCPGLLKGVYQSEHLFESDHQSGAWCKDPLQASDKIYYMPWTPYRTDTLTEYSSKDDFIAGRPTTTYKLPHRVDGTGFVVYDGALFFNKERTRNIVKFDLRTRIKSGEAIIANANYHDTSPYRWGGKSDIDLAVDENGLWVIYATEQNNGKIVISQLNPYTLRIEGTWDTAYDKRSASNAFMICGILYVVKSVYEDDDNEATGNKIDYIYNTDQSKDSLVDVPFPNSYQYIAAVDYNPRDNLLYVWNNYHVVKYSLDFGPLDSRSGQAHHGQVSYISPPIHLDSELERPSVKDISTTGPLGMGSTTTSTTLRTTTLSPGRSTTPSVSGRRNRSTSTPSPAVEVLDDMTTHLPSASSQIPALEESCEAVEAREIMWFKTRQGQIAKQPCPAGTIGVSTYLCLAPDGIWDPQGPDLSNCSSPWVNHITQKLKSGETAANIARELAEQTRNHLNAGDITYSVRAMDQLVGLLDVQLRNLTPGGKDSAARSLNKLQKRERSCRAYVQAMVETVNNLLQPQALNAWRDLTTSDQLRAATMLLHTVEESAFVLADNLLKTDIVRENTDNIKLEVARLSTEGNLEDLKFPENMGHGSTIQLSANTLKQNGRNGEIRVAFVLYNNLGPYLSTENASMKLGTEALSTNHSVIVNSPVITAAINKEFSNKVYLADPVVFTVKHIKQSEENFNPNCSFWSYSKRTMTGYWSTQGCRLLTTNKTHTTCSCNHLTNFAVLMAHVEVKHSDAVHDLLLDVITWVGILLSLVCLLICIFTFCFFRGLQSDRNTIHKNLCISLFVAELLFLIGINRTDQPIACAVFAALLHFFFLAAFTWMFLEGVQLYIMLVEVFESEHSRRKYFYLVGYGMPALIVAVSAAVDYRSYGTDKVCWLRLDTYFIWSFIGPATLIIMLNVIFLGIALYKMFHHTAILKPESGCLDNIKSWVIGAIALLCLLGLTWAFGLMYINESTVIMAYLFTIFNSLQGMFIFIFHCVLQKKVRKEYGKCLRTHCCSGKSTESSIGSGKTSGSRTPGRYSTGSQSRIRRMWNDTVRKQSESSFITGDINSSASLNRGAMANHLISNALLRPHGTNNPYNTLLGEPAVCNNPSVSMYNAQEGLLNNARDTSVMDTLPLNGNHGNSYSIASGEYLSNCVQIIDRGYNHNETALEKKILKELTSNYIPSYLNNHERSSEQNRNLMNKLVNNLGSGREDDAIVLDDATSFNHEESLGLELIHEESDAPLLPPRVYSTENHQPHHYTRRRIPQDHSESFFPLLTNEHTEDLQSPHRDSLYTSMPTLAGVAATESVTTSTQTEPPPAKCGDAEDVYYKSMPNLGSRNHVHQLHTYYQLGRGSSDGFIVPPNKDGTPPEGSSKGPAHLVTSL

SEQ ID NO: 24198 - protein, 918 aa, Homo sapiens
  REGION 1..918: note = ENSP00000424402
  VARIANT 1: note = Any amino acid
XYLCLAPDGIWDPQGPDLSNCSSPWVNHITQKLKSGETAANIARELAEQTRNHLNAGDITYSVRAMDQLVGLLDVQLRNLTPGGKDSAARSLNKAMVETVNNLLQPQALNAWRDLTTSDQLRAATMLLHTVEESAFVLADNLLKTDIVRENTDNIKLEVARLSTEGNLEDLKFPENMGHGSTIQLSANTLKQNGRNGEIRVAFVLYNNLGPYLSTENASMKLGTEALSTNHSVIVNSPVITAAINKEFSNKVYLADPVVFTVKHIKQSEENFNPNCSFWSYSKRTMTGYWSTQGCRLLTTNKTHTTCSCNHLTNFAVLMAHVEVKHSDAVHDLLLDVITWVGILLSLVCLLICIFTFCFFRGLQSDRNTIHKNLCISLFVAELLFLIGINRTDQPIACAVFAALLHFFFLAAFTWMFLEGVQLYIMLVEVFESEHSRRKYFYLVGYGMPALIVAVSAAVDYRSYGTDKVCWLRLDTYFIWSFIGPATLIIMLNVIFLGIALYKMFHHTAILKPESGCLDNIKSWVIGAIALLCLLGLTWAFGLMYINESTVIMAYLFTIFNSLQGMFIFIFHCVLQKKVRKEYGKCLRTHCCSGKSTESSIGSGKTSGSRTPGRYSTGSQSRIRRMWNDTVRKQSESSFITGDINSSASLNREGLLNNARDTSVMDTLPLNGNHGNSYSIASGEYLSNCVQIIDRGYNHNETALEKKILKELTSNYIPSYLNNHERSSEQNRNLMNKLVNNLGSGREDDAIVLDDATSFNHEESLGLELIHEESDAPLLPPRVYSTENHQPHHYTRRRIPQDHSESFFPLLTNEHTEDLQSPHRDSLYTSMPTLAGVAATESVTTSTQTEPPPAKCGDAEDVYYKSMPNLGSRNHVHQLHTYYQLGRGSSDGFIVPPNKDGTPPEGSSKGPAHLVTSL

SEQ ID NO: 24199 - protein, 148 aa, Homo sapiens
  REGION 1..148: note = ENSP00000425936
MAKRSAAAAVPGMPSASLLVNLLSALLILFVFGETEIRFTGQTEFVVNETSTTVIRLIIERIGEPANVTAIVSLYGEDAGDFFDTYAAAFIPAGETNRTVYIAVCDDDLPEPDETFIFHLTLQLPSIAVSEPKGRNESMPLTLIREKG

SEQ ID NO: 24200 - protein, 6306 aa, Homo sapiens
  REGION 1..6306: note = ENSP00000384582
MSVFLGPGMPSASLLVNLLSALLILFVFGETEIRFTGQTEFVVNETSTTVIRLIIERIGEPANVTAIVSLYGEDAGDFFDTYAAAFIPAGETNRTVYIAVCDDDLPEPDETFIFHLTLQKPSANVKLGWPRTVTVTILSNDNAFGIISFNMLPSIAVSEPKGRNESMPLTLIREKGTYGMVMVTFEVEGGPNPPDEDLSPVKGNITFPPGRATVIYNLTVLDDEVPENDEIFLIQLKSVEGGAEINTSRNSIEIIIKKNDSPVRFLQSIYLVPEEDHILIIPVVRGKDNNGNLIGSDEYEVSISYAVTTGNSTAHAQQNLDFIDLQPNTTVVFPPFIHESHLKFQIVDDTIPEIAESFHIMLLKDTLQGDAVLISPSVVQVTIKPNDKPYGVLSFNSVLFERTVIIDEDRISRYEEITVVRNGGTHGNVSANWVLTRNSTDPSPVTADIRPSSGVLHFAQGQMLATIPLTVVDDDLPEEAEAYLLQILPHTIRGGAEVSEPAELLFYIQDSDDVYGLITFFPMENQKIESSPGERYLSLSFTRLGGTKGDVRLLYSVLYIPAGAVDPLQAKEGILNISRRNDLIFPEQKTQVTTKLPIRNDAFLQNGAHFLVQLETVELLNIIPLIPPISPRFGEICNISLLVTPAIANGEIGFLSNLPIILHEPEDFAAEVVYIPLHRDGTDGQATVYWSLKPSGFNSKAVTPDDIGPFNGSVLFLSGQSDTTINITIKGDDIPEMNETVTLSLDRVNVENQVLKSGYTSRDLIILENDDPGGVFEFSPASRGPYVIKEGESVELHIIRSRGSLVKQFLHYRVEPRDSNEFYGNTGVLEFKPGEREIVITLLARLDGIPELDEHYWVVLSSHGERESKLGSATIVNITILKNDDPHGIIEFVSDGLIVMINESKGDAIYSAVYDVVRNRGNFGDVSVSWVVSPDFTQDVFPVQGTVVFGDQEFSKNITIYSLPDEIPEEMEEFTVILLNGTGGAKVGNRTTATLRIRRNDDPIYFAEPRVVRVQEGETANFTVLRNGSVDVTCMVQYATKDGKATARERDFIPVEKGETLIFEVGSRQQSISIFVNEDGIPETDEPFYIILLNSTGDTVVYQYGVATVIIEANDDPNGIFSLEPIDKAVEEGKTNAFWILRHRGYFGSVSVSWQLFQNDSALQPGQEFYETSGTVNFMDGEEAKPIILHAFPDKIPEFNEFYFLKLVNISGGSPGPGGQLAETNLQVTVMVPFNDDPFGVFILDPECLEREVAEDVLSEDDMSYITNFTILRQQGVFGDVQLGWEILSSEFPAGLPPMIDFLLVGIFPTTVHLQQHMRRHHSGTDALYFTGLEGAFGTVNPKYHPSRNNTIANFTFSAWVMPNANTNGFIIAKDDGNGSIYYGVKIQTNESHVTLSLHYKTLGSNATYIAKTTVMKYLEESVWLHLLIILEDGIIEFYLDGNAMPRGIKSLKGEAITDGPGILRIGAGINGNDRFTGLMQDVRSYERKLTLEEIYELHAMPAKSDLHPISGYLEFRQGETNKSFIISARDDNDEEGEELFILKLVSVYGGARISEENTTARLTIQKSDNANGLFGFTGACIPEIAEEGSTISCVVERTRGALDYVHVFYTISQIETDGINYLVDDFANASGTITFLPWQRSEVLNIYVLDDDIPELNEYFRVTLVSAIPGDGKLGSTPTSGASIDPEKETTDITIKASDHPYGLLQFSTGLPPQPKDAMTLPASSVPHITVEEEDGEIRLLVIRAQGLLGRVTAEFRTVSLTAFSPEDYQNVAGTLEFQPGERYKYIFINITDNSIPELEKSFKVELLNLEGGVAELFRVDGSGSGDGDMEFFLPTIHKRASLGVASQILVTIAASDHAHGVFEFSPESLFVSGTEPEDGYSTVTLNVIRHHGTLSPVTLHWNIDSDPDGDLAFTSGNITFEIGQTSANITVEILPDEDPELDKAFSVSVLSVSSGSLGAHINATLTVLASDDPYGIFIFSEKNRPVKVEEATQNITLSIIRLKGLMGKVLVSYATLDDMEKPPYFPPNLARATQGRDYIPASGFALFGANQSEATIAISILDDDEPERSESVFIELLNSTLVAKVQSRSIPNSPRLGPKVETIAQLIIIANDDAFGTLQLSAPIVRVAENHVGPIINVTRTGGAFADVSVKFKAVPITAIAGEDYSIASSDVVLLEGETSKAVPIYVINDIYPELEESFLVQLMNETTGGARLGALTEAVIIIEASDDPYGLFGFQITKLIVEEPEFNSVKVNLPIIRNSGTLGNVTVQWVATINGQLATGDLRVVSGNVTFAPGETIQTLLLEVLADDVPEIEEVIQVQLTDASGGGTIGLDRIANIIIPANDDPYGTVAFAQMVYRVQEPLERSSCANITVRRSGGHFGRLLLFYSTSDIDVVALAMEEGQDLLSYYESPIQGVPDPLWRTWMNVSAVGEPLYTCATLCLKEQACSAFSFFSASEGPQCFWMTSWISPAVNNSDFWTYRKNMTRVASLFSGQAVAGSDYEPVTRQWAIMQEGDEFANLTVSILPDDFPEMDESFLISLLEVHLMNISASLKNQPTIGQPNISTVVIALNGDAFGVFVIYNISPNTSEDGLFVEVQEQPQTLVELMIHRTGGSLGQVAVEWRVVGGTATEGLDFIGAGEILTFAEGETKKTVILTILDDSEPEDDESIIVSLVYTEGGSRILPSSDTVRVNILANDNVAGIVSFQTASRSVIGHEGEILQFHVIRTFPGRGNVTVNWKIIGQNLELNFANFSGQLFFPEGSLNTTLFVHLLDDNIPEEKEVYQVILYDVRTQGVPPAGIALLDAQGYAAVLTVEASDEPHGVLNFALSSRFVLLQEANITIQLFINREFGSLGAINVTYTTVPGMLSLKNQTVGNLAEPEVDFVPIIGFLILEEGETAAAINITILEDDVPELEEYFLVNLTYVGLTMAASTSFPPRLDSEGLTAQVIIDANDGARGVIEWQQSRFEVNETHGSLTLVAQRSREPLGHVSLFVYAQNLEAQVGLDYIFTPMILHFADGERYKNVNIMILDDDIPEGDEKFQLILTNPSPGLELGKNTIALIIVLANDDGPGVLSFNNSEHFFLREPTALYVQESVAVLYIVREPAQGLFGTVTVQFIVTEVNSSNESKDLTPSKGYIVLEEGVRFKALQISAILDTEPEMDEYFVCTLFNPTGGARLGVHVQTLITVLQNQAPLGLFSISAVENRATSIDIEEANRTVYLNVSRTNGIDLAVSVQWETVSETAFGMRGMDVVFSVFQSFLDESASGWCFFTLENLIYGIMLRKSSVTVYRWQGIFIPVEDLNIENPKTCEAFNIGFSPYFVITHEERNEEKPSLNSVFTFTSGFKLFLVQTIIILESSQVRYFTSDSQDYLIIASQRDDSELTQVFRWNGGSFVLHQKLPVRGVLTVALFNKGGSVFLAISQANARLNSLLFRWSGSGFINFQEVPVSGTTEVEALSSANDIYLIFAENVFLGDQNSIDIFIWEMGQSSFRYFQSVDFAAVNRIHSFTPASGIAHILLIGQDMSALYCWNSERNQFSFVLEVPSAYDVASVTVKSLNSSKNLIALVGAHSHIYELAYISSHSDFIPSSGELIFEPGEREATIAVNILDDTVPEKEESFKVQLKNPKGGAEIGINDSVTITILSNDDAYGIVAFAQNSLYKQVEEMEQDSLVTLNVERLKGTYGRITIAWEADGSISDIFPTSGVILFTEGQVLSTITLTILADNIPELSEVVIVTLTRITTEGVEDSYKGATIDQDRSKSVITTLPNDSPFGLVGWRAASVFIRVAEPKENTTTLQLQIARDKGLLGDIAIHLRAQPNFLLHVDNQATENEDYVLQETIIIMKENIKEAHAEVSILPDDLPELEEGFIVTITEVNLVNSDFSTGQPSVRRPGMEIAEIMIEENDDPRGIFMFHVTRGAGEVITAYEVPPPLNVLQVPVVRLAGSFGAVNVYWKASPDSAGLEDFKPSHGILEFADKQVTAMIEITIIDDAEFELTETFNISLISVAGGGRLGDDVVVTVVIPQNDSPFGVFGFEEKTVMIDESLSSDDPDSYVTLTVVRSPGGKGTVRLEWTIDEKAKHNLSPLNGTLHFDETESQKTIVLHTLQDTVLEEDRRFTIQLISIDEVEISPVKGSASIIIRGDKRASGEVGIAPSSRHILIGEPSAKYNGTAIISLVRGPGILGEVTVFWRIFPPSVGEFAETSGKLTMRDEQSAVIVVIQALNDDIPEEKSFYEFQLTAVSEGGVLSESSSTANITVVASDSPYGRFAFSHEQLRVSEAQRVNITIIRSSGDFGHVRLWYKTMSGTAEAGLDFVPAAGELLFEAGEMRKSLHVEILDDDYPEGPEEFSLTITKVELQGRGYDFTIQENGLQIDQPPEIGNISIVRIIIMKNDNAEGIIEFDPKYTAFEVEEDVGLIMIPVVRLHGTYGYVTADFISQSSSASPGGVDYILHGSTVTFQHGQNLSFINISIIDDNESEFEEPIEILLTGATGGAVLGRHLVSRIIIAKSDSPFGVIRFLNQSKISIANPNSTMILSLVLERTGGLLGEIQVNWETVGPNSQEALLPQNRDIADPVSGLFYFGEGEGGVRTIILTIYPHEEIEVEETFIIKLHLVKGEAKLDSRAKDVTLTIQEFGDPNGVVQFAPETLSKKTYSEPLALEGPLLITFFVRRVKGTFGEIMVYWELSSEFDITEDFLSTSGFFTIADGESEASFDVHLLPDEVPEIEEDYVIQLVSVEGGAELDLEKSITWFSVYANDDPHGVFALYSDRQSILIGQNLIRSIQINITRLAGTFGDVAVGLRISSDHKEQPIVTENAERQLVVKDGATYKVDVVPIKNQVFLSLGSNFTLQLVTVMLVGGRFYGMPTILQEAKSAVLPVSEKAANSQVGFESTAFQLMNITAGTSHVMISRRGTYGALSVAWTTGYAPGLEIPEFIVVGNMTPTLGSLSFSHGEQRKGVFLWTFPSPGWPEAFVLHLSGVQSSAPGGAQLRSGFIVAEIEPMGVFQFSTSSRNIIVSEDTQMIRLHVQRLFGFHSDLIKVSYQTTAGSAKPLEDFEPVQNGELFFQKFQTEVDFEITIINDQLSEIEEFFYINLTSVEIRGLQKFDVNWSPRLNLDFSVAVITILDNDDLAGMDISFPETTVAVAVDTTLIPVETESTTYLSTSKTTTILQPTNVVAIVTEATGVSAIPEKLVTLHGTPAVSEKPDVATVTANVSIHGTFSLGPSIVYIEEEMKNGTFNTAEVLIRRTGGFTGNVSITVKTFGERCAQMEPNALPFRGIYGISNLTWAVEEEDFEEQTLTLIFLDGERERKVSVQILDDDEPEGQEFFYVFLTNPQGGAQIVEEKDDTGFAAFAMVIITGSDLHNGIIGFSEESQSGLELREGAVMRRLHLIVTRQPNRAFEDVKVFWRVTLNKTVVVLQKDGVNLVEELQSVSGTTTCTMGQTKCFISIELKPEKVPQVEVYFFVELYEATAGAAINNSARFAQIKILESDESQSLVYFSVGSRLAVAHKKATLISLQVARDSGTGLMMSVNFSTQELRSAETIGRTIISPAISGKDFVITEGTLVFEPGQRSTVLDVILTPETGSLNSFPKRFQIVLFDPKGGARIDKVYGTANITLVSDADSQAIWGLADQLHQPVNDDILNRVLHTISMKVATENTDEQLSAMMHLIEKITTEGKIQAFSVASRTLFYEILCSLINPKRKDTRGFSHFAEVTENFAFSLLTNVTCGSPGEKSKTILDSCPYLSILALHWYPQQINGHKFEGKEGDYIRIPERLLDVQDAEIMAGKSTCKLVQFTEYSSQQWFISGNNLPTLKNKVLSLSVKGQSSQLLTNDNEVLYRIYAAEPRIIPQTSLCLLWNQAAASWLSDSQFCKVVEETADYVECACSHMSVYAVYARTDNLSSYNEAFFTSGFICISGLCLAVLSHIFCARYSMFAAKLLTHMMAASLGTQILFLASAYASPQLAEESCSAMAAVTHYLYLCQFSWMLIQSVNFWYVLVMNDEHTERRYLLFFLLSWGLPAFVVILLIVILKGIYHQSMSQIYGLIHGDLCFIPNVYAALFTAALVPLTCLVVVFVVFIHAYQVKPQWKAYDDVFRGRTNAAEIPLILYLFALISVTWLWGGLHMAYRHFWMLVLFVIFNSLQGLYVFMVYFILHNQMCCPMKASYTVEMNGHPGPSTAFFTPGSGMPPAGGEISKSTQNLIGAMEEVPPDWERASFQQGSQASPDLKPSPQNGATFPSSGGYGQGSLIADEESQEFDDLIFALKTGAGLSVSDNESGQGSQEGGTLTDSQIVELRRIPIADTHL

SEQ ID NO: 24201 - protein, 2038 aa, Homo sapiens
  REGION 1..2038: note = ENSP00000492531
MINESKGDAIYSAVYDVVRNRGNFGDVSVSWVVSPDFTQDVFPVQGTVVFGDQEFSKNITIYSLPDEIPEEMEEFTVILLNGTGGAKVGNRTTATLRIRRNDDPIYFAEPRVVRVQEGETANFTVLRNGSVDVTCMVQYATKDGKATARERDFIPVEKGETLIFEVGSRQQSISIFVNEDGIPETDEPFYIILLNSTGDTVVYQYGVATVIIEANDDPNGIFSLEPIDKAVEEGKTNAFWILRHRGYFGSVSVSWQLFQNDSALQPGQEFYETSGTVNFMDGEEAKPIILHAFPDKIPEFNEFYFLKLVNISGPGGQLAETNLQVTVMVPFNDDPFGVFILDPECLEREVAEDVLSEDDMSYITNFTILRQQGVFGDVQLGWEILSSEFPAGLPPMIDFLLVGIFPTTVHLQQHMRRHHSGTDALYFTGLEGAFGTVNPKYHPSRNNTIANFTFSAWVMPNANTNGFIIAKDDGNGSIYYGVKIQTNESHVTLSLHYKTLGSNATYIAKTTVMKYLEESVWLHLLIILEDGIIEFYLDGNAMPRGIKSLKGEAITDGPGILRIGAGINGNDRFTGLMQDVRSYERKLTLEEIYELHAMPAKSDLHPISGYLEFRQGETNKSFIISARDDNDEEGEELFILKLVSVYGGARISEENTTARLTIQKSDNANGLFGFTGACIPEIAEEGSTISCVVERTRGALDYVHVFYTISQIETDGINYLVDDFANASGTITFLPWQRSEVLNIYVLDDDIPELNEYFRVTLVSAIPGDGKLGSTPTSGASIDPEKETTDITIKASDHPYGLLQFSTGLPPQPKDAMTLPASSVPHITVEEEDGEIRLLVIRAQGLLGRVTAEFRTVSLTAFSPEDYQNVAGTLEFQPGERYKYIFINITDNSIPELEKSFKVELLNLEGGVAELFRVDGSGSGDGDMEFFLPTIHKRASLGVASQILVTIAASDHAHGVFEFSPESLFVSGTEPEDGYSTVTLNVIRHHGTLSPVTLHWNIDSDPDGDLAFTSGNITFEIGQTSANITVEILPDEDPELDKAFSVSVLSVSSGSLGAHINATLTVLASDDPYGIFIFSEKNRPVKVEEATQNITLSIIRLKGLMGKVLVSYATLDDMEKPPYFPPNLARATQGRDYIPASGFALFGANQSEATIAISILDDDEPERSESVFIELLNSTLVAKVQSRSIPNSPRLGPKVETIAQLIIIANDDAFGTLQLSAPIVRVAENHVGPIINVTRTGGAFADVSVKFKAVPITAIAGEDYSIASSDVVLLEGETSKAVPIYVINDIYPELEESFLVQLMNETTGGARLGALTEAVIIIEASDDPYGLFGFQITKLIVEEPEFNSVKVNLPIIRNSGTLGNVTVQWVATINGQLATGDLRVVSGNVTFAPGETIQTLLLEVLADDVPEIEEVIQVQLTDASGGGTIGLDRIANIIIPANDDPYGTVAFAQMVYRVQEPLERSSCANITVRRSGGHFGRLLLFYSTSDIDVVALAMEEGQDLLSYYESPIQGVPDPLWRTWMNVSAVGEPLYTCATLCLKEQACSAFSFFSASEGPQCFWMTSWISPAVNNSDFWTYRKNMTRVASLFSGQAVAGSDYEPVTRQWAIMQEGDEFANLTVSILPDDFPEMDESFLISLLEVHLMNISASLKNQPTIGQPNISTVVIALNGDAFGVFVIYNISPNTSEDGLFVEVQEQPQTLVELMIHRTGGSLGQVAVEWRVVGGTATEGLDFIGAGEILTFAEGETKKTVILTILDDSEPEDDESIIVSLVYTEGGSRILPSSDTVRVNILANDNVAGIVSFQTASRSVIGHEGEILQFHVIRTFPGRGNVTVNWKIIGQNLELNFANFSGQLFFPEGSLNTTLFVHLLDDNIPEEKEVYQVILYDVRTQGVPPAGIALLDAQGYAAVLTVEASDEPHGVLNFALSSRFVLLQEANITIQLFINREFGSLGAINVTYTTVPGMLSLKNQTVGNLAEPEVDFVPIIGFLILEEGETAAAINITILEDDVPELEEYFLVNLTYVGLTMAASTSFPPRL

SEQ ID NO: 24202 - protein, 72 aa, Homo sapiens
  REGION 1..72: note = ENSP00000492054
  VARIANT 1: note = Any amino acid
XEGSTISCVVERTRGALDYVHVFYTISQIETDGINYLVDDFANASGTITFLPWQRSELLIEVSLPIIIYNCN

SEQ ID NO: 24203 - protein, 99 aa, Homo sapiens
  REGION 1..99: note = ENSP00000491057
VPHITVEEEDGEIRLLVIRAQGLLGRVTAEFRTVSLTAFSPEDYQNVAGTLEFQPGERYKYIFINITDNSIPELEKSFKVELLNLEGGVCEFLVRAGDE

SEQ ID NO: 24204 - protein, 567 aa, Homo sapiens
  REGION 1..567: note = ENSP00000492527
  VARIANT 1: note = Any amino acid
XITVEEEDGEIRLLVIRAQGLLGRVTAEFRTVSLTAFSPEDYQNVAGTLEFQPGERYKYIFINITDNSIPELEKSFKVELLNLEGGAELFRVDGSGSGDGDMEFFLPTIHKRASLGVASQILVTIAASDHAHGVFEFSPESLFVSGTEPEDGYSTVTLNVIRHHGTLSPVTLHWNIDSDPDGDLAFTSGNITFEIGQTSANITVEILPDEDPELDKAFSVSVLSVSSGSLGAHINATLTVLASDDPYGIFIFSEKNRPVKVEEATQNITLSIIRLKGLMGKVLVSYATLDDMEKPPYFPPNLARATQGRDYIPASGFALFGANQSEATIAISILDDDEPERSESVFIELLNSTLVAKVQSRSIPNSPRLGPKVETIAQLIIIANDDAFGTLQLSAPIVRVAENHVGPIINVTRTGGAFADVSVKFKAVPITAIAGEDYSIASSDVVLLEGETSKAVPIYVINDIYPELEESFLVQLMNETTGGARLGALTEAVIIIEASDDPYGLFGFQITKLIVEEPEFNSVKVNLPIIRNSGTLGNVTVQWVATINGQLATGDLRVVSGYPSATN

SEQ ID NO: 24205 - protein, 65 aa, Homo sapiens
  REGION 1..65: note = ENSP00000492538
  VARIANT 1: note = Any amino acid
XLPTIHKRASLGVASQILVTIAASDHAHGVFEFSPESLFVSGTEPEDGYSTVTLNFQILHVLGLR

SEQ ID NO: 24206 - protein, 2624 aa, Homo sapiens
  REGION 1..2624: note = ENSP00000392618
QLKNPKGGAEIGINDSVTITILSNDDAYGIVAFAQNSLYKQVEEMEQDSLVTLNVERLKGTYGRITIAWEADGSISDIFPTSGVILFTEGQVLSTITLTILADNIPELSEVVIVTLTRITTEGVEDSYKGATIDQDRSKSVITTLPNDSPFGLVGWRAASVFIRVAEPKENTTTLQLQIARDKGLLGDIAIHLRAQPNFLLHVDNQATENEDYVLQETIIIMKENIKEAHAEVSILPGAGEVITAYEVPPPLNVLQVPVVRLAGSFGAVNVYWKASPDSAGLEDFKPSHGILEFADKQVTAMIEITIIDDAEFELTETFNISLISVAGGGRLGDDVVVTVVIPQNDSPFGVFGFEEKTVMIDESLSSDDPDSYVTLTVVRSPGGKGTVRLEWTIDEKAKHNLSPLNGTLHFDETESQKTIVLHTLQDTVLEEDRRFTIQLISIDEVEISPVKGSASIIIRGDKRASGEVGIAPSSRHILIGEPSAKYNGTAIISLVRGPGILGEVTVFWRIFPPSVGEFAETSGKLTMRDEQSAVIVVIQALNDDIPEEKSFYEFQLTAVSEGGVLSESSSTANITVVASDSPYGRFAFSHEQLRVSEAQRVNITIIRSSGDFGHVRLWYKTMSGTAEAGLDFVPAAGELLFEAGEMRKSLHVEILDDDYPEGPEEFSLTITKVELQGRGYDFTIQENGLQIDQPPEIGNISIVRIIIMKNDNAEGIIEFDPKYTAFEVEEDVGLIMIPVVRLHGTYGYVTADFISQSSSASPGGVDYILHGSTVTFQHGQNLSFINISIIDDNESEFEEPIEILLTGATGGAVLGRHLVSRIIIAKSDSPFGVIRFLNQSKISIANPNSTMILSLVLERTGGLLGEIQVNWETVGPNSQEALLPQNRDIADPVSGLFYFGEGEGGVRTIILTIYPHEEIEVEETFIIKLHLVKGEAKLDSRAKDVTLTIQEFGDPNGVVQFAPETLSKKTYSEPLALEGPLLITFFVRRVKGTFGEIMVYWELSSEFDITEDFLSTSGFFTIADGESEASFDVHLLPDEVPEIEEDYVIQLVSVEGGAELDLEKSITWFSVYANDDPHGVFALYSDRQSILIGQNLIRSIQINITRLAGTFGDVAVGLRISSDHKEQPIVTENAERQLVVKDGATYKVDVVPIKNQVFLSLGSNFTLQLVTVMLVGGRFYGMPTILQEAKSAVLPVSEKAANSQVGFESTAFQLMNITAGTSHVMISRRGTYGALSVAWTTGYAPGLEIPEFIVVGNMTPTLGSLSFSHGEQRKGVFLWTFPSPGWPEAFVLHLSGVQSSAPGGAQLRSGFIVAEIEPMGVFQFSTSSRNIIVSEDTQMIRLHVQRLFGFHSDLIKVSYQTTAGSAKPLEDFEPVQNGELFFQKFQTEVDFEITIINDQLSEIEEFFYINLTSVEIRGLQKFDVNWSPRLNLDFSVAVITILDNDDLAGMDISFPETTVAVAVDTTLIPVETESTTYLSTSKTTTILQPTNVVAIVTEATGVSAIPEKLVTLHGTPAVSEKPDVATVTANVSIHGTFSLGPSIVYIEEEMKNGTFNTAEVLIRRTGGFTGNVSITVKTFGERCAQMEPNALPFRGIYGISNLTWAVEEEDFEEQTLTLIFLDGERERKVSVQILDDDEPEGQEFFYVFLTNPQGGAQIVEEKDDTGFAAFAMVIITGSDLHNGIIGFSEESQSGLELREGAVMRRLHLIVTRQPNRAFEDVKVFWRVTLNKTVVVLQKDGVNLVEELQSVSGTTTCTMGQTKCFISIELKPEKVPQVEVYFFVELYEATAGAAINNSARFAQIKILESDESQSLVYFSVGSRLAVAHKKATLISLQVARDSGTGLMMSVNFSTQELRSAETIGRTIISPAISGKDFVITEGTLVFEPGQRSTVLDVILTPETGSLNSFPKRFQIVLFDPKGGARIDKVYGTANITLVSDADSQAIWGLADQLHQPVNDDILNRVLHTISMKVATENTDEQLSAMMHLIEKITTEGKIQAFSVASRTLFYEILCSLINPKRKDTRGFSHFAEVTENFAFSLLTNVTCGSPGEKSKTILDSCPYLSILALHWYPQQINGHKFEGKEGDYIRIPERLLDVQDAEIMAGKSTCKLVQFTEYSSQQWFISGNNLPTLKNKVLSLSVKGQSSQLLTNDNEVLYRIYAAEPRIIPQTSLCLLWNQAAASWLSDSQFCKVVEETADYVECACSHMSVYAVYARTDNLSSYNEAFFTSGFICISGLCLAVLSHIFCARYSMFAAKLLTHMMAASLGTQILFLASAYASPQLAEESCSAMAAVTHYLYLCQFSWMLIQSVNFWYVLVMNDEHTERRYLLFFLLSWGLPAFVVILLIVILKGIYHQSMSQIYGLIHGDLCFIPNVYAALFTAALVPLTCLVVVFVVFIHAYQVKPQWKAYDDVFRGRTNAAEIPLILYLFALISVTWLWGGLHMAYRHFWMLVLFVIFNSLQGLYVFMVYFILHNQMCCPMKASYTVEMNGHPGPSTAFFTPGSGMPPAGGEISKSTQNLIGAMEEVPPDWERASFQQGSQASPDLKPSPQNGATFPSSGGYGQGSLIADEESQEFDDLIFALKTGAGLSVSDNESGQGSQEGGTLTDSQIVELRRIPIADTHL

SEQ ID NO: 24207 - protein, 390 aa, Homo sapiens
  REGION 1..390: note = ENSP00000492630
TFQHGQNLSFINISIIDDNESEFEEPIEILLTGATGGAVLGRHLVSRIIIAKSDSPFGVIRFLNQSKISIANPNSTMILSLVLERTGGLLGEIQVNWETVGPNSQEALLPQNRDIADPVSGLFYFGEGEGGVRTIILTIYPHEEIEVEETFIIKLHLVKGEAKLDSRAKDVTLTIQEFGDPNGVVQFAPETLSKKTYSEPLALEGPLLITFFVRRVKGTFGEIMVYWELSSEFDITEDFLSTSGFFTIADGESEASFDVHLLPDEVPEIEEDYVIQLVSVEGGAELDLEKSITWFSVYANDDPHGVFALYSDRQSILIGQNLIRSIQINITRLAGTFGDVAVGLRISSDHKEQPIVTENAERQLVVKDGATYKVDVVPIKNQVCGISSVS

SEQ ID NO: 24208 - protein, 938 aa, Homo sapiens
  REGION 1..938: note = ENSP00000491425
NSTMILSLVLERTGGLLGEIQVNWETVGPNSQEALLPQNRDIADPVSGLFYFGEGEGGVRTIILTIYPHEEIEVEETFIIKLHLVKGEAKLDSRAKDVTLTIQEFGDPNGVVQFAPETLSKKTYSEPLALEGPLLITFFVRRVKGTFGEIMVYWELSSEFDITEDFLSTSGFFTIADGESEASFDVHLLPDEVPEIEEDYVIQLVSVEGGAELDLEKSITWFSVYANDDPHGVFALYSDRQSILIGQNLIRSIQINITRLAGTFGDVAVGLRISSDHKEQPIVTENAERQLVVKDGATYKVDVVPIKNQVFLSLGSNFTLQLVTVMLVGGRFYGMPTILQEAKSAVLPVSEKAANSQVGFESTAFQLMNITAGTSHVMISRRGTYGALSVAWTTGYAPGLEIPEFIVVGNMTPTLGSLSFSHGEQRKGVFLWTFPSPGWPEAFVLHLSGVQSSAPGGAQLRSGFIVAEIEPMGVFQFSTSSRNIIVSEDTQMIRLHVQRLFGFHSDLIKVSYQTTAGSAKPLEDFEPVQNGELFFQKFQTEVDFEITIINDQLSEIEEFFYINLTSVEIRGLQKFDVNWSPRLNLDFSVAVITILDNDDLAGMDISFPETTVAVAVDTTLIPVETESTTYLSTSKTTTILQPTNVVAIVTEATGVSAIPEKLVTLHGTPAVSEKPDVATVTANVSIHGTFSLGPSIVYIEEEMKNGTFNTAEVLIRRTGGFTGNVSITVKTFGERCAQMEPNALPFRGIYGISNLTWAVEEEDFEEQTLTLIFLDGERERKVSVQILDDDEPEGQEFFYVFLTNPQGGAQIVEEKDDTGFAAFAMVIITGSDLHNGIIGFSEESQSGLELREGAVMRRLHLIVTRQPNRAFEDVKVFWRVTLNKTVVVLQKDGVNLVEELQSVSGTTTCTMGQTKCFISIELKPEKRNATEPIIKSFS

SEQ ID NO: 24209 - protein, 73 aa, Homo sapiens
  REGION 1..73: note = ENSP00000491299
GQNLIRSIQINITRLAGTFGDVAVGLRISSDHKEQPIVTENAERQLVVKDGATYKVDVVPIKNQVVGCQSLPW

SEQ ID NO: 24210 - protein, 80 aa, Homo sapiens
  REGION 1..80: note = ENSP00000492781
  VARIANT 1: note = Any amino acid
XDEQLSAMMHLIEKITTEGKIQAFSVASRTLFYEILCSLINPKRKDTRGFSHFAEVTENFAFSLLTNVTCGSPGEKSPAC

SEQ ID NO: 24211 - protein, 334 aa, Homo sapiens
  REGION 1..334: note = ENSP00000491767
MAAVTHYLYLCQFSWMLIQSVNFWYVLVMNDEHTERRYLLFFLLSWGLPAFVVILLIVILKGIYHQSMSQIYGLIHGDLCFIPNVYAALFTAALVPLTCLVVVFVVFIHAYQVKPQWKAYDDVFRGRTNAAEIPLILYLFALISVTWLWGGLHMAYRHFWMLVLFVIFNSLQGLYVFMVYFILHNQMCCPMKASYTVEMNGHPGPSTAFFTPGSGMPPAGGEISKSTQNLIGAMEEVPPDWERASFQQGSQASPDLKPSPQNGATFPSSGGYGQGSLIADEESQEFDDLIFALKTGAGLSVSDNESGQGSQEGGTLTDSQIVELRRIPIADTHL

SEQ ID NO: 24212 - protein, 192 aa, Homo sapiens
  REGION 1..192: note = ENSP00000492216
MAAVTHYLYLCQFSWMLIQSVNFWYVLVMNDEHTERRYLLFFLLSWGLPAFVVILLIVILKGIYHQSMSQIYGLIHGDLCFIPNVYAALFTAALVPLTCLVVVFVVFIHAYQVKPQWKAYDDVFRGRTNAAEIPLILYLFALISVTWLWGGLHMAYRHFWMLVLFVIFNSLQVLVSVSVIMNLVKAARRGAP

SEQ ID NO: 24213 - protein, 123 aa, Homo sapiens
  REGION 1..123: note = ENSP00000492328
MAAVTHYLYLCQFSWMLIQSVNFWYVLVMNDEHTERRYLLFFLLSWGLPAFVVILLIVILKGIYHQSMSQIYGLIHGDLCFIPNVYAALFTAALVPLTCLVVVFVVFIHAYQVKPQWKAYDDV

SEQ ID NO: 24214 - protein, 123 aa, Homo sapiens; identical to SEQ ID NO: 24213
  REGION 1..123: note = ENSP00000491401

SEQ ID NO: 24215 - protein, 185 aa, Homo sapiens
  REGION 1..185: note = ENSP00000278175
MKLVSVALMYLGSLAFLGADTARLDVASEFRKKWNKWALSRGKRELRMSSSYPTGLADVKAGPAQTLIRPQDMKGASRSPEDSSPDAARIRVKRYRQSMNNFQGLRSFGCRFGTCTVQKLAHQIYQFTDKDKDNVAPRSKISPQGYGRRRRRSLPEAGPGRTLVSSKPQAHGAPAPPSGSAPHFL

SEQ ID NO: 24216 - protein, 138 aa, Homo sapiens
  REGION 1..138: note = ENSP00000431438
MSSSYPTGLADVKAGPAQTLIRPQDMKGASRSPEDSSPDAARIRVKRYRQSMNNFQGLRSFGCRFGTCTVQKLAHQIYQFTDKDKDNVAPRSKISPQGYGRRRRRSLPEAGPGRTLVSSKPQAHGAPAPPSGSAPHFL

SEQ ID NO: 24217 - protein, 117 aa, Homo sapiens
  REGION 1..117: note = ENSP00000436837
MGSQVAFLPPPPARSSPDAARIRVKRYRQSMNNFQGLRSFGCRFGTCTVQKLAHQIYQFTDKDKDNVAPRSKISPQGYGRRRRRSLPEAGPGRTLVSSKPQAHGAPAPPSGSAPHFL

SEQ ID NO: 24218 - protein, 83 aa, Homo sapiens
  REGION 1..83: note = ENSP00000433062
MKLVSVALMYLGSLAFLGADTARLDVASEFRKKWNKWALSRGKRELRMSSSYPTGLADVKAGPAQTLIRPQDMKGASRSPEDR

SEQ ID NO: 24219 - protein, 185 aa, Homo sapiens; identical to SEQ ID NO: 24215
  REGION 1..185: note = ENSP00000436607

SEQ ID NO: 24220 - protein, 139 aa, Homo sapiens
  REGION 1..139: note = ENSP00000434354
MKLVSVALMYLGSLAFLGADTARLDVASEFRKKWNKWALSRGKRELRMSSSYPTGLADVKAGPAQTLIRPQDMKGASRSPEDSCLSSPSPRPQQSGCRPHPSQALPPEHEQLPGPPELWLPLRDVHGAEAGTPDLPVHR

SEQ ID NO: 24221 - protein, 185 aa, Homo sapiens; identical to SEQ ID NO: 24215
  REGION 1..185: note = ENSP00000435124

SEQ ID NO: 24222 - protein, 83 aa, Homo sapiens; identical to SEQ ID NO: 24218
  REGION 1..83: note = ENSP00000434749

SEQ ID NO: 24223 - protein, 326 aa, Homo sapiens
  REGION 1..326: note = ENSP00000308549
MPPSISAFQAAYIGIEVLIALVSVPGNVLVIWAVKVNQALRDATFCFIVSLAVADVAVGALVIPLAILINIGPQTYFHTCLMVACPVLILTQSSILALLAIAVDRYLRVKIPLRYKMVVTPRRAAVAIAGCWILSFVVGLTPMFGWNNLSAVERAWAANGSMGEPVIKCEFEKVISMEYMVYFNFFVWVLPPLLLMVLIYLEVFYLIRKQLNKKVSASSGDPQKYYGKELKIAKSLALILFLFALSWLPLHILNCITLFCPSCHKPSILTYIAIFLTHGNSAMNPIVYAFRIQKFRVTFLKIWNDHFRCQPAPPIDEDLPEERPDD

SEQ ID NO: 24224 - protein, 326 aa, Homo sapiens; identical to SEQ ID NO: 24223
  REGION 1..326: note = ENSP00000356205

SEQ ID NO: 24225 - protein, 125 aa, Homo sapiens
  REGION 1..125: note = ENSP00000356204
MPPSISAFQAAYIGIEVLIALVSVPGNVLVIWAVKVNQALRDATFCFIVSLAVADVAVGALVIPLAILINIGPQTYFHTCLMVACPVLILTQSSILALLAIAVDRYLRVKIPLRRISQCMASTKS

SEQ ID NO: 24226 - protein, 326 aa, Homo sapiens; identical to SEQ ID NO: 24223
  REGION 1..326: note = ENSP00000338435

SEQ ID NO: 24227 - protein, 125 aa, Homo sapiens; identical to SEQ ID NO: 24225
  REGION 1..125: note = ENSP00000491900

SEQ ID NO: 24228 - protein, 210 aa, Homo sapiens
  REGION 1..210: note = ENSP00000483953
MVVTPRRAAVAIAGCWILSFVVGLTPMFGWNNLSAVERAWAANGSMGEPVIKCEFEKVISMEYMVYFNFFVWVLPPLLLMVLIYLEVFYLIRKQLNKKVSASSGDPQKYYGKELKIAKSLALILFLFALSWLPLHILNCITLFCPSCHKPSILTYIAIFLTHGNSAMNPIVYAFRIQKFRVTFLKIWNDHFRCQPAPPIDEDLPEERPDD

SEQ ID NO: 24229 - protein, 332 aa, Homo sapiens
  REGION 1..332: note = ENSP00000304501
MLLETQDALYVALELVIAALSVAGNVLVCAAVGTANTLQTPTNYFLVSLAAADVAVGLFAIPFAITISLGFCTDFYGCLFLACFVLVLTQSSIFSLLAVAVDRYLAICVPLRYKSLVTGTRARGVIAVLWVLAFGIGLTPFLGWNSKDSATNNCTEPWDGTTNESCCLVKCLFENVVPMSYMVYFNFFGCVLPPLLIMLVIYIKIFLVACRQLQRTELMDHSRTTLQREIHAAKSLAMIVGIFALCWLPVHAVNCVTLFQPAQGKNKPKWAMNMAILLSHANSVVNPIVYAYRNRDFRYTFHKIISRYLLCQADVKSGNGQAGVQPALGVGL

SEQ ID NO: 24230 - protein, 475 aa, Homo sapiens
  REGION 1..475: note = ENSP00000369960
MVFLSGNASDSSNCTQPPAPVNISKAILLGVILGGLILFGVLGNILVILSVACHRHLHSVTHYYIVNLAVADLLLTSTVLPFSAIFEVLGYWAFGRVFCNIWAAVDVLCCTASIMGLCIISIDRYIGVSYPLRYPTIVTQRRGLMALLCVWALSLVISIGPLFGWRQPAPEDETICQINEEPGYVLFSALGSFYLPLAIILVMYCRVYVVAKRESRGLKSGLKTDKSDSEQVTLRIHRKNAPAGGSGMASAKTKTHFSVRLLKFSREKKAAKTLGIVVGCFVLCWLPFFLVMPIGSFFPDFKPSETVFKIVFWLGYLNSCINPIIYPCSSQEFKKAFQNVLRIQCLCRKQSSKHALGYTLHPPSQAVEGQHKDMVRIPVGSRETFYRISKTDGVCEWKFFSSMPRGSARITVSKDQSSCTTARTKSRSVTRLECSGMILAHCNLRLPGSRDSPASASQAAGTTGMCHQADATRPS

SEQ ID NO: 24231 - protein, 324 aa, Homo sapiens
  REGION 1..324: note = ENSP00000431073
MVFLSGNASDSSNCTQPPAPVNISKAILLGVILGGLILFGVLGNILVILSVACHRHLHSVTHYYIVNLAVADLLLTSTVLPFSAIFEVLGYWAFGRVFCNIWAAVDVLCCTASIMGLCIISIDRYIGVSYPLRYPTIVTQRRGLMALLCVWALSLVISIGPLFGWRQPAPEDETICQINEEPGYVLFSALGSFYLPLAIILVMYCRVYVVAKRESRGLKSGLKTDKSDSEQVTLRIHRKNAPAGGSGMASAKTKTHFSVRLLKFSREKKAAKTLGIVVGCFVLCWLPFFLVMPIGTYILKYDVLFWRKGLSVCTRLRERKEIKN

SEQ ID NO: 24232 - protein, 429 aa, Homo sapiens
  REGION 1..429: note = ENSP00000369956
MVFLSGNASDSSNCTQPPAPVNISKAILLGVILGGLILFGVLGNILVILSVACHRHLHSVTHYYIVNLAVADLLLTSTVLPFSAIFEVLGYWAFGRVFCNIWAAVDVLCCTASIMGLCIISIDRYIGVSYPLRYPTIVTQRRGLMALLCVWALSLVISIGPLFGWRQPAPEDETICQINEEPGYVLFSALGSFYLPLAIILVMYCRVYVVAKRESRGLKSGLKTDKSDSEQVTLRIHRKNAPAGGSGMASAKTKTHFSVRLLKFSREKKAAKTLGIVVGCFVLCWLPFFLVMPIGSFFPDFKPSETVFKIVFWLGYLNSCINPIIYPCSSQEFKKAFQNVLRIQCLCRKQSSKHALGYTLHPPSQAVEGQHKDMVRIPVGSRETFYRISKTDGVCEWKFFSSMPRGSARITVSKDQSSCTTARGHTPMT

SEQ ID NO: 24233 - protein, 324 aa, Homo sapiens; identical to SEQ ID NO: 24231
  REGION 1..324: note = ENSP00000430414

SEQ ID NO: 24234 - protein, 427 aa, Homo sapiens
  REGION 1..427: note = ENSP00000430793
MVFLSGNASDSSNCTQPPAPVNISKAILLGVILGGLILFGVLGNILVILSVACHRHLHSVTHYYIVNLAVADLLLTSTVLPFSAIFEVLGYWAFGRVFCNIWAAVDVLCCTASIMGLCIISIDRYIGVSYPLRYPTIVTQRRGLMALLCVWALSLVISIGPLFGWRQPAPEDETICQINEEPGYVLFSALGSFYLPLAIILVMYCRVYVVAKRESRGLKSGLKTDKSDSEQVTLRIHRKNAPAGGSGMASAKTKTHFSVRLLKFSREKKAAKTLGIVVGCFVLCWLPFFLVMPIGSFFPDFKPSETVFKIVFWLGYLNSCINPIIYPCSSQEFKKAFQNVLRIQCLCRKQSSKHALGYTLHPPSQAVEGQHKDMVRIPVGSRETFYRISKTDGVCEWKFFSSMPRGSARITVSKDQSSCTTARSSGF

SEQ ID NO: 24235 - protein, 455 aa, Homo sapiens
  REGION 1..455: note = ENSP00000346557
MVFLSGNASDSSNCTQPPAPVNISKAILLGVILGGLILFGVLGNILVILSVACHRHLHSVTHYYIVNLAVADLLLTSTVLPFSAIFEVLGYWAFGRVFCNIWAAVDVLCCTASIMGLCIISIDRYIGVSYPLRYPTIVTQRRGLMALLCVWALSLVISIGPLFGWRQPAPEDETICQINEEPGYVLFSALGSFYLPLAIILVMYCRVYVVAKRESRGLKSGLKTDKSDSEQVTLRIHRKNAPAGGSGMASAKTKTHFSVRLLKFSREKKAAKTLGIVVGCFVLCWLPFFLVMPIGSFFPDFKPSETVFKIVFWLGYLNSCINPIIYPCSSQEFKKAFQNVLRIQCLCRKQSSKHALGYTLHPPSQAVEGQHKDMVRIPVGSRETFYRISKTDGVCEWKFFSSMPRGSARITVSKDQSSCTTARRGMDCRYFTKNCREHIKHVNFMMPPWRKGSEC

SEQ ID NO: 24236 - protein, 466 aa, Homo sapiens
  REGION 1..466: note = ENSP00000276393
MVFLSGNASDSSNCTQPPAPVNISKAILLGVILGGLILFGVLGNILVILSVACHRHLHSVTHYYIVNLAVADLLLTSTVLPFSAIFEVLGYWAFGRVFCNIWAAVDVLCCTASIMGLCIISIDRYIGVSYPLRYPTIVTQRRGLMALLCVWALSLVISIGPLFGWRQPAPEDETICQINEEPGYVLFSALGSFYLPLAIILVMYCRVYVVAKRESRGLKSGLKTDKSDSEQVTLRIHRKNAPAGGSGMASAKTKTHFSVRLLKFSREKKAAKTLGIVVGCFVLCWLPFFLVMPIGSFFPDFKPSETVFKIVFWLGYLNSCINPIIYPCSSQEFKKAFQNVLRIQCLCRKQSSKHALGYTLHPPSQAVEGQHKDMVRIPVGSRETFYRISKTDGVCEWKFFSSMPRGSARITVSKDQSSCTTARVRSKSFLQVCCCVGPSTPSLDKNHQVPTIKVHTISLSENGEEV

SEQ ID NO: 24237 - protein, 466 aa, Homo sapiens; identical to SEQ ID NO: 24236
  REGION 1..466: note = ENSP00000369947

SEQ ID NO: 24238 - protein, 342 aa, Homo sapiens
  REGION 1..342: note = ENSP00000369946
MVFLSGNASDSSNCTQPPAPVNISKAILLGVILGGLILFGVLGNILVILSVACHRHLHSVTHYYIVNLAVADLLLTSTVLPFSAIFEVLGYWAFGRVFCNIWAAVDVLCCTASIMGLCIISIDRYIGVSYPLRYPTIVTQRRGLMALLCVWALSLVISIGPLFGWRQPAPEDETICQINEEPGYVLFSALGSFYLPLAIILVMYCRVYVVAKRESRGLKSGLKTDKSDSEQVTLRIHRKNAPAGGSGMASAKTKTHFSVRLLKFSREKKAAKTLGIVVGCFVLCWLPFFLVMPIDEETEAQEGKNDSPSFKQPVHHAAVLGLEVMEKENLEGVSRKDTCGVW

SEQ ID NO: 24239 - protein, 35 aa, Homo sapiens
  REGION 1..35: note = ENSP00000493019
MNPDLDTGHNTSAPAHWGELKNANFTGPNQTSSNS

SEQ ID NO: 24240 - protein, 520 aa, Homo sapiens
  REGION 1..520: note = ENSP00000306662
MNPDLDTGHNTSAPAHWGELKNANFTGPNQTSSNSTLPQLDITRAISVGLVLGAFILFAIVGNILVILSVACNRHLRTPTNYFIVNLAMADLLLSFTVLPFSAALEVLGYWVLGRIFCDIWAAVDVLCCTASILSLCAISIDRYIGVRYSLQYPTLVTRRKAILALLSVWVLSTVISIGPLLGWKEPAPNDDKECGVTEEPFYALFSSLGSFYIPLAVILVMYCRVYIVAKRTTKNLEAGVMKEMSNSKELTLRIHSKNFHEDTLSSTKAKGHNPRSSIAVKLFKFSREKKAAKTLGIVVGMFILCWLPFFIALPLGSLFSTLKPPDAVFKVVFWLGYFNSCLNPIIYPCSSKEFKRAFVRILGCQCRGRGRRRRRRRRRLGGCAYTYRPWTRGGSLERSQSRKDSLDDSGSCLSGSQRTLPSASPSPGYLGRGAPPPVELCAFPEWKAPGALLSLPAPEPPGRRGRHDSGPLFTFKLLTEPESPGTDGGASNGGCEAAADVANGQPGFKSNMPLAPGQF

SEQ ID NO: 24241 - protein, 572 aa, Homo sapiens
  REGION 1..572: note = ENSP00000368766
MTFRDLLSVSFEGPRPDSSAGGSSAGGGGGSAGGAAPSEGPAVGGVPGGAGGGGGVVGAGSGEDNRSSAGEPGSAGAGGDVNGTAAVGGLVVSAQGVGVGVFLAAFILMAVAGNLLVILSVACNRHLQTVTNYFIVNLAVADLLLSATVLPFSATMEVLGFWAFGRAFCDVWAAVDVLCCTASILSLCTISVDRYVGVRHSLKYPAIMTERKAAAILALLWVVALVVSVGPLLGWKEPVPPDERFCGITEEAGYAVFSSVCSFYLPMAVIVVMYCRVYVVARSTTRSLEAGVKRERGKASEVVLRIHCRGAATGADGAHGMRSAKGHTFRSSLSVRLLKFSREKKAAKTLAIVVGVFVLCWFPFFFVLPLGSLFPQLKPSEGVFKVIFWLGYFNSCVNPLIYPCSSREFKRAFLRLLRCQCRRRRRRRPLWRVYGHHWRASTSGLRQDCAPSSGDAPPGAPLALTALPDPDPEPPGTPEMQAPVASRRKPPSAFREWRLLGPFRRPTTQLRAKVSSLSHKIRAGGAQRAEAACAQRSEVEAVSLGVPHEVAEGATCQAYELADYSNLRETDI

SEQ ID NO: 24242 - protein, 450 aa, Homo sapiens
  REGION 1..450: note = ENSP00000480573
MDHQDPYSVQATAAIAAAITFLILFTIFGNALVILAVLTSRSLRAPQNLFLVSLAAADILVATLIIPFSLANELLGYWYFRRTWCEVYLALDVLFCTSSIVHLCAISLDRYWAVSRALEYNSKRTPRRIKCIILTVWLIAAVISLPPLIYKGDQGPQPRGRPQCKLNQEAWYILASSIGSFFAPCLIMILVYLRIYLIAKRSNRRGPRAKGGPGQGESKQPRPDHGGALASAKLPALASVASAREVNGHSKSTGEKEEGETPEDTGTRALPPSWAALPNSGQGQKEGVCGASPEDEAEEEEEEEEEEEECEPQAVPVSPASACSPPLQQPQGSRVLATLRGQVLLGRGVGAIGGQWWRRRAQLTREKRFTFVLAVVIGVFVLCWFPFFFSYSLGAICPKHCKVPHGLFQFFFWIGYCNSSLNPVIYTIFNQDFRRAFRRILCRPWTQTAW

SEQ ID NO: 24243 - protein, 413 aa, Homo sapiens [sequence omitted]

SEQ ID NO: 24244 - protein, 916 aa, Homo sapiens
  REGION 1..916: note = ENSP00000307461
METSQETSLFLVKILEELDSKQNTVSYQDLCKSLCARFDLSQLAKLRSVLFYTACLDPNFPATLFKDKMKCTVNNQQSKKIMVAADIVTIFNLIQMNGGAAKEKLPTGRQKVRKKEASFESCRSDTEICNAAECEPLNCELSERSFSRGYPIRQSSKCRKMDCKDCPQFVPASEPNFLLGVSKEVKNRAASLDRLQALAPYSVTSPQPCEMQRTYFPMNIENESISDQDSLPINQSIKETFISNEEPFVVQSCVQKRNIFKEDFHNLMAVSPSLVGPISKAENEHREPQSRKEPHKPPFFNHSFEMPYNSQYLNPVYSPVPDKRRAKHESLDDLQASTYFGPTPVMGTQEARRCLGKPNKQTPWPAKSWSLNTEEVPDFERSFFNRNPSEEKLHYPNASSQTPNFPAPERRPTYLVPKDQQPILPIAYAAKQNGLKSKEISSPVDLEKHEPVKKFKDKSINCTSGQLSSDTSSVGTQTEHVLEPKKCRDLCTSGQGKYSDRHTMKHSDDDSEIVSDDISDIFRFLDDMSISGSTGVIQSSCYNSTGSLSQLHKSDCDSSPEHNLTKIANGVPNSKGDKGNRPENTHHSEEELKTSVCKLVLRIGEIERKLESLSGVRDEISQVLGKLNKLDQKMQQPEKVSVQIDLNSLTSEGPSDDSASPRMFHAHSGSHGPKLENNPDWCCSDASGSNSESLRVKALKKSLFTRPSSRSLTEENSATESKIASISNSPRDWRTITYTNRVGLNEEEIKDTGPGDNKDWHRKSKEADRQYDIPPQHRLPKQPKDGFLVEQVFSPHPYPASLKAHMKSNPLYTDMRLTELAEVKRGQPSWTIEEYARNAGDKGKLTALDLQTQESLNPNNLEYWMEDIYTPGYDSLLKRKEAEFRRAKVCKIAALIAAAACTVILVIVVPICTMKS

SEQ ID NO: 24245 - protein, 854 aa, Homo sapiens
  REGION 1..854: note = ENSP00000454088
METSQETSLFLVKILEELDSKQNTVSYQDLCKSLCARFDLSQLAKLRSVLFYTACLDPNFPATLFKDKMKCTVNNQQSKKIMVAADIVTIFNLIQMNGGAAKEKLPTGRQKVRKKEASFESCRSDTEICNAAECEPLNCELSERSFSRGYPIRQSSKCRKMDCKDCPQFVPASEPNFLLGVSKEVKNRAASLDRLQALAPYSVTSPQPCEMQRTYFPMNIENESISDQDSLPINQSIKETFISNEEPFVVQSCVQKRNIFKEDFHNLMAVSPSLVGPISKAENEHREPQSRKEPHKPPFFNHSFEMPYNSQYLNPVYSPVPDKRRAKHESLDDLQASTYFGPTPVMGTQEARRCLGKPNKQTPWPAKSWSLNTEEVPDFERSFFNRNPSEEKLHYPNASSQTPNFPAPERRPTYLVPKDQQPILPIAYAAKQNGLKSKEISSPVDLEKHEPVKKFKDKSINCTSGQLSSDTSSVGTQTEHVLEPKKCRDLCTSGQGKYSDRHTMKHSDDDSEIVSDDISDIFRFLDDMSISGSTGVIQSSCYNSTGSLSQLHKSDCDSSPEHNLTKIANGVPNSKGDKGNRPENTHHSEEELKTSVCKLVLRIGEIERKLESLSGVRDEISQVLGKLNKLDQKMQQPEKVSVQIDLNSLTSEGPSDDSASPRMFHAHSGSHGPKLENNPDWCCSDASGSNSESLRVKALKKSLFTRPSSRSLTEENSATESKIASISNSPRDWRTITYTNRVGLNEEEIKDTGPGDNKDWHRKSKEADRQYDIPPQHRLPKQPKDGFLVEQVFSPHPYPASLKAHMKSNPLYTDMRLTELAEVKRGQPSWTIEEYARNAGDKGKLTALDLQHVG

SEQ ID NO: 24246 - protein, 730 aa, Homo sapiens
  REGION 1..730: note = ENSP00000353402
MEELIVELRLFLELLDHEYLTSTVREKKAVITNILLRIQSSKGFDVKDHAQKQETANSLPAPPQMPLPEIPQPWLPPDSGPPPLPTSSLPEGYYEEAVPLSPGKAPEYITSNYDSDAMSSSYESYDEEEEDGKGKKTRHQWPSEEASMDLVKDAKICAFLLRKKRFGQWTKLLCVIKDTKLLCYKSSKDQQPQMELPLQGCNITYIPKDSKKKKHELKITQQGTDPLVLAVQSKEQAEQWLKVIKEAYSGCSGPVDSECPPPPSSPVHKAELEKKLSSERPSSDGEGVVENGITTCNGKEQVKRKKSSKSEAKGTVSKVTGKKITKIISLGKKKPSTDEQTSSAEEDVPTCGYLNVLSNSRWRERWCRVKDNKLIFHKDRTDLKTHIVSIPLRGCEVIPGLDSKHPLTFRLLRNGQEVAVLEASSSEDMGRWIGILLAETGSSTDPEALHYDYIDVEMSASVIQTAKQTFCFMNRRVISANPYLGGTSNGYAHPSGTALHYDDVPCINGSLKGKKPPVASNGVTGKGKTLSSQPKKADPAAVVKRTGSNAAQYKYGKNRVEADAKRLQTKEEELLKRKEALRNRLAQLRKERKDLRAAIEVNAGRKPQAILEEKLKQLEEECRQKEAERVSLELELTEVKESLKKALAGGVTLGLAIEPKSGTSSPQSPVFRHRTLENSPISSCDTSDTEGPVPVNSAAVLKKSQAAPGSSPCRGHVLRKAKEWELKNGT

SEQ ID NO: 24247 - protein, 814 aa, Homo sapiens
  REGION 1..814: note = ENSP00000371983
MEELIVELRLFLELLDHEYLTSTVREKKAVITNILLRIQSSKGFDVKDHAQKQETANSLPAPPQMPLPEIPQPWLPPDSGPPPLPTSSLPEGYYEEAVPLSPGKAPEYITSNYDSDAMSSSYESYDEEEEDGKGKKTRHQWPSEEASMDLVKDAKICAFLLRKKRFGQWTKLLCVIKDTKLLCYKSSKDQQPQMELPLQGCNITYIPKDSKKKKHELKITQQGTDPLVLAVQSKEQAEQWLKVIKEAYSGCSGPVDSECPPPPSSPVHKAELEKKLSSERPSSDGEGVVENGITTCNGKEQVKRKKSSKSEAKGTVSKVTGKKITKIISLGKKKPSTDEQTSSAEEDVPTCGYLNVLSNSRWRERWCRVKDNKLIFHKDRTDLKTHIVSIPLRGCEVIPGLDSKHPLTFRLLRNGQEVAVLEASSSEDMGRWIGILLAETGSSTDPEALHYDYIDVEMSASVIQTAKQTFCFMNRRVISANPYLGGTSNGYAHPSGTALHYDDVPCINGSWEPEDGFPASCSRGLGEEVLYDNAGLYDNLPPPHIFARYSPADRKASRLSADKLSSNHYKYPASAQSVTNTSSVGRASLGLNSQLKGKKPPVASNGVTGKGKTLSSQPKKADPAAVVKRTGSNAAQYKYGKNRVEADAKRLQTKEEELLKRKEALRNRLAQLRKERKDLRAAIEVNAGRKPQAILEEKLKQLEEECRQKEAERVSLELELTEVKESLKKALAGGVTLGLAIEPKSGTSSPQSPVFRHRTLENSPISSCDTSDTEGPVPVNSAAVLKKSQAAPGSSPCRGHVLRKAKEWELKNGT

SEQ ID NO: 24248 - protein, 92 aa, Homo sapiens
  REGION 1..92: note = ENSP00000483962
GITTCNGKEQVKRKKSSKSEAKGTVSKVTGKKITKIISLGKKKPSTDEQTSSAEEDVPTCGKTALPGDEQRAPKWVSFSPAVVSVPSSSKAR

SEQ ID NO: 24249 - protein, 730 aa, Homo sapiens; identical to SEQ ID NO: 24246
  REGION 1..730: note = ENSP00000351245

SEQ ID NO: 24250 - protein, 814 aa, Homo sapiens; identical to SEQ ID NO: 24247
  REGION 1..814: note = ENSP00000410689

SEQ ID NO: 24251 - protein, 768 aa, Homo sapiens
  REGION 1..768: note = ENSP00000296721
MDRGQVLEQLLPELTGLLSLLDHEYLSDTTLEKKMAVASILQSLQPLPAKEVSYLYVNTADLHSGPSFVESLFEEFDCDLSDLRDMPEDDGEPSKGASPELAKSPRLRNAADLPPPLPNKPPPEDYYEEALPLGPGKSPEYISSHNGCSPSHSIVDGYYEDADSSYPATRVNGELKSSYNDSDAMSSSYESYDEEEEEGKSPQPRHQWPSEEASMHLVRECRICAFLLRKKRFGQWAKQLTVIREDQLLCYKSSKDRQPHLRLALDTCSIIYVPKDSRHKRHELRFTQGATEVLVLALQSREQAEEWLKVIREVSKPVGGAEGVEVPRSPVLLCKLDLDKRLSQEKQTSDSDSVGVGDNCSTLGRRETCDHGKGKKSSLAELKGSMSRAAGRKITRIIGFSKKKTLADDLQTSSTEEEVPCCGYLNVLVNQGWKERWCRLKCNTLYFHKDHMDLRTHVNAIALQGCEVAPGFGPRHPFAFRILRNRQEVAILEASCSEDMGRWLGLLLVEMGSRVTPEALHYDYVDVETLTSIVSAGRNSFLYARSCQNQWPEPRVYDDVPYEKMQDEEPERPTGAQVKRHASSCSEKSHRVDPQVKVKRHASSANQYKYGKNRAEEDARRYLVEKEKLEKEKETIRTELIALRQEKRELKEAIRSSPGAKLKALEEAVATLEAQCRAKEERRIDLELKLVAVKERLQQSLAGGPALGLSVSSKPKSGETANKPQNSVPEQPLPVNCVSELRKRSPSIVASNQGRVLQKAKEWEMKKT

SEQ ID NO: 24252 - protein, 725 aa, Homo sapiens
  REGION 1..725: note = ENSP00000424427
MDRGQVLEQLLPELTGLLSLLDHEYLSDTTLEKKMAVASILQSLQPLPAKEVSYLYVNTADLHSGPSFVESLFEEFDCDLSDLRDMPEDDGEPSKGASPELAKSPRLRNAADLPPPLPNKPPPEDYYEEALPLGPGKSPEYISSHNGCSPSHSIVDGYYEDADSSYPATRVNGELKSSYNDSDAMSSSYESYDEEEEEGKSPQPRHQWPSEEASMHLVRECRICAFLLRKKRFGQWAKQLTVIREDQLLCYKSSKDRQPHLRLALDTCSIIYVPKDSRHKRHELRFTQGATEVLVLALQSREQAEEWLKVIREVSKPVGGAEGVEVPRSPVLLCKLDLDKRLSQEKQTSDSDSVGVGDNCSTLGRRETCDHGKGKKSSLAELKGSMSRAAGRKITRIIGFSKKKTLADDLQTSSTEEEVPCCGYLNVLVNQGWKERWCRLKCNTLYFHKDHMDLRTHVNAIALQGCEVAPGFGPRHPFAFRILRNRQEVAILEASCSEDMGRWLGLLLVEMGSRVTPEALHYDYVDVETLTSIVSAGRNSFLYARSCQNQWPEPRVYDDVPYEKMQDEEPERPTGAQVKRHASSCSEKSHRVDPQVKVKRHASSANQYKYGKNRAEEDARRYLVEKEKLEKEKETIRTELIALRQEKRELKEAIRSSPGAKLKALEEAVATLEAQCRAKEERRIDLELKLVAVKERLQQSLAGGPALGLSVSSKPKSGEWEMKKT

SEQ ID NO: 24253 - protein, 818 aa, Homo sapiens
  REGION 1..818: note = ENSP00000303042
MERYKALEQLLTELDDFLKILDQENLSSTALVKKSCLAELLRLYTKSSSSDEEYIYMNKVTINKQQNAESQGKAPEEQGLLPNGEPSQHSSAPQKSLPDLPPPKMIPERKQLAIPKTESPEGYYEEAEPYDTSLNEDGEAVSSSYESYDEEDGSKGKSAPYQWPSPEAGIELMRDARICAFLWRKKWLGQWAKQLCVIKDNRLLCYKSSKDHSPQLDVNLLGSSVIHKEKQVRKKEHKLKITPMNADVIVLGLQSKDQAEQWLRVIQEVSGLPSEGASEGNQYTPDAQRFNCQKPDIAEKYLSASEYGSSVDGHPEVPETKDVKKKCSAGLKLSNLMNLGRKKSTSLEPVERSLETSSYLNVLVNSQWKSRWCSVRDNHLHFYQDRNRSKVAQQPLSLVGCEVVPDPSPDHLYSFRILHKGEELAKLEAKSSEEMGHWLGLLLSESGSKTDPEEFTYDYVDADRVSCIVSAAKNSLLLMQRKFSEPNTYIDGLPSQDRQEELYDDVDLSELTAAVEPTEEATPVADDPNERESDRVYLDLTPVKSFLHGPSSAQAQASSPTLSCLDNATEALPADSGPGPTPDEPCIKCPENLGEQQLESLEPEDPSLRITTVKIQTEQQRISFPPSCPDAVVATPPGASPPVKDRLRVTSAEIKLGKNRTEAEVKRYTEEKERLEKKKEEIRGHLAQLRKEKRELKETLLKCTDKEVLASLEQKLKEIDEECRGEESRRVDLELSIMEVKDNLKKAEAGPVTLGTTVDTTHLENVSPRPKAVTPASAPDCTPVNSATTLKNRPLSVVVTGKGTVLQKAKEWEKKGAS

SEQ ID NO: 24254 - protein, 814 aa, Homo sapiens
  REGION 1..814: note = ENSP00000358276
MERYKALEQLLTELDDFLKILDQENLSSTALVKKSCLAELLRLYTKSSSSDEEYIYMNKVTINKQQNAESQGKAPEEQGLLPNGEPSQHSSAPQKSLPDLPPPKMIPERKQLAIPKTESPEGYYEEAEPYDTSLNEDGEAVSSSYESYDEEDGSKGKSAPYQWPSPEAGIELMRDARICAFLWRKKWLGQWAKQLCVIKDNRLLCYKSSKDHSPQLDVNLLGSSVIHKEKQVRKKEHKLKITPMNADVIVLGLQSKDQAEQWLRVIQEVSGLPSEGASEGNQYTPDAQRFNCQKPDIAEKYLSASEYGSSVDGHPEVPETKDVKKKCSAGLKLSNLMNLGRKKSTSLEPVERSLETSSYLNVLVNSQWKSRWCSVRDNHLHFYQDRNRSKVAQQPLSLVGCEVVPDPSPDHLYSFRILHKGEELAKLEAKSSEEMGHWLGLLLSESGSKTDPEEFTYDYVDADRVSCIVSAAKNSLLLMQRKFSEPNTYIDGLPSQDRQEELYDDVDLSELTAAVEPTEEATPVADDPNERESDRVYLDLTPVKSFLHGPSSAQAQASSPTLSCLDNATEALPADSGPGPTPDEPCIKCPENLGEQQLESLEPEDPSLRITTVKIQTEQQRISFPPSCPDAVVATPPGASPPVKDRLRVTSAEIKLGKNRTEAEVKRYTEEKERLEKKKEEIRGHLAQLRKEKRELKETLLKCTDKEVLASLEQKLKEIDEECRGEESRRVDLELSIMEVKDNLKKAEAGPVTLGTTVDTTHLENPKAVTPASAPDCTPVNSATTLKNRPLSVVVTGKGTVLQKAKEWEKKGAS

SEQ ID NO: 24255 - protein, 312 aa, Homo sapiens
  REGION 1..312: note = ENSP00000396781
MERYKAQGCCCLVVQRRIRQVSASLEQLLTELDDFLKILDQENLSSTALVKKSCLAELLRLYTKSSSSDEEYIYMNKVTINKQQNAESQGKAPEEQGLLPNGEPSQHSSAPQKSLPDLPPPKMIPERKQLAIPKTESPEGYYEEAEPYDTSLNEDGEAVSSSYESYDEEDGSKGKSAPYQWPSPEAGIELMRDARICAFLWRKKWLGQWAKQLCVIKDNRLLCYKSSKDHSPQLDVNLLGSSVIHKEKQVRKKEHKLKITPMNADVIVLGLQSKDQAEQWLRVIQEVSGLPSEGASEGNQYTPDAQRFNCQK

SEQ ID NO: 24256 - protein, 1311 aa, Homo sapiens
  REGION 1..1311: note = ENSP00000359489
MDLFDFFRDWDLEQQCHYEQDRSALKKREWERRNQEVQQEDDLFSSGFDLFGEPYKVAEYTNKGDALANRVQNTLGNYDEMKNLLTNHSNQNHLVGIPKNSVPQNPNNKNEPSFFPEQKNRIIPPHQDNTHPSAPMPPPSVVILNSTLIHSNRKSKPEWSRDSHNPSTVLASQASGQPNKMQTLTQDQSQAKLEDFFVYPAEQPQIGEVEESNPSAKEDSNPNSSGEDAFKEIFQSNSPEESEFAVQAPGSPLVASSLLAPSSGLSVQNFPPGLYCKTSMGQQKPTAYVRPMDGQDQAPDISPTLKPSIEFENSFGNLSFGTLLDGKPSAASSKTKLPKFTILQTSEVSLPSDPSCVEEILREMTHSWPTPLTSMHTAGHSEQSTFSIPGQESQHLTPGFTLQKWNDPTTRASTKSVSFKSMLEDDLKLSSDEDDLEPVKTLTTQCTATELYQAVEKAKPRNNPVNPPLATPQPPPAVQASGGSGSSSESESSSESDSDTESSTTDSESNEAPRVATPEPEPPSTNKWQLDKWLNKVTSQNKSFICGQNETPMETISLPPPIIQPMEVQMKVKTNASQVPAEPKERPLLSLIREKARPRPTQKIPETKALKHKLSTTSETVSQRTIGKKQPKKVEKNTSTDEFTWPKPNITSSTPKEKESVELHDPPRGRNKATAHKPAPRKEPRPNIPLAPEKKKYRGPGKIVPKSREFIETDSSTSDSNTDQEETLQIKVLPPCIISGGNTAKSKEICGASLTLSTLMSSSGSNNNLSISNEEPTFSPIPVMQTEILSPLRDHENLKNLWVKIDLDLLSRVPGHSSLHAAPAKPDHKETATKPKRQTAVTAVEKPAPKGKRKHKPIEVAEKIPEKKQRLEEATTICLLPPCISPAPPHKPPNTRENNSSRRANRRKEEKLFPPPLSPLPEDPPRRRNVSGNNGPFGQDKNIAMTGQITSTKPKRTEGKFCATFKGISVNEGDTPKKASSATITVTNTAIATATVTATAIVTTTVTATATATATTTTTTTTISTITSTITTGLMDSSHLEMTSWAALPLLSSSSTNVRRPKLTFDDSVHNADYYMQEAKKLKHKADALFEKFGKAVNYADAALSFTECGNAMERDPLEAKSPYTMYSETVELLRYAMRLKNFASPLASDGDKKLAVLCYRCLSLLYLRMFKLKKDHAMKYSRSLMEYFKQNASKVAQIPSPWVSNGKNTPSPVSLNNVSPINAMGNCNNGPVTIPQRIHHMAASHVNITSNVLRGYEHWDMADKLTRENKEFFGDLDTLMGPLTQHSSMTNLVRYVRQGLCWLRIDAHLL

SEQ ID NO: 24257 - protein, 1276 aa, Homo sapiens
  REGION 1..1276: note = ENSP00000345459
MDLFDFFRDWDLEQQCHYEQDRSALKKREWERRNQEVQQEDDLFSSGFDLFGEPYKTNKGDALANRVQNTLGNYDEMKNLLTNHSNQNHLVGIPKNSVPQNPNNKNEPSFFPEQKNRIIPPHQDNTHPSAPMPPPSVVILNSTLIHSNRKSKPEWSRDSHNPSTVLASQASGQPNKMQTLTQDQSQAKLEDFFVYPAEQPQIGEVEESNPSAKEDSNPNSSGEDAFKEIFQSNSPEESEFAVQAPGSPLVASSLLAPSSGLSVQNFPPGLYCKTSMGQQKPTAYVRPMDGQDQAPDISPTLKPSIEFENSFGNLSFGTLLDGKPSAASSKTKLPKFTILQTSEVSLPSDPSCVEEILRESQHLTPGFTLQKWNDPTTRASTKSVSFKSMLEDDLKLSSDEDDLEPVKTLTTQCTATELYQAVEKAKPRNNPVNPPLATPQPPPAVQASGGSGSSSESESSSESDSDTESSTTDSESNEAPRVATPEPEPPSTNKWQLDKWLNKVTSQNKSFICGQNETPMETISLPPPIIQPMEVQMKVKTNASQVPAEPKERPLLSLIREKARPRPTQKIPETKALKHKLSTTSETVSQRTIGKKQPKKVEKNTSTDEFTWPKPNITSSTPKEKESVELHDPPRGRNKATAHKPAPRKEPRPNIPLAPEKKKYRGPGKIVPKSREFIETDSSTSDSNTDQEETLQIKVLPPCIISGGNTAKSKEICGASLTLSTLMSSSGSNNNLSISNEEPTFSPIPVMQTEILSPLRDHENLKNLWVKIDLDLLSRVPGHSSLHAAPAKPDHKETATKPKRQTAVTAVEKPAPKGKRKHKPIEVAEKIPEKKQRLEEATTICLLPPCISPAPPHKPPNTRENNSSRRANRRKEEKLFPPPLSPLPEDPPRRRNVSGNNGPFGQDKNIAMTGQITSTKPKRTEGKFCATFKGISEGDTPKKASSATITVTNTAIATATVTATAIVTTTVTATATATATTTTTTTTISTITSTITTGLMDSSHLEMTSWAALPLLSSSSTNVRRPKLTFDDSVHNADYYMQEAKKLKHKADALFEKFGKAVNYADAALSFTECGNAMERDPLEAKSPYTMYSETVELLRYAMRLKNFASPLASDGDKKLAVLCYRCLSLLYLRMFKLKKDHAMKYSRSLMEYFKQNASKVAQIPSPWVSNGKNTPSPVSLNNVSPINAMGNCNNGPVTIPQRIHHMAASHVNITSNVLRGYEHWDMADKLTRENKEFFGDLDTLMGPLTQHSSMTNLVRYVRQGLCWLRIDAHLL

SEQ ID NO: 24258 - protein, 427 aa, Homo sapiens
  REGION 1..427: note = ENSP00000359487
MDLFDFFRDWDLEQQCHYEQDRSALKKREWERRNQEVQQEDDLFSSGFDLFGEPYKTNKGDALANRVQNTLGNYDEMKNLLTNHSNQNHLVGIPKNSVPQNPNNKNEPSFFPEQKNRIIPPHQDNTHPSAPMPPPSVVILNSTLIHSNRKSKPEWSRDSHNPSTVLASQASGQPNKMQTLTQDQSQAKLEDFFVYPAEQPQIGEVEESNPSAKEDSNPNSSGEDAFKEIFQSNSPEESEFAVQAPGSPLVASSLLAPSSGLSVQNFPPGLYCKTSMGQQKPTAYVRPMDGQDQAPDISPTLKPSIEFENSFGNLSFGTLLDGKPSAASSKTKLPKFTILQTSEVSLPSDPSCVEEILRESQHLTPGFTLQKWNDPTTRASTKMLEDDLKLSSDEDDLEPVKTLTTQCTATELYQAVEKAKPRNNPVK

SEQ ID NO: 24259 - protein, 1276 aa, Homo sapiens
  REGION 1..1276: note = ENSP00000359486
MDLFDFFRDWDLEQQCHYEQDRSALKKREWERRNQEVQQEDDLFSSGFDLFGEPYKVAEYTNKGDALANRVQNTLGNYDEMKNLLTNHSNQNHLVGIPKNSVPQNPNNKNEPSFFPEQKNRIIPPHQDNTHPSAPMPPPSVVILNSTLIHSNRKSKPEWSRDSHNPSTVLASQASGQPNKMQTLTQDQSQAKLEDFFVYPAEQPQIGEVEESNPSAKEDSNPNSSGEDAFKEIFQSNSPEESEFAVQAPGSPLVASSLLAPSSGLSVQNFPPGLYCKTSMGQQKPTAYVRPMDGQDQAPDISPTLKPSIEFENSFGNLSFGTLLDGKPSAASSKTKLPKFTILQTSEVSLPSDPSCVEEILRESQHLTPGFTLQKWNDPTTRASTKMLEDDLKLSSDEDDLEPVKTLTTQCTATELYQAVEKAKPRNNPVNPPLATPQPPPAVQASGGSGSSSESESSSESDSDTESSTTDSESNEAPRVATPEPEPPSTNKWQLDKWLNKVTSQNKSFICGQNETPMETISLPPPIIQPMEVQMKVKTNASQVPAEPKERPLLSLIREKARPRPTQKIPETKALKHKLSTTSETVSQRTIGKKQPKKVEKNTSTDEFTWPKPNITSSTPKEKESVELHDPPRGRNKATAHKPAPRKEPRPNIPLAPEKKKYRGPGKIVPKSREFIETDSSTSDSNTDQEETLQIKVLPPCIISGGNTAKSKEICGASLTLSTLMSSSGSNNNLSISNEEPTFSPIPVMQTEILSPLRDHENLKNLWVKIDLDLLSRVPGHSSLHAAPAKPDHKETATKPKRQTAVTAVEKPAPKGKRKHKPIEVAEKIPEKKQRLEEATTICLLPPCISPAPPHKPPNTRENNSSRRANRRKEEKLFPPPLSPLPEDPPRRRNVSGNNGPFGQDKNIAMTGQITSTKPKRTEGKFCATFKGISVNEGDTPKKASSATITVTNTAIATATVTATAIVTTTVTATATATATTTTTTTTISTITSTITTGLMDSSHLEMTSWAALPLLSSSSTNVRRPKLTFDDSVHNADYYMQEAKKLKHKADALFEKFGKAVNYADAALSFTECGNAMERDPLEAKSPYTMYSETVELLRYAMRLKNFASPLASDGDKKLAVLCYRCLSLLYLRMFKLKKDHAMKYSRSLMEYFKQNASKVAQIPSPWVSNGKNTPSPVSLNNVSPINAMGNCNNGPVTIPQRIHHMAASHVNITSNVLRGYEHWDMADKLTRENKEFFGDLDTLMGPLTQHSSMTNLVRYVRQGLCWLRIDAHLL

SEQ ID NO: 24260 - protein, 952 aa, Homo sapiens
  REGION 1..952: note = ENSP00000286437
MKFKRRHQAFPSFFKMKVSLPSDPSCVEEILRESQHLTPGFTLQKWNDPTTRASTKSVSFKSMLEDDLKLSSDEDDLEPVKTLTTQCTATELYQAVEKAKPRNNPVNPPLATPQPPPAVQASGGSGSSSESESSSESDSDTESSTTDSESNEAPRVATPEPEPPSTNKWQLDKWLNKVTSQNKSFICGQNETPMETISLPPPIIQPMEVQMKVKTNASQVPAEPKERPLLSLIREKARPRPTQKIPETKALKHKLSTTSETVSQRTIGKKQPKKVEKNTSTDEFTWPKPNITSSTPKEKESVELHDPPRGRNKATAHKPAPRKEPRPNIPLAPEKKKYRGPGKIVPKSREFIETDSSTSDSNTDQEETLQIKVLPPCIISGGNTAKSKEICGASLTLSTLMSSSGSNNNLSISNEEPTFSPIPVMQTEILSPLRDHENLKNLWVKIDLDLLSRVPGHSSLHAAPAKPDHKETATKPKRQTAVTAVEKPAPKGKRKHKPIEVAEKIPEKKQRLEEATTICLLPPCISPAPPHKPPNTRENNSSRRANRRKEEKLFPPPLSPLPEDPPRRRNVSGNNGPFGQDKNIAMTGQITSTKPKRTEGKFCATFKGISVNEGDTPKKASSATITVTNTAIATATVTATAIVTTTVTATATATATTTTTTTTISTITSTITTGLMDSSHLEMTSWAALPLLSSSSTNVRRPKLTFDDSVHNADYYMQEAKKLKHKADALFEKFGKAVNYADAALSFTECGNAMERDPLEAKSPYTMYSETVELLRYAMRLKNFASPLASDGDKKLAVLCYRCLSLLYLRMFKLKKDHAMKYSRSLMEYFKQNASKVAQIPSPWVSNGKNTPSPVSLNNVSPINAMGNCNNGPVTIPQRIHHMAASHVNITSNVLRGYEHWDMADKLTRENKEFFGDLDTLMGPLTQHSSMTNLVRYVRQGLCWLRIDAHLL

SEQ ID NO: 24261 - protein, 609 aa, Homo sapiens
  REGION 1..609: note = ENSP00000379138
MKWVESIFLIFLLNFTESRTLHRNEYGIASILDSYQCTAEISLADLATIFFAQFVQEATYKEVSKMVKDALTAIEKPTGDEQSSGCLENQLPAFLEELCHEKEILEKYGHSDCCSQSEEGRHNCFLAHKKPTPASIPLFQVPEPVTSCEAYEEDRETFMNKFIYEIARRHPFLYAPTILLWAARYDKIIPSCCKAENAVECFQTKAATVTKELRESSLLNQHACAVMKNFGTRTFQAITVTKLSQKFTKVNFTEIQKLVLDVAHVHEHCCRGDVLDCLQDGEKIMSYICSQQDTLSNKITECCKLTTLERGQCIIHAENDEKPEGLSPNLNRFLGDRDFNQFSSGEKNIFLASFVHEYSRRHPQLAVSVILRVAKGYQELLEKCFQTENPLECQDKGEEELQKYIQESQALAKRSCGLFQKLGEYYLQNAFLVAYTKKAPQLTSSELMAITRKMAATAATCCQLSEDKLLACGEGAADIIIGHLCIRHEMTPVNPGVGQCCTSSYANRRPCFSSLVVDETYVPPAFSDDKFIFHKDLCQAQGVALQTMKQEFLINLVKQKPQITEEQLEAVIADFSGLLEKCCQGQEQEVCFAEEGQKLISKTRAALGV

SEQ ID NO: 24262 - protein, 622 aa, Homo sapiens
  REGION 1..622: note = ENSP00000226359
MKWVESIFLIFLLNFTESRTLHRNEYGIASILDSYQCTAEISLADLATIFFAQFVQEATYKEVSKMVKDALTAIEKPTGDEQSSGCLENQLPAFLEELCHEKEILEKYGHSDCCSQSEEGRHNCFLAHKKPTPASIPLFQVPEPVTSCEAYEEDRETFMNKFIYEIARRHPFLYAPTILLWAARYDKIIPSCCKAENAVECFQTKAATVTKELRESSLLNQHACAVMKNFGTRTFQAITVTKLSQKFTKVNFTEIQKLVLDVAHVHEHCCRGDVLDCLQDGEKIMSYICSQQDTLSNKITECCKLTTLERGQCIIHAENDEKPEGLSPNLNRFLGDRDFNQFSSGEKNIFLASFVHEYSRRHPQLAVSVILRVAKGYQELLEKCFQTENPLECQDKGEEELQKYIQESQALAKRSCGLFQKLGEYYLQNAFLVAYTKKAPQLTSSELMAITRKMAATAATCCQLSEDKLLACGEGAADIIIGHLCIRHEMTPVNPGVGQCCTSSYANRRPCFSSLVVDETYVPPAFSDDKFIFHKDLCQAQGVALQTMKQEFLINLVKQKPQITEEQLEAVIADFSGLLEKCCQGQEQEVCFAEEGKRRQNESFIRCELFSLILTDLTLFVN

SEQ ID NO: 24263 - protein, 405 aa, Homo sapiens
  REGION 1..405: note = ENSP00000387174
MNYQQQLANSAAIRAEIQRFESVHPNIYSIYELLERVEEPVLQNQIREHVIAIEDAFVNSQEWTLSRSVPELKVGIVGNLASGKSALVHRYLTGTYVQEESPEGGRFKKEIVVDGQSYLLLIRDEGGPPEAQFAMWVDAVIFVFSLEDEISFQTVYHYYSRMANYRNTSEIPLVLVGTQDAISSANPRVIDDARARKLSNDLKRCTYYETCATYGLNVERVFQDVAQKIVATRKKQQLSIGPCKSLPNSPSHSSVCSAQVSAVHISQTSNGGGSLSDYSSSVPSTPSTSQKELRIDVPPTANTPTPVRKQSKRRSNLFTSRKGSDPDKEKKGLESRADSIGSGRAIPIKQGLPFFVLALTASTYLRPAGARARQSSPWPGPRGGQTSPHCAEGPQSAQLSGAMMN

SEQ ID NO: 24264 - protein, 804 aa, Homo sapiens
  REGION 1..804: note = ENSP00000338378
MNYQQQLANSAAIRAEIQRFESVHPNIYSIYELLERVEEPVLQNQIREHVIAIEDAFVNSQEWTLSRSVPELKVGIVGNLASGKSALVHRYLTGTYVQEESPEGGRFKKEIVVDGQSYLLLIRDEGGPPEAQFAMWVDAVIFVFSLEDEISFQTVYHYYSRMANYRNTSEIPLVLVGTQDAISSANPRVIDDARARKLSNDLKRCTYYETCATYGLNVERVFQDVAQKIVATRKKQQLSIGPCKSLPNSPSHSSVCSAQVSAVHISQTSNGGGSLSDYSSSVPSTPSTSQKELRIDVPPTANTPTPVRKQSKRRSNLFTSRKGSDPDKEKKGLESRADSIGSGRAIPIKQGMLLKRSGKSLNKEWKKKYVTLCDNGVLTYHPSLHDYMQNVHGKEIDLLRTTVKVPGKRPPRATSACAPISSPKTNGLSKDMSSLHISPNSDTGLGDSVCSSPSISSTTSPKLDPPPSPHANRKKHRRKKSTSNFKADGLSGTAEEQEENFEFIIVSLTGQTWHFEATTYEERDAWVQAIESQILASLQSCESSKNKSRLTSQSEAMALQSIRNMRGNSHCVDCETQNPNWASLNLGALMCIECSGIHRNLGTHLSRVRSLDLDDWPVELIKVMSSIGNELANSVWEESSQGRTKPSVDSTREEKERWIRAKYEQKLFLAPLPCTELSLGQHLLRATADEDLRTAILLLAHGSRDEVNETCGEGDGRTALHLACRKGNVVLAQLLIWYGVDVTARDAHGNTALAYARQASSQECIDVLLQYGCPDERFVLMATPNLSRRNNNRNNSSGRVPTII

SEQ ID NO: 24265 - protein, 857 aa, Homo sapiens
  REGION 1..857: note = ENSP00000307634
MNYQQQLANSAAIRAEIQRFESVHPNIYSIYELLERVEEPVLQNQIREHVIAIEDAFVNSQEWTLSRSVPELKVGIVGNLASGKSALVHRYLTGTYVQEESPEGGRFKKEIVVDGQSYLLLIRDEGGPPEAQFAMWVDAVIFVFSLEDEISFQTVYHYYSRMANYRNTSEIPLVLVGTQDAISSANPRVIDDARARKLSNDLKRCTYYETCATYGLNVERVFQDVAQKIVATRKKQQLSIGPCKSLPNSPSHSSVCSAQVSAVHISQTSNGGGSLSDYSSSVPSTPSTSQKELRIDVPPTANTPTPVRKQSKRRSNLFTSRKGSDPDKEKKGLESRADSIGSGRAIPIKQGMLLKRSGKSLNKEWKKKYVTLCDNGVLTYHPSLHDYMQNVHGKEIDLLRTTVKVPGKRPPRATSACAPISSPKTNGLSKDMSSLHISPNSGNVTSASGSQMASGISLVSFNSRPDGMHQRSYSVSSADQWSEATVIANSAISSDTGLGDSVCSSPSISSTTSPKLDPPPSPHANRKKHRRKKSTSNFKADGLSGTAEEQEENFEFIIVSLTGQTWHFEATTYEERDAWVQAIESQILASLQSCESSKNKSRLTSQSEAMALQSIRNMRGNSHCVDCETQNPNWASLNLGALMCIECSGIHRNLGTHLSRVRSLDLDDWPVELIKVMSSIGNELANSVWEESSQGRTKPSVDSTREEKERWIRAKYEQKLFLAPLPCTELSLGQHLLRATADEDLRTAILLLAHGSRDEVNETCGEGDGRTALHLACRKGNVVLAQLLIWYGVDVTARDAHGNTALAYARQASSQECIDVLLQYGCPDERFVLMATPNLSRRNNNRNNSSGRVPTII

SEQ ID NO: 24266 - protein, 108 aa, Homo sapiens
  REGION 1..108: note = ENSP00000489496
QLANSAAIRAEIQRFESVHPNIYSIYELLERVEEPVLQNQIREHVIAIEDAFVNSQEWTLSRSVPELKVGIVGNLASGKSALVHRYLTGTYVQEEYGCRWQVQERDCR

SEQ ID NO: 24267 - protein, 117 aa, Homo sapiens
  REGION 1..117: note = ENSP00000385492
MDAFVNSQEWTLSRSVPELKVGIVGNLASGKSALVHRYLTGTYVQEESPEGGRFKKEIVVDGQSYLLLIRDEGGPPEAQFAMWVDAVIFVFSLEDEISFQTVYHYYSRMANYRNTSE

SEQ ID NO: 24268 - protein, 1069 aa, Homo sapiens
  REGION 1..1069: note = ENSP00000386897
MYLLDGSGEPASPPADAMPRGTPPRKTVYRISVTMVRKEQLAAPGSGGPDPRPVRRPRPARSPDAPGRLEEEAEEAEGAEEPEGPRPRAWDFRTFRTRSTGQLELGRLRPCARGLEPADLAGSAPAEEEGRGSPASGSPDVEGARAAPLRRSLSFRHWSGPEAPQGRTLGGGRRHSSSGSLAWAPCDEAAAGTTLEPATATQPASEKRNTLDVGEVLSKNDALSDLERWERSKSKNRTLDNSDLQRLERARAAAGAGAASEHRLLRFFSGIFARRDGGPGGGPSPRSGASRPRGYFSLRRAPAEAHSSSAESIDGSPRRDAFVNSQEWTLSRSVPELKVGIVGNLASGKSALVHRYLTGTYVQEESPEGGRFKKEIVVDGQSYLLLIRDEGGPPEAQFAMWVDAVIFVFSLEDEISFQTVYHYYSRMANYRNTSEIPLVLVGTQDAISSANPRVIDDARARKLSNDLKRCTYYETCATYGLNVERVFQDVAQKIVATRKKQQLSIGPCKSLPNSPSHSSVCSAQVSAVHISQTSNGGGSLSDYSSSVPSTPSTSQKELRIDVPPTANTPTPVRKQSKRRSNLFTSRKGSDPDKEKKGLESRADSIGSGRAIPIKQGMLLKRSGKSLNKEWKKKYVTLCDNGVLTYHPSLHDYMQNVHGKEIDLLRTTVKVPGKRPPRATSACAPISSPKTNGLSKDMSSLHISPNSDTGLGDSVCSSPSISSTTSPKLDPPPSPHANRKKHRRKKSTSNFKADGLSGTAEEQEENFEFIIVSLTGQTWHFEATTYEERDAWVQAIESQILASLQSCESSKNKSRLTSQSEAMALQSIRNMRGNSHCVDCETQNPNWASLNLGALMCIECSGIHRNLGTHLSRVRSLDLDDWPVELIKVMSSIGNELANSVWEESSQGRTKPSVDSTREEKERWIRAKYEQKLFLAPLPCTELSLGQHLLRATADEDLRTAILLLAHGSRDEVNETCGEGDGRTALHLACRKGNVVLAQLLIWYGVDVTARDAHGNTALAYARQASSQECIDVLLQYGCPDERFVLMATPNLSRRNNNRNNSSGRVPTII

SEQ ID NO: 24269 - protein, 253 aa, Homo sapiens
  REGION 1..253: note = ENSP00000403482
  VARIANT 1: note = Any amino acid
XKYVTLCDNGVLTYHPSLHDYMQNVHGKEIDLLRTTVKVPGKRPPRATSACAPISSPKTNGLSKDMSSLHISPNSGNVTSASGSQMASGISLVSFNSRPDGMHQRSYSVSSADQWSEATVIANSAISSDTGLGDSVCSSPSISSTTSPKLDPPPSPHANRKKHRRKKSTSNFKADGLSGTAEAKRKAWKLNRVGSLRNIYSSSTNTEEQEENFEFIIVSLTGQTWHFEATTYEERDAWVQAIESQILASLQSC

SEQ ID NO: 24270 - protein, 276 aa, Homo sapiens
  REGION 1..276: note = ENSP00000393838
  VARIANT 1: note = Any amino acid
XSSPKTNGLSKDMSSLHISPNSDTGLGDSVCSSPSISSTTSPKLDPPPSPHANRKKHRRKKSTSNFKADGLSGTAEAKRKAWKLNRVGSLRNIYSSSTNTEEQEENFEFIIVSLTGQTWHFEATTYEERDAWVQAIESQILASLQSCESSKNKSRLTSQSEAMALQSIRNMRGNSHCVDCETQNPNWASLNLGALMCIECSGIHRNLGTHLSRVRSLDLDDWPVELIKVMSSIGNELANSVWEESSQGRTKPSVDSTREEKERWIRAKYEQKLFLA

SEQ ID NO: 24271 - protein, 351 aa, Homo sapiens
  REGION 1..351: note = ENSP00000483085
DAFVNSQEWTLSRSVPELKVGIVGNLASGKSALVHRYLTGTYVQEESPEGGRFKKEIVVDGQSYLLLIRDEGGPPEAQFAMWVDAVIFVFSLEDEISFQTVYHYYSRMANYRNTSEIPLVLVGTQDAISSANPRVIDDARARKLSNDLKRCTYYETCATYGLNVERVFQDVAQKIVATRKKQQLSIGPCKSLPNSPSHSSVCSAQVSAVHISQTSNGGGSLSDYSSSVPSTPSTSQKELRIDVPPTANTPTPVRKQSKRRSNLFTSRKGSDPDKEKKGLESRADSIGSGRAIPIKQGLPFFVLALTASTYLRPAGARARQSSPWPGPRGGQTSPHCAEGPQSAQLSGAMMN

SEQ ID NO: 24272 - protein, 803 aa, Homo sapiens
  REGION 1..803: note = ENSP00000411824
DAFVNSQEWTLSRSVPELKVGIVGNLASGKSALVHRYLTGTYVQEESPEGGRFKKEIVVDGQSYLLLIRDEGGPPEAQFAMWVDAVIFVFSLEDEISFQTVYHYYSRMANYRNTSEIPLVLVGTQDAISSANPRVIDDARARKLSNDLKRCTYYETCATYGLNVERVFQDVAQKIVATRKKQQLSIGPCKSLPNSPSHSSVCSAQVSAVHISQTSNGGGSLSDYSSSVPSTPSTSQKELRIDVPPTANTPTPVRKQSKRRSNLFTSRKGSDPDKEKKGLESRADSIGSGRAIPIKQGMLLKRSGKSLNKEWKKKYVTLCDNGVLTYHPSLHDYMQNVHGKEIDLLRTTVKVPGKRPPRATSACAPISSPKTNGLSKDMSSLHISPNSGNVTSASGSQMASGISLVSFNSRPDGMHQRSYSVSSADQWSEATVIANSAISSDTGLGDSVCSSPSISSTTSPKLDPPPSPHANRKKHRRKKSTSNFKADGLSGTAEEQEENFEFIIVSLTGQTWHFEATTYEERDAWVQAIESQILASLQSCESSKNKSRLTSQSEAMALQSIRNMRGNSHCVDCETQNPNWASLNLGALMCIECSGIHRNLGTHLSRVRSLDLDDWPVELIKVMSSIGNELANSVWEESSQGRTKPSVDSTREEKERWIRAKYEQKLFLAPLPCTELSLGQHLLRATADEDLRTAILLLAHGSRDEVNETCGEGDGRTALHLACRKGNVVLAQLLIWYGVDVTARDAHGNTALAYARQASSQECIDVLLQYGCPDERFVLMATPNLSRRNNNRNNSSGRVPTII

SEQ ID NO: 24273 - protein, 750 aa, Homo sapiens
  REGION 1..750: note = ENSP00000484463
DAFVNSQEWTLSRSVPELKVGIVGNLASGKSALVHRYLTGTYVQEESPEGGRFKKEIVVDGQSYLLLIRDEGGPPEAQFAMWVDAVIFVFSLEDEISFQTVYHYYSRMANYRNTSEIPLVLVGTQDAISSANPRVIDDARARKLSNDLKRCTYYETCATYGLNVERVFQDVAQKIVATRKKQQLSIGPCKSLPNSPSHSSVCSAQVSAVHISQTSNGGGSLSDYSSSVPSTPSTSQKELRIDVPPTANTPTPVRKQSKRRSNLFTSRKGSDPDKEKKGLESRADSIGSGRAIPIKQGMLLKRSGKSLNKEWKKKYVTLCDNGVLTYHPSLHDYMQNVHGKEIDLLRTTVKVPGKRPPRATSACAPISSPKTNGLSKDMSSLHISPNSDTGLGDSVCSSPSISSTTSPKLDPPPSPHANRKKHRRKKSTSNFKADGLSGTAEEQEENFEFIIVSLTGQTWHFEATTYEERDAWVQAIESQILASLQSCESSKNKSRLTSQSEAMALQSIRNMRGNSHCVDCETQNPNWASLNLGALMCIECSGIHRNLGTHLSRVRSLDLDDWPVELIKVMSSIGNELANSVWEESSQGRTKPSVDSTREEKERWIRAKYEQKLFLAPLPCTELSLGQHLLRATADEDLRTAILLLAHGSRDEVNETCGEGDGRTALHLACRKGNVVLAQLLIWYGVDVTARDAHGNTALAYARQASSQECIDVLLQYGCPDERFVLMATPNLSRRNNNRNNSSGRVPTII

SEQ ID NO: 24274 - protein, 126 aa, Homo sapiens
  REGION 1..126: note = ENSP00000431912
  VARIANT 1: note = Any amino acid
XQEAAAKKAVVLSARVHPGESNGSWVMKGFLDFILSNSPDAQLLRDIFVFKVLPMLNPDGVIVGNYRCSLAGRDLNRHYKTILKESFPCIWYTRNMIKSSLFTVVILRSKNAKKEQDELLCGGWES

SEQ ID NO: 24275 - protein, 902 aa, Homo sapiens
  REGION 1..902: note = ENSP00000435582
MFPALETHLKQTIPDPYEDFMYRHLQYYGYFKAQRGSLPNSATHQHVRKNNPQCLLNGSLGEKDDLIPDTLQKEKLLWPISLSSAVHRQIEAINRDFHSCLGWMQWRGLSSLQPPPPRFKDSPASAFRVAGITDSHMLSLPHLRSRQLLYDELDEVNPRLREPQELFSILSTKRPLQAPRWPIECEVIKENIHHIEWAPPQPEYFYQPKGNEKVPEIVGEKKGTVVYQLDSVPIEGSYFTSSRVGGKRGIVKELAVTLQGPEDNTLLFESRFESGNLQKAVRVDTYEYELTLRTDLYTNKHTQWFYFRVQNTRKDATYRFTIVNLLKPKSLYTVGMKPLLYSQLDANTRNIGWRREGNEIKYYKNNTDDGQQPFYCLTWTIQFPYDQDTCFFAHFYPYTYTDLQCYLLSVANNPIQSQFCKLQTLCRSLAGNTVYLLTITNPSQTPQEAAAKKAVVLSARVHPGESNGSWVMKGFLDFILSNSPDAQLLRDIFVFKVLPMLNPDGVIVGNYRCSLAGRDLNRHYKTILKESFPCIWYTRNMIKRLLEEREVLLYCDFHGHSRKNNIFLYGCNNNNRKYWLHERVFPLMLCKNAPDKFSFHSCNFKVQKCKEGTGRVVMWRMGILNSYTMESTFGGSTLGNKRDTHFTIEDLKSLGYHVCDTLLDFCDPDQMKFTQCLAELKELLRQEIHKKFHELGQDVDLEGSWSDISLSDIESSTSGSDSSLSDGLPVHLANIADELTQKKKMFKKKKKKSLQTRKQRNEQYQKKNLMQKLKLTEDTSEKAGFASTLQKQPTFFKNSENSSFLPMKNENPRLNETNLNRRDKDTPLDPSMATLILPKNKGRMQNKKPGFTVSCSPKRTINSSQEPAPGMKPNWPRSRYPATKRGCAAMAAYPSLHIYTYP

SEQ ID NO: 24276 - protein, 824 aa, Homo sapiens
  REGION 1..824: note = ENSP00000436630
MFPALETHLKQTIPDPYEDFMYRHLQYYGYFKAQRGSLPNSATHQHVRKNNPQCLLNGSLGEKDDLIPDTLQKEKLLWPISLSSAVHRQIEAINRDSHMLSLPHLRSRQLLYDELDEVNPRLREPQELFSILSTKRPLQAPRWPIECEVIKENIHHIEWAPPQPEYFYQPKGNEKVPEIVGEKKGTVVYQLDSVPIEGSYFTSSRVGGKRGIVKELAVTLQGPEDNTLLFESRFESGNLQKAVRVDTYEYELTLRTDLYTNKHTQWFYFRVQNTRKDATYRFTIVNLLKPKSLYTVGMKPLLYSQLDANTRNIGWRREGNEIKYYKNNTDDGQQPFYCLTWTIQFPYDQDTCFFAHFYPYTYTDLQCYLLSVANNPIQSQFCKLQTLCRSLAGNTVYLLTITNPSQTPQEAAAKKAVVLSARVHPGESNGSWVMKGFLDFILSNSPDAQLLRDIFVFKVLPMLNPDGVIVGNYRCSLAGRDLNRHYKTILKESFPCIWYTRNMIKRLLEEREVLLYCDFHGHSRKNNIFLYGCNNNNRKYWLHERVFPLMLCKNAPDKFSFHSCNFKVQKCKEGTGRVVMWRMGILNSYTMESTFGGSTLGNKRDTHFTIEDLKSLGYHVCDTLLDFCDPDQMKFTQCLAELKELLRQEIHKKFHELGQDVDLEGSWSDISLSDIESSTSGSDSSLSDGLPVHLANIADELTQKKKMFKKKKKKSLQTRKQRNEQYQKKNLMQKLKLTEDTSEKAGFASTLQKQPTFFKNSENSSFLPMKNENPRLNEVVFLFLTLCHTDSLTSRISTSLPQCDKCNSHLRYPNLTVPLGARKH

SEQ ID NO: 24277 - protein, 331 aa, Homo sapiens
  REGION 1..331: note = ENSP00000436063
MFPALETHLKQTIPDPYEDFMYRHLQYYGYFKAQRGSLPNSATHQHVRKNNPQCLLNGSLGEKDDLIPDTLQKEKLLYSHMLSLPHLRSRQLLYDELDEVNPRLREPQELFSILSTKRPLQAPRWPIECEVIKENIHHIEWAPPQPEYFYQPKGNEKVPEIVGEKKGTVVYQLDSVPIEGSYFTSSRVGGKRGIVKELAVTLQGPEDNTLLFESRFESGNLQKAVRVDTYEYELTLRTDLYTNKHTQWFYFRVQNTRKDATYRFTIVNLLKPKSLYTVGMKPLLYSQLDANTRNIGWRREGNEIKYYKNNTDDGQQPFYCLTWTIQFPYDQ

SEQ ID NO: 24278 - protein, 148 aa, Homo sapiens
  REGION 1..148: note = ENSP00000432264
MYRHLQYYGYFKAQRGSLPNSATHQHVRKNNPQCLLNGSLGEKDDLIPDTLQKEKLLWPISLSSAVHRQIEAINRDSHMLSLPHLRSRQLLYDELDEVNPRLREPQELFSILSTKRPLQAPRWPIECEVIKENIHHIEWAPPQPEYFY

SEQ ID NO: 24279 - protein, 61 aa, Homo sapiens
  REGION 1..61: note = ENSP00000432090
MFPALETHLKQTIPDPYEDFMYRHLQYYGYFKGSRSVTQAGGQWPPHPRLKQPSQPLAIIF

SEQ ID NO: 24280 - protein, 95 aa, Homo sapiens
  REGION 1..95: note = ENSP00000436518
MFPALETHLKQTIPDPYEDFMYRHLQYYGYFKAQRGSLPNSATHQHVRKNNPQCLLNGSLGEKDDLIPDTLQKEKLLWPISLSSAVHRQIEAINR

SEQ ID NO: 24281 - protein, 32 aa, Homo sapiens
  REGION 1..32: note = ENSP00000431835
MFPALETHLKQTIPDPYEDFMYRHLQYYGYFK

SEQ ID NO: 24282 - protein, 904 aa, Homo sapiens
  REGION 1..904: note = ENSP00000350228
MFPALETHLKQTIPDPYEDFMYRHLQYYGYFKAQRGSLPNSATHQHVRKNNPQCLLNGSLGEKDDLIPDTLQKEKLLWPISLSSAVHRQIEAINRDFHSCLGWMQWRGLSSLQPPPPRFKDSPASAFRVAGITDSHMLSLPHLRSRQLLYDELDEVNPRLREPQELFSILSTKRPLQAPRWPIECEVIKENIHHIEWAPPQPEYFYQPKGNEKVPEIVGEKKGTVVYQLDSVPIEGSYFTSSRVGGKRGIVKELAVTLQGPEDNTLLFESRFESGNLQKAVRVDTYEYELTLRTDLYTNKHTQWFYFRVQNTRKDATYRFTIVNLLKPKSLYTVGMKPLLYSQLDANTRNIGWRREGNEIKYYKNNTDDGQQPFYCLTWTIQFPYDQDTCFFAHFYPYTYTDLQCYLLSVANNPIQSQFCKLQTLCRSLAGNTVYLLTITNPSQTPQEAAAKKAVVLSARVHPGESNGSWVMKGFLDFILSNSPDAQLLRDIFVFKVLPMLNPDGVIVGNYRCSLAGRDLNRHYKTILKESFPCIWYTRNMIKRLLEEREVLLYCDFHGHSRKNNIFLYGCNNNNRKYWLHERVFPLMLCKNAPDKFSFHSCNFKVQKCKEGTGRVVMWRMGILNSYTMESTFGGSTLGNKRDTHFTIEDLKSLGYHVCDTLLDFCDPDQMKFTQCLAELKELLRQEIHKKFHELGQDVDLEGSWSDISLSDIESRNSTSGSDSSLSDGLPVHLANIADELTQKKKMFKKKKKKSLQTRKQRNEQYQKKNLMQKLKLTEDTSEKAGFASTLQKQPTFFKNSENSSFLPMKNENPRLNETNLNRRDKDTPLDPSMATLILPKNKGRMQNKKPGFTVSCSPKRTINSSQEPAPGMKPNWPRSRYPATKRGCAAMAAYPSLHIYTYP

SEQ ID NO: 24283 - protein, 376 aa, Homo sapiens
  REGION 1..376: note = ENSP00000291572
MGLLAFLKTQFVLHLLVGFVFVVSGLVINFVQLCTLALWPVSKQLYRRLNCRLAYSLWSQLVMLLEWWSCTECTLFTDQATVERFGKEHAVIILNHNFEIDFLCGWTMCERFGVLGSSKVLAKKELLYVPLIGWTWYFLEIVFCKRKWEEDRDTVVEGLRRLSDYPEYMWFLLYCEGTRFTETKHRVSMEVAAAKGLPVLKYHLLPRTKGFTTAVKCLRGTVAAVYDVTLNFRGNKNPSLLGILYGKKYEADMCVRRFPLEDIPLDEKEAAQWLHKLYQEKDALQEIYNQKGMFPGEQFKPARRPWTLLNFLSWATILLSPLFSFVLGVFASGSPLLILTFLGFVGAASFGVRRLIGVTEIEKGSSYGNQEFKKKE

SEQ ID NO: 24284 - protein, 79 aa, Homo sapiens
  REGION 1..79: note = ENSP00000389318
MGLLAFLKTQFVLHLLVGFVFVVSGLVINFVQLCTLALWPVSKQLYRRLNCRLAYSLWSQLVMLLEWWSCTECTLFTDQ

SEQ ID NO: 24285 - protein, 376 aa, Homo sapiens; identical to SEQ ID NO: 24283
  REGION 1..376: note = ENSP00000381138

SEQ ID NO: 24286 - protein, 376 aa, Homo sapiens; identical to SEQ ID NO: 24283
  REGION 1..376: note = ENSP00000332989

SEQ ID NO: 24287 - protein, 128 aa, Homo sapiens
  REGION 1..128: note = ENSP00000412079
MGLLAFLKTQFVLHLLVGFVFVVSGLVINFVQLCTLALWPVSKQLYRRLNCRLAYSLWSQLVMLLEWWSCTECTLFTDQATVERFGKEHAVIILNHNFEIDFLCGWTMCERFGVLGSSKVLAKKELLY

SEQ ID NO: 24288 - protein, 376 aa, Homo sapiens; identical to SEQ ID NO: 24283
  REGION 1..376: note = ENSP00000381140

SEQ ID NO: 24289 - protein, 376 aa, Homo sapiens; identical to SEQ ID NO: 24283
  REGION 1..376: note = ENSP00000381135

SEQ ID NO: 24290 - protein, 255 aa, Homo sapiens
  REGION 1..255: note = ENSP00000413906
MGLLAFLKTQFVLHLLVGFVFVVSGLVINFVQLCTLALWPVSKQLYRRLNCRLAYSLWSQLVMLLEWWSCTECTLFTDQATVERFGKEHAVIILNHNFEIDFLCGWTMCERFGVLGSSKVLAKKELLYVPLIGWTWYFLEIVFCKRKWEEDRDTVVEGLRRLSDYPEYMWFLLYCEGTRFTETKHRVSMEVAAAKGLPVLKYHLLPRTKGFTTAVKCLRGTVAAVYDVTLNFRGNKNPSLLGILYGKKYEADMCV

SEQ ID NO: 24291 - protein, 38 aa, Homo sapiens
  REGION 1..38: note = ENSP00000394102
MGLLAFLKTQFVLHLLVGFVFVVSGLVINFVQLCTLAL

SEQ ID NO: 24292 - protein, 255 aa, Homo sapiens; identical to SEQ ID NO: 24290
  REGION 1..255: note = ENSP00000414440

SEQ ID NO: 24293 - protein, 376 aa, Homo sapiens; identical to SEQ ID NO: 24283
  REGION 1..376: note = ENSP00000443510

SEQ ID NO: 24294 - protein, 378 aa, Homo sapiens
  REGION 1..378: note = ENSP00000314036
MDLAGLLKSQFLCHLVFCYVFIASGLIINTIQLFTLLLWPINKQLFRKINCRLSYCISSQLVMLLEWWSGTECTIFTDPRAYLKYGKENAIVVLNHKFEIDFLCGWSLSERFGLLGGSKVLAKKELAYVPIIGWMWYFTEMVFCSRKWEQDRKTVATSLQHLRDYPEKYFFLIHCEGTRFTEKKHEISMQVARAKGLPRLKHHLLPRTKGFAITVRSLRNVVSAVYDCTLNFRNNENPTLLGVLNGKKYHADLYVRRIPLEDIPEDDDECSAWLHKLYQEKDAFQEEYYRTGTFPETPMVPPRRPWTLVNWLFWASLVLYPFFQFLVSMIRSGSSLTLASFILVFFVASVGVRWMIGVTEIDKGSAYGNSDSKQKLND

SEQ ID NO: 24295 - protein, 105 aa, Homo sapiens
  REGION 1..105: note = ENSP00000400211
  VARIANT 1: note = Any amino acid
XSAVYDCTLNFRNNENPTLLGVLNGKKYHADLYVRRIPLEDIPEDDDECSAWLHKLYQEKGWGDTEFSKQYVSVSRPGRLALCPSEKIAEQQVEVVHGFSKQSGE

SEQ ID NO: 24296 - protein, 133 aa, Homo sapiens
  REGION 1..133: note = ENSP00000413901
MDLAGLLKSQFLCHLVFCYVFIASGLIINTIQLFTLLLWPINKQLFRKINCRLSYCISSQLVMLLEWWSGTECTIFTDPRAYLKYGKENAIVVLNHKFEIDFLCGWSLSERFGLLGFDLLHVACMPLELGLFS

SEQ ID NO: 24297 - protein, 159 aa, Homo sapiens
  REGION 1..159: note = ENSP00000355872
MDLAGLLKSQFLCHLVFCYVFIASGLIINTIQLFTLLLWPINKQLFRKINCRLSYCISSQLVMLLEWWSGTECTIFTDPRAYLKYGKENAIVVLNHKFEIDFLCGWSLSERFGLLGVSQKCIPPCLTHFSGSAPPLVFLLLVIQNLQKNQQSFYLMKWS

SEQ ID NO: 24298 - protein, 118 aa, Homo sapiens
  REGION 1..118: note = ENSP00000355878
MDLAGLLKSQFLCHLVFCYVFIASGLIINTIQLFTLLLWPINKQLFRKINCRLSYCISSRLQGPGQERAGLCPNYRLDVVLHRDGLLFAQVGAGSQDGCHQFAAPPGLPREVFFPDSL

SEQ ID NO: 24299 - protein, 2045 aa, Homo sapiens
  REGION 1..2045: note = ENSP00000368678
MAGRSHPGPLRPLLPLLVVAACVLPGAGGTCPERALERREEEANVVLTGTVEEILNVDPVQHTYSCKVRVWRYLKGKDLVARESLLDGGNKVVISGFGDPLICDNQVSTGDTRIFFVNPAPPYLWPAHKNELMLNSSLMRITLRNLEEVEFCVEDKPGTHFTPVPPTPPDACRGMLCGFGAVCEPNAEGPGRASCVCKKSPCPSVVAPVCGSDASTYSNECELQRAQCSQQRRIRLLSRGPCGSRDPCSNVTCSFGSTCARSADGLTASCLCPATCRGAPEGTVCGSDGADYPGECQLLRRACARQENVFKKFDGPCDPCQGALPDPSRSCRVNPRTRRPEMLLRPESCPARQAPVCGDDGVTYENDCVMGRSGAARGLLLQKVRSGQCQGRDQCPEPCRFNAVCLSRRGRPRCSCDRVTCDGAYRPVCAQDGRTYDSDCWRQQAECRQQRAIPSKHQGPCDQAPSPCLGVQCAFGATCAVKNGQAACECLQACSSLYDPVCGSDGVTYGSACELEATACTLGREIQVARKGPCDRCGQCRFGALCEAETGRCVCPSECVALAQPVCGSDGHTYPSECMLHVHACTHQISLHVASAGPCETCGDAVCAFGAVCSAGQCVCPRCEHPPPGPVCGSDGVTYGSACELREAACLQQTQIEEARAGPCEQAECGSGGSGSGEDGDCEQELCRQRGGIWDEDSEDGPCVCDFSCQSVPGSPVCGSDGVTYSTECELKKARCESQRGLYVAAQGACRGPTFAPLPPVAPLHCAQTPYGCCQDNITAARGVGLAGCPSACQCNPHGSYGGTCDPATGQCSCRPGVGGLRCDRCEPGFWNFRGIVTDGRSGCTPCSCDPQGAVRDDCEQMTGLCSCKPGVAGPKCGQCPDGRALGPAGCEADASAPATCAEMRCEFGARCVEESGSAHCVCPMLTCPEANATKVCGSDGVTYGNECQLKTIACRQGLQISIQSLGPCQEAVAPSTHPTSASVTVTTPGLLLSQALPAPPGALPLAPSSTAHSQTTPPPSSRPRTTASVPRTTVWPVLTVPPTAPSPAPSLVASAFGESGSTDGSSDEELSGDQEASGGGSGGLEPLEGSSVATPGPPVERASCYNSALGCCSDGKTPSLDAEGSNCPATKVFQGVLELEGVEGQELFYTPEMADPKSELFGETARSIESTLDDLFRNSDVKKDFRSVRLRDLGPGKSVRAIVDVHFDPTTAFRAPDVARALLRQIQVSRRRSLGVRRPLQEHVRFMDFDWFPAFITGATSGAIAAGATARATTASRLPSSAVTPRAPHPSHTSQPVAKTTAAPTTRRPPTTAPSRVPGRRPPAPQQPPKPCDSQPCFHGGTCQDWALGGGFTCSCPAGRGGAVCEKVLGAPVPAFEGRSFLAFPTLRAYHTLRLALEFRALEPQGLLLYNGNARGKDFLALALLDGRVQLRFDTGSGPAVLTSAVPVEPGQWHRLELSRHWRRGTLSVDGETPVLGESPSGTDGLNLDTDLFVGGVPEDQAAVALERTFVGAGLRGCIRLLDVNNQRLELGIGPGAATRGSGVGECGDHPCLPNPCHGGAPCQNLEAGRFHCQCPPGRVGPTCADEKSPCQPNPCHGAAPCRVLPEGGAQCECPLGREGTFCQTASGQDGSGPFLADFNGFSHLELRGLHTFARDLGEKMALEVVFLARGPSGLLLYNGQKTDGKGDFVSLALRDRRLEFRYDLGKGAAVIRSREPVTLGAWTRVSLERNGRKGALRVGDGPRVLGESPVPHTVLNLKEPLYVGGAPDFSKLARAAAVSSGFDGAIQLVSLGGRQLLTPEHVLRQVDVTSFAGHPCTRASGHPCLNGASCVPREAAYVCLCPGGFSGPHCEKGLVEKSAGDVDTLAFDGRTFVEYLNAVTESEKALQSNHFELSLRTEATQGLVLWSGKATERADYVALAIVDGHLQLSYNLGSQPVVLRSTVPVNTNRWLRVVAHREQREGSLQVGNEAPVTGSSPLGATQLDTDGALWLGGLPELPVGPALPKAYGTGFVGCLRDVVVGRHPLHLLEDAVTKPELRPCPTP

SEQ ID NO: 24300 - protein, 85 aa, Homo sapiens
  REGION 1..85: note = ENSP00000492725
MPPLPLARDTRQPPGASLLVRGFMVPCNACLILLATATLGFAVLLFLNNYKPGTHFTPVPPTPPDACRGMLCGFGAVCEPNAEGP

SEQ ID NO: 24301 - protein, 287 aa, Homo sapiens
  REGION 1..287: note = ENSP00000400771
  VARIANT 1: note = Any amino acid
XKGDFVSLALRDRRLEFRYDLGKGAAVIRSREPVTLGAWTRVSLERNGRKGALRVGDGPRVLGESPKSRKVPHTVLNLKEPLYVGGAPDFSKLARAAAVSSGFDGAIQLVSLGGRQLLTPEHVLRQVDVTSFAGHPCTRASGHPCLNGASCVPREAAYVCLCPGGFSGPHCEKGLVEKSAGDVDTLAFDGRTFVEYLNAVTESELANEIPVPETLDSGALHSEKALQSNHFELSLRTEATQGLVLWSGKATERADYVALAIVDGHLQLSYNLGSQPVVLRSTVPVNT

SEQ ID NO: 24302 - protein, 1930 aa, Homo sapiens
  REGION 1..1930: note = ENSP00000484607
MRITLRNLEEVEFCVEDKPGTHFTPVPPTPPDACRGMLCGFGAVCEPNAEGPGRASCVCKKSPCPSVVAPVCGSDASTYSNECELQRAQCSQQRRIRLLSRGPCGSRDPCSNVTCSFGSTCARSADGLTASCLCPATCRGAPEGTVCGSDGADYPGECQLLRRACARQENVFKKFDGPCDPCQGALPDPSRSCRVNPRTRRPEMLLRPESCPARQAPVCGDDGVTYENDCVMGRSGAARGLLLQKVRSGQCQGRDQCPEPCRFNAVCLSRRGRPRCSCDRVTCDGAYRPVCAQDGRTYDSDCWRQQAECRQQRAIPSKHQGPCDQAPSPCLGVQCAFGATCAVKNGQAACECLQACSSLYDPVCGSDGVTYGSACELEATACTLGREIQVARKGPCDRCGQCRFGALCEAETGRCVCPSECVALAQPVCGSDGHTYPSECMLHVHACTHQISLHVASAGPCETCGDAVCAFGAVCSAGQCVCPRCEHPPPGPVCGSDGVTYGSACELREAACLQQTQIEEARAGPCEQAECGSGGSGSGEDGDCEQELCRQRGGIWDEDSEDGPCVCDFSCQSVPGSPVCGSDGVTYSTECELKKARCESQRGLYVAAQGACRGPTFAPLPPVAPLHCAQTPYGCCQDNITAARGVGLAGCPSACQCNPHGSYGGTCDPATGQCSCRPGVGGLRCDRCEPGFWNFRGIVTDGRSGCTPCSCDPQGAVRDDCEQMTGLCSCKPGVAGPKCGQCPDGRALGPAGCEADASAPATCAEMRCEFGARCVEESGSAHCVCPMLTCPEANATKVCGSDGVTYGNECQLKTIACRQGLQISIQSLGPCQEAVAPSTHPTSASVTVTTPGLLLSQALPAPPGALPLAPSSTAHSQTTPPPSSRPRTTASVPRTTVWPVLTVPPTAPSPAPSLVASAFGESGSTDGSSDEELSGDQEASGGGSGGLEPLEGSSVATPGPPVERASCYNSALGCCSDGKTPSLDAEGSNCPATKVFQGVLELEGVEGQELFYTPEMADPKSELFGETARSIESTLDDLFRNSDVKKDFRSVRLRDLGPGKSVRAIVDVHFDPTTAFRAPDVARALLRQIQVSRRRSLGVRRPLQEHVRFMDFDWFPAFITGATSGAIAAGATARATTASRLPSSAVTPRAPHPSHTSQPVAKTTAAPTTRRPPTTAPSRVPGRRPPAPQQPPKPCDSQPCFHGGTCQDWALGGGFTCSCPAGRGGAVCEKVLGAPVPAFEGRSFLAFPTLRAYHTLRLALEFRALEPQGLLLYNGNARGKDFLALALLDGRVQLRFDTGSGPAVLTSAVPVEPGQWHRLELSRHWRRGTLSVDGETPVLGESPSGTDGLNLDTDLFVGGVPEDQAAVALERTFVGAGLRGCIRLLDVNNQRLELGIGPGAATRGSGVGECGDHPCLPNPCHGGAPCQNLEAGRFHCQCPPGRVGPTCADEKSPCQPNPCHGAAPCRVLPEGGAQCECPLGREGTFCQTASGQDGSGPFLADFNGFSHLELRGLHTFARDLGEKMALEVVFLARGPSGLLLYNGQKTDGKGDFVSLALRDRRLEFRYDLGKGAAVIRSREPVTLGAWTRVSLERNGRKGALRVGDGPRVLGESPKSRKVPHTVLNLKEPLYVGGAPDFSKLARAAAVSSGFDGAIQLVSLGGRQLLTPEHVLRQVDVTSFAGHPCTRASGHPCLNGASCVPREAAYVCLCPGGFSGPHCEKGLVEKSAGDVDTLAFDGRTFVEYLNAVTESELANEIPVPETLDSGALHSEKALQSNHFELSLRTEATQGLVLWSGKATERADYVALAIVDGHLQLSYNLGSQPVVLRSTVPVNTNRWLRVVAHREQREGSLQVGNEAPVTGSSPLGATQLDTDGALWLGGLPELPVGPALPKAYGTGFVGCLRDVVVGRHPLHLLEDAVTKPELRPCPTP

SEQ ID NO: 24303 - protein, 485 aa, Homo sapiens
  REGION 1..485: note = ENSP00000355627
MRKRAPQSEMAPAGVSLRATILCLLAWAGLAAGDRVYIHPFHLVIHNESTCEQLAKANAGKPKDPTFIPAPIQAKTSPVDEKALQDQLVLVAAKLDTEDKLRAAMVGMLANFLGFRIYGMHSELWGVVHGATVLSPTAVFGTLASLYLGALDHTADRLQAILGVPWKDKNCTSRLDAHKVLSALQAVQGLLVAQGRADSQAQLLLSTVVGVFTAPGLHLKQPFVQGLALYTPVVLPRSLDFTELDVAAEKIDRFMQAVTGWKTGCSLMGASVDSTLAFNTYVHFQGKMKGFSLLAEPQEFWVDNSTSVSVPMLSGMGTFQHWSDIQDNFSVTQVPFTESACLLLIQPHYASDLDKVEGLTFQQNSLNWMKKLSPRTIHLTMPQLVLQGSYDLQDLLAQAELPAILHTELNLQKLSNDRIRVGEVLNSIFFELEADEREPTESTQQLNKPEVLEVTLNRPFLFAVYDQSATALHFLGRVANPLSTA

SEQ ID NO: 24304 - protein, 131 aa, Homo sapiens
  REGION 1..131: note = ENSP00000433789
MEKEETTRELLLPNWQGSGSHGLTIAQRDDGVFVQEVTQNSPAARTGVVKEGDQIVGATIYFDNLQSGEVTQLLNTMGHHTVGLKLHRKGDRSPEPGQTWTREVFSSCSSEVVLDCRSGQEENHPLLRLFL

SEQ ID NO: 24305 - protein, 149 aa, Homo sapiens
  REGION 1..149: note = ENSP00000257247
MEKEETTRELLLPNWQGSGSHGLTIAQRDDGVFVQEVTQNSPAARTGVVKEGDQIVGATIYFDNLQSGEVTQLLNTMGHHTVGLKLHRKGDRSPEPGQTWTREVFSSCSSEVVLNTPQPSALECKDQNKQKEASSQAGAVSVSTPNAGL

SEQ ID NO: 24306 - protein, 121 aa, Homo sapiens
  REGION 1..121: note = ENSP00000433635
MEKEETTRELLLPNWQGSGSHGLTIAQRDDGVFVQEVTQNSPAARTGVVKEGDQIVGATIYFDNLQSGEVTQLLNTMGHHTVGLKLHRKGDRSPEPGQTWTREVFSSCSSEVVLNTPQPSA

SEQ ID NO: 24307 - protein, 5890 aa, Homo sapiens
  REGION 1..5890: note = ENSP00000367263
MEKEETTRELLLPNWQGSGSHGLTIAQRDDGVFVQEVTQNSPAARTGVVKEGDQIVGATIYFDNLQSGEVTQLLNTMGHHTVGLKLHRKGDRSPEPGQTWTREVFSSCSSEVVLSGDDEEYQRIYTTKIKPRLKSEDGVEGDLGETQSRTITVTRRVTAYTVDVTGREGAKDIDISSPEFKIKIPRHELTEISNVDVETQSGKTVIRLPSGSGAASPTGSAVDIRAGAISASGPELQGAGHSKLQVTMPGIKVGGSGVNVNAKGLDLGGRGGVQVPAVDISSSLGGRAVEVQGPSLESGDHGKIKFPTMKVPKFGVSTGREGQTPKAGLRVSAPEVSVGHKGGKPGLTIQAPQLEVSVPSANIEGLEGKLKGPQITGPSLEGDLGLKGAKPQGHIGVDASAPQIGGSITGPSVEVQAPDIDVQGPGSKLNVPKMKVPKFSVSGAKGEETGIDVTLPTGEVTVPGVSGDVSLPEIATGGLEGKMKGTKVKTPEMIIQKPKISMQDVDLSLGSPKLKGDIKVSAPGVQGDVKGPQVALKGSRVDIETPNLEGTLTGPRLGSPSGKTGTCRISMSEVDLNVAAPKVKGGVDVTLPRVEGKVKVPEVDVRGPKVDVSAPDVEAHGPEWNLKMPKMKMPTFSTPGAKGEGPDVHMTLPKGDISISGPKVNVEAPDVNLEGLGGKLKGPDVKLPDMSVKTPKISMPDVDLHVKGTKVKGEYDVTVPKLEGELKGPKVDIDAPDVDVHGPDWHLKMPKMKMPKFSVPGFKAEGPEVDVNLPKADVDISGPKIDVTAPDVSIEEPEGKLKGPKFKMPEMNIKVPKISMPDVDLHLKGPNVKGEYDVTMPKVESEIKVPDVELKSAKMDIDVPDVEVQGPDWHLKMPKMKMPKFSMPGFKAEGPEVDVNLPKADVDISGPKVGVEVPDVNIEGPEGKLKGPKFKMPEMNIKAPKISMPDVDLHMKGPKVKGEYDMTVPKLEGDLKGPKVDVSAPDVEMQGPDWNLKMPKIKMPKFSMPSLKGEGPEFDVNLSKANVDISAPKVDTNAPDLSLEGPEGKLKGPKFKMPEMHFRAPKMSLPDVDLDLKGPKMKGNVDISAPKIEGEMQVPDVDIRGPKVDIKAPDVEGQGLDWSLKIPKMKMPKFSMPSLKGEGPEVDVNLPKADVVVSGPKVDIEAPDVSLEGPEGKLKGPKFKMPEMHFKTPKISMPDVDLHLKGPKVKGDVDVSVPKVEGEMKVPDVEIKGPKMDIDAPDVEVQGPDWHLKMPKMKMPKFSMPGFKGEGREVDVNLPKADIDVSGPKVDVEVPDVSLEGPEGKLKGPKFKMPEMHFKAPKISMPDVDLNLKGPKLKGDVDVSLPEVEGEMKVPDVDIKGPKVDISAPDVDVHGPDWHLKMPKVKMPKFSMPGFKGEGPEVDVKLPKADVDVSGPKMDAEVPDVNIEGPDAKLKGPKFKMPEMSIKPQKISIPDVGLHLKGPKMKGDYDVTVPKVEGEIKAPDVDIKGPKVDINAPDVEVHGPDWHLKMPKVKMPKFSMPGFKGEGPEVDMNLPKADLGVSGPKVDIDVPDVNLEAPEGKLKGPKFKMPSMNIQTHKISMPDVGLNLKAPKLKTDVDVSLPKVEGDLKGPEIDVKAPKMDVNVGDIDIEGPEGKLKGPKFKMPEMHFKAPKISMPDVDLHLKGPKVKGDMDVSVPKVEGEMKVPDVDIKGPKVDIDAPDVEVHDPDWHLKMPKMKMPKFSMPGFKAEGPEVDVNLPKADIDVSGPSVDTDAPDLDIEGPEGKLKGSKFKMPKLNIKAPKVSMPDVDLNLKGPKLKGEIDASVPELEGDLRGPQVDVKGPFVEAEVPDVDLECPDAKLKGPKFKMPEMHFKAPKISMPDVDLHLKGPKVKGDADVSVPKLEGDLTGPSVGVEVPDVELECPDAKLKGPKFKMPDMHFKAPKISMPDVDLHLKGPKVKGDVDVSVPKLEGDLTGPSVGVEVPDVELECPDAKLKGPKFKMPEMHFKTPKISMPDVDLHLKGPKVKGDMDVSVPKVEGEMKVPDVDIKGPKMDIDAPDVDVHGPDWHLKMPKMKMPKFSMPGFKAEGPEVDVNLPKADVVVSGPKVDVEVPDVSLEGPEGKLKGPKLKMPEMHFKAPKISMPDVDLHLKGPKVKGDVDVSLPKLEGDLTGPSVDVEVPDVELECPDAKLKGPKFKMPEMHFKTPKISMPDVNLNLKGPKVKGDMDVSVPKVEGEMKVPDVDIRGPKVDIDAPDVDVHGPDWHLKMPKMKMPKFSMPGFKGEGPEVDVNLPKADVDVSGPKVDVEVPDVSLEGPEGKLKGPKFKMPEMHFKTPKISMPDVDFNLKGPKIKGDVDVSAPKLEGELKGPELDVKGPKLDADMPEVAVEGPNGKWKTPKFKMPDMHFKAPKISMPDLDLHLKSPKAKGEVDVDVPKLEGDLKGPHVDVSGPDIDIEGPEGKLKGPKFKMPDMHFKAPNISMPDVDLNLKGPKIKGDVDVSVPEVEGKLEVPDMNIRGPKVDVNAPDVQAPDWHLKMPKMKMPKFSMPGFKAEGPEVDVNLPKADVDISGPKVDIEGPDVNIEGPEGKLKGPKLKMPEMNIKAPKISMPDFDLHLKGPKVKGDVDVSLPKVEGDLKGPEVDIKGPKVDINAPDVGVQGPDWHLKMPKVKMPKFSMPGFKGEGPDGDVKLPKADIDVSGPKVDIEGPDVNIEGPEGKLKGPKFKMPEMNIKAPKISMPDIDLNLKGPKVKGDVDVSLPKVEGDLKGPEVDIKGPKVDIDAPDVDVHGPDWHLKMPKIKMPKISMPGFKGEGPDVDVNLPKADIDVSGPKVDVECPDVNIEGPEGKWKSPKFKMPEMHFKTPKISMPDIDLNLTGPKIKGDVDVTGPKVEGDLKGPEVDLKGPKVDIDVPDVNVQGPDWHLKMPKMKMPKFSMPGFKAEGPEVDVNLPKADVDVSGPKVDVEGPDVNIEGPEGKLKGPKFKMPEMNIKAPKIPMPDFDLHLKGPKVKGDVDISLPKVEGDLKGPEVDIRGPQVDIDVPDVGVQGPDWHLKMPKVKMPKFSMPGFKGEGPDVDVNLPKADLDVSGPKVDIDVPDVNIEGPEGKLKGPKFKMPEMNIKAPKISMPDIDLNLKGPKVKGDMDVSLPKVEGDMKVPDVDIKGPKVDINAPDVDVQGPDWHLKMPKIKMPKISMPGFKGEGPEVDVNLPKADLDVSGPKVDVDVPDVNIEGPDAKLKGPKFKMPEMNIKAPKISMPDLDLNLKGPKMKGEVDVSLANVEGDLKGPALDIKGPKIDVDAPDIDIHGPDAKLKGPKLKMPDMHVNMPKISMPEIDLNLKGSKLKGDVDVSGPKLEGDIKAPSLDIKGPEVDVSGPKLNIEGKSKKSRFKLPKFNFSGSKVQTPEVDVKGKKPDIDITGPKVDINAPDVEVQGKVKGSKFKMPFLSISSPKVSMPDVELNLKSPKVKGDLDIAGPNLEGDFKGPKVDIKAPEVNLNAPDVDVHGPDWNLKMPKMKMPKFSVSGLKAEGPDVAVDLPKGDINIEGPSMNIEGPDLNVEGPEGGLKGPKFKMPDMNIKAPKISMPDIDLNLKGPKVKGDVDISLPKLEGDLKGPEVDIKGPKVDINAPDVDVHGPDWHLKMPKVKMPKFSMPGFKGEGPEVDVTLPKADIDISGPNVDVDVPDVNIEGPDAKLKGPKFKMPEMNIKAPKISMPDFDLNLKGPKMKGDVVVSLPKVEGDLKGPEVDIKGPKVDIDTPDINIEGSEGKFKGPKFKIPEMHLKAPKISMPDIDLNLKGPKVKGDVDVSLPKMEGDLKGPEVDIKGPKVDINAPDVDVQGPDWHLKMPKVKMPKFSMPGFKGEGPDVDVNLPKADLDVSGPKVDIDVPDVNIEGPEGKLKGPKFKMPEMNIKAPKISMPDIDLNLKGPKVKGDMDVSLPKVEGDMQVPDLDIKGPKVDINAPDVDVRGPDWHLKMPKIKMPKISMPGFKGEGPEVDVNLPKADLDVSGPKVDVDVPDVNIEGPDAKLKGPKFKMPEMNIKAPKISMPDFDLHLKGPKVKGDVDVSLPKMEGDLKAPEVDIKGPKVDIDAPDVDVHGPDWHLKMPKVKMPKFSMPGFKGEGPEVDVNLPKADIDVSGPKVDIDTPDIDIHGPEGKLKGPKFKMPDLHLKAPKISMPEVDLNLKGPKMKGDVDVSLPKVEGDLKGPEVDIKGPKVDIDVPDVDVQGPDWHLKMPKVKMPKFSMPGFKGEGPDVDVNLPKADLDVSGPKVDIDVPDVNIEGPDAKLKGPKFKMPEMNIKAPKISMPDFDLHLKGPKVKGDVDVSLPKVEGDLKGPEVDIKGPKVDIDAPDVDVHGPDWHLKMPKVKMPKFSMPGFKGEGPDVDVTLPKADIEISGPKVDIDAPDVSIEGPDAKLKGPKFKMPEMNIKAPKISMPDIDFNLKGPKVKGDVDVSLPKVEGDLKGPEIDIKGPSLDIDTPDVNIEGPEGKLKGPKFKMPEMNIKAPKISMPDFDLHLKGPKVKGDVDVSLPKVESDLKGPEVDIEGPEGKLKGPKFKMPDVHFKSPQISMSDIDLNLKGPKIKGDMDISVPKLEGDLKGPKVDVKGPKVGIDTPDIDIHGPEGKLKGPKFKMPDLHLKAPKISMPEVDLNLKGPKVKGDMDISLPKVEGDLKGPEVDIRDPKVDIDVPDVDVQGPDWHLKMPKVKMPKFSMPGFKGEGPDVDVNLPKADIDVSGPKVDVDVPDVNIEGPDAKLKGPKFKMPEMSIKAPKISMPDIDLNLKGPKVKGDVDVTLPKVEGDLKGPEADIKGPKVDINTPDVDVHGPDWHLKMPKVKMPKFSMPGFKGEGPDVDVSLPKADIDVSGPKVDVDIPDVNIEGPDAKLKGPKFKMPEINIKAPKISIPDVDLDLKGPKVKGDFDVSVPKVEGTLKGPEVDLKGPRLDFEGPDAKLSGPSLKMPSLEISAPKVTAPDVDLHLKAPKIGFSGPKLEGGEVDLKGPKVEAPSLDVHMDSPDINIEGPDVKIPKFKKPKFGFGAKSPKADIKSPSLDVTVPEAELNLETPEISVGGKGKKSKFKMPKIHMSGPKIKAKKQGFDLNVPGGEIDASLKAPDVDVNIAGPDAALKVDVKSPKTKKTMFGKMYFPDVEFDIKSPKFKAEAPLPSPKLEGELQAPDLELSLPAIHVEGLDIKAKAPKVKMPDVDISVPKIEGDLKGPKVQANLGAPDINIEGLDAKVKTPSFGISAPQVSIPDVNVNLKGPKIKGDVPSVGLEGPDVDLQGPEAKIKFPKFSMPKIGIPGVKMEGGGAEVHAQLPSLEGDLRGPDVKLEGPDVSLKGPGVDLPSVNLSMPKVSGPDLDLNLKGPSLKGDLDASVPSMKVHAPGLNLSGVGGKMQVGGDGVKVPGIDATTKLNVGAPDVTLRGPSLQGDLAVSGDIKCPKVSVGAPDLSLEASEGSIKLPKMKLPQFGISTPGSDLHVNAKGPQVSGELKGPGVDVNLKGPRISAPNVDFNLEGPKVKGSLGATGEIKGPTVGGGLPGIGVQGLEGNLQMPGIKSSGCDVNLPGVNVKLPTGQISGPEIKGGLKGSEVGFHGAAPDISVKGPAFNMASPESDFGINLKGPKIKGGADVSGGVSAPDISLGEGHLSVKGSGGEWKGPQVSSALNLDTSKFAGGLHFSGPKVEGGVKGGQIGLQAPGLSVSGPQGHLESGSGKVTFPKMKIPKFTFSGRELVGREMGVDVHFPKAEASIQAGAGDGEWEESEVKLKKSKIKMPKFNFSKPKGKGGVTGSPEASISGSKGDLKSSKASLGSLEGEAEAEASSPKGKFSLFKSKKPRHRSNSFSDEREFSGPSTPTGTLEFEGGEVSLEGGKVKGKHGKLKFGTFGGLGSKSKGHYEVTGSDDETGKLQGSGVSLASKKSRLSSSSSNDSGNKVGIQLPEVELSVSTKKE

SEQ ID NO: 24308 - protein, 144 aa, Homo sapiens
  REGION 1..144: note = ENSP00000433286
MEKEETTRELLLPNWQGSGSHGLTIAQRDDGVFVQEVTQNSPAARTGVVKEGDQIVGATIYFDNLQSGEVTQLLNTMGHHTVGLKLHRKGDRSPEPGQTWTREVFSSCSSEVVLSGDDEEYQRIYTTKIKPRLKSEDGVEGDLG

SEQ ID NO: 24309 - protein, 123 aa, Homo sapiens
  REGION 1..123: note = ENSP00000435357
MEKEETTRELLLPNWQGSGSHGLTIAQRDDGVFVQEVTQNSPAARTGVVKEGDQIVGATIYFDNLQSGEVTQLLNTMGHHTVGLKLHRKGDRSPEPGQTWTREVFSSCSSEVVLSGDDEEYQR

SEQ ID NO: 24310 - protein, 85 aa, Homo sapiens
  REGION 1..85: note = ENSP00000436845
MEKEETTRELLLPNWQGSGSHGLTIAQRDDGVFVQEVTQNSPAARTGVVKEGDQIVGATIYFDNLQSGEVTQLLNTMGHHTVGLK

SEQ ID NO: 24311 - protein, 701 aa, Homo sapiens
  REGION 1..701: note = ENSP00000424601
MPRTMIPPGECTYAGRKRRRPLQKQRPAVGAEKSNPSKRHRDRLNAELDHLASLLPFPPDIISKLDKLSVLRLSVSYLRVKSFFQVVQEQSSRQPAAGAPSPGDSCPLAGSAVLEGRLLLESLNGFALVVSAEGTIFYASATIVDYLGFHQTDVMHQNIYDYIHVDDRQDFCRQLHWAMDPPQVVFGQPPPLETGDDAILGRLLRAQEWGTGTPTEYSAFLTRCFICRVRCLLDSTSGFLTMQFQGKLKFLFGQKKKAPSGAMLPPRLSLFCIAAPVLLPSAAEMKMRSALLRAKPRADTAATADAKVKATTSLCESELHGKPNYSAGRSSRESGVLVLREQTDAGRWAQVPARAPCLCLRGGPDLVLDPKGGSGDREEEQHRMLSRASGVTGRRETPGPTKPLPWTAGKHSEDGARPRLQPSKNDPPSLRPMPRGSCLPCPCVQGTFRNSPISHPPSPSPSAYSSRTSRPMRDVGEDQVHPPLCHFPQRSLQHQLPQPGAQRFATRGYPMEDMKLQGVPMPPGDLCGPTLLLDVSIKMEKDSGCEGAADGCVPSQVWLGASDRSHPATFPTRMHLKTEPDSRQQVYISHLGHGVRGAQPHGRATAGRSRELTPFHPAHCACLEPTDGLPQSEPPHQLCARGRGEQSCTCRAAEAAPVVKREPLDSPQWATHSQGMVPGMLPKSALATLVPPQASGCTFLP

SEQ ID NO: 24312 - protein, 719 aa, Homo sapiens
  REGION 1..719: note = ENSP00000323816
MPRTMIPPGECTYAGRKRRRPLQKQRPAVGAEKSNPSKRHRDRLNAELDHLASLLPFPPDIISKLDKLSVLRLSVSYLRVKSFFQVVQEQSSRQPAAGAPSPGDSCPLAGSAVLEGRLLLESLNGFALVVSAEGTIFYASATIVDYLGFHQTDVMHQNIYDYIHVDDRQDFCRQLHWAMDPPQVVFGQPPPLETGDDAILGRLLRAQEWGTGTPTEYSAFLTRCFICRVRCLLDSTSGFLARGSQAWQLRLCCPEPLMTMQFQGKLKFLFGQKKKAPSGAMLPPRLSLFCIAAPVLLPSAAEMKMRSALLRAKPRADTAATADAKVKATTSLCESELHGKPNYSAGRSSRESGVLVLREQTDAGRWAQVPARAPCLCLRGGPDLVLDPKGGSGDREEEQHRMLSRASGVTGRRETPGPTKPLPWTAGKHSEDGARPRLQPSKNDPPSLRPMPRGSCLPCPCVQGTFRNSPISHPPSPSPSAYSSRTSRPMRDVGEDQVHPPLCHFPQRSLQHQLPQPGAQRFATRGYPMEDMKLQGVPMPPGDLCGPTLLLDVSIKMEKDSGCEGAADGCVPSQVWLGASDRSHPATFPTRMHLKTEPDSRQQVYISHLGHGVRGAQPHGRATAGRSRELTPFHPAHCACLEPTDGLPQSEPPHQLCARGRGEQSCTCRAAEAAPVVKREPLDSPQWATHSQGMVPGMLPKSALATLVPPQASGCTFLP

SEQ ID NO: 24313 - protein, 547 aa, Homo sapiens [sequence omitted]

SEQ ID NO: 24314 - protein, 12 aa, Homo sapiens
  REGION 1..12: note = ENSP00000430914
MHQNIYDYIHVD

SEQ ID NO: 24315 - protein, 157 aa, Homo sapiens
  REGION 1..157: note = ENSP00000428893
MIPPGECTYAGRKRRRPLQKQRPAVGAEKSNPSKRHRDRLNAELDHLASLLPFPPDIISKLDKLSVLRLSVSYLRVKSFFQVVQEQSSRQPAAGAPSPGDSCPLAGSAVLEGRLLLESLNGFALVVSAEGTIFYASATIVDYLGFHQTDVMHQNIYD

SEQ ID NO: 24316 - protein, 139 aa, Homo sapiens
  REGION 1..139: note = ENSP00000430842
MIPPGECTYAGRKRRRPLQKQRPAVGAEKSNPSKRHRDRLNAELDHLASLLPFPPDIISKLDKLSVLRLSVSYLRVKSFFQGQGLAVADAEDVDDHTGERRPMSFRRPRALDTQALRRTQFGLHLLMVNIAGLIATDRL

SEQ ID NO: 24317 - protein, 81 aa, Homo sapiens
  REGION 1..81: note = ENSP00000429944
MIPPGECTYAGRKRRRPLQKQRPAVGAEKSNPSKRHRDRLNAELDHLASLLPFPPDIISKLDKLSVLRLSVSYLRVKSFFQ

SEQ ID NO: 24318 - protein, 557 aa, Homo sapiens
  REGION 1..557: note = ENSP00000426932
MRGRGMPTDVMHQNIYDYIHVDDRQDFCRQLHWAMDPPQVVFGQPPPLETGDDAILGRLLRAQEWGTGTPTEYSAFLTRCFICRVRCLLDSTSGFLTMQFQGKLKFLFGQKKKAPSGAMLPPRLSLFCIAAPVLLPSAAEMKMRSALLRAKPRADTAATADAKVKATTSLCESELHGKPNYSAGRSSRESGVLVLREQTDAGRWAQVPARAPCLCLRGGPDLVLDPKGGSGDREEEQHRMLSRASGVTGRRETPGPTKPLPWTAGKHSEDGARPRLQPSKNDPPSLRPMPRGSCLPCPCVQGTFRNSPISHPPSPSPSAYSSRTSRPMRDVGEDQVHPPLCHFPQRSLQHQLPQPGAQRFATRGYPMEDMKLQGVPMPPGDLCGPTLLLDVSIKMEKDSGCEGAADGCVPSQVWLGASDRSHPATFPTRMHLKTEPDSRQQVYISHLGHGVRGAQPHGRATAGRSRELTPFHPAHCACLEPTDGLPQSEPPHQLCARGRGEQSCTCRAAEAAPVVKREPLDSPQWATHSQGMVPGMLPKSALATLVPPQASGCTFLP

SEQ ID NO: 24319 - protein, 215 aa, Homo sapiens
  REGION 1..215: note = ENSP00000426076
LLPSAAEMKMRSALLRAKPRADTAATADAKDREEEQHRMLSRASGVTGRRETPGPTKPLPWTAGKHSEDGARPRLQPSKNDPPSLRPMPRGSCLPCPCVQGTFRNSPISHPPSPSPSAYSSRTSRPMRDVGEDQVHPPLCHFPQRSLQHQLPQPGAQRFATRGYPMEDMKLQGVPMPPGDLCGPTLLLDVSIKMEKDSGCEGAADGCVPSQVWLG

SEQ ID NO: 24320 - protein, 203 aa, Homo sapiens
  REGION 1..203: note = ENSP00000451569
MKEEGVKLLREAMGIYISTLKTEFTQGMILPTMNGESVDPVGQPALKTEERKAKPAPSKTQARPVGVKIPTCKITLKETFLTSPEELYRVFTTQELVQAFTHAPATLEADRGGKFHMVDGNVSGEFTDLVPEKHIVMKWRFKSWPEGHFATITLTFIDKNGETELCMEGRGIPAPEEERTRQGWQRYYFEGIKQTFGYGARLF

SEQ ID NO: 24321 - protein, 338 aa, Homo sapiens
  REGION 1..338: note = ENSP00000216479
MAKWGEGDPRWIVEERADATNVNNWHWTERDASNWSTDKLKTLFLAVQVQNEEGKCEVTEVSKLDGEASINNRKGKLIFFYEWSVKLNWTGTSKSGVQYKGHVEIPNLSDENSVDEVEISVSLAKDEPDTNLVALMKEEGVKLLREAMGIYISTLKTEFTQGMILPTMNGESVDPVGQPALKTEERKAKPAPSKTQARPVGVKIPTCKITLKETFLTSPEELYRVFTTQELVQAFTHAPATLEADRGGKFHMVDGNVSGEFTDLVPEKHIVMKWRFKSWPEGHFATITLTFIDKNGETELCMEGRGIPAPEEERTRQGWQRYYFEGIKQTFGYGARLF

SEQ ID NO: 24322 - protein, 288 aa, Homo sapiens
  REGION 1..288: note = ENSP00000440108
MAKWGEGDPRWIVEERADATNVNNWHWTERDASNWSTDKLKTLFLAVQVQNEEGKCEVTEVSKLDGEASINNRKGKLIFFYEWSVKLNWTGTSKSGVQYKGHVEIPNLSDENSVDEVEISVSLAKDEPDTNLVALMKEEGVKLLREAMGIYISTLKTEFTQGMILPTMNGESVDPVGQPALKTEERKAKPAPSKTQARPVGVKIPTCKITLKETFLTSPEELYRVFTTQELVQAFTHAPATLEADRGGKFHMVDGNVSGEFTDLVPEKHIVMKWRFKSWPEGSHCHSG

SEQ ID NO: 24323 - protein, 100 aa, Homo sapiens
  REGION 1..100: note = ENSP00000451467
MAKWGEGDPRWIVEERADATNVNNWHWTERDASNWSTDKLKTLFLAVQVQNEEGKCEVTEVSKLDGEASINNRKGKLIFFYEWSVKLNWTGKSKLGCQRD

SEQ ID NO: 24324 - protein, 216 aa, Homo sapiens
  REGION 1..216: note = ENSP00000451475
  VARIANT 1: note = Any amino acid
XCEVTEVSKLDGEASINNRKGKLIFFYEWSVKLNWTGTSKSGVQYKGHVEIPNLSDENSVDEVEISVSLAKDEPDTNLVALMKEEGVKLLREAMGIYISTLKTEFTQGMILPTMNGESVDPVGQPALKTEERKAKPAPSKTQARPVGVKIPTCKITLKETFLTSPEELYRVFTTQELVQAFTHAPATLEADRGGKFHMVDGNVSGEFTDLVSTCRP

SEQ ID NO: 24325 - protein, 133 aa, Homo sapiens
  REGION 1..133: note = ENSP00000452127
  VARIANT 1: note = Any amino acid
XWSVKLNWTGTSKSGVQYKGHVEIPNLSDENSVDEVEISVSLAKDEPDTNLVALMKEEGVKLLREAMGIYISTLKTGHFATITLTFIDKNGETELCMEGRGIPAPEEERTRQGWQRYYFEGIKQTFGYGARLF

SEQ ID NO: 24326 - protein, 90 aa, Homo sapiens
  REGION 1..90: note = ENSP00000450890
  VARIANT 1: note = Any amino acid
XVGVKIPTCKITLKETFLTSPEELYRVFTTQELVQAFTHAPATLEADRGGKFHMVDGNVSGEFTDLVPEKHIVMKWRFKSWPEGSHCHSG

SEQ ID NO: 24327 - protein, 714 aa, Homo sapiens
  REGION 1..714: note = ENSP00000297625
MLQNPQEKSQAYPRRRRPGCYAYRQNPEAIAAAAMYTFLPDNFSPAKPKPSKDLKPLLGSAVLGLLLVLAAVVAWCYYSVSLRKAERLRAELLDLKAGGFSIRNQKGEQVFRLAFRSGALDLDSCSRDGALLGCSLTADGLPLHFFIQTVRPKDTVMCYRVRWEEAAPGRAVEHAMFLGDAAAHWYGGAEMRTQHWPIRLDGQQEPQPFVTSDVYSSDAAFGGILERYWLSSRAAAIKVNDSVPFHLGWNSTERSLRLQARYHDTPYKPPAGRAAAPELSYRVCVGSDVTSIHKYMVRRYFNKPSRVPAPEAFRDPIWSTWALYGRAVDQDKVLRFAQQIRLHHFNSSHLEIDDMYTPAYGDFDFDEVKFPNASDMFRRLRDAGFRVTLWVHPFVNYNSSRFGEGVERELFVREPTGRLPALVRWWNGIGAVLDFTHPKARDWFQGHLRRLRSRYSVASFKFDAGEVSYLPRDFSTYRPLPDPSVWSRRYTEMALPFFSLAEVRVGYQSQNISCFFRLVDRDSVWGYDLGLRSLIPAVLTVSMLGYPFILPDMVGGNAVPQRTAGGDVPERELYIRWLEVAAFMPAMQFSIPPWRYDAEVVAIAQKFAALRASLVAPLLLELAGEVTDTGDPIVRPLWWIAPGDETAHRIDSQFLIGDTLLVAPVLEPGKQERDVYLPAGKWRSYKGELFDKTPVLLTDYPVDLDEIAYFTWAS

SEQ ID NO: 24328 - protein, 160 aa, Homo sapiens
  REGION 1..160: note = ENSP00000368437
FLPDNFSPAKPKPSKDLKPLLGSAVLGLLLVLAAVVAWCYYSVSLRKAERLRAELLDLKAGGFSIRNQKGEQEPQPFVTSDVYSSDAAFGGILERYWLSSRAAAIKVNDSVPFHLGWNSTERSLRLQARYHDTPYKPPAGRAAAPELSYRVCVGSDVTSI

SEQ ID NO: 24329 - protein, 171 aa, Homo sapiens
  REGION 1..171: note = ENSP00000448458
MAKQYIEKSLLVPDHVITRLMMSELENRRGQHWLLDGFPRTLGQAEALDKICEVDLVISLNIPFETLKDRLSRRWIHPPSGRVYNLDFNPPHVHGIDDVTGEPLVQQEDDKPEAVAARLRQYKDVAKPVIELYKSRGVLHQFSGTETNKIWPYVYTLFSNKITPIQSKEAY

SEQ ID NO: 24330 - protein, 223 aa, Homo sapiens
  REGION 1..223: note = ENSP00000322175
MASKLLRAVILGPPGSGKGTVCQRIAQNFGLQHLSSGHFLRENIKASTEVGEMAKQYIEKSLLVPDHVITRLMMSELENRRGQHWLLDGFPRTLGQAEALDKICEVDLVISLNIPFETLKDRLSRRWIHPPSGRVYNLDFNPPHVHGIDDVTGEPLVQQEDDKPEAVAARLRQYKDVAKPVIELYKSRGVLHQFSGTETNKIWPYVYTLFSNKITPIQSKEAY

SEQ ID NO: 24331 - protein, 223 aa, Homo sapiens; identical to SEQ ID NO: 24330
  REGION 1..223: note = ENSP00000445912

SEQ ID NO: 24332 - protein, 223 aa, Homo sapiens; identical to SEQ ID NO: 24330
  REGION 1..223: note = ENSP00000378743

SEQ ID NO: 24333 - protein, 76 aa, Homo sapiens
  REGION 1..76: note = ENSP00000462259
MSVQYPRRRATAGEKPGNEPEEVKLQNASKQIVQNAILQAVQQVSQESQRREERISDNRDHIQLGVGELTKKHEKK

SEQ ID NO: 24334 - protein, 69 aa, Homo sapiens
  REGION 1..69: note = ENSP00000399075
MVFAPGEKPGNEPEEVKLQNASKQIVQNAILQAVQQVSQESQRREERISDNRDHIQLGVGELTKKHEKK

SEQ ID NO: 24335 - protein, 1745 aa, Homo sapiens
  REGION 1..1745: note = ENSP00000453768
MKLNPQQAPLYGDCVVTVLLAEEDKAEDDVVFYLVFLGSTLRHCTSTRKVSSDTLETIAPGHDCCETVKVQLCASKEGLPVFVVAEEDFHFVQDEAYDAAQFLATSAGNQQALNFTRFLDQSGPPSGDVNSLDKKLVLAFRHLKLPTEWNVLGTDQSLHDAGPRETLMHFAVRLGLLRLTWFLLQKPGGRGALSIHNQEGATPVSLALERGYHKLHQLLTEENAGEPDSWSSLSYEIPYGDCSVRHHRELDIYTLTSESDSHHEHPFPGDGCTGPIFKLMNIQQQLMKTNLKQMDSLMPLMMTAQDPSSAPETDGQFLPCAPEPTDPQRLSSSEETESTQCCPGSPVAQTESPCDLSSIVEEENTDRSCRKKNKGVERKGEEVEPAPIVDSGTVSDQDSCLQSLPDCGVKGTEGLSSCGNRNEETGTKSSGMPTDQESLSSGDAVLQRDLVMEPGTAQYSSGGELGGISTTNVSTPDTAGEMEHGLMNPDATVWKNVLQGGESTKERFENSNIGTAGASDVHVTSKPVDKISVPNCAPAASSLDGNKPAESSLAFSNEETSTEKTAETETSRSREESADAPVDQNSVVIPAAAKDKISDGLEPYTLLAAGIGEAMSPSDLALLGLEEDVMPHQNSETNSSHAQSQKGKSSPICSTTGDDKLCADSACQQNTVTSSGDLVAKLCDNIVSESESTTARQPSSQDPPDASHCEDPQAHTVTSDPVRDTQERADFCPFKVVDNKGQRKDVKLDKPLTNMLEVVSHPHPVVPKMEKELVPDQAVISDSTFSLANSPGSESVTKDDALSFVPSQKEKGTATPELHTATDYRDGPDGNSNEPDTRPLEDRAVGLSTSSTAAELQHGMGNTSLTGLGGEHEGPAPPAIPEALNIKGNTDSSLQSVGKATLALDSVLTEEGKLLVVSESSAAQEQDKDKAVTCSSIKENALSSGTLQEEQRTPPPGQDTQQFHEKSISADCAKDKALQLSNSPGASSAFLKAETEHNKEVAPQVSLLTQGGAAQSLVPPGASLATESRQEALGAEHNSSALLPCLLPDGSDGSDALNCSQPSPLDVGVKNTQSQGKTSACEVSGDVTVDVTGVNALQGMAEPRRENISHNTQDILIPNVLLSQEKNAVLGLPVALQDKAVTDPQGVGTPEMIPLDWEKGKLEGADHSCTMGDAEEAQIDDEAHPVLLQPVAKELPTDMELSAHDDGAPAGVREVMRAPPSGRERSTPSLPCMVSAQDAPLPKGADLIEEAASRIVDAVIEQVKAAGALLTEGEACHMSLSSPELGPLTKGLESAFTEKVSTFPPGESLPMGSTPEEATGSLAGCFAGREEPEKIILPVQGPEPAAEMPDVKAEDEVDFRASSISEEVAVGSIAATLKMKQGPMTQAINRENWCTIEPCPDAASLLASKQSPECENFLDVGLGRECTSKQGVLKRESGSDSDLFHSPSDDMDSIIFPKPEEEHLACDITGSSSSTDDTASLDRHSSHGSDVSLSQILKPNRSRDRQSLDGFYSHGMGAEGRESESEPADPGDVEEEEMDSITEVPANCSVLRSSMRSLSPFRRHSWGPGKNAASDAEMNHRSFSLEGLTGGAGVGNKPSSSLEVSSANAEELRHPFSGEERVDSLVSLSEEDLESDQREHRMFDQQICHRSKQQGFNYCTSAISSPLTKSISLMTISHPGLDNSRPFHSTFHNTSANLTESITEENYNFLPHSPSKKDSEWKSGTKVSRTFSYIKNKMSSSKKSK

SEQ ID NO: 24336 - protein, 179 aa, Homo sapiens
  REGION 1..179: note = ENSP00000453634
MKLNPQQAPLYGDCVVTVLLAEEDKAEDDVVFYLVFLGSTLRHCTSTRKVSSDTLETIAPGHDCCETVKVQLCASKEGLPVFVVAEEDFHFVQDEAYDAAQFLATSAGNQQALNFTRFLDQSGPPSGDVNSLDKKLVLAFRHLKLPTEWNVLGTDQSLHGENLYDLQTHFKFVIFLLFF

SEQ ID NO: 24337 - protein, 2813 aa, Homo sapiens
  REGION 1..2813: note = ENSP00000378026
MKLNPQQAPLYGDCVVTVLLAEEDKAEDDVVFYLVFLGSTLRHCTSTRKVSSDTLETIAPGHDCCETVKVQLCASKEGLPVFVVAEEDFHFVQDEAYDAAQFLATSAGNQQALNFTRFLDQSGPPSGDVNSLDKKLVLAFRHLKLPTEWNVLGTDQSLHDAGPRETLMHFAVRLGLLRLTWFLLQKPGGRGALSIHNQEGATPVSLALERGYHKLHQLLTEENAGEPDSWSSLSYEIPYGDCSVRHHRELDIYTLTSESDSHHEHPFPGDGCTGPIFKLMNIQQQLMKTNLKQMDSLMPLMMTAQDPSSAPETDGQFLPCAPEPTDPQRLSSSEETESTQCCPGSPVAQTESPCDLSSIVEEENTDRSCRKKNKGVERKGEEVEPAPIVDSGTVSDQDSCLQSLPDCGVKGTEGLSSCGNRNEETGTKSSGMPTDQESLSSGDAVLQRDLVMEPGTAQYSSGGELGGISTTNVSTPDTAGEMEHGLMNPDATVWKNVLQGGESTKERFENSNIGTAGASDVHVTSKPVDKISVPNCAPAASSLDGNKPAESSLAFSNEETSTEKTAETETSRSREESADAPVDQNSVVIPAAAKDKISDGLEPYTLLAAGIGEAMSPSDLALLGLEEDVMPHQNSETNSSHAQSQKGKSSPICSTTGDDKLCADSACQQNTVTSSGDLVAKLCDNIVSESESTTARQPSSQDPPDASHCEDPQAHTVTSDPVRDTQERADFCPFKVVDNKGQRKDVKLDKPLTNMLEVVSHPHPVVPKMEKELVPDQAVISDSTFSLANSPGSESVTKDDALSFVPSQKEKGTATPELHTATDYRDGPDGNSNEPDTRPLEDRAVGLSTSSTAAELQHGMGNTSLTGLGGEHEGPAPPAIPEALNIKGNTDSSLQSVGKATLALDSVLTEEGKLLVVSESSAAQEQDKDKAVTCSSIKENALSSGTLQEEQRTPPPGQDTQQFHEKSISADCAKDKALQLSNSPGASSAFLKAETEHNKEVAPQVSLLTQGGAAQSLVPPGASLATESRQEALGAEHNSSALLPCLLPDGSDGSDALNCSQPSPLDVGVKNTQSQGKTSACEVSGDVTVDVTGVNALQGMAEPRRENISHNTQDILIPNVLLSQEKNAVLGLPVALQDKAVTDPQGVGTPEMIPLDWEKGKLEGADHSCTMGDAEEAQIDDEAHPVLLQPVAKELPTDMELSAHDDGAPAGVREVMRAPPSGRERSTPSLPCMVSAQDAPLPKGADLIEEAASRIVDAVIEQVKAAGALLTEGEACHMSLSSPELGPLTKGLESAFTEKVSTFPPGESLPMGSTPEEATGSLAGCFAGREEPEKIILPVQGPEPAAEMPDVKAEDEVDFRASSISEEVAVGSIAATLKMKQGPMTQAINRENWCTIEPCPDAASLLASKQSPECENFLDVGLGRECTSKQGVLKRESGSDSDLFHSPSDDMDSIIFPKPEEEHLACDITGSSSSTDDTASLDRHSSHGSDVSLSQILKPNRSRDRQSLDGFYSHGMGAEGRESESEPADPGDVEEEEMDSITEVPANCSVLRSSMRSLSPFRRHSWGPGKNAASDAEMNHRSSMRVLGDVVRRPPIHRRSFSLEGLTGGAGVGNKPSSSLEVSSANAEELRHPFSGEERVDSLVSLSEEDLESDQREHRMFDQQICHRSKQQGFNYCTSAISSPLTKSISLMTISHPGLDNSRPFHSTFHNTSANLTESITEENYNFLPHSPSKKDSEWKSGTKVSRTFSYIKNKMSSSKKSKEKEKEKDKIKEKEKDSKDKEKDKKTVNGHTFSSIPVVGPISCSQCMKPFTNKDAYTCANCSAFVHKGCRESLASCAKVKMKQPKGSLQAHDTSSLPTVIMRNKPSQPKERPRSAVLLVDETATTPIFANRRSQQSVSLSKSVSIQNITGVGNDENMSNTWKFLSHSTDSLNKISKVNESTESLTDEGVGTDMNEGQLLGDFEIESKQLEAESWSRIIDSKFLKQQKKDVVKRQEVIYELMQTEFHHVRTLKIMSGVYSQGMMADLLFEQQMVEKLFPCLDELISIHSQFFQRILERKKESLVDKSEKNFLIKRIGDVLVNQFSGENAERLKKTYGKFCGQHNQSVNYFKDLYAKDKRFQAFVKKKMSSSVVRRLGIPECILLVTQRITKYPVLFQRILQCTKDNEVEQEDLAQSLSLVKDVIGAVDSKVASYEKKVRLNEIYTKTDSKSIMRMKSGQMFAKEDLKRKKLVRDGSVFLKNAAGRLKEVQAVLLTDILVFLQEKDQKYIFASLDQKSTVISLKKLIVREVAHEEKGLFLISMGMTDPEMVEVHASSKEERNSWIQIIQDTINTLNRDEDEGIPSENEEEKKMLDTRARELKEQLHQKDQKILLLLEEKEMIFRDMAECSTPLPEDCSPTHSPRVLFRSNTEEALKGGPLMKSAINEVEILQGLVSGNLGGTLGPTVSSPIEQDVVGPVSLPRRAETFGGFDSHQMNASKGGEKEEGDDGQDLRRTESDSGLKKGGNANLVFMLKRNSEQVVQSVVHLYELLSALQGVVLQQDSYIEDQKLVLSERALTRSLSRPSSLIEQEKQRSLEKQRQDLANLQKQQAQYLEEKRRREREWEARERELREREALLAQREEEVQQGQQDLEKEREELQQKKGTYQYDLERLRAAQKQLEREQEQLRREAERLSQRQTERDLCQVSHPHTKLMRIPSFFPSPEEPPSPSAPSIAKSGSLDSELSVSPKRNSISRTHKDKGPFHILSSTSQTNKGPEGQSQAPASTSASTRLFGLTKPKEKKEKKKKNKTSRSQPGDGPASEVSAEGEEIFC

SEQ ID NO: 24338 - protein, 2817 aa, Homo sapiens
  REGION 1..2817: note = ENSP00000354718
MKLNPQQAPLYGDCVVTVLLAEEDKAEDDVVFYLVFLGSTLRHCTSTRKVSSDTLETIAPGHDCCETVKVQLCASKEGLPVFVVAEEDFHFVQDEAYDAAQFLATSAGNQQALNFTRFLDQSGPPSGDVNSLDKKLVLAFRHLKLPTEWNVLGTDQSLHDAGPRETLMHFAVRLGLLRLTWFLLQKPGGRGALSIHNQEGATPVSLALERGYHKLHQLLTEENAGEPDSWSSLSYEIPYGDCSVRHHRELDIYTLTSESDSHHEHPFPGDGCTGPIFKLMNIQQQLMKTNLKQMDSLMPLMMTAQDPSSAPETDGQFLPCAPEPTDPQRLSSSEETESTQCCPGSPVAQTESPCDLSSIVEEENTDRSCRKKNKGVERKGEEVEPAPIVDSGTVSDQDSCLQSLPDCGVKGTEGLSSCGNRNEETGTKSSGMPTDQESLSSGDAVLQRDLVMEPGTAQYSSGGELGGISTTNVSTPDTAGEMEHGLMNPDATVWKNVLQGGESTKERFENSNIGTAGASDVHVTSKPVDKISVPNCAPAASSLDGNKPAESSLAFSNEETSTEKTAETETSRSREESADAPVDQNSVVIPAAAKDKISDGLEPYTLLAAGIGEAMSPSDLALLGLEEDVMPHQNSETNSSHAQSQKGKSSPICSTTGDDKLCADSACQQNTVTSSGDLVAKLCDNIVSESESTTARQPSSQDPPDASHCEDPQAHTVTSDPVRDTQERADFCPFKVVDNKGQRKDVKLDKPLTNMLEVVSHPHPVVPKMEKELVPDQAVISDSTFSLANSPGSESVTKDDALSFVPSQKEKGTATPELHTATDYRDGPDGNSNEPDTRPLEDRAVGLSTSSTAAELQHGMGNTSLTGLGGEHEGPAPPAIPEALNIKGNTDSSLQSVGKATLALDSVLTEEGKLLVVSESSAAQEQDKDKAVTCSSIKENALSSGTLQEEQRTPPPGQDTQQFHEKSISADCAKDKALQLSNSPGASSAFLKAETEHNKEVAPQVSLLTQGGAAQSLVPPGASLATESRQEALGAEHNSSALLPCLLPDGSDGSDALNCSQPSPLDVGVKNTQSQGKTSACEVSGDVTVDVTGVNALQGMAEPRRENISHNTQDILIPNVLLSQEKNAVLGLPVALQDKAVTDPQGVGTPEMIPLDWEKGKLEGADHSCTMGDAEEAQIDDEAHPVLLQPVAKELPTDMELSAHDDGAPAGVREVMRAPPSGRERSTPSLPCMVSAQDAPLPKGADLIEEAASRIVDAVIEQVKAAGALLTEGEACHMSLSSPELGPLTKGLESAFTEKVSTFPPGESLPMGSTPEEATGSLAGCFAGREEPEKIILPVQGPEPAAEMPDVKAEDEVDFRASSISEEVAVGSIAATLKMKQGPMTQAINRENWCTIEPCPDAASLLASKQSPECENFLDVGLGRECTSKQGVLKRESGSDSDLFHSPSDDMDSIIFPKPEEEHLACDITGSSSSTDDTASLDRHSSHGSDVSLSQILKPNRSRDRQSLDGFYSHGMGAEGRESESEPADPGDVEEEEMDSITEVPANCSVLRSSMRSLSPFRRHSWGPGKNAASDAEMNHRSMSWCPSGVQYSAGLSADFNYRSFSLEGLTGGAGVGNKPSSSLEVSSANAEELRHPFSGEERVDSLVSLSEEDLESDQREHRMFDQQICHRSKQQGFNYCTSAISSPLTKSISLMTISHPGLDNSRPFHSTFHNTSANLTESITEENYNFLPHSPSKKDSEWKSGTKVSRTFSYIKNKMSSSKKSKEKEKEKDKIKEKEKDSKDKEKDKKTVNGHTFSSIPVVGPISCSQCMKPFTNKDAYTCANCSAFVHKGCRESLASCAKVKMKQPKGSLQAHDTSSLPTVIMRNKPSQPKERPRSAVLLVDETATTPIFANRRSQQSVSLSKSVSIQNITGVGNDENMSNTWKFLSHSTDSLNKISKVNESTESLTDEGVGTDMNEGQLLGDFEIESKQLEAESWSRIIDSKFLKQQKKDVVKRQEVIYELMQTEFHHVRTLKIMSGVYSQGMMADLLFEQQMVEKLFPCLDELISIHSQFFQRILERKKESLVDKSEKNFLIKRIGDVLVNQFSGENAERLKKTYGKFCGQHNQSVNYFKDLYAKDKRFQAFVKKKMSSSVVRRLGIPECILLVTQRITKYPVLFQRILQCTKDNEVEQEDLAQSLSLVKDVIGAVDSKVASYEKKVRLNEIYTKTDSKSIMRMKSGQMFAKEDLKRKKLVRDGSVFLKNAAGRLKEVQAVLLTDILVFLQEKDQKYIFASLDQKSTVISLKKLIVREVAHEEKGLFLISMGMTDPEMVEVHASSKEERNSWIQIIQDTINTLNRDEDEGIPSENEEEKKMLDTRARELKEQLHQKDQKILLLLEEKEMIFRDMAECSTPLPEDCSPTHSPRVLFRSNTEEALKGGPLMKSAINEVEILQGLVSGNLGGTLGPTVSSPIEQDVVGPVSLPRRAETFGGFDSHQMNASKGGEKEEGDDGQDLRRTESDSGLKKGGNANLVFMLKRNSEQVVQSVVHLYELLSALQGVVLQQDSYIEDQKLVLSERALTRSLSRPSSLIEQEKQRSLEKQRQDLANLQKQQAQYLEEKRRREREWEARERELREREALLAQREEEVQQGQQDLEKEREELQQKKGTYQYDLERLRAAQKQLEREQEQLRREAERLSQRQTERDLCQVSHPHTKLMRIPSFFPSPEEPPSPSAPSIAKSGSLDSELSVSPKRNSISRTHKDKGPFHILSSTSQTNKGPEGQSQAPASTSASTRLFGLTKPKEKKEKKKKNKTSRSQPGDGPASEVSAEGEEIFC

SEQ ID NO: 24339 - protein, 38 aa, Homo sapiens
  REGION 1..38: note = ENSP00000453620
MKLNPQQAPLYGDCVVTVLLAEEDKAEDDVVFYLVFLG

SEQ ID NO: 24340 - protein, 93 aa, Homo sapiens
  REGION 1..93: note = ENSP00000452622
MNIQQQLMKTNLKQMDSLMPLMMTAQDPSSAPETDGQFLPCAPEPTDPQRLSSSEETESTQCCPGSPVAQTESPCDLSSIVEEENTDRSCRKK

SEQ ID NO: 24341 - protein, 146 aa, Homo sapiens
  REGION 1..146: note = ENSP00000452698
MGLRYSGCLGSHVENAGEPDSWSSLSYEIPYGDCSVRHHRELDIYTLTSESDSHHEHPFPGDGCTGPIFKLMNIQQQLMKTNLKQMDSLMPLMMTAQDPSSAPETDGQFLPCAPEPTDPQRLSSSEETESTQCCPGSPVAQTESPC

SEQ ID NO: 24342 - protein, 98 aa, Homo sapiens
  REGION 1..98: note = ENSP00000483091
MPDVKAEDEVDFRASSISEEVAVGSIAATLKMKQGPMTQAINRENWCTIEPCPDAASLLASKQSPECENFLDVGLGRECTSKQGVLKRESGSDSDLFH

SEQ ID NO: 24343 - protein, 967 aa, Homo sapiens
  REGION 1..967: note = ENSP00000481485
MYERHKRRYSLCDISKVDRTVDVVLLKINRENWCTIEPCPDAASLLASKQSPECENFLDVGLGRECTSKQGVLKRESGSDSDLFHSPSDDMDSIIFPKPEEEHLACDITGSSSSTDDTASLDRHSSHGSDVSLSQILKPNRSRDRQSLDGFYSHGMGAEGRESESEPADPGDVEEEEMDSITEVPANCSVLRSSMRSLSPFRRHSWGPGKNAASDAEMNHRSFSLEGLTGGAGVGNKPSSSLEVSSANAEELRHPFSGEERVDSLVSLSEEDLESDQREHRMFDQQICHRSKQQGFNYCTSAISSPLTKSISLMTISHPGLDNSRPFHSTFHNTSANLTESITEENYNFLPHSPSKKDSEWKSGTKVSRTFSYIKNKMSSSKKSKEKEKEKDKIKEKEKDSKDKEKDKKTVNGHTFSSIPVVGPISCSQCMKPFTNKDAYTCANCSAFVHKGCRESLASCAKVKMKPKGSLQAHDTSSLPTVIMRNKPSQPKERPRSAVLLVDETATTPIFANRRSQQSVSLSKSVSIQNITGVGNDENMSNTWKFLSHSTDSLNKISKVNESTESLTDEGVGTDMNEGQLLGDFEIESKQLEAESWSRIIDSKFLKQQKKDVVKRQEVIYELMQTEFHHVRTLKIMSGVYSQGMMADLLFEQQMVEKLFPCLDELISIHSQFFQRILERKKESLVDKSEKNFLIKRIGDVLVNQFSGENAERLKKTYGKFCGQHNQSVNYFKDLYAKDKRFQAFVKKKMSSSVVRRLGIPECILLVTQRITKYPVLFQRILQCTKDNEVEQEDLAQSLSLVKDVIGAVDSKVASYEKKVRLNEIYTKTDSKSIMRMKSGQMFAKEDLKRKKLVRDGSVFLKNAAGRLKEVQAVLLTDILVFLQEKDQKYIFASLDQKSTVISLKKLIVREVAHEEKGLFLISMGMTDPEMVEVHASSKEERNSWIQIIQDTINTLNRDEDEGIPSE

SEQ ID NO: 24344 - protein, 1429 aa, Homo sapiens
  REGION 1..1429: note = ENSP00000477780
MLYINRENWCTIEPCPDAASLLASKQSPECENFLDVGLGRECTSKQGVLKRESGSDSDLFHSPSDDMDSIIFPKPEEEHLACDITGSSSSTDDTASLDRHSSHGSDVSLSQILKPNRSRDRQSLDGFYSHGMGAEGRESESEPADPGDVEEEEMDSITEVPANCSVLRSSMRSLSPFRRHSWGPGKNAASDAEMNHRSSMRVLGDVVRRPPIHRRSFSLEGLTGGAGVGNKPSSSLEVSSANAEELRHPFSGEERVDSLVSLSEEDLESDQREHRMFDQQICHRSKQQGFNYCTSAISSPLTKSISLMTISHPGLDNSRPFHSTFHNTSANLTESITEENYNFLPHSPSKKDSEWKSGTKVSRTFSYIKNKMSSSKKSKEKEKEKDKIKEKEKDSKDKEKDKKTVNGHTFSSIPVVGPISCSQCMKPFTNKDAYTCANCSAFVHKGCRESLASCAKVKMKQPKGSLQAHDTSSLPTVIMRNKPSQPKERPRSAVLLVDETATTPIFANRRSQQSVSLSKSVSIQNITGVGNDENMSNTWKFLSHSTDSLNKISKVNESTESLTDEGVGTDMNEGQLLGDFEIESKQLEAESWSRIIDSKFLKQQKKDVVKRQEVIYELMQTEFHHVRTLKIMSGVYSQGMMADLLFEQQMVEKLFPCLDELISIHSQFFQRILERKKESLVDKSEKNFLIKRIGDVLVNQFSGENAERLKKTYGKFCGQHNQSVNYFKDLYAKDKRFQAFVKKKMSSSVVRRLGIPECILLVTQRITKYPVLFQRILQCTKDNEVEQEDLAQSLSLVKDVIGAVDSKVASYEKKVRLNEIYTKTDSKSIMRMKSGQMFAKEDLKRKKLVRDGSVFLKNAAGRLKEVQAVLLTDILVFLQEKDQKYIFASLDQKSTVISLKKLIVREVAHEEKGLFLISMGMTDPEMVEVHASSKEERNSWIQIIQDTINTLNRDEDEGIPSENEEEKKMLDTRARELKEQLHQKDQKILLLLEEKEMIFRDMAECSTPLPEDCSPTHSPRVLFRSNTEEALKGGPLMKSAINEVEILQGLVSGNLGGTLGPTVSSPIEQDVVGPVSLPRRAETFGGFDSHQMNASKGGEKEEGDDGQDLRRTESDSGLKKGGNANLVFMLKRNSEQVVQSVVHLYELLSALQGVVLQQDSYIEDQKLVLSERALTRSLSRPSSLIEQEKQRSLEKQRQDLANLQKQQAQYLEEKRRREREWEARERELREREALLAQREEEVQQGQQDLEKEREELQQKKGTYQYDLERLRAAQKQLEREQEQLRREAERLSQRQTERDLCQVSHPHTKLMRIPSFFPSPEEPPSPSAPSIAKSGSLDSELSVSPKRNSISRTHKDKGPFHILSSTSQTNKGPEGQSQAPASTSASTRLFGLTKPKEKKEKKKKNKTSRSQPGDGPASEVSAEGEEIFC

SEQ ID NO: 24345 - protein, 275 aa, Homo sapiens
  REGION 1..275: note = ENSP00000453205
PSDDMDSIIFPKPEEEHLACDITGSSSSTDDTASLDRHSSHGSDVSLSQILKPNRSRDRQSLDGFYSHGMGAEGRESESEPADPGDVEEEEMDSITEVPANCSVLRSSMRSLSPFRRHSWGPGKNAASDAEMNHRSSMRVLGDVVRRPPIHRRSMSWCPSGVQYSAGLSADFNYRSFSLEGLTGGAGVGNKPSSSLEVSSANAEELRHPFSGEERVDSLVSLSEEDLESDQREHRMFDQQICHRSKQQGFNYCTSAISSPLTKSISLMTISHPGL

SEQ ID NO: 24346 - protein, 66 aa, Homo sapiens
  REGION 1..66: note = ENSP00000482058
MSSSKKSKEKEKEKDKIKEKEKDSKDKEKDKKTVNGHTFSSIPVVGPISCSQCMKPFTNKDAYTCA

SEQ ID NO: 24347 - protein, 166 aa, Homo sapiens
  REGION 1..166: note = ENSP00000480789
MSIKWARFHEVPHITVRFIGPKHGEEKEKEKDKIKEKEKDSKDKEKDKKTVNGHTFSSIPVVGPISCSQCMKPFTNKDAYTCANCSAFVHKGCRESLASCAKVKMKQPKGSLQAHDTSSLPTVIMRNKPSQPKERPRSAVLLVDETATTPIFANRRSQQSVSLSKS

SEQ ID NO: 24348 - protein, 1434 aa, Homo sapiens
  REGION 1..1434: note = ENSP00000378018
MYERHKRRYSLCDISKVDRTVDVVLLKINRENWCTIEPCPDAASLLASKQSPECENFLDVGLGRECTSKQGVLKRESGSDSDLFHSPSDDMDSIIFPKPEEEHLACDITGSSSSTDDTASLDRHSSHGSDVSLSQILKPNRSRDRQSLDGFYSHGMGAEGRESESEPADPGDVEEEEMDSITEVPANCSVLRSSMRSLSPFRRHSWGPGKNAASDAEMNHRSFSLEGLTGGAGVGNKPSSSLEVSSANAEELRHPFSGEERVDSLVSLSEEDLESDQREHRMFDQQICHRSKQQGFNYCTSAISSPLTKSISLMTISHPGLDNSRPFHSTFHNTSANLTESITEENYNFLPHSPSKKDSEWKSGTKVSRTFSYIKNKMSSSKKSKEKEKEKDKIKEKEKDSKDKEKDKKTVNGHTFSSIPVVGPISCSQCMKPFTNKDAYTCANCSAFVHKGCRESLASCAKVKMKPKGSLQAHDTSSLPTVIMRNKPSQPKERPRSAVLLVDETATTPIFANRRSQQSVSLSKSVSIQNITGVGNDENMSNTWKFLSHSTDSLNKISKVNESTESLTDEGVGTDMNEGQLLGDFEIESKQLEAESWSRIIDSKFLKQQKKDVVKRQEVIYELMQTEFHHVRTLKIMSGVYSQGMMADLLFEQQMVEKLFPCLDELISIHSQFFQRILERKKESLVDKSEKNFLIKRIGDVLVNQFSGENAERLKKTYGKFCGQHNQSVNYFKDLYAKDKRFQAFVKKKMSSSVVRRLGIPECILLVTQRITKYPVLFQRILQCTKDNEVEQEDLAQSLSLVKDVIGAVDSKVASYEKKVRLNEIYTKTDSKSIMRMKSGQMFAKEDLKRKKLVRDGSVFLKNAAGRLKEVQAVLLTDILVFLQEKDQKYIFASLDQKSTVISLKKLIVREVAHEEKGLFLISMGMTDPEMVEVHASSKEERNSWIQIIQDTINTLNRDEDEGIPSENEEEKKMLDTRARELKEQLHQKDQKILLLLEEKEMIFRDMAECSTPLPEDCSPTHSPRVLFRSNTEEALKGGPLMKSAINEVEILQGLVSGNLGGTLGPTVSSPIEQDVVGPVSLPRRAETFGGFDSHQMNASKGGEKEEGDDGQDLRRTESDSGLKKGGNANLVFMLKRNSEQVVQSVVHLYELLSALQGVVLQQDSYIEDQKLVLSERALTRSLSRPSSLIEQEKQRSLEKQRQDLANLQKQQAQYLEEKRRREREWEARERELREREALLAQREEEVQQGQQDLEKEREELQQKKGTYQYDLERLRAAQKQLEREQEQLRREAERLSQRQTERDLCQVSHPHTKLMRIPSFFPSPEEPPSPSAPSIAKSGSLDSELSVSPKRNSISRTHKDKGPFHILSSTSQTNKGPEGQSQAPASTSASTRLFGLTKPKEKKEKKKKNKTSRSQPGDGPASEVSAEGEEIFC

SEQ ID NO: 24349 - protein, 1439 aa, Homo sapiens
  REGION 1..1439: note = ENSP00000363201
MASSETEIRWAEPGLGKGPQRRRWAWAEDKRDVDRSSSQSWEEERLFPNATSPELLEDFRLAQQHLPPLEWDPHPQPDGHQDSESGETSGEEAEAEDVDSPASSHEPLAWLPQQGRQLDMTEEEPDGTLGSLEVEEAGESSSRLGYEAGLSLEGHGNTSPMALGHGQARGWVASGEQASGDKLSEHSEVNPSVELSPARSWSSGTVSLDHPSDSLDSTWEGETDGPQPTALAETLPEGPSHHLLSPDGRTGGSVARATPMEFQDSSAPPAQSPQHATDRWRRETTRFFCPQPKEHIWKQTKTSPKPLPSRFIGSISPLNPQPRPTRQGRPLPRQGATLAGRSSSNAPKYGRGQLNYPLPDFSKVGPRVRFPKDESYRPPKSRSHNRKPQAPARPLIFKSPAEIVQEVLLSSGEAALAKDTPPAHPITRVPQEFQTPEQATELVHQLQEDYHRLLTKYAEAENTIDQLRLGAKVNLFSDPPQPNHSIHTGMVPQGTKVLSFTIPQPRSAEWWPGPAEDPQASAASGWPSARGDLSPSSLTSMPTLGWLPENRDISEDQSSAEQTQALASQASQFLAKVESFERLIQAGRLMPQDQVKGFQRLKAAHAALEEEYLKACREQHPAQPLAGSKGTPGRFDPRRELEAEIYRLGSCLEELKEHIDQTQQEPEPPGSDSALDSTPALPCLHQPTHLPAPSGQAPMPAIKTSCPEPATTTAAASTGPCPLHVNVEVSSGNSEVEDRPQDPLARLRHKELQMEQVYHGLMERYLSVKSLPEAMRMEEEEEGEEEEEEEGGGDSLEVDGVAATPGKAEATRVLPRQCPVQAEKSHGAPLEEATEKMVSMKPPGFQASLARDGHMSGLGKAEAAPPGPGVPPHPPGTKSAASHQSSMTSLEGSGISERLPQKPLHRGGGPHLEETWMASPETDSGFVGSETSRVSPLTQTPEHRLSHISTAGTLAQPFAASVPRDGASYPKARGSLIPRRATEPSTPRSQAQRYLSSPSGPLRQRAPNFSLERTLAAEMAVPGSEFEGHKRISEQPLPNKTISPPPAPAPAAAPLPCGPTETIPSFLLTRAGRDQAICELQEEVSRLRLRLEDSLHQPLQGSPTRPASAFDRPARTRGRPADSPATWGSHYGSKSTERLPGEPRGEEQIVPPGRQRARSSSVPREVLRLSLSSESELPSLPLFSEKSKTTKDSPQAARDGKRGVGSAGWPDRVTFRGQYTGHEYHVLSPKAVPKGNGTVSCPHCRPIRTQDAGGAVTGDPLGPPPADTLQCPLCGQVGSPPEADGPGSATSGAEKATTRRKASSTPSPKQRSKQAGSSPRPPPGLWYLATAPPAPAPPAFAYISSVPIMPYPPAAVYYAPAGPTSAQPAAKWPPTASPPPARRHRHSIQLDLGDLEELNKALSRAVQAAESVRSTTRQMRSSLSADLRQAHSLRGSCLF

SEQ ID NO: 24350 - protein, 899 aa, Homo sapiens
  REGION 1..899: note = ENSP00000223791
MPTLGWLPENRDISEDQSSAEQTQALASQASQFLAKVESFERLIQAGRLMPQDQVKGFQRLKAAHAALEEEYLKACREQHPAQPLAGSKGTPGRFDPRRELEAEIYRLGSCLEELKEHIDQTQQEPEPPGSDSALDSTPALPCLHQPTHLPAPSGQAPMPAIKTSCPEPATTTAAASTGPCPLHVNVEVSSGNSEVEDRPQDPLARLRHKELQMEQVYHGLMERYLSVKSLPEAMRMEEEEEGEEEEEEEGGGDSLEVDGVAATPGKAEATRVLPRQCPVQAEKSHGAPLEEATEKMVSMKPPGFQASLARDGHMSGLGKAEAAPPGPGVPPHPPGTKSAASHQSSMTSLEGSGISERLPQKPLHRGGGPHLEETWMASPETDSGFVGSETSRVSPLTQTPEHRLSHISTAGTLAQPFAASVPRDGASYPKARGSLIPRRATEPSTPRSQAQRYLSSPSGPLRQRAPNFSLERTLAAEMAVPGSEFEGHKRISEQPLPNKTISPPPAPAPAAAPLPCGPTETIPSFLLTRAGRDQAICELQEEVSRLRLRLEDSLHQPLQGSPTRPASAFDRPARTRGRPADSPATWGSHYGSKSTERLPGEPRGEEQIVPPGRQRARSSSVPREVLRLSLSSESELPSLPLFSEKSKTTKDSPQAARDGKRGVGSAGWPDRVTFRGQYTGHEYHVLSPKAVPKGNGTVSCPHCRPIRTQDAGGAVTGDPLGPPPADTLQCPLCGQVGSPPEADGPGSATSGAEKATTRRKASSTPSPKQRSKQAGSSPRPPPGLWYLATAPPAPAPPAFAYISSVPIMPYPPAAVYYAPAGPTSAQPAAKWPPTASPPPARRHRHSIQLDLGDLEELNKALSRAVQAAESVRSTTRQMRSSLSADLRQAHSLRGSCLF

SEQ ID NO: 24351 - protein, 1358 aa, Homo sapiens
  REGION 1..1358: note = ENSP00000363188
MLRSEWPVFPEAEAEDVDSPASSHEPLAWLPQQGRQLDMTEEEPDGTLGSLEVEEAGESSSRLGYEAGLSLEGHGNTSPMALGHGQARGWVASGEQASGDKLSEHSEVNPSVELSPARSWSSGTVSLDHPSDSLDSTWEGETDGPQPTALAETLPEGPSHHLLSPDGRTGGSVARATPMEFQDSSAPPAQSPQHATDRWRRETTRFFCPQPKEHIWKQTKTSPKPLPSRFIGSISPLNPQPRPTRQGRPLPRQGATLAGRSSSNAPKYGRGQLNYPLPDFSKVGPRVRFPKDESYRPPKSRSHNRKPQAPARPLIFKSPAEIVQEVLLSSGEAALAKDTPPAHPITRVPQEFQTPEQATELVHQLQEDYHRLLTKYAEAENTIDQLRLGAKVNLFSDPPQPNHSIHTGMVPQGTKVLSFTIPQPRSAEWWPGPAEDPQASAASGWPSARGDLSPSSLTSMPTLGWLPENRDISEDQSSAEQTQALASQASQFLAKVESFERLIQAGRLMPQDQVKGFQRLKAAHAALEEEYLKACREQHPAQPLAGSKGTPGRFDPRRELEAEIYRLGSCLEELKEHIDQTQQEPEPPGSDSALDSTPALPCLHQPTHLPAPSGQAPMPAIKTSCPEPATTTAAASTGPCPLHVNVEVSSGNSEVEDRPQDPLARLRHKELQMEQVYHGLMERYLSVKSLPEAMRMEEEEEGEEEEEEEGGGDSLEVDGVAATPGKAEATRVLPRQCPVQAEKSHGAPLEEATEKMVSMKPPGFQASLARDGHMSGLGKAEAAPPGPGVPPHPPGTKSAASHQSSMTSLEGSGISERLPQKPLHRGGGPHLEETWMASPETDSGFVGSETSRVSPLTQTPEHRLSHISTAGTLAQPFAASVPRDGASYPKARGSLIPRRATEPSTPRSQAQRYLSSPSGPLRQRAPNFSLERTLAAEMAVPGSEFEGHKRISEQPLPNKTISPPPAPAPAAAPLPCGPTETIPSFLLTRAGRDQAICELQEEVSRLRLRLEDSLHQPLQGSPTRPASAFDRPARTRGRPADSPATWGSHYGSKSTERLPGEPRGEEQIVPPGRQRARSSSVPREVLRLSLSSESELPSLPLFSEKSKTTKDSPQAARDGKRGVGSAGWPDRVTFRGQYTGHEYHVLSPKAVPKGNGTVSCPHCRPIRTQDAGGAVTGDPLGPPPADTLQCPLCGQVGSPPEADGPGSATSGAEKATTRRKASSTPSPKQRSKQAGSSPRPPPGLWYLATAPPAPAPPAFAYISSVPIMPYPPAAVYYAPAGPTSAQPAAKWPPTASPPPARRHRHSIQLDLGDLEELNKALSRAVQAAESVRSTTRQMRSSLSADLRQAHSLRGSCLF

SEQ ID NO: 24352 - protein, 831 aa, Homo sapiens
  REGION 1..831: note = ENSP00000309222
MASSETEIRWAEPGLGKGPQRRRWAWAEDKRDVDRSSSQSWEEERLFPNATSPELLEDFRLAQQHLPPLEWDPHPQPDGHQDSESGETSGEEAEAEDVDSPASSHEPLAWLPQQGRQLDMTEEEPDGTLGSLEVEEAGESSSRLGYEAGLSLEGHGNTSPMALGHGQARGWVASGEQASGDKLSEHSEVNPSVELSPARSWSSGTVSLDHPSDSLDSTWEGETDGPQPTALAETLPEGPSHHLLSPDGRTGGSVARATPMEFQDSSAPPAQSPQHATDRWRRETTRFFCPQPKEHIWKQTKTSPKPLPSRFIGSISPLNPQPRPTRQGRPLPRQGATLAGRSSSNAPKYGRGQLNYPLPDFSKVGPRVRFPKDESYRPPKSRSHNRKPQAPARPLIFKSPAEIVQEVLLSSGEAALAKDTPPAHPITRVPQEFQTPEQATELVHQLQEDYHRLLTKYAEAENTIDQLRLGAKVNLFSDPPQPNHSIHTGMVPQGTKVLSFTIPQPRSAEWWPGPAEDPQASAASGWPSARGDLSPSSLTSMPTLGWLPENRDISEDQSSAEQTQALASQASQFLAKVESFERLIQAGRLMPQDQVKGFQRLKAAHAALEEEYLKACREQHPAQPLAGSKGTPGRFDPRRELEAEIYRLGSCLEELKEHIDQTQQEPEPPGSDSALDSTPALPCLHQPTHLPAPSGQAPMPAIKTSCPEPATTTAAASTGPCPLHVNVEVSSGNSEVEDRPQDPLARLRHKELQMEQVYHGLMERYLSVKSLPEAMRMEEEEEGEEEEEEEGGGDSLEVDGVAATPGKAEATRVLPRQCPVQAEKSHGAPLE

SEQ ID NO: 24353 - protein, 1439 aa, Homo sapiens; identical to SEQ ID NO: 24349
  REGION 1..1439: note = ENSP00000303769

SEQ ID NO: 24354 - protein, 384 aa, Homo sapiens
  REGION 1..384: note = ENSP00000363192
MSAGGGTRGYSPRSPGATSQAICELQEEVSRLRLRLEDSLHQPLQGSPTRPASAFDRPARTRGRPADSPATWGSHYGSKSTERLPGEPRGEEQIVPPGRQRARSSSVPREVLRLSLSSESELPSLPLFSEKSKTTKDSPQAARDGKRGVGSAGWPDRVTFRGQYTGHEYHVLSPKAVPKGNGTVSCPHCRPIRTQDAGGAVTGDPLGPPPADTLQCPLCGQVGSPPEADGPGSATSGAEKATTRRKASSTPSPKQRSKQAGSSPRPPPGLWYLATAPPAPAPPAFAYISSVPIMPYPPAAVYYAPAGPTSAQPAAKWPPTASPPPARRHRHSIQLDLGDLEELNKALSRAVQAAESVRSTTRQMRSSLSADLRQAHSLRGSCLF

SEQ ID NO: 24355 - protein, 323 aa, Homo sapiens
  REGION 1..323: note = ENSP00000370254
MDSKYQCVKLNDGHFMPVLGFGTYAPAEVPKSKALEATKLAIEAGFRHIDSAHLYNNEEQVGLAIRSKIADGSVKREDIFYTSKLWCNSHRPELVRPALERSLKNLQLDYVDLYLIHFPVSVKPGEEVIPKDENGKILFDTVDLCATWEAVEKCKDAGLAKSIGVSNFNRRQLEMILNKPGLKYKPVCNQVECHPYFNQRKLLDFCKSKDIVLVAYSALGSHREEPWVDPNSPVLLEDPVLCALAKKHKRTPALIALRYQLQRGVVVLAKSYNEQRIRQNVQVFEFQLTSEEMKAIDGLNRNVRYLTLDIFAGPPNYPFSDEY

SEQ ID NO: 24356 - protein, 248 aa, Homo sapiens
  REGION 1..248: note = ENSP00000416415
  VARIANT 1: note = Any amino acid
XSKYQCVKLNDGHFMPVLGFGTYAPAEVGLAIRSKIADGSVKREDIFYTSKLWCNSHRPELVRPALERSLKNLQLDYVDLYLIHFPVSVKPGEEVIPKDENGKILFDTVDLCATWEAVEKCKDAGLAKSIGVSNFNRRQLEMILNKPGLKYKPVCNQVECHPYFNQRKLLDFCKSKDIVLVAYSALGSHREEPWVDPNSPVLLEDPVLCALAKKHKRTPALIALRYQLQRGVVVLAKSYNEQRIRQNV

SEQ ID NO: 24357 - protein, 205 aa, Homo sapiens
  REGION 1..205: note = ENSP00000370240
MGVVSLFLCIVEQIFTSSKKIQFRGIFMAKVPKSKALEATKLAIEAGFRHIDSAHLYNNEEQVGLAIRSKIADGSVKREDIFYTSKLWCNSHRPELVRPALERSLKNLQLDYVDLYLIHFPVSVKPGEEVIPKDENGKILFDTVDLCATWEAVEKCKDAGLAKSIGVSNFNRRQLEMILNKPGLKYKPVCNQPRDNSIFSLSPDW

SEQ ID NO: 24358 - protein, 323 aa, Homo sapiens
  REGION 1..323: note = ENSP00000370129
MDSKYQCVKLNDGHFMPVLGFGTYAPAEVPKSKALEAVKLAIEAGFHHIDSAHVYNNEEQVGLAIRSKIADGSVKREDIFYTSKLWSNSHRPELVRPALERSLKNLQLDYVDLYLIHFPVSVKPGEEVIPKDENGKILFDTVDLCATWEAMEKCKDAGLAKSIGVSNFNHRLLEMILNKPGLKYKPVCNQVECHPYFNQRKLLDFCKSKDIVLVAYSALGSHREEPWVDPNSPVLLEDPVLCALAKKHKRTPALIALRYQLQRGVVVLAKSYNEQRIRQNVQVFEFQLTSEEMKAIDGLNRNVRYLTLDIFAGPPNYPFSDEY

SEQ ID NO: 24359 - protein, 297 aa, Homo sapiens
  REGION 1..297: note = ENSP00000392694
MDSKYQCVKLNDGHFMPVLGFGTYAPAEVPKSKALEAVKLAIEAGFHHIDSAHVYNNEEQVGLAIRSKIADGSVKREDIFYTSKLWSNSHRPELVRPALERSLKNLQLDYVDLYLIHFPVSVKAMEKCKDAGLAKSIGVSNFNHRLLEMILNKPGLKYKPVCNQVECHPYFNQRKLLDFCKSKDIVLVAYSALGSHREEPWVDPNSPVLLEDPVLCALAKKHKRTPALIALRYQLQRGVVVLAKSYNEQRIRQNVQVFEFQLTSEEMKAIDGLNRNVRYLTLDIFAGPPNYPFSDEY

SEQ ID NO: 24360 - protein, 200 aa, Homo sapiens
  REGION 1..200: note = ENSP00000474566
MDSKYQCVKLNDGHFMPVLGFGTYAPAEVPKSKALEAVKLAIEAGFHHIDSAHVYNNEEQVGLAIRSKIADGSVKREDIFYTSKLWSNSHRPELVRPALERSLKNLQLDYVDLYLIHFPVSVKPGEEVIPKDENGKILFDTVDLCATWEAMEKCKDAGLAKSIGVSNFNHRLLEMILNKPGLKYKPVCNQVECHPYFNQR

SEQ ID NO: 24361 - protein, 139 aa, Homo sapiens
  REGION 1..139: note = ENSP00000408440
MDSKYQCVKLNDGHFMPVLGFGTYAPAEVPKSKALEAVKLAIEAGFHHIDSAHVYNNEEQVGLAIRSKIADGSVKREDIFYTSKLWSNSHRPELVRPALERSLKNLQLDYVDLYLIHFPVSVKEDIGILTWKKSPKHNS

SEQ ID NO: 24362 - protein, 155 aa, Homo sapiens
  REGION 1..155: note = ENSP00000474188
MQISQVPRSKALEVTKLAIEAGFRHIDSAHLYNNEEQVGLAIRSKIADGSVKREDIFYTSKLWSTFHRPELVRPALENSLKKAQLDYVDLYLIHSPMSLKPGEELSPTDENGKVIFDIVDLCTTWEAMEKCKDAGLAKSIGVSNFNRRQLEMILN

SEQ ID NO: 24363 - protein, 323 aa, Homo sapiens
  REGION 1..323: note = ENSP00000401327
MDSKHQCLKLNDGHFMPVLGFGTYAPPEVPRSKALEVTKLAIEAGFRHIDSAHLYNNEEQVGLAIRSKIADGSVKREDIFYTSKLWSTFHRPELVRPALENSLKKAQLDYVDLYLIHSPMSLKPGEELSPTDENGKVIFDIVDLCTTWEAMEKCKDAGLAKSIGVSNFNRRQLEMILNKPGLKYKPVCNQVECHPYFNRSKLLDFCKSKDIVLVAYSALGSQRDKRWVDPNSPVLLEDPVLCALAKKHKRTPALIALRYQLQRGVVVLAKSYNEQRIRQNVQVFEFQLTAEDMKAIDGLDRNLHYFNSDSFASHPNYPYSDEY

SEQ ID NO: 24364 - protein, 300 aa, Homo sapiens
  REGION 1..300: note = ENSP00000474882
MQISQVPRSKALEVTKLAIEAGFRHIDSAHLYNNEEQVGLAIRSKIADGSVKREDIFYTSKLWSTFHRPELVRPALENSLKKAQLDYVDLYLIHSPMSLKPGEELSPTDENGKVIFDIVDLCTTWEAMEKCKDAGLAKSIGVSNFNRRQLEMILNKPGLKYKPVCNQVECHPYFNRSKLLDFCKSKDIVLVAYSALGSQRDKRWVDPNSPVLLEDPVLCALAKKHKRTPALIALRYQLQRGVVVLAKSYNEQRIRQNVQVFEFQLTAEDMKAIDGLDRNLHYFNSDSFASHPNYPYSDEY

SEQ ID NO: 24365 - protein, 323 aa, Homo sapiens
  REGION 1..323: note = ENSP00000369927
MDSKHQCVKLNDGHFMPVLGFGTYAPPEVPRSKALEVTKLAIEAGFRHIDSAHLYNNEEQVGLAIRSKIADGSVKREDIFYTSKLWSTFHRPELVRPALENSLKKAQLDYVDLYLIHSPMSLKPGEELSPTDENGKVIFDIVDLCTTWEAMEKCKDAGLAKSIGVSNFNRRQLEMILNKPGLKYKPVCNQVECHPYFNRSKLLDFCKSKDIVLVAYSALGSQRDKRWVDPNSPVLLEDPVLCALAKKHKRTPALIALRYQLQRGVVVLAKSYNEQRIRQNVQVFEFQLTAEDMKAIDGLDRNLHYFNSDSFASHPNYPYSDEY

SEQ ID NO: 24366 - protein, 323 aa, Homo sapiens
  REGION 1..323: note = ENSP00000369814
MDPKYQRVELNDGHFMPVLGFGTYAPPEVPRNRAVEVTKLAIEAGFRHIDSAYLYNNEEQVGLAIRSKIADGSVKREDIFYTSKLWCTFFQPQMVQPALESSLKKLQLDYVDLYLLHFPMALKPGETPLPKDENGKVIFDTVDLSATWEVMEKCKDAGLAKSIGVSNFNCRQLEMILNKPGLKYKPVCNQVECHPYLNQSKLLDFCKSKDIVLVAHSALGTQRHKLWVDPNSPVLLEDPVLCALAKKHKQTPALIALRYQLQRGVVVLAKSYNEQRIRENIQVFEFQLTSEDMKVLDGLNRNYRYVVMDFLMDHPDYPFSDEY

SEQ ID NO: 24367 - protein, 323 aa, Homo sapiens; identical to SEQ ID NO: 24366
  REGION 1..323: note = ENSP00000263126

SEQ ID NO: 24368 - protein, 574 aa, Homo sapiens
  REGION 1..574: note = ENSP00000379501
MRGGEVALGWNKKKRLFCEDFRFKMVTAAMLLQCCPVLARGPTSLLGKVVKTHQFLFGIGRCPILATQGPNCSQIHLKATKAGGDSPSWAKGHCPFMLSELQDGKSKIVQKAAPEVQEDVKAFKTGNYVFSYDQFFRDKIMEKKQDHTYRVFKTVNRWADAYPFAQHFSEASVASKDVSVWCSNDYLGMSRHPQVLQATQETLQRHGAGAGGTRNISGTSKFHVELEQELAELHQKDSALLFSSCFVANDSTLFTLAKILPGCEIYSDAGNHASMIQGIRNSGAAKFVFRHNDPDHLKKLLEKSNPKIPKIVAFETVHSMDGAICPLEELCDVSHQYGALTFVDEVHAVGLYGSRGAGIGERDGIMHKIDIISGTLGKAFGCVGGYIASTRDLVDMVRSYAAGFIFTTSLPPMVLSGALESVRLLKGEEGQALRRAHQRNVKHMRQLLMDRGLPVIPCPSHIIPIRVGNAALNSKLCDLLLSKHGIYVQAINYPTVPRGEELLRLAPSPHHSPQMMEDFVEKLLLAWTAVGLPLQDVSVAACNFCRRPVHFELMSEWERSYFGNMGPQYVTTYA

SEQ ID NO: 24369 - protein, 587 aa, Homo sapiens
  REGION 1..587: note = ENSP00000332369
MVTAAMLLQCCPVLARGPTSLLGKVVKTHQFLFGIGRCPILATQGPNCSQIHLKATKAGGDSPSWAKGHCPFMLSELQDGKSKIVQKAAPEVQEDVKAFKTDLPSSLVSVSLRKPFSGPQEQEQISGKVTHLIQNNMPGNYVFSYDQFFRDKIMEKKQDHTYRVFKTVNRWADAYPFAQHFSEASVASKDVSVWCSNDYLGMSRHPQVLQATQETLQRHGAGAGGTRNISGTSKFHVELEQELAELHQKDSALLFSSCFVANDSTLFTLAKILPGCEIYSDAGNHASMIQGIRNSGAAKFVFRHNDPDHLKKLLEKSNPKIPKIVAFETVHSMDGAICPLEELCDVSHQYGALTFVDEVHAVGLYGSRGAGIGERDGIMHKIDIISGTLGKAFGCVGGYIASTRDLVDMVRSYAAGFIFTTSLPPMVLSGALESVRLLKGEEGQALRRAHQRNVKHMRQLLMDRGLPVIPCPSHIIPIRVGNAALNSKLCDLLLSKHGIYVQAINYPTVPRGEELLRLAPSPHHSPQMMEDFVEKLLLAWTAVGLPLQDVSVAACNFCRRPVHFELMSEWERSYFGNMGPQYVTTYA

SEQ ID NO: 24370 - protein, 550 aa, Homo sapiens
  REGION 1..550: note = ENSP00000337131
MVTAAMLLQCCPVLARGPTSLLGKVVKTHQFLFGIGRCPILATQGPNCSQIHLKATKAGGDSPSWAKGHCPFMLSELQDGKSKIVQKAAPEVQEDVKAFKTGNYVFSYDQFFRDKIMEKKQDHTYRVFKTVNRWADAYPFAQHFSEASVASKDVSVWCSNDYLGMSRHPQVLQATQETLQRHGAGAGGTRNISGTSKFHVELEQELAELHQKDSALLFSSCFVANDSTLFTLAKILPGCEIYSDAGNHASMIQGIRNSGAAKFVFRHNDPDHLKKLLEKSNPKIPKIVAFETVHSMDGAICPLEELCDVSHQYGALTFVDEVHAVGLYGSRGAGIGERDGIMHKIDIISGTLGKAFGCVGGYIASTRDLVDMVRSYAAGFIFTTSLPPMVLSGALESVRLLKGEEGQALRRAHQRNVKHMRQLLMDRGLPVIPCPSHIIPIRVGNAALNSKLCDLLLSKHGIYVQAINYPTVPRGEELLRLAPSPHHSPQMMEDFVEKLLLAWTAVGLPLQDVSVAACNFCRRPVHFELMSEWERSYFGNMGPQYVTTYA

SEQ ID NO: 24371 - protein, 221 aa, Homo sapiens
  REGION 1..221: note = ENSP00000407204
  VARIANT 1: note = Any amino acid
XLSFVRPQCRATDSPSWAKGHCPFMLSELQDGKSKIVQKAAPEVQEDVKAFKTDLPSSLVSVSLRKPFSGPQEQEQISGKVTHLIQNNMPGNYVFSYDQFFRDKIMEKKQDHTYRVFKTVNRWADAYPFAQHFSEASVASKDVSVWCSNDYLGMSRHPQVLQATQETLQRHGAGAGGTRNISGTSKFHVELEQELAELHQKDSALLFSSCFVANDSTLFTL

SEQ ID NO: 24372 - protein, 583 aa, Homo sapiens
  REGION 1..583: note = ENSP00000305988
MESKGASSCRLLFCLLISATVFRPGLGWYTVNSAYGDTIIIPCRLDVPQNLMFGKWKYEKPDGSPVFIAFRSSTKKSVQYDDVPEYKDRLNLSENYTLSISNARISDEKRFVCMLVTEDNVFEAPTIVKVFKQPSKPEIVSKALFLETEQLKKLGDCISEDSYPDGNITWYRNGKVLHPLEGAVVIIFKKEMDPVTQLYTMTSTLEYKTTKADIQMPFTCSVTYYGPSGQKTIHSEQAVFDIYYPTEQVTIQVLPPKNAIKEGDNITLKCLGNGNPPPEEFLFYLPGQPEGIRSSNTYTLTDVRRNATGDYKCSLIDKKSMIASTAITVHYLDLSLNPSGEVTRQIGDALPVSCTISASRNATVVWMKDNIRLRSSPSFSSLHYQDAGNYVCETALQEVEGLKKRESLTLIVEGKPQIKMTKKTDPSGLSKTIICHVEGFPKPAIQWTITGSGSVINQTEESPYINGRYYSKIIISPEENVTLTCTAENQLERTVNSLNVSAISIPEHDEADEISDENREKVNDQAKLIVGIVVGLLLAALVAGVVYWLYMKKSKTASKHVNKDLGNMEENKKLEENNHKTEA

SEQ ID NO: 24373 - protein, 570 aa, Homo sapiens
  REGION 1..570: note = ENSP00000419236
MESKGASSCRLLFCLLISATVFRPGLGWYTVNSAYGDTIIIPCRLDVPQNLMFGKWKYEKPDGSPVFIAFRSSTKKSVQYDDVPEYKDRLNLSENYTLSISNARISDEKRFVCMLVTEDNVFEAPTIVKVFKQPSKPEIVSKALFLETEQLKKLGDCISEDSYPDGNITWYRNGKVLHPLEGAVVIIFKKEMDPVTQLYTMTSTLEYKTTKADIQMPFTCSVTYYGPSGQKTIHSEQAVFDIYYPTEQVTIQVLPPKNAIKEGDNITLKCLGNGNPPPEEFLFYLPGQPEGIRSSNTYTLTDVRRNATGDYKCSLIDKKSMIASTAITVHYLDLSLNPSGEVTRQIGDALPVSCTISASRNATVVWMKDNIRLRSSPSFSSLHYQDAGNYVCETALQEVEGLKKRESLTLIVEGKPQIKMTKKTDPSGLSKTIICHVEGFPKPAIQWTITGSGSVINQTEESPYINGRYYSKIIISPEENVTLTCTAENQLERTVNSLNVSANENREKVNDQAKLIVGIVVGLLLAALVAGVVYWLYMKKSKTASKHVNKDLGNMEENKKLEENNHKTEA

SEQ ID NO: 24374 - protein, 532 aa, Homo sapiens
  REGION 1..532: note = ENSP00000418213
MFGKWKYEKPDGSPVFIAFRSSTKKSVQYDDVPEYKDRLNLSENYTLSISNARISDEKRFVCMLVTEDNVFEAPTIVKVFKQPSKPEIVSKALFLETEQLKKLGDCISEDSYPDGNITWYRNGKVLHPLEGAVVIIFKKEMDPVTQLYTMTSTLEYKTTKADIQMPFTCSVTYYGPSGQKTIHSEQAVFDIYYPTEQVTIQVLPPKNAIKEGDNITLKCLGNGNPPPEEFLFYLPGQPEGIRSSNTYTLTDVRRNATGDYKCSLIDKKSMIASTAITVHYLDLSLNPSGEVTRQIGDALPVSCTISASRNATVVWMKDNIRLRSSPSFSSLHYQDAGNYVCETALQEVEGLKKRESLTLIVEGKPQIKMTKKTDPSGLSKTIICHVEGFPKPAIQWTITGSGSVINQTEESPYINGRYYSKIIISPEENVTLTCTAENQLERTVNSLNVSAISIPEHDEADEISDENREKVNDQAKLIVGIVVGLLLAALVAGVVYWLYMKKSKTASKHVNKDLGNMEENKKLEENNHKTEA

SEQ ID NO: 24375 - protein, 344 aa, Homo sapiens
  REGION 1..344: note = ENSP00000418937
  VARIANT 1: note = Any amino acid
XLGDCISEDSYPDGNITWYRNGKVLHPLEGAVVIIFKKEMDPVTQLYTMTSTLEYKTTKADIQMPFTCSVTYYGPSGQKTIHSEQAVFDIYYLDLSLNPSGEVTRQIGDALPVSCTISASRNATVVWMKDNIRLRSSPSFSSLHYQDAGNYVCETALQEVEGLKKRESLTLIVEGKPQIKMTKKTDPSGLSKTIICHVEGFPKPAIQWTITGSGSVINQTEESPYINGRYYSKIIISPEENVTLTCTAENQLERTVNSLNVSAISIPEHDEADEISDENREKVNDQAKLIVGIVVGLLLAALVAGVVYWLYMKKSKTASKHVNKDLGNMEENKKLEENNHKTEA

SEQ ID NO: 24376 - protein, 501 aa, Homo sapiens
  REGION 1..501: note = ENSP00000297785
MSSSGTPDLPVLLTDLKIQYTKIFINNEWHDSVSGKKFPVFNPATEEELCQVEEGDKEDVDKAVKAARQAFQIGSPWRTMDASERGRLLYKLADLIERDRLLLATMESMNGGKLYSNAYLNDLAGCIKTLRYCAGWADKIQGRTIPIDGNFFTYTRHEPIGVCGQIIPWNFPLVMLIWKIGPALSCGNTVVVKPAEQTPLTALHVASLIKEAGFPPGVVNIVPGYGPTAGAAISSHMDIDKVAFTGSTEVGKLIKEAAGKSNLKRVTLELGGKSPCIVLADADLDNAVEFAHHGVFYHQGQCCIAASRIFVEESIYDEFVRRSVERAKKYILGNPLTPGVTQGPQIDKEQYDKILDLIESGKKEGAKLECGGGPWGNKGYFVQPTVFSNVTDEMRIAKEEIFGPVQQIMKFKSLDDVIKRANNTFYGLSAGVFTKDIDKAITISSALQAGTVWVNCYGVVSAQCPFGGFKMSGNGRELGEYGFHEYTEVKTVTVKISQKNS

SEQ ID NO: 24377 - protein, 230 aa, Homo sapiens
  REGION 1..230: note = ENSP00000366138
MSSSGTPDLPVLLTDLKIQYTKIFINNEWHDSVSGKKFPVFNPATEEELCQVEEGDKEDVDKAVKAARQAFQIGSPWRTMDASERGRLLYKLADLIERDRLLLATMESMNGGKLYSNAYLNDLAGCIKTLRYCAGWADKIQGRTIPIDGNFFTYTRHEPIGVCGQIIPWNFPLVMLIWKIGPALSCGNTVVVKPAEQTPLTALHVASLIKEAGFPPGVVNIVPGYGASVV

SEQ ID NO: 24378 - protein, 238 aa, Homo sapiens
  REGION 1..238: note = ENSP00000388026
MSSSGTPDLPVLLTDLKIQYTKIFINNEWHDSVSGKKFPVFNPATEEELCQVEEGDKEDVDKAVKAARQAFQIGSPWRTMDASERGRLLYKLADLIERDRLLLATMESMNGGKLYSNAYLNDLAGCIKTLRYCAGWADKIQGRTIPIDGNFFTYTRHEPIGVCGQIIPWNFPLVMLIWKIGPALSCGNTVVVKPAEQTPLTALHVASLIKEAGFPPGVVNIVPGYGPTAGAAISSHMD

SEQ ID NO: 24379 - protein, 203 aa, Homo sapiens
  REGION 1..203: note = ENSP00000401361
MSSSGTPDLPVLLTDLKIQYTKIFINNEWHDSVSGKKFPVFNPATEEELCQVEEGDKEDVDKAVKAARQAFQIGSPWRTMDASERGRLLYKLADLIERDRLLLATMESMNGGKLYSNAYLNDLAGCIKTLRYCAGWADKIQGRTIPIDGNFFTYTRHEPIGVCGQIIPWNFPLVMLIWKIGPALSCGNTVVVKPAEQTPLTAL

SEQ ID NO: 24380 - protein, 501 aa, Homo sapiens; identical to SEQ ID NO: 24376
  REGION 1..501: note = ENSP00000297785

SEQ ID NO: 24381 - protein, 230 aa, Homo sapiens; identical to SEQ ID NO: 24377
  REGION 1..230: note = ENSP00000366138

SEQ ID NO: 24382 - protein, 238 aa, Homo sapiens; identical to SEQ ID NO: 24378
  REGION 1..238: note = ENSP00000388026

SEQ ID NO: 24383 - protein, 203 aa, Homo sapiens; identical to SEQ ID NO: 24379
  REGION 1..203: note = ENSP00000401361

SEQ ID NO: 24384 - protein, 144 aa, Homo sapiens
  REGION 1..144: note = ENSP00000452789
MSECEIFINNEWHESKSGKKFATCNPSTREQICEVEEGDKPDVDKAVEAAQVAFQRGSPWRRLDALSRGRLLHQLADLVERDRATLAALETMDTGKPFLHAFFIDLEGCIRTLRYFAGWADKIQGKTIPTDDNVVCFTRHEPIG

SEQ ID NO: 24385 - protein, 512 aa, Homo sapiens
  REGION 1..512: note = ENSP00000332256
MATANGAVENGQPDRKPPALPRPIRNLEVKFTKIFINNEWHESKSGKKFATCNPSTREQICEVEEGDKPDVDKAVEAAQVAFQRGSPWRRLDALSRGRLLHQLADLVERDRATLAALETMDTGKPFLHAFFIDLEGCIRTLRYFAGWADKIQGKTIPTDDNVVCFTRHEPIGVCGAITPWNFPLLMLVWKLAPALCCGNTMVLKPAEQTPLTALYLGSLIKEAGFPPGVVNIVPGFGPTVGAAISSHPQINKIAFTGSTEVGKLVKEAASRSNLKRVTLELGGKNPCIVCADADLDLAVECAHQGVFFNQGQCCTAASRVFVEEQVYSEFVRRSVEYAKKRPVGDPFDVKTEQGPQIDQKQFDKILELIESGKKEGAKLECGGSAMEDKGLFIKPTVFSEVTDNMRIAKEEIFGPVQPILKFKSIEEVIKRANSTDYGLTAAVFTKNLDKALKLASALESGTVWINCYNALYAQAPFGGFKMSGNGRELGEYALAEYTEVKTVTIKLGDKNP

SEQ ID NO: 24386 - protein, 141 aa, Homo sapiens
  REGION 1..141: note = ENSP00000454107
MATANGAVENGQPDRKPPALPRPIRNLEVKFTKIFINNEWHESKSGKKFATCNPSTREQICEVEEGDKPDVDKAVEAAQVAFQRGSPWRRLDALSRGRLLHQLADLVERDRATLAMTTSCASPGMSPLVSVGPSLHGTSPC

SEQ ID NO: 24387 - protein, 102 aa, Homo sapiens
  REGION 1..102: note = ENSP00000453328
MATANGAVENGQPDRKPPALPRPIRNLEVKFTKVRRAPLPPDGRGPLRWAARLGAAGAREQRAGGPPGAAETRASLPGRGSPETAPFAGRLGRDRRRRGSAL

SEQ ID NO: 24388 - protein, 405 aa, Homo sapiens
  REGION 1..405: note = ENSP00000343294
MATANGAVENGQPDRKPPALPRPIRNLEVKFTKIFINNEWHESKSGKKFATCNPSTREQICEVEEGDKPDVDKAVEAAQVAFQRGSPWRRLDALSRGRLLHQLADLVERDRATLAAGFPPGVVNIVPGFGPTVGAAISSHPQINKIAFTGSTEVGKLVKEAASRSNLKRVTLELGGKNPCIVCADADLDLAVECAHQGVFFNQGQCCTAASRVFVEEQVYSEFVRRSVEYAKKRPVGDPFDVKTEQGPQIDQKQFDKILELIESGKKEGAKLECGGSAMEDKGLFIKPTVFSEVTDNMRIAKEEIFGPVQPILKFKSIEEVIKRANSTDYGLTAAVFTKNLDKALKLASALESGTVWINCYNALYAQAPFGGFKMSGNGRELGEYALAEYTEVKTVTIKLGDKNP

SEQ ID NO: 24389 - protein, 912 aa, Homo sapiens
  REGION 1..912: note = ENSP00000273450
MAGPSNPPATMKIAVIGQSLFGQEVYCHLRKEGHEVVGVFTVPDKDGKADPLGLEAEKDGVPVFKYSRWRAKGQALPDVVAKYQALGAELNVLPFCSQFIPMEIISAPRHGSIIYHPSLLPRHRGASAINWTLIHGDKKGGFSIFWADDGLDTGDLLLQKECEVLPDDTVSTLYNRFLFPEGIKGMVQAVRLIAEGKAPRLPQPEEGATYEGIQKKETAKINWDQPAEAIHNWIRGNDKVPGAWTEACEQKLTFFNSTLNTSGLVPEGDALPIPGAHRPGVVTKAGLILFGNDDKMLLVKNIQLEDGKMILASNFFKGAASSVLELTEAELVTAEAVRSVWQRILPKVLEVEDSTDFFKSGAASVDVVRLVEEVKELCDGLELENEDVYMASTFGDFIQLLVRKLRGDDEEGECSIDYVEMAVNKRTVRMPHQLFIGGEFVDAEGAKTSETINPTDGSVICQVSLAQVTDVDKAVAAAKDAFENGRWGKISARDRGRLMYRLADLMEQHQEELATIEALDAGAVYTLALKTHVGMSIQTFRYFAGWCDKIQGSTIPINQARPNRNLTLTRKEPVGVCGIIIPWNYPLMMLSWKTAACLAAGNTVVIKPAQVTPLTALKFAELTLKAGIPKGVVNVLPGSGSLVGQRLSDHPDVRKIGFTGSTEVGKHIMKSCAISNVKKVSLELGGKSPLIIFADCDLNKAVQMGMSSVFFNKGENCIAAGRLFVEDSIHDEFVRRVVEEVRKMKVGNPLDRDTDHGPQNHHAHLVKLMEYCQHGVKEGATLVCGGNQVPRPGFFFEPTVFTDVEDHMFIAKEESFGPVMIISRFADGDLDAVLSRANATEFGLASGVFTRDINKALYVSDKLQAGTVFVNTYNKTDVAAPFGGFKQSGFGKDLGEAALNEYLRVKTVTFEY

SEQ ID NO: 24390 - protein, 902 aa, Homo sapiens
  REGION 1..902: note = ENSP00000420293
MKIAVIGQSLFGQEVYCHLRKEGHEVVGVFTVPDKDGKADPLGLEAEKDGVPVFKYSRWRAKGQALPDVVAKYQALGAELNVLPFCSQFIPMEIISAPRHGSIIYHPSLLPRHRGASAINWTLIHGDKKGGFSIFWADDGLDTGDLLLQKECEVLPDDTVSTLYNRFLFPEGIKGMVQAVRLIAEGKAPRLPQPEEGATYEGIQKKETAKINWDQPAEAIHNWIRGNDKVPGAWTEACEQKLTFFNSTLNTSGLVPEGDALPIPGAHRPGVVTKAGLILFGNDDKMLLVKNIQLEDGKMILASNFFKGAASSVLELTEAELVTAEAVRSVWQRILPKVLEVEDSTDFFKSGAASVDVVRLVEEVKELCDGLELENEDVYMASTFGDFIQLLVRKLRGDDEEGECSIDYVEMAVNKRTVRMPHQLFIGGEFVDAEGAKTSETINPTDGSVICQVSLAQVTDVDKAVAAAKDAFENGRWGKISARDRGRLMYRLADLMEQHQEELATIEALDAGAVYTLALKTHVGMSIQTFRYFAGWCDKIQGSTIPINQARPNRNLTLTRKEPVGVCGIIIPWNYPLMMLSWKTAACLAAGNTVVIKPAQVTPLTALKFAELTLKAGIPKGVVNVLPGSGSLVGQRLSDHPDVRKIGFTGSTEVGKHIMKSCAISNVKKVSLELGGKSPLIIFADCDLNKAVQMGMSSVFFNKGENCIAAGRLFVEDSIHDEFVRRVVEEVRKMKVGNPLDRDTDHGPQNHHAHLVKLMEYCQHGVKEGATLVCGGNQVPRPGFFFEPTVFTDVEDHMFIAKEESFGPVMIISRFADGDLDAVLSRANATEFGLASGVFTRDINKALYVSDKLQAGTVFVNTYNKTDVAAPFGGFKQSGFGKDLGEAALNEYLRVKTVTFEY

SEQ ID NO: 24391 - protein, 801 aa, Homo sapiens
  REGION 1..801: note = ENSP00000395881
MKIAVIGQSLFGQEVYCHLRKEGHEVVGVFTVPDKDGKADPLGLEAEKDGVPVFKYSRWRAKGQALPDVVAKYQALGAELNVLPFCSQFIPMEIISAPRHGSIIYHPSLLPRHRGASAIHNWIRGNDKVPGAWTEACEQKLTFFNSTLNTSGLVPEGDALPIPGAHRPGVVTKAGLILFGNDDKMLLVKNIQLEDGKMILASNFFKGAASSVLELTEAELVTAEAVRSVWQRILPKVLEVEDSTDFFKSGAASVDVVRLVEEVKELCDGLELENEDVYMASTFGDFIQLLVRKLRGDDEEGECSIDYVEMAVNKRTVRMPHQLFIGGEFVDAEGAKTSETINPTDGSVICQVSLAQVTDVDKAVAAAKDAFENGRWGKISARDRGRLMYRLADLMEQHQEELATIEALDAGAVYTLALKTHVGMSIQTFRYFAGWCDKIQGSTIPINQARPNRNLTLTRKEPVGVCGIIIPWNYPLMMLSWKTAACLAAGNTVVIKPAQVTPLTALKFAELTLKAGIPKGVVNVLPGSGSLVGQRLSDHPDVRKIGFTGSTEVGKHIMKSCAISNVKKVSLELGGKSPLIIFADCDLNKAVQMGMSSVFFNKGENCIAAGRLFVEDSIHDEFVRRVVEEVRKMKVGNPLDRDTDHGPQNHHAHLVKLMEYCQHGVKEGATLVCGGNQVPRPGFFFEPTVFTDVEDHMFIAKEESFGPVMIISRFADGDLDAVLSRANATEFGLASGVFTRDINKALYVSDKLQAGTVFVNTYNKTDVAAPFGGFKQSGFGKDLGEAALNEYLRVKTVTFEY

SEQ ID NO: 24392 - protein, 902 aa, Homo sapiens; identical to SEQ ID NO: 24390
  REGION 1..902: note = ENSP00000377083

SEQ ID NO: 24393 - protein, 47 aa, Homo sapiens
  REGION 1..47: note = ENSP00000419448
MKIAVIGQSLFGQEVYCHLRKEGHEVVGVFTVPDKDGKADPLDTRTE

SEQ ID NO: 24394 - protein, 81 aa, Homo sapiens
  REGION 1..81: note = ENSP00000418905
MKIAVIGQSLFGQEVYCHLRKEGHEVVGVFTVPDKDGKADPLGPSFTEIRKGGFPSSGRMMVWTPETCCCRRSVRCSRTTP

SEQ ID NO: 24395 - protein, 177 aa, Homo sapiens
  REGION 1..177: note = ENSP00000418711
MKIAVIGQSLFGQEVYCHLRKEGHEVVGVFTVPDKDGKADPLGLEAEKDGVPVFKYSRWRAKGQALPDVVAKYQALGAELNVLPFCSQFIPMEIISAPRHGSIIYHPSLLPRHRGASAINWTLIHGDKKGGFSIFWADDGLDTGDLLLQKECEVLPDDTVSTLYNRFLFPEGIKGMV

SEQ ID NO: 24396 - protein, 168 aa, Homo sapiens
  REGION 1..168: note = ENSP00000419826
MKIAVIGQSLFGQEVYCHLRKEGHEVVGVFTVPDKDGKADPLGLEAEKDGVPVFKYSRWRAKGQALPDVVAKYQALGAELNVLPFCSQFIPMEIISAPRHGSIIYHPSLLPRHRGASAINWTLIHGDKKGGFSIFWADDGLDTGDLLLQKECEVLPDDTVSTLYNRFL

SEQ ID NO: 24397 - protein, 157 aa, Homo sapiens
  REGION 1..157: note = ENSP00000419955
MKIAVIGQSLFGQEVYCHLRKEGHEVVGVFTVPDKDGKADPLGLEAEKDGVPVFKYSRWRAKGQALPDVVAKYQALGAELNVLPFCSQFIPMEIISAPRHGSIIYHPSLLPRHRGASAINWTLIHGDKKGGFSIFWADDGLDTGDLLLQKECEVLPD

SEQ ID NO: 24398 - protein, 100 aa, Homo sapiens
  REGION 1..100: note = ENSP00000426594
MKIAVIGQSLFGQEVYCHLRKEGHEVVGVFTVPDKDGKADPLGLEAEKDGVPVFKYSRWRAKGQALPDVVAKYQALGAELNVLPFCSQFIPMEIISAPRH

SEQ ID NO: 24399 - protein, 47 aa, Homo sapiens; identical to SEQ ID NO: 24393
  REGION 1..47: note = ENSP00000426713

SEQ ID NO: 24400 - protein, 505 aa, Homo sapiens
  REGION 1..505: note = ENSP00000377081
MKIAVIGQSLFGQEVYCHLRKEGHEVVGVFTVPDKDGKADPLGLEAEKDGVPVFKYSRWRAKGQALPDVVAKYQALGAELNVLPFCSQFIPMEIISAPRHGSIIYHPSLLPRHRGASAINWTLIHGDKKGGFSIFWADDGLDTGDLLLQKECEVLPDDTVSTLYNRFLFPEGIKGMVQAVRLIAEGKAPRLPQPEEGATYEGIQKKETAKINWDQPAEAIHNWIRGNDKVPGAWTEACEQKLTFFNSTLNTSGLVPEGDALPIPGAHRPGVVTKAGLILFGNDDKMLLVKNIQLEDGKMILASNFFKGAASSVLELTEAELVTAEAVRSVWQRILPKVLEVEDSTDFFKSGAASVDVVRLVEEVKELCDGLELENEDVYMASTFGDFIQLLVRKLRGDDEEGECSIDYVEMAVNKRTVRMPHQLFIGGEFVDAEGAKTSETINPTDGSVICQVSLAQVTDVDKAVAAAKDAFENGRWGKISARDRGRLMYRAPPSPSTRPDPTAT

SEQ ID NO: 24401 - protein, 505 aa, Homo sapiens; identical to SEQ ID NO: 24400
  REGION 1..505: note = ENSP00000414126

SEQ ID NO: 24402 - protein, 923 aa, Homo sapiens
  REGION 1..923: note = ENSP00000258494
MLRRGSQALRRFSTGRVYFKNKLKLALIGQSLFGQEVYSHLRKEGHRVVGVFTVPDKDGKADPLALAAEKDGTPVFKLPKWRVKGKTIKEVAEAYRSVGAELNVLPFCTQFIPMDIIDSPKHGSIIYHPSILPRHRGASAINWTLIMGDKKAGFSVFWADDGLDTGPILLQRSCDVEPNDTVDALYNRFLFPEGIKAMVEAVQLIADGKAPRIPQPEEGATYEGIQKKENAEISWDQSAEVLHNWIRGHDKVPGAWTEINGQMVTFYGSTLLNSSVPPGEPLEIKGAKKPGLVTKNGLVLFGNDGKALTVRNLQFEDGKMIPASQYFSTGETSVVELTAEEVKVAETIKVIWAGILSNVPIIEDSTDFFKSGASSMDVARLVEEIRQKCGGLQLQNEDVYMATKFEGFIQKVVRKLRGEDQEVELVVDYISKEVNEIMVKMPYQCFINGQFTDADDGKTYDTINPTDGSTICKVSYASLADVDKAVAAAKDAFENGEWGRMNARERGRLMYRLADLLEENQEELATIEALDSGAVYTLALKTHIGMSVQTFRYFAGWCDKIQGSTIPINQARPNRNLTFTKKEPLGVCAIIIPWNYPLMMLAWKSAACLAAGNTLVLKPAQVTPLTALKFAELSVKAGFPKGVINIIPGSGGIAGQRLSEHPDIRKLGFTGSTPIGKQIMKSCAVSNLKKVSLELGGKSPLIIFNDCELDKAVRMGMGAVFFNKGENCIAAGRLFVEESIHDEFVTRVVEEIKKMKIGDPLDRSTDHGPQNHKAHLEKLLQYCETGVKEGATLVYGGRQVQRPGFFMEPTVFTDVEDYMYLAKEESFGPIMVISKFQNGDIDGVLQRANSTEYGLASGVFTRDINKAMYVSEKLEAGTVFINTYNKTDVAAPFGGVKQSGFGKDLGEEALNEYLKTKTVTLEY

SEQ ID NO: 24403 - protein, 203 aa, Homo sapiens
  REGION 1..203: note = ENSP00000447538
MLRRGSQALRRFSTGRVYFKNKLKLALIGQSLFGQEVYSHLRKEGHRVVGVFTVPDKDGKADPLALAAEKDGTPVFKLPKWRVKGKTIKEVAEAYRSVGAELNVLPFCTQFIPMDIIDSPKHGSIIYHPSILPRHRGASAINWTLIMGDKKAGFSVFWADDGLDTGPILLQRSCDVEPNDTVDALYNRFLFPEGIKAMKLSNS

SEQ ID NO: 24404 - protein, 92 aa, Homo sapiens
  REGION 1..92: note = ENSP00000447464
  VARIANT 1: note = Any amino acid
XVEEIKKMKIGDPLDRSTDHGPQNHKAHLEKLLQYCETGVKEGATLVYGGRQVQRPGFFMEPTVFTDVEDYMYLAKEESFGPIMVISKFQNG

SEQ ID NO: 24405 - protein, 535 aa, Homo sapiens
  REGION 1..535: note = ENSP00000450436
MAALLAAAAVRARILQVSSKVKSSPTWYSASSFSSSVPTVKLFIGGKFVESKSDKWIDIHNPATNEVIGRVPQATKAEMDAAIASCKRAFPAWADTSVLSRQQVLLRYQQLIKENLKEIAKLITLEQGKTLADAEGDVFRGLQVVEHACSVTSLMMGETMPSITKDMDLYSYRLPLGVCAGIAPFNFPAMIPLWMFPMAMVCGNTFLMKPSERVPGATMLLAKLLQDSGAPDGTLNIIHGQHEAVNFICDHPDIKAISFVGSNKAGEYIFERGSRHGKRVQANMGAKNHGVVMPDANKENTLNQLVGAAFGAAGQRCMALSTAVLVGEAKKWLPELVEHAKNLRVNAGDQPGADLGPLITPQAKERVCNLIDSGTKEGASILLDGRKIKVKGYENGNFVGPTIISNVKPNMTCYKEEIFGPVLVVLETETLDEAIQIVNNNPYGNGTAIFTTNGATARKYAHLVDVGQVGVNVPIPVPLPMFSFTGSRSSFRGDTNFYGKQGIQFYTQLKTITSQWKEEDATLSSPAVVMPTMGR

SEQ ID NO: 24406 - protein, 522 aa, Homo sapiens
  REGION 1..522: note = ENSP00000342564
MAALLAAAAVRARILQVSSKVKSSPTWYSASSFSSSVPTVKLFIGGKFVESKSDKWIDIHNPATNEVIGRVPQATKAEMDAAIASCKRAFPAWADTSVLSRQQKEIAKLITLEQGKTLADAEGDVFRGLQVVEHACSVTSLMMGETMPSITKDMDLYSYRLPLGVCAGIAPFNFPAMIPLWMFPMAMVCGNTFLMKPSERVPGATMLLAKLLQDSGAPDGTLNIIHGQHEAVNFICDHPDIKAISFVGSNKAGEYIFERGSRHGKRVQANMGAKNHGVVMPDANKENTLNQLVGAAFGAAGQRCMALSTAVLVGEAKKWLPELVEHAKNLRVNAGDQPGADLGPLITPQAKERVCNLIDSGTKEGASILLDGRKIKVKGYENGNFVGPTIISNVKPNMTCYKEEIFGPVLVVLETETLDEAIQIVNNNPYGNGTAIFTTNGATARKYAHLVDVGQVGVNVPIPVPLPMFSFTGSRSSFRGDTNFYGKQGIQFYTQLKTITSQWKEEDATLSSPAVVMPTMGR

SEQ ID NO: 24407 - protein, 252 aa, Homo sapiens
  REGION 1..252: note = ENSP00000452081
MGAKNHGVVMPDANKENTLNQLVGAAFGAAGQRCMALSTAVLVGEAKKWLPELVEHAKNLRVNAGDQPGADLGPLITPQAKERVCNLIDSGTKEGASILLDGRKIKVKGYENGNFVGPTIISNVKPNMTCYKEEIFGPVLVVLETETLDEAIQIVNNNPYGNGTAIFTTNGATARKYAHLVDVGQVGVNVPIPVPLPMFSFTGSRSSFRGDTNFYGKQGIQFYTQLKTITSQWKEEDATLSSPAVVMPTMGR

SEQ ID NO: 24408 - protein, 336 aa, Homo sapiens
  REGION 1..336: note = ENSP00000378729
MPHSYPALSAEQKKELSDIALRIVAPGKGILAADESVGSMAKRLSQIGVENTEENRRLYRQVLFSADDRVKKCIGGVIFFHETLYQKDDNGVPFVRTIQDKGIVVGIKVDKGVVPLAGTDGETTTQGLDGLSERCAQYKKDGADFAKWRCVLKISERTPSALAILENANVLARYASICQQVLAAVYKALSDHHVYLEGTLLKPNMVTPGHACPIKYTPEEIAMATVTALRRTVPPAVPGVTFLSGGQSEEEASFNLNAINRCPLPRPWALTFSYGRALQASALNAWRGQRDNAGAATEEFIKRAEVNGLAAQGKYEGSGEDGGAAAQSLYIANHAY

SEQ ID NO: 24409 - protein, 364 aa, Homo sapiens
  REGION 1..364: note = ENSP00000378731
MPHSYPALSAEQKKELSDIALRIVAPGKGILAADESVGSMAKRLSQIGVENTEENRRLYRQVLFSADDRVKKCIGGVIFFHETLYQKDDNGVPFVRTIQDKGIVVGIKVDKGVVPLAGTDGETTTQGLDGLSERCAQYKKDGADFAKWRCVLKISERTPSALAILENANVLARYASICQQNGIVPIVEPEILPDGDHDLKRCQYVTEKVLAAVYKALSDHHVYLEGTLLKPNMVTPGHACPIKYTPEEIAMATVTALRRTVPPAVPGVTFLSGGQSEEEASFNLNAINRCPLPRPWALTFSYGRALQASALNAWRGQRDNAGAATEEFIKRAEVNGLAAQGKYEGSGEDGGAAAQSLYIANHAY

SEQ ID NO: 24410 - protein, 364 aa, Homo sapiens; identical to SEQ ID NO: 24409
  REGION 1..364: note = ENSP00000226253

SEQ ID NO: 24411 - protein, 180 aa, Homo sapiens
  REGION 1..180: note = ENSP00000463174
MPHSYPALSAEQKKELSDIALRIVAPGKGILAADESVGSMAKRLSQIGVENTEENRRLYRQVLFSADDRVKKCIGGVIFFHETLYQKDDNGVPFVRTIQDKGIVVGIKVDKGVVPLAGTDGETTTQGLDGLSERCAQYKKDGADFAKWRCVLKISERTPSALAILENANVLARYASICQQ

SEQ ID NO: 24412 - protein, 175 aa, Homo sapiens
  REGION 1..175: note = ENSP00000462674
MPHSYPALSAEQKKELSDIALRIVAPGKGILAADESVGSMAKRLSQIGVENTEENRRLYRQVLFSADDRVKKCIGGVIFFHETLYQKDDNGVPFVRTIQDKGIVVGIKVDKGVVPLAGTDGETTTQGLDGLSERCAQYKKDGADFAKWRCVLKISERTPSALAILENANVLARYA

SEQ ID NO: 24413 - protein, 135 aa, Homo sapiens
  REGION 1..135: note = ENSP00000465623
MAKRLSQIGVENTEENRRLYRQVLFSADDRVKKCIGGVIFFHETLYQKDDNGVPFVRTIQDKGIVVGIKVDKGVVPLAGTDGETTTQGLDGLSERCAQYKKDGADFAKWRCVLKISERTPSALAILENANVLARY

SEQ ID NO: 24414 - protein, 149 aa, Homo sapiens
  REGION 1..149: note = ENSP00000398976
MPHSYPALSAEQKKELSDIALRIVAPGKGILAADESVGSMAKRLSQIGVENTEENRRLYRQVLFSADDRVKKCIGGVIFFHETLYQKDDNGVPFVRTIQDKGIVVGIKVDKGVVPLAGTDGETTTQGLDGLSERCAQYKKDGADFAKWR

SEQ ID NO: 24415 - protein, 122 aa, Homo sapiens
  REGION 1..122: note = ENSP00000463118
MPHSYPALSAEQKKELSDIALRIVAPGKGILAADESVGSMAKRLSQIGVENTEENRRLYRQVLFSADDRVKKCIGGVIFFHETLYQKDDNGVPFVRTIQDKGIVVGIKVDKGVVPLAGTDGE

SEQ ID NO: 24416 - protein, 552 aa, Homo sapiens
  REGION 1..552: note = ENSP00000493203
MQMELQSPEYKLSKLRTSTIMTDYNPNYCFAGKTSSISDLKEVPRKNITLIRGLGHGAFGEVYEGQVSGMPNDPSPLQVAVKTLPEVCSEQDELDFLMEALIISKFNHQNIVRCIGVSLQSLPRFILLELMAGGDLKSFLRETRPRPSQPSSLAMLDLLHVARDIACGCQYLEENHFIHRDIAARNCLLTCPGPGRVAKIGDFGMARDIYRASYYRKGGCAMLPVKWMPPEAFMEGIFTSKTDTWSFGVLLWEIFSLGYMPYPSKSNQEVLEFVTSGGRMDPPKNCPGPVYRIMTQCWQHQPEDRPNFAIILERIEYCTQDPDVINTALPIEYGPLVEEEEKVPVRPKDPEGVPPLLVSQQAKREEERSPAAPPPLPTTSSGKAAKKPTAAEISVRVPRGPAVEGGHVNMAFSQSNPPSELHKVHGSRNKPTSLWNPTYGSWFTEKPTKKNNPIAKKEPHDRGNLGLEGSCTVPPNVATGRLPGASLLLEPSSLTANMKEVPLFRLRHFPCGNVNYGYQQQGLPLEAATAPGAGHYEDTILKSKNSMNQPGP

SEQ ID NO: 24417 - protein, 1620 aa, Homo sapiens
  REGION 1..1620: note = ENSP00000373700
MGAIGLLWLLPLLLSTAAVGSGMGTGQRAGSPAAGPPLQPREPLSYSRLQRKSLAVDFVVPSLFRVYARDLLLPPSSSELKAGRPEARGSLALDCAPLLRLLGPAPGVSWTAGSPAPAEARTLSRVLKGGSVRKLRRAKQLVLELGEEAILEGCVGPPGEAAVGLLQFNLSELFSWWIRQGEGRLRIRLMPEKKASEVGREGRLSAAIRASQPRLLFQIFGTGHSSLESPTNMPSPSPDYFTWNLTWIMKDSFPFLSHRSRYGLECSFDFPCELEYSPPLHDLRNQSWSWRRIPSEEASQMDLLDGPGAERSKEMPRGSFLLLNTSADSKHTILSPWMRSSSEHCTLAVSVHRHLQPSGRYIAQLLPHNEAAREILLMPTPGKHGWTVLQGRIGRPDNPFRVALEYISSGNRSLSAVDFFALKNCSEGTSPGSKMALQSSFTCWNGTVLQLGQACDFHQDCAQGEDESQMCRKLPVGFYCNFEDGFCGWTQGTLSPHTPQWQVRTLKDARFQDHQDHALLLSTTDVPASESATVTSATFPAPIKSSPCELRMSWLIRGVLRGNVSLVLVENKTGKEQGRMVWHVAAYEGLSLWQWMVLPLLDVSDRFWLQMVAWWGQGSRAIVAFDNISISLDCYLTISGEDKILQNTAPKSRNLFERNPNKELKPGENSPRQTPIFDPTVHWLFTTCGASGPHGPTQAQCNNAYQNSNLSVEVGSEGPLKGIQIWKVPATDTYSISGYGAAGGKGGKNTMMRSHGVSVLGIFNLEKDDMLYILVGQQGEDACPSTNQLIQKVCIGENNVIEEEIRVNRSVHEWAGGGGGGGGATYVFKMKDGVPVPLIIAAGGGGRAYGAKTDTFHPERLENNSSVLGLNGNSGAAGGGGGWNDNTSLLWAGKSLQEGATGGHSCPQAMKKWGWETRGGFGGGGGGCSSGGGGGGYIGGNAASNNDPEMDGEDGVSFISPLGILYTPALKVMEGHGEVNIKHYLNCSHCEVDECHMDPESHKVICFCDHGTVLAEDGVSCIVSPTPEPHLPLSLILSVVTSALVAALVLAFSGIMIVYRRKHQELQAMQMELQSPEYKLSKLRTSTIMTDYNPNYCFAGKTSSISDLKEVPRKNITLIRGLGHGAFGEVYEGQVSGMPNDPSPLQVAVKTLPEVCSEQDELDFLMEALIISKFNHQNIVRCIGVSLQSLPRFILLELMAGGDLKSFLRETRPRPSQPSSLAMLDLLHVARDIACGCQYLEENHFIHRDIAARNCLLTCPGPGRVAKIGDFGMARDIYRASYYRKGGCAMLPVKWMPPEAFMEGIFTSKTDTWSFGVLLWEIFSLGYMPYPSKSNQEVLEFVTSGGRMDPPKNCPGPVYRIMTQCWQHQPEDRPNFAIILERIEYCTQDPDVINTALPIEYGPLVEEEEKVPVRPKDPEGVPPLLVSQQAKREEERSPAAPPPLPTTSSGKAAKKPTAAEISVRVPRGPAVEGGHVNMAFSQSNPPSELHKVHGSRNKPTSLWNPTYGSWFTEKPTKKNNPIAKKEPHDRGNLGLEGSCTVPPNVATGRLPGASLLLEPSSLTANMKEVPLFRLRHFPCGNVNYGYQQQGLPLEAATAPGAGHYEDTILKSKNSMNQPGP

SEQ ID NO: 24418 - protein, 129 aa, Homo sapiens
  REGION 1..129: note = ENSP00000414027
  VARIANT 1: note = Any amino acid
XNDPEMDGEDGVSFISPLGILYTPALKVMEGHGEVNIKHYLNCSHCEVDECHMDPESHKVICFCDHGTVLAEDGVSCIVSPTPEPHLPLSLILSVVTSALVAALVLAFSGIMIGNPNLITVGPLHRGGN

SEQ ID NO: 24419 - protein, 152 aa, Homo sapiens
  REGION 1..152: note = ENSP00000387488
SSISDLKEVPRKNITLIRGLGHGAFGEVYEGQVSGMPNDPSPLQVAVKTLPEVCSEQDELDFLMEALIISLSWKQLFCFTFCLRPSWEKSTMNSSTQSTHQYLRKTLSCPLRHFLTQVPEQHPHSSSHSPANGTPVEPAVVLPTCSPARFWV

SEQ ID NO: 24420 - protein, 1243 aa, Homo sapiens
  REGION 1..1243: note = ENSP00000482733
MPTPGKHGWTVLQGRIGRPDNPFRVALEYISSGNRSLSAVDFFALKNCSEGTSPGSKMALQSSFTCWNGTVLQLGQACDFHQDCAQGEDESQMCRKLPVGFYCNFEDGFCGWTQGTLSPHTPQWQVRTLKDARFQDHQDHALLLSTTDVPASESATVTSATFPAPIKSSPCELRMSWLIRGVLRGNVSLVLVENKTGKEQGRMVWHVAAYEGLSLWQWMVLPLLDVSDRFWLQMVAWWGQGSRAIVAFDNISISLDCYLTISGEDKILQNTAPKSRNLFERNPNKELKPGENSPRQTPIFDPTVHWLFTTCGASGPHGPTQAQCNNAYQNSNLSVEVGSEGPLKGIQIWKVPATDTYSISGYGAAGGKGGKNTMMRSHGVSVLGIFNLEKDDMLYILVGQQGEDACPSTNQLIQKVCIGENNVIEEEIRVNRSVHEWAGGGGGGGGATYVFKMKDGVPVPLIIAAGGGGRAYGAKTDTFHPERLENNSSVLGLNGNSGAAGGGGGWNDNTSLLWAGKSLQEGATGGHSCPQAMKKWGWETRGGFGGGGGGCSSGGGGGGYIGGNAASNNDPEMDGEDGVSFISPLGILYTPALKVMEGHGEVNIKHYLNCSHCEVDECHMDPESHKVICFCDHGTVLAEDGVSCIVSPTPEPHLPLSLILSVVTSALVAALVLAFSGIMIVYRRKHQELQAMQMELQSPEYKLSKLRTSTIMTDYNPNYCFAGKTSSISDLKEVPRKNITLIRGLGHGAFGEVYEGQVSGMPNDPSPLQVAVKTLPEVCSEQDELDFLMEALIISKFNHQNIVRCIGVSLQSLPRFILLELMAGGDLKSFLRETRPRPSQPSSLAMLDLLHVARDIACGCQYLEENHFIHRDIAARNCLLTCPGPGRVAKIGDFGMARDIYRASYYRKGGCAMLPVKWMPPEAFMEGIFTSKTDTWSFGVLLWEIFSLGYMPYPSKSNQEVLEFVTSGGRMDPPKNCPGPVYRIMTQCWQHQPEDRPNFAIILERIEYCTQDPDVINTALPIEYGPLVEEEEKVPVRPKDPEGVPPLLVSQQAKREEERSPAAPPPLPTTSSGKAAKKPTAAEISVRVPRGPAVEGGHVNMAFSQSNPPSELHKVHGSRNKPTSLWNPTYGSWFTEKPTKKNNPIAKKEPHDRGNLGLEGSCTVPPNVATGRLPGASLLLEPSSLTANMKEVPLFRLRHFPCGNVNYGYQQQGLPLEAATAPGAGHYEDTILKSKNSMNQPGP

SEQ ID NO: 24421 - protein, 674 aa, Homo sapiens
  REGION 1..674: note = ENSP00000484468
MPSYTVTVATGSQWFAGTDDYIYLSLVGSAGCSEKHLLDKPFYNDFERGAVDSYDVTVDEELGEIQLVRIEKRKYWLNDDWYLKYITLKTPHGDYIEFPCYRWITGDVEVVLRDGRAKLARDDQIHILKQHRRKELETRQKQYRWMEWNPGFPLSIDAKCHKDLPRDIQFDSEKGVDFVLNYSKAMENLFINRFMHMFQSSWNDFADFEKIFVKISNTISERVMNHWQEDLMFGYQFLNGCNPVLIRRCTELPEKLPVTTEMVECSLERQLSLEQEVQQGNIFIVDFELLDGIDANKTDPCTLQFLAAPICLLYKNLANKIVPIAIQLNQIPGDENPIFLPSDAKYDWLLAKIWVRSSDFHVHQTITHLLRTHLVSEVFGIAMYRQLPAVHPIFKLLVAHVRFTIAINTKAREQLICECGLFDKANATGGGGHVQMVQRAMKDLTYASLCFPEAIKARGMESKEDIPYYFYRDDGLLVWEAIRTFTAEVVDIYYEGDQVVEEDPELQDFVNDVYVYGMRGRKSSGFPKSVKSREQLSEYLTVVIFTASAQHAAVNFGQYDWCSWIPNAPPTMRAPPPTAKGVVTIEQIVDTLPDRGRSCWHLGAVWALSQFQENELFLGMYPEEHFIEKPVKEAMARFRKNLEAIVSVIAERNKKKQLPYYYLSPDRIPNSVAI

SEQ ID NO: 24422 - protein, 617 aa, Homo sapiens
  REGION 1..617: note = ENSP00000479958
MPSYTVTVATGSQWFAGTDDYIYLSLVGSAGCSEKHLLDKPFYNDFERGAVDSYDVTVDEELGEIQLVRIEKRKYWLNDDWYLKYITLKTPHGDYIEFPCYRWITGDVEVVLRDGRAKLARDDQIHILKQHRRKELETRQKQYRWMEWNPGFPLSIDAKCHKDLPRDIQFDSEKGVDFVLNYSKAMENLFINRFMHMFQSSWNDFADFEKIFVKISNTISERVMNHWQEDLMFGYQFLNGCNPVLIRRCTELPEKLPVTTEMVECSLERQLSLEQEVQQGNIFIVDFELLDGIDANKTDPCTLQFLAAPICLLYKNLANKIVPIAIQLNQIPGDENPIFLPSDAKYDWLLAKIWVRSSDFHVHQTITHLLRTHLVSEVFGIAMYRQLPAVHPIFKLLVAHVRFTIAINTKAREQLICECGLFDKANATGGGGHVQMVQRAMKDLTYASLCFPEAIKARGMESKEDIPYYFYRDDGLLVWEAIRTFTAEVVDIYYEGDQVVEEDPELQDFVNDVYVYGMRGRKSSGFPKSVKSREQLSEYLTVVIFTASAQHAAVNFGQLFLGMYPEEHFIEKPVKEAMARFRKNLEAIVSVIAERNKKKQLPYYYLSPDRIPNSVAI

SEQ ID NO: 24423 - protein, 139 aa, Homo sapiens
  REGION 1..139: note = ENSP00000479452
MPSYTVTVATGSQWFAGTDDYIYLSLVGSAGCSEKHLLDKPFYNDFERGAVDSYDVTVDEELGEIQLVRIEKRKYWLNDDWYLKYITLKTPHGDYIEFPCYRWITGDVEVVLRDGREMDGVEPWLPLEHRCQMPQGFTP

SEQ ID NO: 24424 - protein, 674 aa, Homo sapiens; identical to SEQ ID NO: 24421
  REGION 1..674: note = ENSP00000363512

SEQ ID NO: 24425 - protein, 617 aa, Homo sapiens; identical to SEQ ID NO: 24422
  REGION 1..617: note = ENSP00000437634

SEQ ID NO: 24426 - protein, 139 aa, Homo sapiens; identical to SEQ ID NO: 24423
  REGION 1..139: note = ENSP00000483803

SEQ ID NO: 24427 - protein, 1657 aa, Homo sapiens
  REGION 1..1657: note = ENSP00000264276
MDSKKRSSTEAEGSKERGLVHIWQAGSFPITPERLPGWGGKTVLQAALGVKHGVLLTEDGEVYSFGTLPWRSGPVEICPSSPILENALVGQYVITVATGSFHSGAVTDNGVAYMWGENSAGQCAVANQQYVPEPNPVSIADSEASPLLAVRILQLACGEEHTLALSISREIWAWGTGCQLGLITTAFPVTKPQKVEHLAGRVVLQVACGAFHSLALVQCLPSQDLKPVPERCNQCSQLLITMTDKEDHVIISDSHCCPLGVTLTESQAENHASTALSPSTETLDRQEEVFENTLVANDQSVATELNAVSAQITSSDAMSSQQNVMGTTEISSARNIPSYPDTQAVNEYLRKLSDHSVREDSEHGEKPVPSQPLLEEAIPNLHSPPTTSTSALNSLVVSCASAVGVRVAATYEAGALSLKKVMNFYSTTPCETGAQAGSSAIGPEGLKDSREEQVKQESMQGKKSSSLVDIREEETEGGSRRLSLPGLLSQVSPRLLRKAARVKTRTVVLTPTYSGEADALLPSLRTEVWTWGKGKEGQLGHGDVLPRLQPLCVKCLDGKEVIHLEAGGYHSLALTAKSQVYSWGSNTFGQLGHSDFPTTVPRLAKISSENGVWSIAAGRDYSLFLVDTEDFQPGLYYSGRQDPTEGDNLPENHSGSKTPVLLSCSKLGYISRVTAGKDSYLALVDKNIMGYIASLHELATTERRFYSKLSDIKSQILRPLLSLENLGTTTTVQLLQEVASRFSKLCYLIGQHGASLSSFLHGVKEARSLVILKHSSLFLDSYTEYCTSITNFLVMGGFQLLAKPAIDFLNKNQELLQDLSEVNDENTQLMEILNTLFFLPIRRLHNYAKVLLKLATCFEVASPEYQKLQDSSSCYECLALHLGRKRKEAEYTLGFWKTFPGKMTDSLRKPERRLLCESSNRALSLQHAGRFSVNWFILFNDALVHAQFSTHHVFPLATLWAEPLSEEAGGVNGLKITTPEEQFTLISSTPQEKTKWLRAISQAVDQALRGMSDLPPYGSGSSVQRQEPPISRSAKYTFYKDPRLKDATYDGRWLSGKPHGRGVLKWPDGKMYSGMFRNGLEDGYGEYRIPNKAMNKEDHYVGHWKEGKMCGQGVYSYASGEVFEGCFQDNMRHGHGLLRSGKLTSSSPSMFIGQWVMDKKAGYGVFDDITRGEKYMGMWQDDVCQGNGVVVTQFGLYYEGNFHLNKMMGNGVLLSEDDTIYEGEFSDDWTLSGKGTLTMPNGDYIEGYFSGEWGSGIKITGTYFKPSLYESDKDRPKVFRKLGNLAVPADEKWKAVFDECWRQLGCEGPGQGEVWKAWDNIAVALTTSRRQHRDSPEILSRSQTQTLESLEFIPQHVGAFSVEKYDDIRKYLIKACDTPLHPLGRLVETLVAVYRMTYVGVGANRRLLQEAVKEIKSYLKRIFQLVRFLFPELPEEGSTIPLSAPLPTERKSFCTGKSDSRSESPEPGYVVTSSGLLLPVLLPRLYPPLFMLYALDNDREEDIYWECVLRLNKQPDIALLGFLGVQRKFWPATLSILGESKKVLPTTKDACFASAVECLQQISTTFTPSDKLKVIQQTFEEISQSVLASLHEDFLWSMDDLFPVFLYVVLRARIRNLGSEVHLIEDLMDPYLQHGEQGIMFTTLKACYYQIQREKLN

SEQ ID NO: 24428 - protein, 585 aa, Homo sapiens
  REGION 1..585: note = ENSP00000403832
  VARIANT 1: note = Any amino acid
XLALVDKNIMGYIASLHELATTERRFYSKLSDIKSQILRPLLSLENLGTTTTVQLLQEVASRFSKLCYLIGQHGASLSSFLHGVKEARSLVILKHSSLFLDSYTEYCTSITNFLVMGGFQLLAKPAIDFLNKNQELLQDLSEVNDENTQLMEILNTLFFLPIRRLHNYAKVLLKLATCFEVASPEYQKLQDSSSCYECLALHLGRKRKEAEYTLGFWKTFPGKMTDSLRKPERRLLCESSNRALSLQHAGRFSVNWFILFNDALVHAQFSTHHVFPLATLWAEPLSEEAGGVNGLKITTPEEQFTLISSTPQEKTKWLRAISQAVDQALRGMSDLPPYGSGSSVQRQEPPISRSAKYTFYKDPRLKDATYDGRWLSGKPHGRGVLKWPDGKMYSGMFRNGLEDGYGEYRIPNKAMNKEDHYVGHWKEGKMCGQGVYSYASGEVFEGCFQDNMRHGHGLLRSGKLTSSSPSMFIGQWVMDKKAGYGVFDDITRGEKYMGMWQDDVCQGNGVVVTQFGLYYEGNFHLNKMMGNGVLLSEDDTIYEGEFSDDWTLSGKDNSGLIEQVGKCSLLPYFLKVCEALVLFLL

SEQ ID NO: 24429 - protein, 396 aa, Homo sapiens
  REGION 1..396: note = ENSP00000429223
MDSKKRSSTEAEGSKERGLVHIWQAGSFPITPERLPGWGGKTVLQAALGVKHGVLLTEDGEVYSFGTLPWRSGPVEICPSSPILENALVGQYVITVATGSFHSGAVTDNGVAYMWGENSAGQCAVANQQYVPEPNPVSIADSEASPLLAVRILQLACGEEHTLALSISREIWAWGTGCQLGLITTAFPVTKPQKVEHLAGRVVLQVACGAFHSLALVQCLPSQDLKPVPERCNQCSQLLITMTDKEDHVIISDSHCCPLGVTLTESQAENHASTALSPSTETLDRQEEVFENTLVANDQSVATELNAVSAQITSSDAMSSQQNVMGTTEISSARNIPSYPDTQAVNEYLRKLSDHSVREDSEHGEKPVPSQVPAQFYKIKVCLELNCMGFSLETLK

SEQ ID NO: 24430 - protein, 139 aa, Homo sapiens
  REGION 1..139: note = ENSP00000386384
MDSKKRSSTEAEGSKERGLVHIWQAGSFPITPERLPGWGGKTVLQAALGVKHGVLLTEDGEVYSFGTLPWRSGPVEICPSSPILENALVGQYVITVATGSFHSGAVTDNGVAYMWGENSAGQCAVANQQYVPEPNPVSI

SEQ ID NO: 24431 - protein, 106 aa, Homo sapiens
  REGION 1..106: note = ENSP00000386948
MDSKKRSSTEAEGSKERGLVHIWQAGSFPITPERLPGWGGKTVLQAALGVKHGVLLTEDGEVYSFGTLPWRSGPVEICPSSPILENALVGQYVITVATGSFHSGAV

SEQ ID NO: 24432 - protein, 445 aa, Homo sapiens
  REGION 1..445: note = ENSP00000286190
MYPNPLIYCTCWDPWNLGPRKLIKTPQLPRKNSTGSSKLTPLVPAPKNHNYLQPTKPVVSPKMKIHSARQEETNKSFYEVINVSPGYQLVRNREQISVTLGDEMFDRKKRWESEIPDKGRFSRTNIISDLEEQISELTAIIEQMNRDHQSAQKLLSSEMDLRCAEMKQNFENKNRELKEAHEAELSELENNYKAALKAEKLAAQEKLEEMGKEYKYLKNMFRTYQDSIYDEMEEKWSKQKAKWKKDEKFERENILLQQKKKMTKKFEMESGEEDKKINESCSAVFENFIQEKEELLKQHQSDTLQLEELRKTKEVPWRRDQINRHWHDVLQQLLLMQVMQEELHAQALILESLNTNLYYTQLELQKEKAIVGNLEKMLQTKFAETEEKYKHTIQILTEENIHLKQKIISKNEEICEGCSGRLASITVSKDDSDTVQDGSKKGQES

SEQ ID NO: 24433 - protein, 124 aa, Homo sapiens
  REGION 1..124: note = ENSP00000402327
  VARIANT 1: note = Any amino acid
XSIYDEMEEKWSKQKAKWKKDEKFERENILLQQKKKMTKKFEMESGEEDKKINESCSAVFENFIQEKEELLKQHQSDTLQLEELRKTKEVMQEELHAQALILESLNTNLYYTQLELQKEAKDNF

SEQ ID NO: 24434 - protein, 422 aa, Homo sapiens
  REGION 1..422: note = ENSP00000376086
MYPNPLIYCTCWDPWNLGPRKLIKTPQLPRKNSTGSSKLTPLVPAPKNHNYLQPTKPVVSPKMKIHSARQEETNKSFYEVINVSPGYQLVRNREQISVTLGDEMFDRKKRWESEIPDKGRFSRTNIISDLEEQISELTAIIEQMNRDHQSAQKLLSSEMDLRCAEMKQNFENKNRELKEAHEAELSELENNYKAALKAEKLAAQEKLEEMGKEYKYLKNMFRTYQDSIYDEMEEKWSKQKAKWKKDEKFERENILLQQKKKMTKKFEMESGEEDKKINESCSAVFENFIQEKEELLKQHQSDTLQLEELRKTKEVMQEELHAQALILESLNTNLYYTQLELQKEKAIVGNLEKMLQTKFAETEEKYKHTIQILTEENIHLKQKIISKNEEICEGCSGRLASITVSKDDSDTVQDGSKKGQES

SEQ ID NO: 24435 - protein, 422 aa, Homo sapiens; identical to SEQ ID NO: 24434
  REGION 1..422: note = ENSP00000412073

SEQ ID NO: 24436 - protein, 143 aa, Homo sapiens
  REGION 1..143: note = ENSP00000393945
MKIHSARQEETNKSFYEVINVSPGYQLVRNREQISVTLGDEMFDRKKRWESEIPDKGRFSRELKEAHEAELSELENNYKAALKAEKLAAQEKLEEMGKEYKYLKNMFRTYQDSIYDEMEEKWSKQKAKWKKDEKFERENILLQ

SEQ ID NO: 24437 - protein, 49 aa, Homo sapiens
  REGION 1..49: note = ENSP00000407585
MYPNPLIYCTCWDPWNLGPRKLIKTPQLPRKNSTGSSKLTPLVPAPKNH

SEQ ID NO: 24438 - protein, 445 aa, Homo sapiens; identical to SEQ ID NO: 24432
  REGION 1..445: note = ENSP00000385098

SEQ ID NO: 24439 - protein, 111 aa, Homo sapiens
  REGION 1..111: note = ENSP00000432707
MPRQFPKLNISEVDEQVRLLAEKVFAKVLREEDSKDALSLFTVPEDCPIGQKEAKERELQKELAEQKSVETAKRKKSFKMIRSQSLSLQMPPQQDWKGPPAASPAMSPTTP

SEQ ID NO: 24440 - protein, 776 aa, Homo sapiens
  REGION 1..776: note = ENSP00000379802
MALSSEPAEMPRQFPKLNISEVDEQVRLLAEKVFAKVLREEDSKDALSLFTVPEDCPIGQKEAKERELQKELAEQKSVETAKRKKSFKMIRSQSLSLQMPPQQDWKGPPAASPAMSPTTPVVTGATSLPTPAPYAMPEFQRVTISGDYCAGITLEDYEQAAKSLAKALMIREKYARLAYHRFPRITSQYLGHPRADTAPPEEGLPDFHPPPLPQEDPYCLDDAPPNLDYLVHMQGGILFVYDNKKMLEHQEPHSLPYPDLETYTVDMSHILALITDGPTKTYCHRRLNFLESKFSLHEMLNEMSEFKELKSNPHRDFYNVRKVDTHIHAAACMNQKHLLRFIKHTYQTEPDRTVAEKRGRKITLRQVFDGLHMDPYDLTVDSLDVHAGRQTFHRFDKFNSKYNPVGASELRDLYLKTENYLGGEYFARMVKEVARELEESKYQYSEPRLSIYGRSPEEWPNLAYWFIQHKVYSPNMRWIIQVPRIYDIFRSKKLLPNFGKMLENIFLPLFKATINPQDHRELHLFLKYVTGFDSVDDESKHSDHMFSDKSPNPDVWTSEQNPPYSYYLYYMYANIMVLNNLRRERGLSTFLFRPHCGEAGSITHLVSAFLTADNISHGLLLKKSPVLQYLYYLAQIPIAMSPLSNNSLFLEYSKNPLREFLHKGLHVSLSTDDPMQFHYTKEALMEEYAIAAQVWKLSTCDLCEIARNSVLQSGLSHQEKQKFLGQNYYKEGPEGNDIRKTNVAQIRMAFRYETLCNELSFLSDAMKSEEITALTN

SEQ ID NO: 24441 - protein, 267 aa, Homo sapiens
  REGION 1..267: note = ENSP00000433284
MPRQFPKLNISEVDEQVRLLAEKVFAKVLREEDSKDALSLFTVPEDCPIGQKEAKERELQKELAEQKSVETAKRKKSFKMIRSQSLSLQMPPQQDWKGPPAASPAMSPTTPVVTGATSLPTPAPYAMPEFQRVTISGDYCAGITLEDYEQAAKSLAKALMIREKYARLAYHRFPRITSQYLGHPRADTAPPEEGLPDFHPPPLPQEDPYCLDDAPPNLDYLVHMQGGILFVYDNKKMLEHQEPHSLPYPDLETYTVDMSHILALITD

SEQ ID NO: 24442 - protein, 212 aa, Homo sapiens
  REGION 1..212: note = ENSP00000433937
MALSSEPAEMPRQFPKLNISEVDEQVRLLAEKVFAKVLREEDSKDALSLFTVPEDCPIGQKEAKERELQKELAEQKSVETAKRKKSFKMIRSQSLSLQMPPQQDWKGPPAASPAMSPTTPVVTGATSLPTPAPYAMPEFQRVTISGDYCAGITLEDYEQAAKSLAKALMIREKYARLAYHRFPRITSQYLGHPRADTAPPEEGLPGGHPLCV

SEQ ID NO: 24443 - protein, 767 aa, Homo sapiens
  REGION 1..767: note = ENSP00000379801
MPRQFPKLNISEVDEQVRLLAEKVFAKVLREEDSKDALSLFTVPEDCPIGQKEAKERELQKELAEQKSVETAKRKKSFKMIRSQSLSLQMPPQQDWKGPPAASPAMSPTTPVVTGATSLPTPAPYAMPEFQRVTISGDYCAGITLEDYEQAAKSLAKALMIREKYARLAYHRFPRITSQYLGHPRADTAPPEEGLPDFHPPPLPQEDPYCLDDAPPNLDYLVHMQGGILFVYDNKKMLEHQEPHSLPYPDLETYTVDMSHILALITDGPTKTYCHRRLNFLESKFSLHEMLNEMSEFKELKSNPHRDFYNVRKVDTHIHAAACMNQKHLLRFIKHTYQTEPDRTVAEKRGRKITLRQVFDGLHMDPYDLTVDSLDVHAGRQTFHRFDKFNSKYNPVGASELRDLYLKTENYLGGEYFARMVKEVARELEESKYQYSEPRLSIYGRSPEEWPNLAYWFIQHKVYSPNMRWIIQVPRIYDIFRSKKLLPNFGKMLENIFLPLFKATINPQDHRELHLFLKYVTGFDSVDDESKHSDHMFSDKSPNPDVWTSEQNPPYSYYLYYMYANIMVLNNLRRERGLSTFLFRPHCGEAGSITHLVSAFLTADNISHGLLLKKSPVLQYLYYLAQIPIAMSPLSNNSLFLEYSKNPLREFLHKGLHVSLSTDDPMQFHYTKEALMEEYAIAAQVWKLSTCDLCEIARNSVLQSGLSHQEKQKFLGQNYYKEGPEGNDIRKTNVAQIRMAFRYETLCNELSFLSDAMKSEEITALTN

SEQ ID NO: 24444 - protein, 677 aa, Homo sapiens
  REGION 1..677: note = ENSP00000435382
MPRQFPKLNISEVDEQVRLLAEKVFAKVLREEDSKDALSLFTVPEDCPIGQKEAKERELQKELAEQKSVETAKRKKSFKMIRSQSLSLQMPPQQDWKGPPAASPAMSPTTPVVTGATSLPTPAPYAMPEFQRVTISGDYCAGITLEDYEQAAKSLAKALMIREKYARLAYHRFPRITSQYLGHPRADTAPPEEGLPDFHPPPLPQEDPYCLDDAPPNLDYLVHMQGGILFVYDNKKMLEHQEPHSLPYPDLETYTVDMSHILALITDGPTKTYCHRRLNFLESKFSLHEMLNEMSEFKELKSNPHRDFYNVRKVDTHIHAAACMNQKHLLRFIKHTYQTEPDRTVAEKRGRKITLRQVFDGLHMDPYDLTVDSLDVHAGRQTFHRFDKFNSKYNPVGASELRDLYLKTENYLGGEYFARMVKEVARELEESKYQYSEPRLSIYGRSPEEWPNLAYWFIQHKVYSPNMRWIIQVPRIYDIFRSKKLLPNFGKMLENIFLPLFKATINPQDHRELHLFLKYVTGFDSVDDESKHSDHMFSDKSPNPDVWTSEQNPPYSYYLYYMYANIMVLNNLRRERGLSTFLFRPHCGEAGSITHLVSAFLTADNISHGLLLKKSPVLQYLYYLAQIPIAMSPLSNNSLFLEYSKNPLREFLHKGLHVSLSTDDPMQFHYTKLKCGS

SEQ ID NO: 24445 - protein, 774 aa, Homo sapiens
  REGION 1..774: note = ENSP00000436987
MEPGSAEMPRQFPKLNISEVDEQVRLLAEKVFAKVLREEDSKDALSLFTVPEDCPIGQKEAKERELQKELAEQKSVETAKRKKSFKMIRSQSLSLQMPPQQDWKGPPAASPAMSPTTPVVTGATSLPTPAPYAMPEFQRVTISGDYCAGITLEDYEQAAKSLAKALMIREKYARLAYHRFPRITSQYLGHPRADTAPPEEGLPDFHPPPLPQEDPYCLDDAPPNLDYLVHMQGGILFVYDNKKMLEHQEPHSLPYPDLETYTVDMSHILALITDGPTKTYCHRRLNFLESKFSLHEMLNEMSEFKELKSNPHRDFYNVRKVDTHIHAAACMNQKHLLRFIKHTYQTEPDRTVAEKRGRKITLRQVFDGLHMDPYDLTVDSLDVHAGRQTFHRFDKFNSKYNPVGASELRDLYLKTENYLGGEYFARMVKEVARELEESKYQYSEPRLSIYGRSPEEWPNLAYWFIQHKVYSPNMRWIIQVPRIYDIFRSKKLLPNFGKMLENIFLPLFKATINPQDHRELHLFLKYVTGFDSVDDESKHSDHMFSDKSPNPDVWTSEQNPPYSYYLYYMYANIMVLNNLRRERGLSTFLFRPHCGEAGSITHLVSAFLTADNISHGLLLKKSPVLQYLYYLAQIPIAMSPLSNNSLFLEYSKNPLREFLHKGLHVSLSTDDPMQFHYTKEALMEEYAIAAQVWKLSTCDLCEIARNSVLQSGLSHQEKQKFLGQNYYKEGPEGNDIRKTNVAQIRMAFRYETLCNELSFLSDAMKSEEITALTN

SEQ ID NO: 24446 - protein, 767 aa, Homo sapiens; identical to SEQ ID NO: 24443
  REGION 1..767: note = ENSP00000431648

SEQ ID NO: 24447 - protein, 110 aa, Homo sapiens
  REGION 1..110: note = ENSP00000433351
AAACMNQKHLLRFIKHTYQTEPDRTVAEKRGRKITLRQVFDGLHMDPYDLTVDSLDVHAVSELLLQCRQQTAALAGDSAPWKATMIVLAGRCYGSSFLFYLTERSCGLRE

SEQ ID NO: 24448 - protein, 90 aa, Homo sapiens
  REGION 1..90: note = ENSP00000434608
PPYSYYLYYMYANIMVLNNLRRERGLSTFLFRPHCGEAGSITHLVSAFLTADNISHGLLLKKQQQFVPRIFQEPSEGIPTQGTACFSFHR

SEQ ID NO: 24449 - protein, 608 aa, Homo sapiens
  REGION 1..608: note = ENSP00000396000
MIREKYARLAYHRFPRITSQYLGHPRADTAPPEEGLPDFHPPPLPQEDPYCLDDAPPNLDYLVHMQGGILFVYDNKKMLEHQEPHSLPYPDLETYTVDMSHILALITDGPTKTYCHRRLNFLESKFSLHEMLNEMSEFKELKSNPHRDFYNVRKVDTHIHAAACMNQKHLLRFIKHTYQTEPDRTVAEKRGRKITLRQVFDGLHMDPYDLTVDSLDVHAGRQTFHRFDKFNSKYNPVGASELRDLYLKTENYLGGEYFARMVKEVARELEESKYQYSEPRLSIYGRSPEEWPNLAYWFIQHKVYSPNMRWIIQVPRIYDIFRSKKLLPNFGKMLENIFLPLFKATINPQDHRELHLFLKYVTGFDSVDDESKHSDHMFSDKSPNPDVWTSEQNPPYSYYLYYMYANIMVLNNLRRERGLSTFLFRPHCGEAGSITHLVSAFLTADNISHGLLLKKSPVLQYLYYLAQIPIAMSPLSNNSLFLEYSKNPLREFLHKGLHVSLSTDDPMQFHYTKEALMEEYAIAAQVWKLSTCDLCEIARNSVLQSGLSHQEKQKFLGQNYYKEGPEGNDIRKTNVAQIRMAFRYETLCNELSFLSDAMKSEEITALTN

SEQ ID NO: 24450 - protein, 498 aa, Homo sapiens
  REGION 1..498: note = ENSP00000308149
MLQCRPAQEFSFGPRALKDALVSTDAALQQLYVSAFSPAERLFLAEAYNPQRTLFCTLLIRTGFDWLLSRPEAPEDFQTFHASLQHRKPRLARKHIYLQPIDLSEEPVGSSLLHQLCSCTEAFFLGLRVKCLPSVAAASIRCSSRPSRDSDRLQLHTDGILSFLKNNKPGDALCVLGLTLSDLYPHEAWSFTFSKFLPGHEVGVCSFARFSGEFPKSGPSAPDLALVEAAADGPEAPLQDRGWALCFSALGMVQCCKVTCHELCHLLGLGNCRWLRCLMQGALSLDEALRRPLDLCPICLRKLQHVLGFRLIERYQRLYTWTQAVVGTWPSQEAGEPSVWEDTPPASADSGMCCESDSEPGTSVSEPLTPDAGSHTFASGPEEGLSYLAASEAPLPPGGPAEAIKEHERWLAMCIQALQREVAEEDLVQVDRAVDALDRWEMFTGQLPATRQDPPSSRDSVGLRKVLGDKFSSLRRKLSARKLARAESAPRPWDGEES

SEQ ID NO: 24451 - protein, 297 aa, Homo sapiens
  REGION 1..297: note = ENSP00000386020
MLQCRPAQEFSFGPRALKDALVSTDAALQQLYVSAFSPAERLFLAEAYNPQRTLFCTLLIRTGFDWLLSRPEAPEDFQTFHASLQHRKPRLARKHIYLQPIDLSEEPVGSSLLHQLCSCTEAFFLGLRVKCLPSVAAASIRCSSRPSRDSDRLQLHTDGILSFLKNNKPGDALCVLGLTLSDLYPHEAWSFTFSKFLPGHGHVPRALPPSGPGELPLAPLPHAGCAQPGRGPAAAPGPLSHLPEEAAACPGFQAHREVPETLHLDSGGGGDVAQPGGGGAVSVGGHPACQRRLGHVL

SEQ ID NO: 24452 - protein, 498 aa, Homo sapiens
  REGION 1..498: note = ENSP00000428340
MTVFLSFAFLAAILTHIGCSNQRRSPENSGRRYNRIQHGQCAYTFILPEHDGNCRESTTDQYNTNALQRDAPHVEPDFSSQKLQHLEHVMENYTQWLQKLENYIVENMKSEMAQIQQNAVQNHTATMLEIGTSLLSQTAEQTRKLTDVETQVLNQTSRLEIQLLENSLSTYKLEKQLLQQTNEILKIHEKNSLLEHKILEMEGKHKEELDTLKEEKENLQGLVTRQTYIIQELEKQLNRATTNNSVLQKQQLELMDTVHNLVNLCTKEGVLLKGGKREEEKPFRDCADVYQAGFNKSGIYTIYINNMPEPKKVFCNMDVNGGGWTVIQHREDGSLDFQRGWKEYKMGFGNPSGEYWLGNEFIFAITSQRQYMLRIELMDWEGNRAYSQYDRFHIGNEKQNYRLYLKGHTGTAGKQSSLILHGADFSTKDADNDNCMCKCALMLTGGWWFDACGPSNLNGMFYTAGQNHGKLNGIKWHYFKGPSYSLRSTTMMIRPLDF

SEQ ID NO: 24453 - protein, 497 aa, Homo sapiens
  REGION 1..497: note = ENSP00000297450
MTVFLSFAFLAAILTHIGCSNQRRSPENSGRRYNRIQHGQCAYTFILPEHDGNCRESTTDQYNTNALQRDAPHVEPDFSSQKLQHLEHVMENYTQWLQKLENYIVENMKSEMAQIQQNAVQNHTATMLEIGTSLLSQTAEQTRKLTDVETQVLNQTSRLEIQLLENSLSTYKLEKQLLQQTNEILKIHEKNSLLEHKILEMEGKHKEELDTLKEEKENLQGLVTRQTYIIQELEKQLNRATTNNSVLQKQQLELMDTVHNLVNLCTKEVLLKGGKREEEKPFRDCADVYQAGFNKSGIYTIYINNMPEPKKVFCNMDVNGGGWTVIQHREDGSLDFQRGWKEYKMGFGNPSGEYWLGNEFIFAITSQRQYMLRIELMDWEGNRAYSQYDRFHIGNEKQNYRLYLKGHTGTAGKQSSLILHGADFSTKDADNDNCMCKCALMLTGGWWFDACGPSNLNGMFYTAGQNHGKLNGIKWHYFKGPSYSLRSTTMMIRPLDF

SEQ ID NO: 24454 - protein, 298 aa, Homo sapiens
  REGION 1..298: note = ENSP00000430750
MEGKHKEELDTLKEEKENLQGLVTRQTYIIQELEKQLNRATTNNSVLQKQQLELMDTVHNLVNLCTKEGVLLKGGKREEEKPFRDCADVYQAGFNKSGIYTIYINNMPEPKKVFCNMDVNGGGWTVIQHREDGSLDFQRGWKEYKMGFGNPSGEYWLGNEFIFAITSQRQYMLRIELMDWEGNRAYSQYDRFHIGNEKQNYRLYLKGHTGTAGKQSSLILHGADFSTKDADNDNCMCKCALMLTGGWWFDACGPSNLNGMFYTAGQNHGKLNGIKWHYFKGPSYSLRSTTMMIRPLDF

SEQ ID NO: 24455 - protein, 297 aa, Homo sapiens
  REGION 1..297: note = ENSP00000429349
MEGKHKEELDTLKEEKENLQGLVTRQTYIIQELEKQLNRATTNNSVLQKQQLELMDTVHNLVNLCTKEVLLKGGKREEEKPFRDCADVYQAGFNKSGIYTIYINNMPEPKKVFCNMDVNGGGWTVIQHREDGSLDFQRGWKEYKMGFGNPSGEYWLGNEFIFAITSQRQYMLRIELMDWEGNRAYSQYDRFHIGNEKQNYRLYLKGHTGTAGKQSSLILHGADFSTKDADNDNCMCKCALMLTGGWWFDACGPSNLNGMFYTAGQNHGKLNGIKWHYFKGPSYSLRSTTMMIRPLDF

SEQ ID NO: 24456 - protein, 30 aa, Homo sapiens
  REGION 1..30: note = ENSP00000428908
MKSEMAQIQQNAVQNHTATMLEIGTSLLSQ

SEQ ID NO: 24457 - protein, 460 aa, Homo sapiens
  REGION 1..460: note = ENSP00000360170
MFTIKLLLFIVPLVISSRIDQDNSSFDSLSPEPKSRFAMLDDVKILANGLLQLGHGLKDFVHKTKGQINDIFQKLNIFDQSFYDLSLQTSEIKEEEKELRRTTYKLQVKNEEVKNMSLELNSKLESLLEEKILLQQKVKYLEEQLTNLIQNQPETPEHPEVTSLKTFVEKQDNSIKDLLQTVEDQYKQLNQQHSQIKEIENQLRRTSIQEPTEISLSSKPRAPRTTPFLQLNEIRNVKHDGIPAECTTIYNRGEHTSGMYAIRPSNSQVFHVYCDVISGSPWTLIQHRIDGSQNFNETWENYKYGFGRLDGEFWLGLEKIYSIVKQSNYVLRIELEDWKDNKHYIEYSFYLGNHETNYTLHLVAITGNVPNAIPENKDLVFSTWDHKAKGHFNCPEGYSGGWWWHDECGENNLNGKYNKPRAKSKPERRRGLSWKSQNGRLYSIKSTKMLIHPTDSESFE

SEQ ID NO: 24458 - protein, 198 aa, Homo sapiens
  REGION 1..198: note = ENSP00000422195
MVLLAGTGPEGGGARCMTPPPPSPPRGAQVEEDPADYEEFEDFSSLPDTRSIASDDSFYPFEDEEEHGVESAESVPEGVPESVPETATLLRAACANNVGLLRTLVRRGVSVEEAQETDRNGRTGLIVACYHGFVDTVVALAECPHVDVNWQDSEGNTALITAAQAGAAPVPMGIVSLDTGSQSCASGVSITWAGSCEH

SEQ ID NO: 24459 - protein, 494 aa, Homo sapiens
  REGION 1..494: note = ENSP00000296657
MVLLAGTGPEGGGARCMTPPPPSPPRGAQVEEDPADYEEFEDFSSLPDTRSIASDDSFYPFEDEEEHGVESAESVPEGVPESVPETATLLRAACANNVGLLRTLVRRGVSVEEAQETDRNGRTGLIVACYHGFVDTVVALAECPHVDVNWQDSEGNTALITAAQAGHAIITNYLLNYFPGLDLERRNAFGFTALMKAAMQGRTDCIRALMLAGADVHARDPRRGMSPQEWATYTGRVDAVRLMQRLLERPCPEQFWEKYRPELPPPPEAARKPAGSKNCLQRLTDCVLSVLTPRSVRGPEDGGVLDHMVRMTTSLYSPAVAIVCQTVCPESPPSVGKRRLAVQEILAARAARGPQAQEEDEVGGAGQRGRTGQEDADSREGSPRAGLPPALGSRGPAAPAPRKASLLPLQRLRRRSVRPGVVVPRVRVSKAPAPTFQPERPARKGSTKDSGHLQIPKWRYKEAKEEKRKAEEAEKKRQAEAQKERRTAPWKKRT

SEQ ID NO: 24460 - protein, 44 aa, Homo sapiens
  REGION 1..44: note = ENSP00000421529
MLLLDCNPEVDGLKHLLETGASVNAPPDPCKQSPVHLAAGSGLA

SEQ ID NO: 24461 - protein, 158 aa, Homo sapiens
  REGION 1..158: note = ENSP00000335147
MLLLDCNPEVDGLKHLLETGASVNAPPDPCKQSPVHLAAGSGLACFLLWQLQTGADLNQQDVLGEAPLHKAAKVGSLECLSLLVASDAQIDLCNKNGQTAEDLAWSCGFPDCAKFLTTIKCMQTIKASEHPDRNDCVAVLRQKRSLGSVENTSGKRKC

SEQ ID NO: 24462 - protein, 198 aa, Homo sapiens
  REGION 1..198: note = ENSP00000377049
MPGVANSGPSTSSRETANPCSRKKVHFGSIHDAVRAGDVKQLSEIVVRGASINELDVLHKFTPLHWAAHSGSLECLHWLLWHGADITHVTTRGWTASHIAAIRGQDACVQALIMNGANLTAQDDRGCTPLHLAATHGHSFTLQIMLRSGVDPSVTDKREWRPVHYAAFHGRLGCLQLLVKWGCSIEDVDYNGNLPEPP

SEQ ID NO: 24463 - protein, 85 aa, Homo sapiens
  REGION 1..85: note = ENSP00000432375
MNGANLTAQDDRGCTPLHLAATHGHSFTLQIMLRSGVDPSVTDKREWRPVHYAAFHGRLGCLQLLVKWGCSIEDVDYNGNLPEPP

SEQ ID NO: 24464 - protein, 517 aa, Homo sapiens
  REGION 1..517: note = ENSP00000260047
MPGVANSGPSTSSRETANPCSRKKVHFGSIHDAVRAGDVKQLSEIVVRGASINELDVLHKFTPLHWAAHSGSLECLHWLLWHGADITHVTTRGWTASHIAAIRGQDACVQALIMNGANLTAQDDRGCTPLHLAATHGHSFTLQIMLRSGDPSVTDKREWRPVHYAAFHGRLGCLQLLVKWGCSIEDVDYNGNLPVHLAAMEGHLHCFKFLVSRMSSATQVLKAFNDNGENVLDLAQRFFKQNILQFIQGAEYEGKDLEDQETLAFPGHVAAFKGDLGMLKKLVEDGVININERADNGSTPMHKAAGQGHIECLQWLIKMGADSNITNKAGERPSDVAKRFAHLAAVKLLEELQKYDIDDENEIDENDVKYFIRHGVEGSTDAKDDLCLSDLDKTDARMRAYKKIVELRHLLEIAESNYKHLGGITEEDLKQKKEQLESEKTIKELQGQLEYERLRREKLECQLDEYRAEVDQLRETLEKIQVPNFVAMEDSASCESNKEKRRVKKKVSSGGVFVRRY

SEQ ID NO: 24465 - protein, 230 aa, Homo sapiens
  REGION 1..230: note = ENSP00000433585
MPGVANSGPSTSSRETANPCSRKKVHFGSIHDAVRAGDVKQLSEIVVRGASINELDVLHKFTPLHWAAHSGSLECLHWLLWHGADITHVTTRGWTASHIAAIRGQDACVQALIMNGANLTAQDDRGCTPLHLAATHGHSFTLQIMLRSGVDPSVTDKREWRPVHYAAFHGRLGCLQLLVKWGCSIEDVDYNGNLPGGSHLLLSIMATLRPLVKPRIIKKRTKKFFRHQTD

SEQ ID NO: 24466 - protein, 502 aa, Homo sapiens
  REGION 1..502: note = ENSP00000434666
MPGVANSGPSTSSRETANPCSRKKVHFGSIHDAVRAGDVKQLSEIVVRGASINELDVLHKFTPLHWAAHSGSLECLHWLLWHGADITHVTTRGWTASHIAAIRGQDACVQALIMNGANLTAQDDRGCTPLHLAATHGHSFTLQIMLRSGVDPSVTDKREWRPVHYAAFHGRLGCLQLLVKWGCSIEDVDYNGNLPVHLAAMEGHLHCFKFLVSRMSSATQVLKAFNDNGENVLDLAQRFFKQNILQFIQGAEYEGKDLEDQETLAFPGHVAAFKGDLGMLKKLVEDGVININERADNGSTPMHKAAGQGHIECLQWLIKMGADSNITNKAGERPSDVAKRFAHLAAVKLLEELQKYDIDDENEIDENDVKYFIRHGVEGSTDAKDDLCLSDLDKTDARMRAYKKIVELRHLLEIAESNYKHLGGITEEDLKQKKEQLESEKTIKELQGQLEYERLRREKLECQLDEYRAEVDQLRETLEKIQVPNFVAMTALLVSQTKRRGE

SEQ ID NO: 24467 - protein, 389 aa, Homo sapiens
  REGION 1..389: note = ENSP00000377051
MPGVANSGPSTSSRETANPCSRKKVHFGSIHDAVRAGDVKQLSEIVCLHWLLWHGADITHVTTRGWTASHIAAIRGQDACVQALIMNGANLTAQDDRGCTPLHLAATHGHSFTLQIMLRSGVDPSVTDKREWRPVHYAAFHGRLGCLQLLVKWGCSIEDVDYNGNLPVHLAAMEGHLHCFKFLVSRMSSATQVLKAFNDNGENVLDLAQRFFKQNILQFIQGAEYEGKDLEDQETLAFPGHVAAFKGDLGMLKKLVEDGVININERADNGSTPMHKAAGQGHIECLQWLIKMGADSNITNKAGERPSDVAKRFAHLAAVKLLEELQKYDIDDENEIDENDVKYFIRHGVEGSTDAKDDLCLSDLDKTDARRPSKNCRASWSMNDYVEKN

SEQ ID NO: 24468 - protein, 527 aa, Homo sapiens
  REGION 1..527: note = ENSP00000435790
MPGVANSGPSTSSRETANPCSRKKVHFGSIHDAVRAGDVKQLSEIVVRGASINELDVLHKFTPLHWAAHSGSLECLHWLLWHGADITHVTTRGWTASHIAAIRGQDACVQALIMNGANLTAQDDRGCTPLHLAATHGHSFTLQIMLRSGVDPSVTDKREWRPVHYAAFHGRLGCLQLLVKWGCSIEDVDYNGNLPVHLAAMEGHLHCFKFLVSRMSSATQVLKAFNDNGENVLDLAQRFFKQNILQFIQGAEYEGKDLEDQETLAFPGHVAAFKGDLGMLKKLVEDGVININERADNGSTPMHKAAGQGHIECLQWLIKMGADSNITNKAGERPSDVAKRFAHLAAVKLLEELQKYDIDDENEIDENDVKYFIRHGVEGSTDAKDDLCLSDLDKTDARMRAYKKIVELRHLLEIAESNYKHLGGITEEDLKQKKEQLESEKTIKELQGQLEYERLRREKLECQLDEYRAEVDQLRETLEKIQVPNFVAMVGVLFNTFIFLKKYIQEWPRVQALGWGSLDLNPGYSLF

SEQ ID NO: 24469 - protein, 142 aa, Homo sapiens
  REGION 1..142: note = ENSP00000435197
DLGMLKKLVEDGVININERADNGSTPMHKAAGQGHIECLQWLIKMGADSNITNKAGERPSDVAKRTIKELQGQLEYERLRREKLECQLDEYRAEVDQLRETLEKIQVPNFVAMEDSASCESNKEKRRVKKKVSSGGVFVRRY

SEQ ID NO: 24470 - protein, 1124 aa, Homo sapiens
  REGION 1..1124: note = ENSP00000265748
MDPFTEKLLERTRARRENLQRKMAERPTAAPRSMTHAKRARQPLSEASNQQPLSGGEEKSCTKPSPSKKRCSDNTEVEVSNLENKQPVESTSAKSCSPSPVSPQVQPQAADTISDSVAVPASLLGMRRGLNSRLEATAASSVKTRMQKLAEQRRRWDNDDMTDDIPESSLFSPMPSEEKAASPPRPLLSNASATPVGRRGRLANLAATICSWEDDVNHSFAKQNSVQEQPGTACLSKFSSASGASARINSSSVKQEATFCSQRDGDASLNKALSSSADDASLVNASISSSVKATSPVKSTTSITDAKSCEGQNPELLPKTPISPLKTGVSKPIVKSTLSQTVPSKGELSREICLQSQSKDKSTTPGGTGIKPFLERFGERCQEHSKESPARSTPHRTPIITPNTKAIQERLFKQDTSSSTTHLAQQLKQERQKELACLRGRFDKGNIWSAEKGGNSKSKQLETKQETHCQSTPLKKHQGVSKTQSLPVTEKVTENQIPAKNSSTEPKGFTECEMTKSSPLKITLFLEEDKSLKVTSDPKVEQKIEVIREIEMSVDDDDINSSKVINDLFSDVLEEGELDMEKSQEEMDQALAESSEEQEDALNISSMSLLAPLAQTVGVVSPESLVSTPRLELKDTSRSDESPKPGKFQRTRVPRAESGDSLGSEDRDLLYSIDAYRSQRFKETERPSIKQVIVRKEDVTSKLDEKNNAFPCQVNIKQKMQELNNEINMQQTVIYQASQALNCCVDEEHGKGSLEEAEAERLLLIATGKRTLLIDELNKLKNEGPQRKNKASPQSEFMPSKGSVTLSEIRLPLKADFVCSTVQKPDAANYYYLIILKAGAENMVATPLASTSNSLNGDALTFTTTFTLQDVSNDFEINIEVYSLVQKKDPSGLDKKKKTSKSKAITPKRLLTSITTKSNIHSSVMASPGGLSAVRTSNFALVGSYTLSLSSVGNTKFVLDKVPFLSSLEGHIYLKIKCQVNSSVEERGFLTIFEDVSGFGAWHRRWCVLSGNCISYWTYPDDEKRKNPIGRINLANCTSRQIEPANREFCARRNTFELITVRPQREDDRETLVSQCRDTLCVTKNWLSADTKEERDLWMQKLNQVLVDIRLWQPDACYKPIGKP

SEQ ID NO: 24471 - protein, 1087 aa, Homo sapiens
  REGION 1..1087: note = ENSP00000379380
MDPFTEKLLERTRARRENLQRKMAERPTAAPRSMTHAKRARQPLSEASNQQPLSGGEEKSCTKPSPSKKRCSDNTEVEVSNLENKQPVESTSAKSCSPSPVSPQVQPQAADTISDSVAVPASLLGMRRGLNSRLEATAASSVKTRMQKLAEQRRRWDNDDMTDDIPESSLFSPMPSEEKAASPPRPLLSNASATPVGRRGRLANLAATICSWEDDVNHSFAKQNSVQEQPGTACLSKFSSASGASARINSSSVKQEATFCSQRDGDASLNKALSSSADDASLVNASISSSVKATSPVKSTTSITDAKSCEGQNPELLPKTPISPLKTGVSKPIVKSTLSQTVPSKGELSREICLQSQSKDKSTTPGGTGIKPFLERFGERCQEHSKESPARSTPHRTPIITPNTKAIQERLFKQDTSSSTTHLAQQLKQERQKELACLRGRFDKGNIWSAEKGGNSKSKQLETKQETHCQSTPLKKHQGVSKTQSLPVTEKVTENQIPAKNSSTEPKEVIREIEMSVDDDDINSSKVINDLFSDVLEEGELDMEKSQEEMDQALAESSEEQEDALNISSMSLLAPLAQTVGVVSPESLVSTPRLELKDTSRSDESPKPGKFQRTRVPRAESGDSLGSEDRDLLYSIDAYRSQRFKETERPSIKQVIVRKEDVTSKLDEKNNAFPCQVNIKQKMQELNNEINMQQTVIYQASQALNCCVDEEHGKGSLEEAEAERLLLIATGKRTLLIDELNKLKNEGPQRKNKASPQSEFMPSKGSVTLSEIRLPLKADFVCSTVQKPDAANYYYLIILKAGAENMVATPLASTSNSLNGDALTFTTTFTLQDVSNDFEINIEVYSLVQKKDPSGLDKKKKTSKSKAITPKRLLTSITTKSNIHSSVMASPGGLSAVRTSNFALVGSYTLSLSSVGNTKFVLDKVPFLSSLEGHIYLKIKCQVNSSVEERGFLTIFEDVSGFGAWHRRWCVLSGNCISYWTYPDDEKRKNPIGRINLANCTSRQIEPANREFCARRNTFELITVRPQREDDRETLVSQCRDTLCVTKNWLSADTKEERDLWMQKLNQVLVDIRLWQPDACYKPIGKP

SEQ ID NO: 24472 - protein, 169 aa, Homo sapiens
  REGION 1..169: note = ENSP00000404979
MAERPTAAPRSMTHAKRARQPLSEASNQQPLSGGEEKSCTKPSPSKKRCSDNTEVEVSNLENKQPVESTSAKSCSPSPVSPQVQPQAADTISDSVAVPASLLGMRRGLNSRLEATAASSVKTRMQKLAEQRRRWDNDDMTDDIPESSLFSPMPSEEKAASPPRPLLSNA

SEQ ID NO: 24473 - protein, 36 aa, Homo sapiens
  REGION 1..36: note = ENSP00000406584
MAERPTAAPRSMTHAKRARQPLSEASNQQPLSGGEG

SEQ ID NO: 24474 - protein, 73 aa, Homo sapiens
  REGION 1..73: note = ENSP00000398712
KFSSASGASARINSSSVKQEATFCSQRDGDASLNKALSSSADDASLVNASISSSVCFHVSESYFSSEIYYIYH

SEQ ID NO: 24475 - protein, 69 aa, Homo sapiens
  REGION 1..69: note = ENSP00000397465
  VARIANT 1: note = Any amino acid
XFSSASGASARINSSSVKQEATFCSQRDGDASLNKALSSSADDASLVNASISSSVVKSYFSSEIYYIYH

SEQ ID NO: 24476 - protein, 26 aa, Homo sapiens
  REGION 1..26: note = ENSP00000413441
  VARIANT 1: note = Any amino acid
XSLVNASISSSVVKSYFSSEIYYIYH

SEQ ID NO: 24477 - protein, 236 aa, Homo sapiens
  REGION 1..236: note = ENSP00000413522
  VARIANT 1: note = Any amino acid
XQEHSKESPARSTPHRTPIITPNTKAIQERLFKQDVSNDFEINIEVYSLVQKKDPSGLDKKKKTSKSKAITPKRLLTSITTKSNIHSSVMASPGGLSAVRTSNFALVGSYTLSLSSVGNTKFVLDKVPFLSSLEGHIYLKIKCQVNSSVEERGFLTIFEDVSGFGAWHRRWCVLSGNCISYWTYPDDEKRKNPIGRINLANCTSRQIEPANREFCARRNTFELITVRPQREDDRET

SEQ ID NO: 24478 - protein, 276 aa, Homo sapiens
  REGION 1..276: note = ENSP00000400777
  VARIANT 1: note = Any amino acid
XPKPGKFQRTRVPRAESGDSLGSEDRDLLYRSQRFKETERPSIKQVIVRKEDVTSKLDEKNNAFPCQVNIKQKMQELNNEINMQQTVIYQASQALNCCVDEEHGKGSLEEAEAERLLLIATGKRTLLIDELNKLKNEGPQRKNKASPQSEFMPSKGSVTLSEIRLPLKADFVCSTVQKPDAANYYYLIILKAGAENMVATPLASTSNSLNGDALTFTTTFTLQDVSNDFEINIEVYSLVQKKDPSGLDKKKKTSKSKAITPKRLLTSITTKSNIHS

SEQ ID NO: 24479 - protein, 252 aa, Homo sapiens
  REGION 1..252: note = ENSP00000399553
  VARIANT 1: note = Any amino acid
XMPSKGSVTLSEIRLPLKADFVCSTVQKPDAANYYYLIILKAGAENMVATPLASTSNSLNGDALTFTTTFTLQDVSNDFEINIEVYSLVQKKDPSGLDKKKKTSKSKAITPKRLLTSITTKSNIHSSVMASPGGLSAVRTSNFALVGSYTLSLSSVGNTKFVLDKINYDVRERELLGYLFQEKVPFLSSLEGHIYLKIKCQVNSSVEERGFLTIFEDVSGFGAWHRRWCVLSGNCISYWTYPDDEKRKNPIG

SEQ ID NO: 24480 - protein, 176 aa, Homo sapiens
  REGION 1..176: note = ENSP00000469449
  VARIANT 1: note = Any amino acid
XSVITNAFVIAITSDFIPRLVYAYKYGPCAGQGEAGQKCMVGYVNASLSVFRISDFENRSEPESDGSEFSGTPLKYCRYRDYRDPPHSLVPYGYTLQFWHVLAARLAFIIVFEHLVFCIKHLISYLIPDLPKDLRDRMRREKYLIQEMMYEAELERLQKERKERKKNGKAHHNEWP

SEQ ID NO: 24481 - protein, 176 aa, Homo sapiens; identical to SEQ ID NO: 24480
  REGION 1..176: note = ENSP00000470039
  VARIANT 1: note = Any amino acid

SEQ ID NO: 24482 - protein, 176 aa, Homo sapiens; identical to SEQ ID NO: 24480
  REGION 1..176: note = ENSP00000471431
  VARIANT 1: note = Any amino acid

SEQ ID NO: 24483 - protein, 190 aa, Homo sapiens
  REGION 1..190: note = ENSP00000449116
MEASSSGITNGKTKVFHPEGGVDLQGYQLDMQILPDGPKSDVDFSEILNAIQEMAKDVNILFDELEAVSSPCKDDDSLLHPGNLTSTSDDASRLEAGGETVPERNKSNGLYFRDGKCRIDYILVYRKSNPQTEKREVFERNIRAEGLQMEKESSLINSDIIFVKLHAPWEVLGRYAEQMNVRMPFSSNCN

SEQ ID NO: 24484 - protein, 11 aa, Homo sapiens
  REGION 1..11: note = ENSP00000447867
MEASSSGITNG

SEQ ID NO: 24485 - protein, 920 aa, Homo sapiens
  REGION 1..920: note = ENSP00000376705
MEASSSGITNGKTKVFHPVAKDVNILFDELEAVSSPCKDDDSLLHPGNLTSTSDDASRLEAGGETVPERNKSNGLYFRDGKCRIDYILVYRKSNPQTEKREVFERNIRAEGLQMEKESSLINSDIIFVKLHAPWEVLGRYAEQMNVRMPFRRKIYYLPRRYKFMSRIDKQISRFRRWLPKKPMRLDKETLPDLEENDCYTAPFSQQRIHHFIIHNKETFFNNATRSRIVHHILQRIKYEEGKNKIGLNRLLTNGSYEAAFPLHEGSYRSKNSIRTHGAENHRHLLYECWASWGVWYKYQPLDLVRRYFGEKIGLYFAWLGWYTGMLFPAAFIGLFVFLYGVTTLDHSQVSKEVCQATDIIMCPVCDKYCPFMRLSDSCVYAKVTHLFDNGATVFFAVFMAVWATVFLEFWKRRRAVIAYDWDLIDWEEEEEEIRPQFEAKYSKKERMNPISGKPEPYQAFTDKCSRLIVSASGIFFMICVVIAAVFGIVIYRVVTVSTFAAFKWALIRNNSQVATTGTAVCINFCIIMLLNVLYEKVALLLTNLEQPRTESEWENSFTLKMFLFQFVNLNSSTFYIAFFLGRFTGHPGAYLRLINRWRLEECHPSGCLIDLCMQMGIIMVLKQTWNNFMELGYPLIQNWWTRRKVRQEHGPERKISFPQWEKDYNLQPMNAYGLFDEYLEMILQFGFTTIFVAAFPLAPLLALLNNIIEIRLDAYKFVTQWRRPLASRAKDIGIWYGILEGIGILSVITNAFVIAITSDFIPRLVYAYKYGPCAGQGEAGQKCMVGYVNASLSVFRISDFENRSEPESDGSEFSGTPLKYCRYRDYRDPPHSLVPYGYTLQFWHVLAARLAFIIVFEHLVFCIKHLISYLIPDLPKDLRDRMRREKYLIQEMMYEAELERLQKERKERKKNGKAHHNEWP

SEQ ID NO: 24486 - protein, 955 aa, Homo sapiens
  REGION 1..955: note = ENSP00000376703
MEASSSGITNGKTKVFHPEGGVDLQGYQLDMQILPDGPKSDVDFSEILNAIQEMAKDVNILFDELEAVSSPCKDDDSLLHPGNLTSTSDDASRLEAGGETVPERNKSNGLYFRDGKCRIDYILVYRKSNPQTEKREVFERNIRAEGLQMEKESSLINSDIIFVKLHAPWEVLGRYAEQMNVRMPFRRKIYYLPRRYKFMSRIDKQISRFRRWLPKKPMRLDKETLPDLEENDCYTAPFSQQRIHHFIIHNKETFFNNATRSRIVHHILQRIKYEEGKNKIGLNRLLTNGSYEAAFPLHEGSYRSKNSIRTHGAENHRHLLYECWASWGVWYKYQPLDLVRRYFGEKIGLYFAWLGWYTGMLFPAAFIGLFVFLYGVTTLDHSQVSKEVCQATDIIMCPVCDKYCPFMRLSDSCVYAKVTHLFDNGATVFFAVFMAVWATVFLEFWKRRRAVIAYDWDLIDWEEEEEEIRPQFEAKYSKKERMNPISGKPEPYQAFTDKCSRLIVSASGIFFMICVVIAAVFGIVIYRVVTVSTFAAFKWALIRNNSQVATTGTAVCINFCIIMLLNVLYEKVALLLTNLEQPRTESEWENSFTLKMFLFQFVNLNSSTFYIAFFLGRFTGHPGAYLRLINRWRLEECHPSGCLIDLCMQMGIIMVLKQTWNNFMELGYPLIQNWWTRRKVRQEHGPERKISFPQWEKDYNLQPMNAYGLFDEYLEMILQFGFTTIFVAAFPLAPLLALLNNIIEIRLDAYKFVTQWRRPLASRAKDIGIWYGILEGIGILSVITNAFVIAITSDFIPRLVYAYKYGPCAGQGEAGQKCMVGYVNASLSVFRISDFENRSEPESDGSEFSGTPLKYCRYRDYRDPPHSLVPYGYTLQFWHVLAARLAFIIVFEHLVFCIKHLISYLIPDLPKDLRDRMRREKYLIQEMMYEAELERLQKERKERKKNGKAHHNEWP

SEQ ID NO: 24487 - protein, 475 aa, Homo sapiens
  REGION 1..475: note = ENSP00000450192
MAVWATVFLEFWKRRRAVIAYDWDLIDWEEEEICVVIAAVFGIVIYRVVTVSTFAAFKWALIRNNSQVATTGTAVCINFCIIMLLNVLYEKVALLLTNLEQPRTESEWENSFTLKMFLFQFVNLNSSTFYIAFFLGRFTGHPGAYLRLINRWRLEECHPSGCLIDLCMQMGIIMVLKQTWNNFMELGYPLIQNWWTRRKVRQEHGPERKISFPQWEKDYNLQPMNAYGLFDEYLEMILQFGFTTIFVAAFPLAPLLALLNNIIEIRLDAYKFVTQWRRPLASRAKDIGIWYGILEGIGILSVITNAFVIAITSDFIPRLVYAYKYGPCAGQGEAGQKCMVGYVNASLSVFRISDFENRSEPESDGSEFSGTPLKYCRYRDYRDPPHSLVPYGYTLQFWHVLAARLAFIIVFEHLVFCIKHLISYLIPDLPKDLRDRMRREKYLIQEMMYEAELERLQKERKERKKNGKAHHNEWP

SEQ ID NO: 24488 - protein, 929 aa, Homo sapiens
  REGION 1..929: note = ENSP00000391417
MKKMSRNVLLQMEEEEDDDDGDIVLENLGQTIVPDLGSLESQHDFRTPEFEEFNGKPDSLFFNDGQRRIDFVLVYEDESRKETNKKGTNEKQRRKRQAYESNLICHGLQLEATRSVLDDKLVFVKVHAPWEVLCTYAEIMHIKLPLKPNDLKNRSSAFGTLNWFTKVLSVDESIIKPEQEFFTAPFEKNRMNDFYIVDRDAFFNPATRSRIVYFILSRVKYQVINNVSKFGINRLVNSGIYKAAFPLHDCKFRRQSEDPSCPNERYLLYREWAHPRSIYKKQPLDLIRKYYGEKIGIYFAWLGYYTQMLLLAAVVGVACFLYGYLNQDNCTWSKEVCHPDIGGKIIMCPQCDRLCPFWKLNITCESSKKLCIFDSFGTLVFAVFMGVWVTLFLEFWKRRQAELEYEWDTVELQQEEQARPEYEARCTHVVINEITQEEERIPFTAWGKCIRITLCASAVFFWILLIIASVIGIIVYRLSVFIVFSAKLPKNINGTDPIQKYLTPQTATSITASIISFIIIMILNTIYEKVAIMITNFELPRTQTDYENSLTMKMFLFQFVNYYSSCFYIAFFKGKFVGYPGDPVYWLGKYRNEECDPGGCLLELTTQLTIIMGGKAIWNNIQEVLLPWIMNLIGRFHRVSGSEKITPRWEQDYHLQPMGKLGLFYEYLEMIIQFGFVTLFVASFPLAPLLALVNNILEIRVDAWKLTTQFRRLVPEKAQDIGAWQPIMQGIAILAVVTNAMIIAFTSDMIPRLVYYWSFSVPPYGDHTSYTMEGYINNTLSIFKVADFKNKSKGNPYSDLGNHTTCRYRDFRYPPGHPQEYKHNIYYWHVIAAKLAFIIVMEYLALLPRLGHSGMILAHCNLRLPVDCCMCYRFVDEIRLLEQLTSDFIDSLYYIFSISIISIFFSVTFFFLLLSLGPTPCFSVSNFLS

SEQ ID NO: 24489 - protein, 931 aa, Homo sapiens
  REGION 1..931: note = ENSP00000409126
MKKMSRNVLLQMEEEEDDDDGDIGDVPASRRPFLTPHTHLPSSLVLENLGQTIVPDLGSLESQHDFRTPEFEEFNGKPDSLFFNDGQRRIDFVLVYEDESRKETNKKGTNEKQRRKRQAYESNLICHGLQLEATRSVLDDKLVFVKVHAPWEVLCTYAEIMHIKLPLKPNDLKNRSSAFGTLNWFTKVLSVDESIIKPEQEFFTAPFEKNRMNDFYIVDRDAFFNPATRSRIVYFILSRVKYQVINNVSKFGINRLVNSGIYKAAFPLHDCKFRRQSEDPSCPNERYLLYREWAHPRSIYKKQPLDLIRKYYGEKIGIYFAWLGYYTQMLLLAAVVGVACFLYGYLNQDNCTWSKEVCHPDIGGKIIMCPQCDRLCPFWKLNITCESSKKLCIFDSFGTLVFAVFMGVWVTLFLEFWKRRQAELEYEWDTVELQQEEQARPEYEARCTHVVINEITQEEERIPFTAWGKCIRITLCASAVFFWILLIIASVIGIIVYRLSVFIVFSAKLPKNINGTDPIQKYLTPQTATSITASIISFIIIMILNTIYEKVAIMITNFELPRTQTDYENSLTMKMFLFQFVNYYSSCFYIAFFKGKFVGYPGDPVYWLGKYRNEECDPGGCLLELTTQLTIIMGGKAIWNNIQEVLLPWIMNLIGRFHRVSGSEKITPRWEQDYHLQPMGKLGLFYEYLEMIIQFGFVTLFVASFPLAPLLALVNNILEIRVDAWKLTTQFRRLVPEKAQDIGAWQPIMQGIAILAVVTNAMIIAFTSDMIPRLVYYWSFSVPPYGDHTSYTMEGYINNTLSIFKVADFKNKSKGNPYSDLGNHTTCRYRDFRYPPGHPQEYKHNIYYWHVIAAKLAFIIVMEHVIYSVKFFISYAIPDVSKRTKSKIQREKYLTQKLLHENHLKDMTKNMGVIAERMIEAVDNNLRPKSE

SEQ ID NO: 24490 - protein, 45 aa, Homo sapiens
  REGION 1..45: note = ENSP00000449423
MKKMSRNVLLQMEEEEDDDDGDIGLKCSSGVAQSWLTVALTPRLN

SEQ ID NO: 24491 - protein, 910 aa, Homo sapiens
  REGION 1..910: note = ENSP00000320087
MKKMSRNVLLQMEEEEDDDDGDIVLENLGQTIVPDLGSLESQHDFRTPEFEEFNGKPDSLFFNDGQRRIDFVLVYEDESRKETNKKGTNEKQRRKRQAYESNLICHGLQLEATRSVLDDKLVFVKVHAPWEVLCTYAEIMHIKLPLKPNDLKNRSSAFGTLNWFTKVLSVDESIIKPEQEFFTAPFEKNRMNDFYIVDRDAFFNPATRSRIVYFILSRVKYQVINNVSKFGINRLVNSGIYKAAFPLHDCKFRRQSEDPSCPNERYLLYREWAHPRSIYKKQPLDLIRKYYGEKIGIYFAWLGYYTQMLLLAAVVGVACFLYGYLNQDNCTWSKEVCHPDIGGKIIMCPQCDRLCPFWKLNITCESSKKLCIFDSFGTLVFAVFMGVWVTLFLEFWKRRQAELEYEWDTVELQQEEQARPEYEARCTHVVINEITQEEERIPFTAWGKCIRITLCASAVFFWILLIIASVIGIIVYRLSVFIVFSAKLPKNINGTDPIQKYLTPQTATSITASIISFIIIMILNTIYEKVAIMITNFELPRTQTDYENSLTMKMFLFQFVNYYSSCFYIAFFKGKFVGYPGDPVYWLGKYRNEECDPGGCLLELTTQLTIIMGGKAIWNNIQEVLLPWIMNLIGRFHRVSGSEKITPRWEQDYHLQPMGKLGLFYEYLEMIIQFGFVTLFVASFPLAPLLALVNNILEIRVDAWKLTTQFRRLVPEKAQDIGAWQPIMQGIAILAVVTNAMIIAFTSDMIPRLVYYWSFSVPPYGDHTSYTMEGYINNTLSIFKVADFKNKSKGNPYSDLGNHTTCRYRDFRYPPGHPQEYKHNIYYWHVIAAKLAFIIVMEHVIYSVKFFISYAIPDVSKRTKSKIQREKYLTQKLLHENHLKDMTKNMGVIAERMIEAVDNNLRPKSE

SEQ ID NO: 24492 - protein, 892 aa, Homo sapiens
  REGION 1..892: note = ENSP00000413137
MFCAAVLENLGQTIVPDLGSLESQHDFRTPEFEEFNGKPDSLFFNDGQRRIDFVLVYEDESRKETNKKGTNEKQRRKRQAYESNLICHGLQLEATRSVLDDKLVFVKVHAPWEVLCTYAEIMHIKLPLKPNDLKNRSSAFGTLNWFTKVLSVDESIIKPEQEFFTAPFEKNRMNDFYIVDRDAFFNPATRSRIVYFILSRVKYQVINNVSKFGINRLVNSGIYKAAFPLHDCKFRRQSEDPSCPNERYLLYREWAHPRSIYKKQPLDLIRKYYGEKIGIYFAWLGYYTQMLLLAAVVGVACFLYGYLNQDNCTWSKEVCHPDIGGKIIMCPQCDRLCPFWKLNITCESSKKLCIFDSFGTLVFAVFMGVWVTLFLEFWKRRQAELEYEWDTVELQQEEQARPEYEARCTHVVINEITQEEERIPFTAWGKCIRITLCASAVFFWILLIIASVIGIIVYRLSVFIVFSAKLPKNINGTDPIQKYLTPQTATSITASIISFIIIMILNTIYEKVAIMITNFELPRTQTDYENSLTMKMFLFQFVNYYSSCFYIAFFKGKFVGYPGDPVYWLGKYRNEECDPGGCLLELTTQLTIIMGGKAIWNNIQEVLLPWIMNLIGRFHRVSGSEKITPRWEQDYHLQPMGKLGLFYEYLEMIIQFGFVTLFVASFPLAPLLALVNNILEIRVDAWKLTTQFRRLVPEKAQDIGAWQPIMQGIAILAVVTNAMIIAFTSDMIPRLVYYWSFSVPPYGDHTSYTMEGYINNTLSIFKVADFKNKSKGNPYSDLGNHTTCRYRDFRYPPGHPQEYKHNIYYWHVIAAKLAFIIVMEHVIYSVKFFISYAIPDVSKRTKSKIQREKYLTQKLLHENHLKDMTKNMGVIAERMIEAVDNNLRPKSE

SEQ ID NO: 24493 - protein, 323 aa, Homo sapiens
  REGION 1..323: note = ENSP00000264908
MASIWVGHRGTVRDYPDFSPSVDAEAIQKAIRGIGTDEKMLISILTERSNAQRQLIVKEYQAAYGKELKDDLKGDLSGHFEHLMVALVTPPAVFDAKQLKKSMKGAGTNEDALIEILTTRTSRQMKDISQAYYTVYKKSLGDDISSETSGDFRKALLTLADGRRDESLKVDEHLAKQDAQILYKAGENRWGTDEDKFTEILCLRSFPQLKLTFDEYRNISQKDIVDSIKGELSGHFEDLLLAIVNCVRNTPAFLAERLHRALKGIGTDEFTLNRIMVSRSEIDLLDIRTEFKKHYGYSLYSAIKSDTSGDYEITLLKICGGDD

SEQ ID NO: 24494 - protein, 284 aa, Homo sapiens
  REGION 1..284: note = ENSP00000423068
MLISILTERSNAQRQLIVKEYQAAYGKELKDDLKGDLSGHFEHLMVALVTPPAVFDAKQLKKSMKGAGTNEDALIEILTTRTSRQMKDISQAYYTVYKKSLGDDISSETSGDFRKALLTLADGRRDESLKVDEHLAKQDAQILYKAGENRWGTDEDKFTEILCLRSFPQLKLTFDEYRNISQKDIVDSIKGELSGHFEDLLLAIVNCVRNTPAFLAERLHRALKGIGTDEFTLNRIMVSRSEIDLLDIRTEFKKHYGYSLYSAIKSDTSGDYEITLLKICGGDD

SEQ ID NO: 24495 - protein, 55 aa, Homo sapiens
  REGION 1..55: note = ENSP00000426591
MASIWGRRDESLKVDEHLAKQDAQILYKAGENRWGTDEDKFTEILCLRSFPQLKL

SEQ ID NO: 24496 - protein, 284 aa, Homo sapiens; identical to SEQ ID NO: 24494
  REGION 1..284: note = ENSP00000421015

SEQ ID NO: 24497 - protein, 104 aa, Homo sapiens
  REGION 1..104: note = ENSP00000424584
MASIWVGHRGTVRDYPDFSPSVDAEAIQKAIRGIGTDEKMLISILTERSNAQRQLIVKEYQAAYGKELKDDLKGDLSGHFEHLMVALVTPPAVFDAKQLKKSMK

SEQ ID NO: 24498 - protein, 154 aa, Homo sapiens
  REGION 1..154: note = ENSP00000421512
MASIWVGHRGTVRDYPDFSPSVDAEAIQKAIRGIGTDEKMLISILTERSNAQRQLIVKEYQAAYGKELKDDLKGDLSGHFEHLMVALVTPPAVFDAKQLKKSMKGAGTNEDALIEILTTRTSRQMKDISQAYYTVYKKSLGDDISSETSGDFRK

SEQ ID NO: 24499 - protein, 134 aa, Homo sapiens
  REGION 1..134: note = ENSP00000422281
MASIWVGHRGTVRDYPDFSPSVDAEAIQKAIRGIGTDEKMLISILTERSNAQRQLIVKEYQAAYGKELKDDLKGDLSGHFEHLMVALVTPPAVFDAKQLKKSMKGAGTNEDALIEILTTRTSRQMKDISQAYYT

SEQ ID NO: 24500 - protein, 1338 aa, Homo sapiens
  REGION 1..1338: note = ENSP00000363832
MDRASELLFYVNGRKVIEKNVDPETMLLPYLRKKLRLTGTKYGCGGGGCGACTVMISRYNPITKRIRHHPANACLIPICSLYGAAVTTVEGIGSTHTRIHPVQERIAKCHGTQCGFCTPGMVMSIYTLLRNHPEPTLDQLTDALGGNLCRCTGYRPIIDACKTFCKTSGCCQSKENGVCCLDQGINGLPEFEEGSKTSPKLFAEEEFLPLDPTQELIFPPELMIMAEKQSQRTRVFGSERMMWFSPVTLKELLEFKFKYPQAPVIMGNTSVGPEVKFKGVFHPVIISPDRIEELSVVNHAYNGLTLGAGLSLAQVKDILADVVQKLPEEKTQMYHALLKHLGTLAGSQIRNMASLGGHIISRHPDSDLNPILAVGNCTLNLLSKEGKRQIPLNEQFLSKCPNADLKPQEILVSVNIPYSRKWEFVSAFRQAQRQENALAIVNSGMRVFFGEGDGIIRELCISYGGVGPATICAKNSCQKLIGRHWNEQMLDIACRLILNEVSLLGSAPGGKVEFKRTLIISFLFKFYLEVSQILKKMDPVHYPSLADKYESALEDLHSKHHCSTLKYQNIGPKQHPEDPIGHPIMHLSGVKHATGEAIYCDDMPLVDQELFLTFVTSSRAHAKIVSIDLSEALSMPGVVDIMTAEHLSDVNSFCFFTEAEKFLATDKVFCVGQLVCAVLADSEVQAKRAAKRVKIVYQDLEPLILTIEESIQHNSSFKPERKLEYGNVDEAFKVVDQILEGEIHMGGQEHFYMETQSMLVVPKGEDQEMDVYVSTQFPKYIQDIVASTLKLPANKVMCHVRRVGGAFGGKVLKTGIIAAVTAFAANKHGRAVRCVLERGEDMLITGGRHPYLGKYKAGFMNDGRILALDMEHYSNAGASLDESLFVIEMGLLKMDNAYKFPNLRCRGWACRTNLPSNTAFRGFGFPQAALITESCITEVAAKCGLSPEKVRIINMYKEIDQTPYKQEINAKNLIQCWRECMAMSSYSLRKVAVEKFNAENYWKKKGLAMVPLKFPVGLGSRAAGQAAALVHIYLDGSVLVTHGGIEMGQGVHTKMIQVVSRELRMPMSNVHLRGTSTETVPNANISGGSVVADLNGLAVKDACQTLLKRLEPIISKNPKGTWKDWAQTAFDESINLSAVGYFRGYESDMNWEKGEGQPFEYFVYGAACSEVEIDCLTGDHKNIRTDIVMDVGCSINPAIDIGQIEGAFIQGMGLYTIEELNYSPQGILHTRGPDQYKIPAICDMPTELHIALLPPSQNSNTLYSSKGLGESGVFLGCSVFFAIHDAVSAARQERGLHGPLTLNSPLTPEKIRMACEDKFTKMIPRDEPGSYVPWNVPI

SEQ ID NO: 24501 - protein, 151 aa, Homo sapiens
  REGION 1..151: note = ENSP00000392485
MLLPYLRKKLRLTGTKYGCGGGGCGACTVMISRYNPITKRIRHHPANACLIPICSLYGAAVTTVEGIGSTHTRIHPVQERIAKCHGTQCGFCTPGMVMSIYTLLRNHPEPTLDQLTDALGGNLCRCTGYRPIIDACKTFCKTSGCCQSKEN

SEQ ID NO: 24502 - protein, 193 aa, Homo sapiens
  REGION 1..193: note = ENSP00000260930
SKNPKGTWKDWAQTAFDESINLSAVGYFRGYESDMNWEKGEGQPFEYFVYGAACSEVEIDCLTGDHKNIRTDIVMDVGCSINPAIDIGQGILHTRGPDQYKIPAICDMPTELHIALLPPSQNSNTLYSSKGLGESGVFLGCSVFFAIHDAVSAARQERGLHGPLTLNSPLTPEKIRMACEDKFTKMIPRDEPG

SEQ ID NO: 24503 - protein, 190 aa, Homo sapiens
  REGION 1..190: note = ENSP00000413326
YFVYGAACSEVEIDCLTGDHKNIRTDIVMDVGCSINPAIDIGQIEGAFIQGMGLYTIEELNYSPQGILHTRGPDQYKIPAICDMPTELHIALLPPSQNSNTLYSSKGLGESGVFLGCSVFFAIHDAVSAARQERGLHGPLTLNSPLTPEKIRMACEDKFTKMGAHGKPVRRTQEQVLLIQLHKIQPMLVA

SEQ ID NO: 24504 - protein, 164 aa, Homo sapiens
  REGION 1..164: note = ENSP00000397155
MIHFILLFSRQGKLRLQKWYITLPDKERKKITREIVQIILSRGHRTSSFVDWKELKLVYKRYASLYFCCAIENQDNELLTLEIVHRYVELLDKYFGNVCELDIIFNFEKAYFILDEFIIGGEIQETSKKIAVKAIEDSDMLQENRLSPRGRDCSEPRSCHCTLA

SEQ ID NO: 24505 - protein, 104 aa, Homo sapiens
  REGION 1..104: note = ENSP00000401705
MIHFILLFSRQGKLRLQKWYITLPDKERKKITREIVQIILSRGHRTSSFVDWKELKLVYKRYASLYFCCAIENQDNELLTLEIVHRYVELLDKYFGNTWPFARA

SEQ ID NO: 24506 - protein, 81 aa, Homo sapiens
  REGION 1..81: note = ENSP00000333888
MIHFILLFSRQGKLRLQKWYITLPDKERKKITREIVQIILSRGHRTSSFVDWKELKLVYKRSVSWILSLILKRLISSWTSL

SEQ ID NO: 24507 - protein, 154 aa, Homo sapiens
  REGION 1..154: note = ENSP00000379891
MIHFILLFSRQGKLRLQKWYITLPDKERKKITREIVQIILSRGHRTSSFVDWKELKLVYKRYASLYFCCAIENQDNELLTLEIVHRYVELLDKYFGNVCELDIIFNFEKAYFILDEFIIGGEIQETSKKIAVKAIEDSDMLQETMEEYMNKPTF

SEQ ID NO: 24508 - protein, 63 aa, Homo sapiens
  REGION 1..63: note = ENSP00000379890
MIHFILLFSRQGKLRLQKWYITLPDKERKKITREIVQIILSRGHRTSSFVDWKELKLVYKRCL

SEQ ID NO: 24509 - protein, 154 aa, Homo sapiens
  REGION 1..154: note = ENSP00000388738
MIHFILLFSRQGKLRLQKWYITLPDKERKKITREIVQIILSRGHRTSSFVDWKELKLVYKRYASLYFCCAIENQDNELLTLEIVHRYVELLDKYFGNVCELDIIFNFEKAYFILDEFIIGGEIQETSKKIAVKAIEDSDMLQEVSTVSQTMGER

SEQ ID NO: 24510 - protein, 56 aa, Homo sapiens
  REGION 1..56: note = ENSP00000399738
MISFLDEERLGGGGGDCIFVGKTVSRLLNVCELDIIFNFEKAYFILDEFIIGGEIQ

SEQ ID NO: 24511 - protein, 137 aa, Homo sapiens
  REGION 1..137: note = ENSP00000387199
MIHFILLFSRQGKLRLQKWYITLPDKERKKITREIVQIILSRGHRTSSFVDWKELKLVYKRYASLYFCCAIENQDNELLTLEIVHRYVELLDKYFGNEFNCWFLLMRLLSVLDSWSTPALNSEVPQLATITPDFCLF

SEQ ID NO: 24512 - protein, 70 aa, Homo sapiens
  REGION 1..70: note = ENSP00000488632
MAHRKLESVGSGMLDHRVRPGPVPHSQEPESEDMELPLEGYVPEGLELAALRPESPAPEEQECHNHSPDG

SEQ ID NO: 24513 - protein, 4 aa, Homo sapiens
  REGION 1..4: note = ENSP00000488322
MAHR

SEQ ID NO: 24514 - protein, 737 aa, Homo sapiens
  REGION 1..737: note = ENSP00000483174
MAHRKLESVGSGMLDHRVRPGPVPHSQEPESEDMELPLEGYVPEGLELAALRPESPAPEEQECHNHSPDGDSSSDYVNNTSEEEDYDEGLPEEEEGITYYIRYCPEDDSYLEGMDCNGEEYLAHSAHPVDTDECQEAVEEWTDSAGPHPHGHEAEGSQDYPDGQLPIPEDEPSVLEAHDQEEDGHYCASKEGYQDYYPEEANGNTGASPYRLRRGDGDLEDQEEDIDQIVAEIKMSLSMTSITSASEASPEHGPEPGPEDSVEACPPIKASCSPSRHEARPKSLNLLPEAKHPGDPQRGFKPKTRTPEERLKWPHEQVCNGLEQPRKQQRSDLNGPVDNNNIPETKKVASFPSFVAVPGPCEPEDLIDGIIFAANYLGSTQLLSERNPSKNIRMMQAQEAVSRVKNSEGDAQTLTEVDLFISTQRIKVLNADTQETMMDHALRTISYIADIGNIVVLMARRRMPRSASQDCIETTPGAQEGKKQYKMICHVFESEDAQLIAQSIGQAFSVAYQEFLRANGINPEDLSQKEYSDIINTQEMYNDDLIHFSNSENCKELQLEKHKGEILGVVVVESGWGSILPTVILANMMNGGPAARSGKLSIGDQIMSINGTSLVGLPLATCQGIIKGLKNQTQVKLNIVSCPPVTTVLIKRPDLKYQLGFSVQNGIICSLMRGGIAERGGVRVGHRIIEINGQSVVATAHEKIVQALSNSVGEIHMKTMPAAMFRLLTGQETPLYI

SEQ ID NO: 24515 - protein, 749 aa, Homo sapiens
  REGION 1..749: note = ENSP00000488107
MAHRKLESVGSGMLDHRVRPGPVPHSQEPESEDMELPLEGYVPEGLELAALRPESPAPEEQECHNHSPDGDSSSDYVNNTSEEEDYDEGLPEEEEGITYYIRYCPEDDSYLEGMDCNGEEYLAHSAHPVDTDECQEAVEEWTDSAGPHPHGHEAEGSQDYPDGQLPIPEDEPSVLEAHDQEEDGHYCASKEGYQDYYPEEANGNTGASPYRLRRGDGDLEDQEEDIDQIVAEIKMSLSMTSITSASEASPEHGPEPGPEDSVEACPPIKASCSPSRHEARPKSLNLLPEAKHPGDPQRGFKPKTRTPEERLKWPHEQVCNGLEQPRKQQRSDLNGPVDNNNIPETKKVASFPSFVAVPGPCEPEDLIDGIIFAANYLGSTQLLSERNPSKNIRMMQAQEAVSRVKRMQKAAKIKKKANSEGDAQTLTEVDLFISTQRIKVLNADTQETMMDHALRTISYIADIGNIVVLMARRRMPRSASQDCIETTPGAQEGKKQYKMICHVFESEDAQLIAQSIGQAFSVAYQEFLRANGINPEDLSQKEYSDIINTQEMYNDDLIHFSNSENCKELQLEKHKGEILGVVVVESGWGSILPTVILANMMNGGPAARSGKLSIGDQIMSINGTSLVGLPLATCQGIIKGLKNQTQVKLNIVSCPPVTTVLIKRPDLKYQLGFSVQNGIICSLMRGGIAERGGVRVGHRIIEINGQSVVATAHEKIVQALSNSVGEIHMKTMPAAMFRLLTGQETPLYI

SEQ ID NO: 24516 - protein, 749 aa, Homo sapiens; identical to SEQ ID NO: 24515
  REGION 1..749: note = ENSP00000480384

SEQ ID NO: 24517 - protein, 112 aa, Homo sapiens
  REGION 1..112: note = ENSP00000488620
MAHRKLESVGSGMLDHRVRPGPVPHSQEPESEDMELPLEGYVPEGLELAALRPESPAPEEQECHNHSPDGDSSSDYVNNTSEEEDYDEGLPEEEEGITYYIRYCPEDDSYLE

SEQ ID NO: 24518 - protein, 27 aa, Homo sapiens
  REGION 1..27: note = ENSP00000488031
MAHRKLESVGSGMLDHRVRPGPVPHSQ

SEQ ID NO: 24519 - protein, 263 aa, Homo sapiens
  REGION 1..263: note = ENSP00000487880
MAHRKLESVGSGMLDHRVRPGPVPHSQEPESEDMELPLEGYVPEGLELAALRPESPAPEEQECHNHSPDGDSSSDYVNNTSEEEDYDEGLPEEEEGITYYIRYCPEDDSYLEGMDCNGEEYLAHSAHPVDTDECQEAVEEWTDSAGPHPHGHEAEGSQDYPDGQLPIPEDEPSVLEAHDQEEDGHYCASKEGYQDYYPEEANGNTGASPYRLRRGDGDLEDQEEDIDQIVAEIKMSLSMTSITSASEASPEHGPEPGPEDSVE

SEQ ID NO: 24520 - protein, 749 aa, Homo sapiens; identical to SEQ ID NO: 24515
  REGION 1..749: note = ENSP00000453144

SEQ ID NO: 24521 - protein, 749 aa, Homo sapiens; identical to SEQ ID NO: 24515
  REGION 1..749: note = ENSP00000453293

SEQ ID NO: 24522 - protein, 737 aa, Homo sapiens; identical to SEQ ID NO: 24514
  REGION 1..737: note = ENSP00000452722

SEQ ID NO: 24523 - protein, 4 aa, Homo sapiens
  REGION 1..4: note = ENSP00000452699
MAHR

SEQ ID NO: 24524 - protein, 70 aa, Homo sapiens; identical to SEQ ID NO: 24512
  REGION 1..70: note = ENSP00000454001

SEQ ID NO: 24525 - protein, 112 aa, Homo sapiens; identical to SEQ ID NO: 24517
  REGION 1..112: note = ENSP00000453034

SEQ ID NO: 24526 - protein, 27 aa, Homo sapiens
  REGION 1..27: note = ENSP00000453981
MAHRKLESVGSGMLDHRVRPGPVPHSQ

SEQ ID NO: 24527 - protein, 263 aa, Homo sapiens; identical to SEQ ID NO: 24519
  REGION 1..263: note = ENSP00000453715

SEQ ID NO: 24528 - protein, 749 aa, Homo sapiens; identical to SEQ ID NO: 24515
  REGION 1..749: note = ENSP00000454171

SEQ ID NO: 24529 - protein, 737 aa, Homo sapiens; identical to SEQ ID NO: 24514
  REGION 1..737: note = ENSP00000409312

SEQ ID NO: 24530 - protein, 758 aa, Homo sapiens
  REGION 1..758: note = ENSP00000295974
MSEVLPADSGVDTLAVFMASSGTTDVTNRNSPATPPNTLNLRSSHNELLNAEIKHTETKNSTPPKCRKKYALTNIQAAMGLSDPAAQPLLGNGSANIKLVKNGENQLRKAAEQGQQDPNKNLSPTAVINITSEKLEGKEPHPQDSSSCEILPSQPRRTKSFLNYYADLETSARELEQNRGNHHGTAEEKSQPVQGQASTIIGNGDLLLQKPNRPQSSPEDGQVATVSSSPETKKDHPKTGAKTDCALHRIQNLAPSDEESSWTTLSQDSASPSSPDETDIWSDHSFQTDPDLPPGWKRVSDIAGTYYWHIPTGTTQWERPVSIPADLQGSRKGSLSSVTPSPTPENEKQPWSDFAVLNGGKINSDIWKDLHAATVNPDPSLKEFEGATLRYASLKLRNAPHPDDDDSCSINSDPEAKCFAVRSLGWVEMAEEDLAPGKSSVAVNNCIRQLSYCKNDIRDTVGIWGEGKDMYLILENDMLSLVDPMDRSVLHSQPIVSIRVWGVGRDNGRDFAYVARDKDTRILKCHVFRCDTPAKAIATSLHEICSKIMAERKNAKALACSSLQERANVNLDVPLQVDFPTPKTELVQKFHVQYLGMLPVDKPVGMDILNSAIENLMTSSNKEDWLSVNMNVADATVTVISEKNEEEVLVECRVRFLSFMGVGKDVHTFAFIMDTGNQRFECHVFWCEPNAGNVSEAVQAACMLRYQKCLVARPPSQKVRPPPPPADSVTRRVTTNVKRGVLSLIDTLKQKRPVTEMP

SEQ ID NO: 24531 - protein, 736 aa, Homo sapiens
  REGION 1..736: note = ENSP00000426018
MSEVLPADSGVDTLAVFMASSGTTDVTNRNSPATPPNTLNLRSSHNELLNAEIKHTETKNSTPPKCRKKYALTNIQAAMGLSDPAAQPLLGNGSANIKLVKNGENQLRKAAEQGQQDPNKNLSPTAVINITSEKLEGKEPHPQDSSSCEILPSQPRRTKSFLNYYADLETSARELEQNRGNHHGTAEEKSQPVQGQASTIIGNGDLLLQKPNRPQSSPEDGQVATVSSSPETKKDHPKTGAKTDCALHRIQNLAPSDEESSWTTLSQDSASPSSPDETDIWSDHSFQTDPDLPPGWKRVSDIAGTYYWHIPTGTTQWERPVSIPADLQGSRKGSLSSVTPSPTPENEDLHAATVNPDPSLKEFEGATLRYASLKLRNAPHPDDDDSCSINSDPEAKCFAVRSLGWVEMAEEDLAPGKSSVAVNNCIRQLSYCKNDIRDTVGIWGEGKDMYLILENDMLSLVDPMDRSVLHSQPIVSIRVWGVGRDNGRDFAYVARDKDTRILKCHVFRCDTPAKAIATSLHEICSKIMAERKNAKALACSSLQERANVNLDVPLQDFPTPKTELVQKFHVQYLGMLPVDKPVGMDILNSAIENLMTSSNKEDWLSVNMNVADATVTVISEKNEEEVLVECRVRFLSFMGVGKDVHTFAFIMDTGNQRFECHVFWCEPNAGNVSEAVQAACMLRYQKCLVARPPSQKVRPPPPPADSVTRRVTTNVKRGVLSLIDTLKQKRPVTEMP

SEQ ID NO: 24532 - protein, 728 aa, Homo sapiens
  REGION 1..728: note = ENSP00000427307
  VARIANT 1: note = Any amino acid
XDTLAVFMASSGTTDVTNRNSPATPPNTLNLRSSHNELLNAEIKHTETKNSTPPKCRKKYALTNIQAAMGLSDPAAQPLLGNGSANIKLVKNGENQLRKAAEQGQQDPNKNLSPTAVINITSEKLEGKEPHPQDSSSCEILPSQPRRTKSFLNYYADLETSARELEQNRGNHHGTAEEKSQPVQGQASTIIGNGDLLLQKPNRPQSSPEDGQVATVSSSPETKKDHPKTGAKTDCALHRIQNLAPSDEESSWTTLSQDSASPSSPDETADIWSDHSFQTDPDLPPGWKRVSDIAGTYYWHIPTGTTQWERPVSIPADLQGSRKGSLSSVTPSPTPENEDLHAATVNPDPSLKEFEGATLRYASLKLRNAPHPDDDDSCSINSDPEAKCFAVRSLGWVEMAEEDLAPGKSSVAVNNCIRQLSYCKNDIRDTVGIWGEGKDMYLILENDMLSLVDPMDRSVLHSQPIVSIRVWGVGRDNGRDFAYVARDKDTRILKCHVFRCDTPAKAIATSLHEICSKIMAERKNAKALACSSLQERANVNLDVPLQVDFPTPKTELVQKFHVQYLGMLPVDKPVGMDILNSAIENLMTSSNKEDWLSVNMNVADATVTVISEKNEEEVLVECRVRFLSFMGVGKDVHTFAFIMDTGNQRFECHVFWCEPNAGNVSEAVQAACMLRYQKCLVARPPSQKVRPPPPPADSVTRRVTTNVKRGVLSLIDTLKQKRPVTEMP

SEQ ID NO: 24533 - protein, 759 aa, Homo sapiens
  REGION 1..759: note = ENSP00000427211
MSEVLPADSGVDTLAVFMASSGTTDVTNRNSPATPPNTLNLRSSHNELLNAEIKHTETKNSTPPKCRKKYALTNIQAAMGLSDPAAQPLLGNGSANIKLVKNGENQLRKAAEQGQQDPNKNLSPTAVINITSEKLEGKEPHPQDSSSCEILPSQPRRTKSFLNYYADLETSARELEQNRGNHHGTAEEKSQPVQGQASTIIGNGDLLLQKPNRPQSSPEDGQVATVSSSPETKKDHPKTGAKTDCALHRIQNLAPSDEESSWTTLSQDSASPSSPDETADIWSDHSFQTDPDLPPGWKRVSDIAGTYYWHIPTGTTQWERPVSIPADLQGSRKGSLSSVTPSPTPENEKQPWSDFAVLNGGKINSDIWKDLHAATVNPDPSLKEFEGATLRYASLKLRNAPHPDDDDSCSINSDPEAKCFAVRSLGWVEMAEEDLAPGKSSVAVNNCIRQLSYCKNDIRDTVGIWGEGKDMYLILENDMLSLVDPMDRSVLHSQPIVSIRVWGVGRDNGRDFAYVARDKDTRILKCHVFRCDTPAKAIATSLHEICSKIMAERKNAKALACSSLQERANVNLDVPLQVDFPTPKTELVQKFHVQYLGMLPVDKPVGMDILNSAIENLMTSSNKEDWLSVNMNVADATVTVISEKNEEEVLVECRVRFLSFMGVGKDVHTFAFIMDTGNQRFECHVFWCEPNAGNVSEAVQAACMLRYQKCLVARPPSQKVRPPPPPADSVTRRVTTNVKRGVLSLIDTLKQKRPVTEMP

SEQ ID NO: 24534 - protein, 210 aa, Homo sapiens
  REGION 1..210: note = ENSP00000425802
MAERKNAKALACSSLQERANVNLDVPLQVDFPTPKTELVQKFHVQYLGMLPVDKPVGMDILNSAIENLMTSSNKEDWLSVNMNVADATVTVISEKNEEEVLVECRVRFLSFMGVGKDVHTFAFIMDTGNQRFECHVFWCEPNAGNVSEAVQAACMLRYQKCLVARPPSQKVRPPPPPADSVTRRVTTNVKRGVLSLIDTLKQKRPVTEMP

SEQ ID NO: 24535 - protein, 737 aa, Homo sapiens
  REGION 1..737: note = ENSP00000421539
MSEVLPADSGVDTLAVFMASSGTTDVTNRNSPATPPNTLNLRSSHNELLNAEIKHTETKNSTPPKCRKKYALTNIQAAMGLSDPAAQPLLGNGSANIKLVKNGENQLRKAAEQGQQDPNKNLSPTAVINITSEKLEGKEPHPQDSSSCEILPSQPRRTKSFLNYYADLETSARELEQNRGNHHGTAEEKSQPVQGQASTIIGNGDLLLQKPNRPQSSPEDGQVATVSSSPETKKDHPKTGAKTDCALHRIQNLAPSDEESSWTTLSQDSASPSSPDETDIWSDHSFQTDPDLPPGWKRVSDIAGTYYWHIPTGTTQWERPVSIPADLQGSRKGSLSSVTPSPTPENEDLHAATVNPDPSLKEFEGATLRYASLKLRNAPHPDDDDSCSINSDPEAKCFAVRSLGWVEMAEEDLAPGKSSVAVNNCIRQLSYCKNDIRDTVGIWGEGKDMYLILENDMLSLVDPMDRSVLHSQPIVSIRVWGVGRDNGRDFAYVARDKDTRILKCHVFRCDTPAKAIATSLHEICSKIMAERKNAKALACSSLQERANVNLDVPLQVDFPTPKTELVQKFHVQYLGMLPVDKPVGMDILNSAIENLMTSSNKEDWLSVNMNVADATVTVISEKNEEEVLVECRVRFLSFMGVGKDVHTFAFIMDTGNQRFECHVFWCEPNAGNVSEAVQAACMLRYQKCLVARPPSQKVRPPPPPADSVTRRVTTNVKRGVLSLIDTLKQKRPVTEMP

SEQ ID NO: 24536 - protein, 210 aa, Homo sapiens; identical to SEQ ID NO: 24534
  REGION 1..210: note = ENSP00000423765

SEQ ID NO: 24537 - protein, 41 aa, Homo sapiens
  REGION 1..41: note = ENSP00000422948
  VARIANT 1: note = Any amino acid
XDTPAKAIATSLHEICSKVRLWLNGRMPKRWPAAPYRKGPM

SEQ ID NO: 24538 - protein, 179 aa, Homo sapiens
  REGION 1..179: note = ENSP00000426429
VLHSQPIVSIRVWGVGRDNGRERDFAYVARDKDTRILKCHVFRCDTPAKAIATSLHEICSKIMAERKNAKALACSSLQERANVNLDVPLQVDFPTPKTELVQKFHVQYLGMLPVDKPVGMDILNSAIENLMTSSNKEDWLSVNMNVADATVTVISEKNEEEVLVECRVRFLSFMGVGKD

SEQ ID NO: 24539 - protein, 102 aa, Homo sapiens
  REGION 1..102: note = ENSP00000427107
MAERKNAKALACSSLQERANVNLDVPLQVDFPTPKTELVQKFHVQYLGMLPVDKPVGMDILNSAIENLMTSSNKEDWLSVNMNVADATVTVISEKNEEEVLV

SEQ ID NO: 24540 - protein, 95 aa, Homo sapiens
  REGION 1..95: note = ENSP00000421751
MAERKNAKALACSSLQERANVNLDVPLQVDFPTPKTELVQKFHVQYLGMLPVDKPVGMDILNSAIENLMTSSNKEDWLSVNMNVADATVTVISEK

SEQ ID NO: 24541 - protein, 87 aa, Homo sapiens
  REGION 1..87: note = ENSP00000421301
MAERKNAKALACSSLQERANVNLDVPLQVDFPTPKTELVQKFHVQYLGMLPVDKPVGMDILNSAIENLMTSSNKEDWLSVNMNVADA

SEQ ID NO: 24542 - protein, 142 aa, Homo sapiens
  REGION 1..142: note = ENSP00000425121
  VARIANT 1: note = Any amino acid
XGEGKDMYLILENDMLSLVDPMDRSVLHSQPIVSIRVWGVGRDNGRERDFAYVARDKDTRILKCHVFRCDTPAKAIATSLHEICSKIMAERKNAKALACSSLQERANVNLDVPLQDFPTPKTELVQKFHVQYLGMLPVDKPV

SEQ ID NO: 24543 - protein, 140 aa, Homo sapiens
  REGION 1..140: note = ENSP00000424414
MASSGTTDVTNRNSPATPPNTLNLRSSHNELLNAEIKHTETKNSTPPKCRKKYALTNIQAAMGLSDPAAQPLLGNGSANIKLVKNGENQLRKAAEQGQQDPNKNLSPTAVINITSEKLEGKEPHPQDSSSCEILPSQPRR

SEQ ID NO: 24544 - protein, 68 aa, Homo sapiens
  REGION 1..68: note = ENSP00000424579
MSEVLPADSGVDTLAVFMASSGTTDVTNRNSPATPPNTLNLRSSHNELLNAEIKHTETKNSTPPKCRK

SEQ ID NO: 24545 - protein, 26 aa, Homo sapiens
  REGION 1..26: note = ENSP00000425202
MASSGTTDVTNRNSPATPPNTLNLRS

SEQ ID NO: 24546 - protein, 27 aa, Homo sapiens
  REGION 1..27: note = ENSP00000422723
MSEVLPADSGVDTLAVFMASSGTTDVT

SEQ ID NO: 24547 - protein, 10 aa, Homo sapiens
  REGION 1..10: note = ENSP00000421205
MSEVLPADSG

SEQ ID NO: 24548 - protein, 210 aa, Homo sapiens; identical to SEQ ID NO: 24534
  REGION 1..210: note = ENSP00000439357

SEQ ID NO: 24549 - protein, 514 aa, Homo sapiens
  REGION 1..514: note = ENSP00000347433
MSWPRRLLLRYLFPALLLHGLGEGSALLHPDSRSHPRSLEKSAWRAFKESQCHHMLKHLHNGARITVQMPPTIEGHWVSTGCEVRSGPEFITRSYRFYHNNTFKAYQFYYGSNRCTNPTYTLIIRGKIRLRQASWIIRGGTEADYQLHNVQVICHTEAVAEKLGQQVNRTCPGFLADGGPWVQDVAYDLWREENGCECTKAVNFAMHELQLIRVEKQYLHHNLDHLVEELFLGDIHTDATQRMFYRPSSYQPPLQNAKNHDHACIACRIIYRSDEHHPPILPPKADLTIGLHGEWVSQRCEVRPEVLFLTRHFIFHDNNNTWEGHYYHYSDPVCKHPTFSIYARGRYSRGVLSSRVMGGTEFVFKVNHMKVTPMDAATASLLNVFNGNECGAEGSWQVGIQQDVTHTNGCVALGIKLPHTEYEIFKMEQDARGRYLLFNGQRPSDGSSPDRPEKRATSYQMPLVQCASSSPRAEDLAEDSGSSLYGRAPGRHTWSLLLAALACLVPLLHWNIRR

SEQ ID NO: 24550 - protein, 61 aa, Homo sapiens
  REGION 1..61: note = ENSP00000404930
MSWPRRLLLRYLFPALLLHEPRPCLHRLSDHLSVRRAPPSHPAPKGRPDHRPARGVGEPAL

SEQ ID NO: 24551 - protein, 22 aa, Homo sapiens
  REGION 1..22: note = ENSP00000463110
MSWPRRLLLRYLFPALLLHAVK

SEQ ID NO: 24552 - protein, 184 aa, Homo sapiens
  REGION 1..184: note = ENSP00000463104
MSWPRRLLLRYLFPALLLHGLGEGSALLHPDSRSHPRSLEKSAWRAFKESQCHHMLKHLHNGARITVQMPPTIEGHWVSTGCEVRSGPEFITRSYRFYHNNTFKAYQFYYGSNRCTNPTYTLIIRGKIRLRQASWIIRGGTEADYQLHNVQGHGRHRVRVQSESHEGHPHGCGHSLTAQRLQRE

SEQ ID NO: 24553 - protein, 227 aa, Homo sapiens
  REGION 1..227: note = ENSP00000476491
  VARIANT 1: note = Any amino acid
XDVAYDLWREENGCECTKAVNFAMHELQLIRVEKQYLHHNLDHLVEELFLGDIHTDATQRMFYRPSSYQPPLQNAKCAAESSGSFQILPQDSSEKEQNGLSHWCLSRPGHQKDWALCAHAGPATAGCPSCLWPPAETGRKAGRTSSKTVHACPGEAGTSSFELFYFPNCWSIETKLKISLNAKLSFKPRASAPLETGHRVKIETLSQLVFLSFIQLCCEVQSPLANK

SEQ ID NO: 24554 - protein, 94 aa, Homo sapiens
  REGION 1..94: note = ENSP00000464649
PEDVLPALQLPAPSAECQVEMGFHHVGQDGLQLPTSSDPPALASQSAGITGVSHRPPGRHLSNDLRTTTMPASPVGSSIGQTSTTLPSCPQRQT

SEQ ID NO: 24555 - protein, 518 aa, Homo sapiens
  REGION 1..518: note = ENSP00000364126
MLRVVSWNINGIRRPLQGVANQEPSNCAAVAVGRILDELDADIVCLQETKVTRDALTEPLAIVEGYNSYFSFSRNRSGYSGVATFCKDNATPVAAEEGLSGLFATQNGDVGCYGNMDEFTQEELRALDSEGRALLTQHKIRTWEGKEKTLTLINVYCPHADPGRPERLVFKMRFYRLLQIRAEALLAAGSHVIILGDLNTAHRPIDHWDAVNLECFEEDPGRKWMDSLLSNLGCQSASHVGPFIDSYRCFQPKQEGAFTCWSAVTGARHLNYGSRLDYVLGDRTLVIDTFQASFLLPEVMGSDHCPVGAVLSVSSVPAKQCPPLCTRFLPEFAGTQLKILRFLVPLEQSPVLEQSTLQHNNQTRVQTCQNKAQVRSTRPQPSQVGSSRGQKNLKSYFQPSPSCPQASPDIELPSLPLMSALMTPKTPEEKAVAKVVKGQAKTSEAKDEKELRTSFWKSVLAGPLRTPLCGGHREPCVMRTVKKPGPNLGRRFYMCARPRGPPTDPSSRCNFFLWSRPS

SEQ ID NO: 24556 - protein, 188 aa, Homo sapiens
  REGION 1..188: note = ENSP00000453002
MARVIIDNKDGPTQKYLLIFGAFVSVYIQEMFRFAYYKLLKKASEGLKSINPGETAPSMRLLAYVSGLGFGIMSGVFSFVNTLSDSLGPGTVGIHGDSPQFFLYSAFMTLVIILLHVFWGIVFFDGCEKKKWGILLIVLLTHLLVSAQTFISSYYGINLASAFIILVLMGTWAFLAAGGSCRSLKLCL

SEQ ID NO: 24557 - protein, 257 aa, Homo sapiens
  REGION 1..257: note = ENSP00000261879
MTAAVFFGCAFIAFGPALALYVFTIATEPLRIIFLIAGAFFWLVSLLISSLVWFMARVIIDNKDGPTQKYLLIFGAFVSVYIQEMFRFAYYKLLKKASEGLKSINPGETAPSMRLLAYVSGLGFGIMSGVFSFVNTLSDSLGPGTVGIHGDSPQFFLYSAFMTLVIILLHVFWGIVFFDGCEKKKWGILLIVLLTHLLVSAQTFISSYYGINLASAFIILVLMGTWAFLAAGGSCRSLKLCLLCQDKNFLLYNQRSR

SEQ ID NO: 24558 - protein, 216 aa, Homo sapiens
  REGION 1..216: note = ENSP00000369700
MTAAVFFGCAFIAFGPALALYVFTIATEPLRIIFLIAGAFFWLVSLLISSLVWFMARVIIDNKDGPTQKYLLIFGAFVSVYIQEMFRFAYYKLLKKASEGLKSINPGETAPSMRLLAYAFMTLVIILLHVFWGIVFFDGCEKKKWGILLIVLLTHLLVSAQTFISSYYGINLASAFIILVLMGTWAFLAAGGSCRSLKLCLLCQDKNFLLYNQRSR

SEQ ID NO: 24559 - protein, 81 aa, Homo sapiens
  REGION 1..81: note = ENSP00000369697
MTAAVFFGCAFIAFGPALALYVFTIATEPLRIIFLIAGRRVETCKNTEAPDCASPSGSLSFLLVGVSTDFVPCLVHGKSHY

SEQ ID NO: 24560 - protein, 222 aa, Homo sapiens
  REGION 1..222: note = ENSP00000453327
MTAAVFFGCAFIAFGPALALYVFTIATEPLRIIFLIAGAFFWLVSLLISSLVWFMARVIIDNKDGPTQKYLLIFGAFVSVYIQEMFRFAYYKLLKKASEGLKSINPGETAPSMRLLAYVSGLGFGIMSGVFSFVNTLSDSLGPGTVGIHGDSPQFFLYSDLHKFLLWNKPGVSIYNPGAHGHLGILSCGRQLPKPETLPALPRQELSSLQPALQITSGNQHF

SEQ ID NO: 24561 - protein, 19 aa, Homo sapiens
  REGION 1..19: note = ENSP00000453516
LYVFTIATEPLRIIFLIAG

SEQ ID NO: 24562 - protein, 380 aa, Homo sapiens
  REGION 1..380: note = ENSP00000257254
MEEGGDFDNYYGADNQSECEYTDWKSSGALIPAIYMLVFLLGTTGNGLVLWTVFRSSREKRRSADIFIASLAVADLTFVVTLPLWATYTYRDYDWPFGTFFCKLSSYLIFVNMYASVFCLTGLSFDRYLAIVRPVANARLRLRVSGAVATAVLWVLAALLAMPVMVLRTTGDLENTTKVQCYMDYSMVATVSSEWAWEVGLGVSSTTVGFVVPFTIMLTCYFFIAQTIAGHFRKERIEGLRKRRRLLSIIVVLVVTFALCWMPYHLVKTLYMLGSLLHWPCDFDLFLMNIFPYCTCISYVNSCLNPFLYAFFDPRFRQACTSMLCCGQSRCAGTSHSSSGEKSASYSSGHSQGPGPNMGKGGEQMHEKSIPYSQETLVVD

SEQ ID NO: 24563 - protein, 380 aa, Homo sapiens; identical to SEQ ID NO: 24562
  REGION 1..380: note = ENSP00000475344

SEQ ID NO: 24564 - protein, 380 aa, Homo sapiens; identical to SEQ ID NO: 24562
  REGION 1..380: note = ENSP00000477818

SEQ ID NO: 24565 - protein, 611 aa, Homo sapiens
  REGION 1..611: note = ENSP00000441501
MLASLEKDKTAPGSAQVAGLCGRLTLHRDLRTGRWEPDPQRSRRCLRDPQRVLEYCRQMYPELQIARVEQATQAIPMERWCGGSRSGSCAHPHHQVVPFRCLPGEFVSEALLVPEGCRFLHQERMDQCESSTRRHQEAQEACSSQGLILHGSGMLLPCGSDRFRGVEYVCCPPPGTPDPSGTAVGDPSTRSWPPGSRVEGAEDEEEEESFPQPVDDYFVEPPQAEEEEETVPPPSSHTLAVVGKVTPTPRPTDGVDIYFGMPGEISEHEGFLRAKMDLEERRMRQINEVMREWAMADNQSKNLPKADRQALNEHFQSILQTLEEQVSGERQRLVETHATRVIALINDQRRAALEGFLAALQADPPQAERVLLALRRYLRAEQKEQRHTLRHYQHVAAVDPEKAQQMRFQVHTHLQVIEERVNQSLGLLDQNPHLAQELRPQIQELLHSEHLGPSELEAPAPGGSSEDKGGLQPPDSKDDTPMTLPKGSTEQDAASPEKEKMNPLEQYERKVNASVPRGFPFHSSEIQRDELAPAGTGVSREAVSGLLIMGAGGGSLIVLSMLLLRRKKPYGAISHGVVEVDPMLTLEEQQLRELQRHGYENPTYRFLEERP

SEQ ID NO: 24566 - protein, 651 aa, Homo sapiens
  REGION 1..651: note = ENSP00000221891
MGPASPAARGLSRRPGQPPLPLLLPLLLLLLRAQPAIGSLAGGSPGAAEAPGSAQVAGLCGRLTLHRDLRTGRWEPDPQRSRRCLRDPQRVLEYCRQMYPELQIARVEQATQAIPMERWCGGSRSGSCAHPHHQVVPFRCLPGEFVSEALLVPEGCRFLHQERMDQCESSTRRHQEAQEACSSQGLILHGSGMLLPCGSDRFRGVEYVCCPPPGTPDPSGTAVGDPSTRSWPPGSRVEGAEDEEEEESFPQPVDDYFVEPPQAEEEEETVPPPSSHTLAVVGKVTPTPRPTDGVDIYFGMPGEISEHEGFLRAKMDLEERRMRQINEVMREWAMADNQSKNLPKADRQALNEHFQSILQTLEEQVSGERQRLVETHATRVIALINDQRRAALEGFLAALQADPPQAERVLLALRRYLRAEQKEQRHTLRHYQHVAAVDPEKAQQMRFQVHTHLQVIEERVNQSLGLLDQNPHLAQELRPQIQELLHSEHLGPSELEAPAPGGSSEDKGGLQPPDSKDADTPMTLPKGSTEQDAASPEKEKMNPLEQYERKVNASVPRGFPFHSSEIQRDELAPAGTGVSREAVSGLLIMGAGGGSLIVLSMLLLRRKKPYGAISHGVVEVDPMLTLEEQQLRELQRHGYENPTYRFLEERP

SEQ ID NO: 24567 - protein, 118 aa, Homo sapiens
  REGION 1..118: note = ENSP00000466623
MGPASPAARGLSRRPGQPPLPLLLPLLLLLLRAQPAIGSLAGGSPGAAETHSALDAVSGTRSACWSTADRCTRSCRLHVWSRLRRPSPWSAGAGVPGAAAAPTPTTRLCPSAACLVNL

SEQ ID NO: 24568 - protein, 644 aa, Homo sapiens
  REGION 1..644: note = ENSP00000465694
MEAVCGAWGRGLVLGVSVLGSKEPGDPHANAPRALTVLSTSIQAPGSAQVAGLCGRLTLHRDLRTGRWEPDPQRSRRCLRDPQRVLEYCRQMYPELQIARVEQATQAIPMERWCGGSRSGSCAHPHHQVVPFRCLPGEFVSEALLVPEGCRFLHQERMDQCESSTRRHQEAQEACSSQGLILHGSGMLLPCGSDRFRGVEYVCCPPPGTPDPSGTAVGDPSTRSWPPGSRVEGAEDEEEEESFPQPVDDYFVEPPQAEEEEETVPPPSSHTLAVVGKVTPTPRPTDGVDIYFGMPGEISEHEGFLRAKMDLEERRMRQINEVMREWAMADNQSKNLPKADRQALNEHFQSILQTLEEQVSGERQRLVETHATRVIALINDQRRAALEGFLAALQADPPQAERVLLALRRYLRAEQKEQRHTLRHYQHVAAVDPEKAQQMRFQVHTHLQVIEERVNQSLGLLDQNPHLAQELRPQIQELLHSEHLGPSELEAPAPGGSSEDKGGLQPPDSKDDTPMTLPKGSTEQDAASPEKEKMNPLEQYERKVNASVPRGFPFHSSEIQRDELAPAGTGVSREAVSGLLIMGAGGGSLIVLSMLLLRRKKPYGAISHGVVEVDPMLTLEEQQLRELQRHGYENPTYRFLEERP

SEQ ID NO: 24569 - protein, 173 aa, Homo sapiens
  REGION 1..173: note = ENSP00000466116
MYPELQIARVEQATQAIPMERWCGGSRSGSCAHPHHQVVPFRCLPGEFVSEALLVPEGCRFLHQERMDQCESSTRRHQEAQEACSSQGLILHGSGMLLPCGSDRFRGVEYVCCPPPGTPDPSGTAVGDPSTRSWPPGSRVEGAEDEEEEESFPQPVDDYFVEPPQAEEEEETV

SEQ ID NO: 24570 - protein, 294 aa, Homo sapiens
  REGION 1..294: note = ENSP00000467854
MYPELQIARVEQATQAIPMERWCGGSRSGSCAHPHHQVVPFRCLPGEFVSEALLVPEGCRFLHQERMDQCESSTRRHQEAQEACSSQGLILHGSGMLLPCGSDRFRGVEYVCCPPPGTPDPSGTAVGDPSTRSWPPGSRVEGAEDEEEEESFPQPVDDYFVEPPQAEEEEETVPPPSSHTLAVVGKVTPTPRPTDGVDIYFGMPGEISEHEGFLRAKMDLEERRMRQINEVMREWAMADNQSKNLPKADRQALNEHFQSILQTLEEQVSGERQRLVETHATRVIALINDQRRAA

SEQ ID NO: 24571 - protein, 221 aa, Homo sapiens
  REGION 1..221: note = ENSP00000466576
  VARIANT 1: note = Any amino acid
XEWAMADNQSKNLPKADRQALNEAERVLLALRRYLRAEQKEQRHTLRHYQHVAAVDPEKAQQMRFQVHTHLQVIEERVNQSLGLLDQNPHLAQELRPQIQELLHSEHLGPSELEAPAPGGSSEDKGGLQPPDSKDDTPMTLPKGSTEQDAASPEKEKMNPLEQYERKVNASVPRGFPFHSSEIQRDELAPAGTGVSREAVSGLLIMGAGGGSLIVLSMLLL

SEQ ID NO: 24572 - protein, 289 aa, Homo sapiens
  REGION 1..289: note = ENSP00000474762
  VARIANT 1: note = Any amino acid
XQSILQTLEEQVSGERQRLVETHATRVIALINDQRRAALEGFLAALQADPPQAERVLLALRRYLRAEQKEQRHTLRHYQHVAAVDPEKAQQMRFQVHTHLQVIEERVNQSLGLLDQNPHLAQELRPQIQELLHSEHLGPSELEAPAPGGSSEDKGGLQPPDSKDGSTEQDAASPEKEKMNPLEQYERKVNASVPRGFPFHSSEIQRDELAPAGTGVSREAVSGLLIMGAGGGSLIVLSMLLLRRKKPYGAISHGVVEVDPMLTLEEQQLRELQRHGYENPTYRFLEERP

SEQ ID NO: 24573 - protein, 189 aa, Homo sapiens
  REGION 1..189: note = ENSP00000345179
MVMLLLLLSALAGLFGAAEGQAFHLGKCPNPPVQENFDVNKYLGRWYEIEKIPTTFENGRCIQANYSLMENGKIKVLNQELRADGTVNQIEGEATPVNLTEPAKLEVKFSWFMPSAPYWILATDYENYALVYSCTCIIQLFHVDFAWILARNPNLPPETVDSLKNILTSNNIDVKKMTVTDQVNCPKLS

SEQ ID NO: 24574 - protein, 108 aa, Homo sapiens
  REGION 1..108: note = ENSP00000391597
MVMLLLLLSALAGLFGAAEGQAFHLGKCPNPPVQENFDVNKTESHFVTQGGVQHHHLGSLQPPPPGFKQFSCLSLPSSWDYSISEDGTKLRRSQQPLRMDAASRPTTH

SEQ ID NO: 24575 - protein, 215 aa, Homo sapiens
  REGION 1..215: note = ENSP00000415235
MFKQLSCISLPSSCDYSSRSLLQPPSPKMVMLLLLLSALAGLFGAAEGQAFHLGKCPNPPVQENFDVNKYLGRWYEIEKIPTTFENGRCIQANYSLMENGKIKVLNQELRADGTVNQIEGEATPVNLTEPAKLEVKFSWFMPSAPYWILATDYENYALVYSCTCIIQLFHVDFAWILARNPNLPPETVDSLKNILTSNNIDVKKMTVTDQVNCPK

SEQ ID NO: 24576 - protein, 149 aa, Homo sapiens
  REGION 1..149: note = ENSP00000393076
MVMLLLLLSALAGLFGAAEGQAFHLGKCPNPPVQENFDVNKYLGRWYEIEKIPTTFENGRCIQANYSLMENGKIKVLNQELRADGTVNQIEGEATPVNLTEPAKLEVKFSWFMPSAPYWILATDYENYALVYSCTCIIQLFHVDFAWIL

SEQ ID NO: 24577 - protein, 664 aa, Homo sapiens
  REGION 1..664: note = ENSP00000258530
MPAVDKLLLEEALQDSPQTRSLLSVFEEDAGTLTDYTNQLLQAMQRVYGAQNEMCLATQQLSKQLLAYEKQNFALGKGDEEVISTLHYFSKVVDELNLLHTELAKQLADTMVLPIIQFREKDLTEVSTLKDLFGLASNEHDLSMAKYSRLPKKKENEKVKTEVGKEVAAARRKQHLSSLQYYCALNALQYRKQMAMMEPMIGFAHGQINFFKKGAEMFSKRMDSFLSSVADMVQSIQVELEAEAEKMRVSQQELLSVDESVYTPDSDVAAPQINRNLIQKAGYLNLRNKTGLVTTTWERLYFFTQGGNLMCQPRGAVAGGLIQDLDNCSVMAVDCEDRRYCFQITTPNGKSGIILQAESRKENEEWICAINNISRQIYLTDNPEAVAIKLNQTALQAVTPITSFGKKQESSCPSQNLKNSEMENENDKIVPKATASLPEAEELIAPGTPIQFDIVLPATEFLDQNRGSRRTNPFGETEDESFPEAEDSLLQQMFIVRFLGSMAVKTDSTTEVIYEAMRQVLAARAIHNIFRMTESHLMVTSQSLRLIDPQTQVSRANFELTSVTQFAAHQENKRLVGFVIRVPESTGEESLSTYIFESNSEGEKICYAINLGKEIIEVQKDPEALAQLMLSIPLTNDGKYVLLNDQPDDDDGNPNEHRGAESEA

SEQ ID NO: 24578 - protein, 235 aa, Homo sapiens
  REGION 1..235: note = ENSP00000449410
MPAVDKLLLEEALQDSPQTRSLLSVFEEDAGTLTDYTNQLLQAMQRVYGAQNEMCLATQQLSKQLLAYEKQNFALGKGDEEVISTLHYFSKVVDELNLLHTELAKQLADTMVLPIIQFREKDLTEVSTLKDLFGLASNEHDLSMAKYSRLPKKKENEKVKTEVGKEVAAARRKQHLSSLQYYCALNALQYRKQMAMMEPMIGFAHGQINFFKKGAEMFSKRMDSFLSSVADMVQR

SEQ ID NO: 24579 - protein, 621 aa, Homo sapiens
  REGION 1..621: note = ENSP00000444472
MQRVYGAQNEMCLATQQLSKQLLAYEKQNFALGKGDEEVISTLHYFSKVVDELNLLHTELAKQLADTMVLPIIQFREKDLTEVSTLKDLFGLASNEHDLSMAKYSRLPKKKENEKVKTEVGKEVAAARRKQHLSSLQYYCALNALQYRKQMAMMEPMIGFAHGQINFFKKGAEMFSKRMDSFLSSVADMVQSIQVELEAEAEKMRVSQQELLSVDESVYTPDSDVAAPQINRNLIQKAGYLNLRNKTGLVTTTWERLYFFTQGGNLMCQPRGAVAGGLIQDLDNCSVMAVDCEDRRYCFQITTPNGKSGIILQAESRKENEEWICAINNISRQIYLTDNPEAVAIKLNQTALQAVTPITSFGKKQESSCPSQNLKNSEMENENDKIVPKATASLPEAEELIAPGTPIQFDIVLPATEFLDQNRGSRRTNPFGETEDESFPEAEDSLLQQMFIVRFLGSMAVKTDSTTEVIYEAMRQVLAARAIHNIFRMTESHLMVTSQSLRLIDPQTQVSRANFELTSVTQFAAHQENKRLVGFVIRVPESTGEESLSTYIFESNSEGEKICYAINLGKEIIEVQKDPEALAQLMLSIPLTNDGKYVLLNDQPDDDDGNPNEHRGAESEA

SEQ ID NO: 24580 - protein, 107 aa, Homo sapiens
  REGION 1..107: note = ENSP00000447828
MSLLQPGPVFPSGNSENSDLTVLPNHICSKILSFSTFANHYFSCLLQICYAINLGKEIIEVQKDPEALAQLMLSIPLTNDGKYVLLNDQPDDDDGNPNEHRGAESEA

SEQ ID NO: 24581 - protein, 670 aa, Homo sapiens
  REGION 1..670: note = ENSP00000446917
MPAVDKLLLEEALQDSPQTRSLLSVFEEDAGTLTDYTNQLLQAMQRVYGAQNEMCLATQQLSKQLLAYEKQNFALGKGDEEVISTLHYFSKVVDELNLLHTELAKQLADTMVLPIIQFREKDLTEVSTLKDLFGLASNDVCLFLEHDLSMAKYSRLPKKKENEKVKTEVGKEVAAARRKQHLSSLQYYCALNALQYRKQMAMMEPMIGFAHGQINFFKKGAEMFSKRMDSFLSSVADMVQSIQVELEAEAEKMRVSQQELLSVDESVYTPDSDVAAPQINRNLIQKAGYLNLRNKTGLVTTTWERLYFFTQGGNLMCQPRGAVAGGLIQDLDNCSVMAVDCEDRRYCFQITTPNGKSGIILQAESRKENEEWICAINNISRQIYLTDNPEAVAIKLNQTALQAVTPITSFGKKQESSCPSQNLKNSEMENENDKIVPKATASLPEAEELIAPGTPIQFDIVLPATEFLDQNRGSRRTNPFGETEDESFPEAEDSLLQQMFIVRFLGSMAVKTDSTTEVIYEAMRQVLAARAIHNIFRMTESHLMVTSQSLRLIDPQTQVSRANFELTSVTQFAAHQENKRLVGFVIRVPESTGEESLSTYIFESNSEGEKICYAINLGKEIIEVQKDPEALAQLMLSIPLTNDGKYVLLNDQPDDDDGNPNEHRGAESEA

SEQ ID NO: 24582 - protein, 188 aa, Homo sapiens
  REGION 1..188: note = ENSP00000446510
DIVLPATEFLDQNRGSRRTNPFGETEDESFPEAEVKTDSTTEVIYEAMRQVLAARAIHNIFRMTESHLMVTSQSLRLIDPQTQVSRANFELTSVTQFAAHQENKRLVGFVIRVPESTGEESLSTYIFESNSEGEKICYAINLGKEIIEVQKDPEALAQLMLSIPLTNDGKYVLLNDQPDDDDGNPNEH

SEQ ID NO: 24583 - protein, 39 aa, Homo sapiens
  REGION 1..39: note = ENSP00000448569
MVLPIIQFREKDLTEVSTLKDLFGLASNAGCLRKRRMRR

SEQ ID NO: 24584 - protein, 144 aa, Homo sapiens
  REGION 1..144: note = ENSP00000449767
MPAVDKLLLEEALQDSPQNEMCLATQQLSKQLLAYEKQNFALGKGDEEVISTLHYFSKVVDELNLLHTELAKQLADTMVLPIIQFREKDLTEVSTLKDLFGLASNEHDLSMAKYSRLPKKKENEKVKTEVGKEVAAARRKQHLS

SEQ ID NO: 24585 - protein, 61 aa, Homo sapiens
  REGION 1..61: note = ENSP00000447520
MQRVYGAQNEMCLATQQLSKQLLAYEKQNFALGKGDEEVISTLHYFSKVVDELNLLHTELA

SEQ ID NO: 24586 - protein, 323 aa, Homo sapiens
  REGION 1..323: note = ENSP00000372654
MSDRPTARRWGKCGPLCTRENIMVAFKGVWTQAFWKAVTAEFLAMLIFVLLSLGSTINWGGTEKPLPVDMVLISLCFGLSIATMVQCFGHISGGHINPAVTVAMVCTRKISIAKSVFYIAAQCLGAIIGAGILYLVTPPSVVGGLGVTMVHGNLTAGHGLLVELIITFQLVFTIFASCDSKRTDVTGSIALAIGFSVAIGHLFAINYTGASMNPARSFGPAVIMGNWENHWIYWVGPIIGAVLAGGLYEYVFCPDVEFKRRFKEAFSKAAQQTKGSYMEVEDNRSQVETDDLILKPGVVHVIDVDRGEEKKGKDQSGEVLSSV

SEQ ID NO: 24587 - protein, 301 aa, Homo sapiens
  REGION 1..301: note = ENSP00000462597
MVAFKGVWTQAFWKAVTAEFLAMLIFVLLSLGSTINWGGTEKPLPVDMVLISLCFGLSIATMVQCFGHISGGHINPAVTVAMVCTRKISIAKSVFYIAAQCLGAIIGAGILYLVTPPSVVGGLGVTMVHGNLTAGHGLLVELIITFQLVFTIFASCDSKRTDVTGSIALAIGFSVAIGHLFAINYTGASMNPARSFGPAVIMGNWENHWIYWVGPIIGAVLAGGLYEYVFCPDVEFKRRFKEAFSKAAQQTKGSYMEVEDNRSQVETDDLILKPGVVHVIDVDRGEEKKGKDQSGEVLSSV

SEQ ID NO: 24588 - protein, 301 aa, Homo sapiens; identical to SEQ ID NO: 24587
  REGION 1..301: note = ENSP00000393121

SEQ ID NO: 24589 - protein, 185 aa, Homo sapiens
  REGION 1..185: note = ENSP00000462075
MSDRPTARRWGLGSTINWGGTEKPLPVDMVLISLCFGLSIATMVQCFGHISGGHINPAVTVAMVCTRKISIAKSVFYIAAQCLGAIIGAGILYLVTPPSVVGGLGVTMVHGNLTAGHGLLVELIITFQLVFTIFASCDSKRTDVTGSIALAIGFSVAIGHLFAINYTGASMNPARSFGPAVIMGN

SEQ ID NO: 24590 - protein, 98 aa, Homo sapiens
  REGION 1..98: note = ENSP00000372656
MSDRPTARRWGVDLCVPERTSWWLSKGSGLKLSGKQSQRNFWPCLFLFSSAWDPPSTGVEQKSLYRSTWFSSPFALDSALQPWCSALAISAVATSTLQ

SEQ ID NO: 24591 - protein, 296 aa, Homo sapiens
  REGION 1..296: note = ENSP00000484446
MSDRPTARRWGKCGPLCTRENIMVAFKGVWTQAFWKAVTAEFLAMLIFVLLSLGSTINWGGTEKPLPVDMVLISLCFGLSIATMVQCFGHISGGHINPAVTVAMVCTRKISIAKSVFYIAAQCLGAIIGAGILYLVTPPSVVGGLGVTMVHGNLTAGHGLLVELIITFQLVFTIFASCDSKRTDVTGSIALAIGFSVAIGHLFAIYWVGPIIGAVLAGGLYEYVFCPDVEFKRRFKEAFSKAAQQTKGSYMEVEDNRSQVETDDLILKPGVVHVIDVDRGEEKKGKDQSGEVLSSV

SEQ ID NO: 24592 - protein, 341 aa, Homo sapiens
  REGION 1..341: note = ENSP00000368821
MGSGHCLRSTRGSKMVSWSVIAKIQEILQRKMVREFLAEFMSTYVMMVFGLGSVAHMVLNKKYGSYLGVNLGFGFGVTMGVHVAGRISGAHMNAAVTFANCALGRVPWRKFPVYVLGQFLGSFLAAATIYSLFYTAILHFSGGQLMVTGPVATAGIFATYLPDHMTLWRGFLNEAWLTGMLQLCLFAITDQENNPALPGTEALVIGILVVIIGVSLGMNTGYAINPSRDLPPRIFTFIAGWGKQVFSNGENWWWVPVVAPLLGAYLGGIIYLVFIGSTIPREPLKLEDSVAYEDHGITVLPKMGSHEPTISPLTPVSVSPANRSSVHPAPPLHESMALEHF

SEQ ID NO: 24593 - protein, 51 aa, Homo sapiens
  REGION 1..51: note = ENSP00000441619
MVQASGHRRSTRGSKMVSWSVIAKIQEILQRKMVREFLAEFMSTYVMMEPT

SEQ ID NO: 24594 - protein, 216 aa, Homo sapiens
  REGION 1..216: note = ENSP00000396111
MVLNKKYGSYLGVNLGFGFGVTMGVHVAGRISGAHMNAAVTFANCALGRVPWRKFPVYVLGQFLGSFLAAATIYSLFYTAILHFSGGQLMVTGPVATAGIFATYLPDHMTLWRGFLNEAWLTGMLQLCLFAITDQENNPALPGTEALVIGILVVIIGVSLGMNTGYAINPSRDLPPRIFTFIAGWGKQVFRWHHLPGLHWLHHPTGAPEIGGFCGV

SEQ ID NO: 24595 - protein, 342 aa, Homo sapiens
  REGION 1..342: note = ENSP00000297988
MVQASGHRRSTRGSKMVSWSVIAKIQEILQRKMVREFLAEFMSTYVMMVFGLGSVAHMVLNKKYGSYLGVNLGFGFGVTMGVHVAGRISGAHMNAAVTFANCALGRVPWRKFPVYVLGQFLGSFLAAATIYSLFYTAILHFSGGQLMVTGPVATAGIFATYLPDHMTLWRGFLNEAWLTGMLQLCLFAITDQENNPALPGTEALVIGILVVIIGVSLGMNTGYAINPSRDLPPRIFTFIAGWGKQVFSNGENWWWVPVVAPLLGAYLGGIIYLVFIGSTIPREPLKLEDSVAYEDHGITVLPKMGSHEPTISPLTPVSVSPANRSSVHPAPPLHESMALEHF

SEQ ID NO: 24596 - protein, 169 aa, Homo sapiens
  REGION 1..169: note = ENSP00000410138
MNAAVTFANCALGRVPWRKFPVYVLGQFLGSFLAAATIYSLFYTAILHFSGGQLMVTGPVATAGIFATYLPDHMTLWRGFLNEAWLTGMLQLCLFAITDQENNPALPGTEALVIGILVVIIGVSLGMNTGYAINPSRDLPPRIFTFIAGWGKQVFSNGENWWWVPVVAP

SEQ ID NO: 24597 - protein, 256 aa, Homo sapiens
  REGION 1..256: note = ENSP00000368820
MGSGHCLRSTRGSKMVSWSVIAKIQEILQRKMVREFLAEFMSTYVMMVFGLGSVAHMVLNKKYGSYLGVNLGFGFGVTMGVHVAGRISGAHMNAAVTFANCALGRVPWRKFPVYVLGQFLGSFLAAATIYSLFYTAILHFSGGQLMVTGPVATAGIFATYLPDHMTLWRGFLNEAWLTGMLQLCLFAITDQENNPALPGTEALVIGILVVIIGVSLGMNTGYAINPSRDLPPRIFTFIAGWGKQVFRYCPCPGPFL

SEQ ID NO: 24598 - protein, 257 aa, Homo sapiens
  REGION 1..257: note = ENSP00000485332
MVQASGHRRSTRGSKMVSWSVIAKIQEILQRKMVREFLAEFMSTYVMMVFGLGSVAHMVLNKKYGSYLGVNLGFGFGVTMGVHVAGRISGAHMNAAVTFANCALGRVPWRKFPVYVLGQFLGSFLAAATIYSLFYTAILHFSGGQLMVTGPVATAGIFATYLPDHMTLWRGFLNEAWLTGMLQLCLFAITDQENNPALPGTEALVIGILVVIIGVSLGMNTGYAINPSRDLPPRIFTFIAGWGKQVFRYCPCPGPFL

SEQ ID NO: 24599 - protein, 41 aa, Homo sapiens
  REGION 1..41: note = ENSP00000485131
MVQASGHRRGLLAPWIALSAPHPPICKVASLVCHFYWSSPN

SEQ ID NO: 24600 - protein, 51 aa, Homo sapiens; identical to SEQ ID NO: 24593
  REGION 1..51: note = ENSP00000485224

SEQ ID NO: 24601 - protein, 165 aa, Homo sapiens
  REGION 1..165: note = ENSP00000412868
MNAAVTFANCALGRVPWRKFPVYVLGQFLGSFLAAATIYSLFYTAILHFSGGQLMVTGPVATAGIFATYLPDHMTLWRGFLNEAWLTGMLQLCLFAITDQENNPALPGTEALVIGILVVIIGVSLGMNTGYAINPSRDLPPRIFTFIAGWGKQVFRYCPCPGPFL

SEQ ID NO: 24602 - protein, 85 aa, Homo sapiens
  REGION 1..85: note = ENSP00000485348
MVQASGHRRSTRGSKMVSWSVIAKIQEILQRKMVREFLAEFMSTYVMMREGDDWFGVGEESTCLRGLWKTESGRLCQQKMWAKRR

SEQ ID NO: 24603 - protein, 84 aa, Homo sapiens
  REGION 1..84: note = ENSP00000485419
MGSGHCLRSTRGSKMVSWSVIAKIQEILQRKMVREFLAEFMSTYVMMREGDDWFGVGEESTCLRGLWKTESGRLCQQKMWAKRR

SEQ ID NO: 24604 - protein, 80 aa, Homo sapiens
  REGION 1..80: note = ENSP00000485081
MVQASGHRRSTRGSKMVSWSVIAKIQEILQRKMVREFLAEFMSTYVMMAWLTGMLQLCLFAITDQENNPALPGTEALVIG

SEQ ID NO: 24605 - protein, 50 aa, Homo sapiens
  REGION 1..50: note = ENSP00000485246
MVQASGHRRSTRGSKMVSWSVIAKIQEILQRKMVREFLAEFMSTYVMMRE

SEQ ID NO: 24606 - protein, 295 aa, Homo sapiens
  REGION 1..295: note = ENSP00000441390
MQPEGAEKGKSFKQRLVLKSSLAKETLSEFLGTFILIVLGCGCVAQAILSRGRFGGVITINVGFSMAVAMAIYVAGGVSGGHINPAVSLAMCLFGRMKWFKLPFYVGAQFLGAFVGAATVFGIYYDGLMSFAGGKLLIVGENATAHIFATYPAPYLSLANAFADQVVATMILLIIVFAIFDSRNLGAPRGLEPIAIGLLIIVIASSLGLNSGCAMNPARDLSPRLFTALAGWGFEVFRAGNNFWWIPVVGPLVGAVIGGLIYVLVIEIHHPEPDSVFKTEQSEDKPEKYELSVIM

SEQ ID NO: 24607 - protein, 295 aa, Homo sapiens; identical to SEQ ID NO: 24606
  REGION 1..295: note = ENSP00000219919

SEQ ID NO: 24608 - protein, 230 aa, Homo sapiens
  REGION 1..230: note = ENSP00000452673
MAVAMAIYVAGGVSGGHINPAVSLAMCLFGRMKWFKLPFYVGAQFLGAFVGAATVFGIYYDGLMSFAGGKLLIVGENATAHIFATYPAPYLSLANAFADQVVATMILLIIVFAIFDSRNLGAPRGLEPIAIGLLIIVIASSLGLNSGCAMNPARDLSPRLFTALAGWGFEVFRAGNNFWWIPVVGPLVGAVIGGLIYVLVIEIHHPEPDSVFKTEQSEDKPEKYELSVIM

SEQ ID NO: 24609 - protein, 920 aa, Homo sapiens
  REGION 1..920: note = ENSP00000363822
MEVQLGLGRVYPRPPSKTYRGAFQNLFQSVREVIQNPGPRHPEAASAAPPGASLLLLQQQQQQQQQQQQQQQQQQQQQQQETSPRQQQQQQGEDGSPQAHRRGPTGYLVLDEEQQPSQPQSALECHPERGCVPEPGAAVAASKGLPQQLPAPPDEDDSAAPSTLSLLGPTFPGLSSCSADLKDILSEASTMQLLQQQQQEAVSEGSSSGRAREASGAPTSSKDNYLGGTSTISDNAKELCKAVSVSMGLGVEALEHLSPGEQLRGDCMYAPLLGVPPAVRPTPCAPLAECKGSLLDDSAGKSTEDTAEYSPFKGGYTKGLEGESLGCSGSAAAGSSGTLELPSTLSLYKSGALDEAAAYQSRDYYNFPLALAGPPPPPPPPHPHARIKLENPLDYGSAWAAAAAQCRYGDLASLHGAGAAGPGSGSPSAAASSSWHTLFTAEEGQLYGPCGGGGGGGGGGGGGGGGGGGGGGGEAGAVAPYGYTRPPQGLAGQESDFTAPDVWYPGGMVSRVPYPSPTCVKSEMGPWMDSYSGPYGDMRLETARDHVLPIDYYFPPQKTCLICGDEASGCHYGALTCGSCKVFFKRAAEGKQKYLCASRNDCTIDKFRRKNCPSCRLRKCYEAGMTLGARKLKKLGNLKLQEEGEASSTTSPTEETTQKLTVSHIEGYECQPIFLNVLEAIEPGVVCAGHDNNQPDSFAALLSSLNELGERQLVHVVKWAKALPGFRNLHVDDQMAVIQYSWMGLMVFAMGWRSFTNVNSRMLYFAPDLVFNEYRMHKSRMYSQCVRMRHLSQEFGWLQITPQEFLCMKALLLFSIIPVDGLKNQKFFDELRMNYIKELDRIIACKRKNPTSCSRRFYQLTKLLDSVQPIARELHQFTFDLLIKSHMVSVDFPEMMAEIISVQVPKILSGKVKPIYFHTQ

SEQ ID NO: 24610 - protein, 644 aa, Homo sapiens
  REGION 1..644: note = ENSP00000421155
MEVQLGLGRVYPRPPSKTYRGAFQNLFQSVREVIQNPGPRHPEAASAAPPGASLLLLQQQQQQQQQQQQQQQQQQQQQQQETSPRQQQQQQGEDGSPQAHRRGPTGYLVLDEEQQPSQPQSALECHPERGCVPEPGAAVAASKGLPQQLPAPPDEDDSAAPSTLSLLGPTFPGLSSCSADLKDILSEASTMQLLQQQQQEAVSEGSSSGRAREASGAPTSSKDNYLGGTSTISDNAKELCKAVSVSMGLGVEALEHLSPGEQLRGDCMYAPLLGVPPAVRPTPCAPLAECKGSLLDDSAGKSTEDTAEYSPFKGGYTKGLEGESLGCSGSAAAGSSGTLELPSTLSLYKSGALDEAAAYQSRDYYNFPLALAGPPPPPPPPHPHARIKLENPLDYGSAWAAAAAQCRYGDLASLHGAGAAGPGSGSPSAAASSSWHTLFTAEEGQLYGPCGGGGGGGGGGGGGGGGGGGGGGGEAGAVAPYGYTRPPQGLAGQESDFTAPDVWYPGGMVSRVPYPSPTCVKSEMGPWMDSYSGPYGDMRLETARDHVLPIDYYFPPQKTCLICGDEASGCHYGALTCGSCKVFFKRAAEGKQKYLCASRNDCTIDKFRRKNCPSCRLRKCYEAGMTLGEKFRVGNCKHLKMTRP

SEQ ID NO: 24611 - protein, 600 aa, Homo sapiens
  REGION 1..600: note = ENSP00000425199
MEVQLGLGRVYPRPPSKTYRGAFQNLFQSVREVIQNPGPRHPEAASAAPPGASLLLLQQQQQQQQQQQQQQQQQQQQQQQETSPRQQQQQQGEDGSPQAHRRGPTGYLVLDEEQQPSQPQSALECHPERGCVPEPGAAVAASKGLPQQLPAPPDEDDSAAPSTLSLLGPTFPGLSSCSADLKDILSEASTMQLLQQQQQEAVSEGSSSGRAREASGAPTSSKDNYLGGTSTISDNAKELCKAVSVSMGLGVEALEHLSPGEQLRGDCMYAPLLGVPPAVRPTPCAPLAECKGSLLDDSAGKSTEDTAEYSPFKGGYTKGLEGESLGCSGSAAAGSSGTLELPSTLSLYKSGALDEAAAYQSRDYYNFPLALAGPPPPPPPPHPHARIKLENPLDYGSAWAAAAAQCRYGDLASLHGAGAAGPGSGSPSAAASSSWHTLFTAEEGQLYGPCGGGGGGGGGGGGGGGGGGGGGGGEAGAVAPYGYTRPPQGLAGQESDFTAPDVWYPGGMVSRVPYPSPTCVKSEMGPWMDSYSGPYGDMRLETARDHVLPIDYYFPPQKTCLICGDEASGCHYGALTCGSCKVFFKRAAEGFFRMNKLKES

SEQ ID NO: 24612 - protein, 388 aa, Homo sapiens
  REGION 1..388: note = ENSP00000379358
MILWLHSLETARDHVLPIDYYFPPQKTCLICGDEASGCHYGALTCGSCKVFFKRAAEGKQKYLCASRNDCTIDKFRRKNCPSCRLRKCYEAGMTLGARKLKKLGNLKLQEEGEASSTTSPTEETTQKLTVSHIEGYECQPIFLNVLEAIEPGVVCAGHDNNQPDSFAALLSSLNELGERQLVHVVKWAKALPGFRNLHVDDQMAVIQYSWMGLMVFAMGWRSFTNVNSRMLYFAPDLVFNEYRMHKSRMYSQCVRMRHLSQEFGWLQITPQEFLCMKALLLFSIIPVDGLKNQKFFDELRMNYIKELDRIIACKRKNPTSCSRRFYQLTKLLDSVQPIARELHQFTFDLLIKSHMVSVDFPEMMAEIISVQVPKILSGKVKPIYFHTQ

SEQ ID NO: 24613 - protein, 642 aa, Homo sapiens
  REGION 1..642: note = ENSP00000482407
MEVQLGLGRVYPRPPSKTYRGAFQNLFQSVREVIQNPGPRHPEAASAAPPGASLLLLQQQQQQQQQQQQQQQQQQQQQQQETSPRQQQQQQGEDGSPQAHRRGPTGYLVLDEEQQPSQPQSALECHPERGCVPEPGAAVAASKGLPQQLPAPPDEDDSAAPSTLSLLGPTFPGLSSCSADLKDILSEASTMQLLQQQQQEAVSEGSSSGRAREASGAPTSSKDNYLGGTSTISDNAKELCKAVSVSMGLGVEALEHLSPGEQLRGDCMYAPLLGVPPAVRPTPCAPLAECKGSLLDDSAGKSTEDTAEYSPFKGGYTKGLEGESLGCSGSAAAGSSGTLELPSTLSLYKSGALDEAAAYQSRDYYNFPLALAGPPPPPPPPHPHARIKLENPLDYGSAWAAAAAQCRYGDLASLHGAGAAGPGSGSPSAAASSSWHTLFTAEEGQLYGPCGGGGGGGGGGGGGGGGGGGGGGGEAGAVAPYGYTRPPQGLAGQESDFTAPDVWYPGGMVSRVPYPSPTCVKSEMGPWMDSYSGPYGDMRLETARDHVLPIDYYFPPQKTCLICGDEASGCHYGALTCGSCKVFFKRAAEGFFRMNKLKESSDTNPKPYCMAAPMGLTENNRNRKKSYRETNLKAVSWPLNHT

SEQ ID NO: 24614 - protein, 572 aa, Homo sapiens
  REGION 1..572: note = ENSP00000479013
MEVQLGLGRVYPRPPSKTYRGAFQNLFQSVREVIQNPGPRHPEAASAAPPGASLLLLQQQQQQQQQQQQQQQQQQQQQQQETSPRQQQQQQGEDGSPQAHRRGPTGYLVLDEEQQPSQPQSALECHPERGCVPEPGAAVAASKGLPQQLPAPPDEDDSAAPSTLSLLGPTFPGLSSCSADLKDILSEASTMQLLQQQQQEAVSEGSSSGRAREASGAPTSSKDNYLGGTSTISDNAKELCKAVSVSMGLGVEALEHLSPGEQLRGDCMYAPLLGVPPAVRPTPCAPLAECKGSLLDDSAGKSTEDTAEYSPFKGGYTKGLEGESLGCSGSAAAGSSGTLELPSTLSLYKSGALDEAAAYQSRDYYNFPLALAGPPPPPPPPHPHARIKLENPLDYGSAWAAAAAQCRYGDLASLHGAGAAGPGSGSPSAAASSSWHTLFTAEEGQLYGPCGGGGGGGGGGGGGGGGGGGGGGGEAGAVAPYGYTRPPQGLAGQESDFTAPDVWYPGGMVSRVPYPSPTCVKSEMGPWMDSYSGPYGDMRNTRRKRLWKLIIRSINSCICSPRETEVPVRQQK

SEQ ID NO: 24615 - protein, 737 aa, Homo sapiens
  REGION 1..737: note = ENSP00000484033
MQLLQQQQQEAVSEGSSSGRAREASGAPTSSKDNYLGGTSTISDNAKELCKAVSVSMGLGVEALEHLSPGEQLRGDCMYAPLLGVPPAVRPTPCAPLAECKGSLLDDSAGKSTEDTAEYSPFKGGYTKGLEGESLGCSGSAAAGSSGTLELPSTLSLYKSGALDEAAAYQSRDYYNFPLALAGPPPPPPPPHPHARIKLENPLDYGSAWAAAAAQCRYGDLASLHGAGAAGPGSGSPSAAASSSWHTLFTAEEGQLYGPCGGGGGGGGGGGGGGGGGGGGGGGEAGAVAPYGYTRPPQGLAGQESDFTAPDVWYPGGMVSRVPYPSPTCVKSEMGPWMDSYSGPYGDMRLETARDHVLPIDYYFPPQKTCLICGDEASGCHYGALTCGSCKVFFKRAAEGKQKYLCASRNDCTIDKFRRKNCPSCRLRKCYEAGMTLGARKLKKLGNLKLQEEGEASSTTSPTEETTQKLTVSHIEGYECQPIFLNVLEAIEPGVVCAGHDNNQPDSFAALLSSLNELGERQLVHVVKWAKALPGFRNLHVDDQMAVIQYSWMGLMVFAMGWRSFTNVNSRMLYFAPDLVFNEYRMHKSRMYSQCVRMRHLSQEFGWLQITPQEFLCMKALLLFSIKANLFARIPVDGLKNQKFFDELRMNYIKELDRIIACKRKNPTSCSRRFYQLTKLLDSVQPIARELHQFTFDLLIKSHMVSVDFPEMMAEIISVQVPKILSGKVKPIYFHTQ

SEQ ID NO: 24616 - protein, 734 aa, Homo sapiens
  REGION 1..734: note = ENSP00000379359
MEVQLGLGRVYPRPPSKTYRGAFQNLFQSVREVIQNPGPRHPEAASAAPPGASLLLLQQQQQQQQQQQQQQQQQQQQQQQETSPRQQQQQQGEDGSPQAHRRGPTGYLVLDEEQQPSQPQSALECHPERGCVPEPGAAVAASKGLPQQLPAPPDEDDSAAPSTLSLLGPTFPGLSSCSADLKDILSEASTMQLLQQQQQEAVSEGSSSGRAREASGAPTSSKDNYLGGTSTISDNAKELCKAVSVSMGLGVEALEHLSPGEQLRGDCMYAPLLGVPPAVRPTPCAPLAECKGSLLDDSAGKSTEDTAEYSPFKGGYTKGLEGESLGCSGSAAAGSSGTLELPSTLSLYKSGALDEAAAYQSRDYYNFPLALAGPPPPPPPPHPHARIKLENPLDYGSAWAAAAAQCRYGDLASLHGAGAAGPGSGSPSAAASSSWHTLFTAEEGQLYGPCGGGGGGGGGGGGGGGGGGGGGGGEAGAVAPYGYTRPPQGLAGQESDFTAPDVWYPGGMVSRVPYPSPTCVKSEMGPWMDSYSGPYGDMRLETARDHVLPIDYYFPPQKTCLICGDEASGCHYGALTCGSCKVFFKRAAEGKQKYLCASRNDCTIDKFRRKNCPSCRLRKCYEAGMTLGARKLKKLGNLKLQEEGEASSTTSPTEETTQKLTVSHIEGYECQPIFLNVLEAIEPGVVCAGHDNNQPDSFAALLSSLNELGERQLVHVVKWAKALPDCERAASVHF

SEQ ID NO: 24617 - protein, 1375 aa, Homo sapiens
  REGION 1..1375: note = ENSP00000421826
MEPSPSPAPQAQPPKPVPKPRTVFGGLSGPATTQRPGLSPALGGPGVSRSPEPSPRPPPLPTSSSEQSSALNTVEMMPNSIYFGLDSRGRAQAAQDKAPDSSQISAPTPALRPTTGTVHIMDPGCLYYGVQPVGTPGAPDRRESRGVCQGRAEHRLSRQDLEAREDAGYASLELPGDSTLLSPTLETEETSDDLISPYASFSFTADRLTPLLSGWLDKLSPQGNYVFQRRFVQFNGRSLMYFGSDKDPFPKGVIPLTAIEMTRSSKDNKFQVITGQRVFVFRTESEAQRDMWCSTLQSCLKEQRLLGHPRPPQPPRPLRTGMLELRGHKAKVFAALSPGELALYKSEQAFSLGIGICFIELQGCSVRETKSRSFDLLTPHRCFSFTAESGGARQSWAAALQEAVTETLSDYEVAEKIWSNRANRQCADCGSSRPDWAAVNLGVVICKQCAGQHRALGSGISKVQSLKLDTSVWSNEIVQLFIVLGNDRANRFWAGTLPPGEGLHPDATPGPRGEFISRKYRLGLFRKPHPQYPDHSQLLQALCAAVARPNLLKNMTQLLCVEAFEDPSPGVYNEVVVRATYSGFLYCSPVSNKAGPSPPRRGRDAPPRLWCVLGAALEMFASENSPEPLSLIQPQDIVCLGVSPPPTDPGDRFPFSFELILAGGRIQHFGTDGADSLEAWTSAVGKWFSPLSCHQLLGPGLLRLGRLWLRSPSHTAPAPGLWLSGFGLLRGDHLFLCSAPGPGPPAPEDMVHLRRLQEISVVSAADTPDKKEHLVLVETGRTLYLQGEGRLDFTAWNAAIGGAAGGGGTGLQEQQMSRGDIPIIVDACISFVTQHELPQKNQRLEKYKDVIGCLPRVNRRTLATLIGHLYRVQKCAALNQMCTRNLALLFAPSVFQTDGRGEHEVRVLQELIDGYISVFDIDSDQVAQIDLEVSLITTWKDVQLSQAGDLIMEVYIEQQLPDNCVTLKVSPTLTAEELTNQVLEMRGTAAGMDLWVTFEIREHGELERPLHPKEKVLEQALQWCQLPEPCSASLLLKKVPLAQAGCLFTGIRRESPRVGLLRCREEPPRLLGSRFQERFFLLRGRCLLLLKEKKSSKPEREWPLEGAKVYLGIRKKLKPPTPWGFTLILEKMHLYLSCTDEDEMWDWTTSILKAQHDDQQPVVLRRHSSSDLARQKFGTMPLLPIRGDDSGATLLSANQTLRRLHNRRTLSMFFPMKSSQGSVEEQEELEEPVYEEPVYEEVGAFPELIQDTSTSFSTTREWTVKPENPLTSQKSLDQPFLSKSSTLGQEERPPEPPPGPPSKSSPQARGSLEEQLLQELSSLILRKGETTAGLGSPSQPSSPQSPSPTGLPTQTPGFPTQPPCTSSPPSSQPLT

SEQ ID NO: 24618 - protein, 1544 aa, Homo sapiens
  REGION 1..1544: note = ENSP00000239440
MAAPQDLDIAVWLATVHLEQYADTFRRHGLATAGAARGLGHEELKQLGISATGHRKRILRLLQTGTEEGSLDPKSDSAMEPSPSPAPQAQPPKPVPKPRTVFGGLSGPATTQRPGLSPALGGPGVSRSPEPSPRPPPLPTSSSEQSSALNTVEMMPNSIYFGLDSRGRAQAAQDKAPDSSQISAPTPALRPTTGTVHIMDPGCLYYGVQPVGTPGAPDRRESRGVCQGRAEHRLSRQDLEAREDAGYASLELPGDSTLLSPTLETEETSDDLISPYASFSFTADRLTPLLSGWLDKLSPQGNYVFQRRFVQFNGRSLMYFGSDKDPFPKGVIPLTAIEMTRSSKDNKFQVITGQRVFVFRTESEAQRDMWCSTLQSCLKEQRLLGHPRPPQPPRPLRTGMLELRGHKAKVFAALSPGELALYKSEQAFSLGIGICFIELQGCSVRETKSRSFDLLTPHRCFSFTAESGGARQSWAAALQEAVTETLSDYEVAEKIWSNRANRQCADCGSSRPDWAAVNLGVVICKQCAGQHRALGSGISKVQSLKLDTSVWSNEIVQLFIVLGNDRANRFWAGTLPPGEGLHPDATPGPRGEFISRKYRLGLFRKPHPQYPDHSQLLQALCAAVARPNLLKNMTQLLCVEAFEGEEPWFPPAPDGSCPGLLPSDPSPGVYNEVVVRATYSGFLYCSPVSNKAGPSPPRRGRDAPPRLWCVLGAALEMFASENSPEPLSLIQPQDIVCLGVSPPPTDPGDRFPFSFELILAGGRIQHFGTDGADSLEAWTSAVGKWFSPLSCHQLLGPGLLRLGRLWLRSPSHTAPAPGLWLSGFGLLRGDHLFLCSAPGPGPPAPEDMVHLRRLQEISVVSAADTPDKKEHLVLVETGRTLYLQGEGRLDFTAWNAAIGGAAGGGGTGLQEQQMSRGDIPIIVDACISFVTQHGLRLEGVYRKGGARARSLRLLAEFRRDARSVKLRPGEHFVEDVTDTLKRFFRELDDPVTSARLLPRWREAAELPQKNQRLEKYKDVIGCLPRVNRRTLATLIGHLYRVQKCAALNQMCTRNLALLFAPSVFQTDGRGEHEVRVLQELIDGYISVFDIDSDQVAQIDLEVSLITTWKDVQLSQAGDLIMEVYIEQQLPDNCVTLKVSPTLTAEELTNQVLEMRGTAAGMDLWVTFEIREHGELERPLHPKEKVLEQALQWCQLPEPCSASLLLKKVPLAQAGCLFTGIRRESPRVGLLRCREEPPRLLGSRFQERFFLLRGRCLLLLKEKKSSKPEREWPLEGAKVYLGIRKKLKPPTPWGFTLILEKMHLYLSCTDEDEMWDWTTSILKAQHDDQQPVVLRRHSSSDLARQKFGTMPLLPIRGDDSGATLLSANQTLRRLHNRRTLSMFFPMKSSQGSVEEQEELEEPVYEEPVYEEVGAFPELIQDTSTSFSTTREWTVKPENPLTSQKSLDQPFLSKSSTLGQEERPPEPPPGPPSKSSPQARGSLEEQLLQELSSLILRKGETTAGLGSPSQPSSPQSPSPTGLPTQTPGFPTQPPCTSSPPSSQPLT

SEQ ID NO: 24619 - protein, 1193 aa, Homo sapiens
  REGION 1..1193: note = ENSP00000421468
MTRSSKDNKFQVITGQRVFVFRTESEAQRDMWCSTLQSCLKEQRLLGHPRPPQPPRPLRTGMLELRGHKAKVFAALSPGELALYKSEQAFSLGIGICFIELQGCSVRETKSRSFDLLTPHRCFSFTAESGGARQSWAAALQEAVTETLSDYEVAEKIWSNRANRQCADCGSSRPDWAAVNLGVVICKQCAGQHRALGSGISKVQSLKLDTSVWSNEIVQLFIVLGNDRANRFWAGTLPPGEGLHPDATPGPRGEFISRKYRLGLFRKPHPQYPDHSQLLQALCAAVARPNLLKNMTQLLCVEAFEGEEPWFPPAPDGSCPGLLPSDPSPGVYNEVVVRATYSGFLYCSPVSNKAGPSPPRRGRDAPPRLWCVLGAALEMFASENSPEPLSLIQPQDIVCLGVSPPPTDPGDRFPFSFELILAGGRIQHFGTDGADSLEAWTSAVGKWFSPLSCHQLLGPGLLRLGRLWLRSPSHTAPAPGLWLSGFGLLRGDHLFLCSAPGPGPPAPEDMVHLRRLQEISVVSAADTPDKKEHLVLVETGRTLYLQGEGRLDFTAWNAAIGGAAGGGGTGLQEQQMSRGDIPIIVDACISFVTQHGLRLEGVYRKGGARARSLRLLAEFRRDARSVKLRPGEHFVEDVTDTLKRFFRELDDPVTSARLLPRWREAAELPQKNQRLEKYKDVIGCLPRVNRRTLATLIGHLYRVQKCAALNQMCTRNLALLFAPSVFQTDGRGEHEVRVLQELIDGYISVFDIDSDQVAQIDLEVSLITTWKDVQLSQAGDLIMEVYIEQQLPDNCVTLKVSPTLTAEELTNQVLEMRGTAAGMDLWVTFEIREHGELERPLHPKEKVLEQALQWCQLPEPCSASLLLKKVPLAQAGCLFTGIRRESPRVGLLRCREEPPRLLGSRFQERFFLLRGRCLLLLKEKKSSKPEREWPLEGAKVYLGIRKKLKPPTPWGFTLILEKMHLYLSCTDEDEMWDWTTSILKAQHDDQQPVVLRRHSSSDLARQKFGTMPLLPIRGDDSGATLLSANQTLPMKSSQGSVEEQEELEEPVYEEPVYEEVGAFPELIQDTSTSFSTTREWTVKPENPLTSQKSLDQPFLSKSSTLGQEERPPEPPPGPPSKSSPQARGSLEEQLLQELSSLILRKGETTAGLGSPSQPSSPQSPSPTGLPTQTPGFPTQPPCTSSPPSSQPLT

SEQ ID NO: 24620 - protein, 473 aa, Homo sapiens
  REGION 1..473: note = ENSP00000421148
MAAPQDLDIAVWLATVHLEQYADTFRRHGLATAGAARGLGHEELKQLGISATGHRKRILRLLQTGTEEGSLDPKSDSAMEPSPSPAPQAQPPKPVPKPRTVFGGLSGPATTQRPGLSPALGGPGVSRSPEPSPRPPPLPTSSSEQSSALNTVEMMPNSIYFGLDSRGRAQAAQDKAPDSSQISAPTPALRPTTGTVHIMDPGCLYYGVQPVGTPGAPDRRESRGVCQGRAEHRLSRQDLEAREDAGYASLELPGDSTLLSPTLETEETSDDLISPYASFSFTADRLTPLLSGWLDKLSPQGNYVFQRRFVQFNGRSLMYFGSDKDPFPKGVIPLTAIEMTRSSKDNKFQVITGQRVFVFRTESEAQRDMWCSTLQSCLKEQRLLGHPRPPQPPRPLRTGMLELRGHKAKVFAALSPGELALYKSEQAFSLGIGICFIELQGCSVRETKSRSFDLLTPHRCFSFTAESGGARQS

SEQ ID NO: 24621 - protein, 1375 aa, Homo sapiens; identical to SEQ ID NO: 24617
  REGION 1..1375: note = ENSP00000486980

SEQ ID NO: 24622 - protein, 396 aa, Homo sapiens
  REGION 1..396: note = ENSP00000349022
MELDHRTSGGLHAYPGPRGGQVAKPNVILQIGKCRAEMLEHVRRTHRHLLAEVSKQVERELKGLHRSVGKLESNLDGYVPTSDSQRWKKSIKACLCRCQETIANLERWVKREMHVWREVFYRLERWADRLESTGGKYPVGSESARHTVSVGVGGPESYCHEADGYDYTVSPYAITPPPAAGELPGQEPAEAQQYQPWVPGEDGQPSPGVDTQIFEDPREFLSHLEEYLRQVGGSEEYWLSQIQNHMNGPAKKWWEFKQGSVKNWVEFKKEFLQYSEGTLSREAIQRELDLPQKQGEPLDQFLWRKRDLYQTLYVDADEEEIIQYVVGTLQPKLKRFLRHPLPKTLEQLIQRGMEVQDDLEQAAEPAGPHLPVEDEAETLTPAPNSESVASDRTQPE

SEQ ID NO: 24623 - protein, 180 aa, Homo sapiens
  REGION 1..180: note = ENSP00000306010
MGLTISSLFSRLFGKKQMRILMVGLDAAGKTTILYKLKLGEIVTTIPTIGFNVETVEYKNICFTVWDVGGQDRIRPLWKHYFQNTQGLIFVVDSNDRERIQEVADELQKMLLVDELRDAVLLLFANKQDLPNAMAISEMTDKLGLQSLRNRTWYVQATCATQGTGLYEGLDWLSNELSKR

SEQ ID NO: 24624 - protein, 153 aa, Homo sapiens
  REGION 1..153: note = ENSP00000417501
MGLTISSLFSRLFGKKQMRILMGFNVETVEYKNICFTVWDVGGQDRIRPLWKHYFQNTQGLIFVVDSNDRERIQEVADELQKMLLVDELRDAVLLLFANKQDLPNAMAISEMTDKLGLQSLRNRTWYVQATCATQGTGLYEGLDWLSNELSKR

SEQ ID NO: 24625 - protein, 71 aa, Homo sapiens
  REGION 1..71: note = ENSP00000475828
MLLVDELRDAVLLLFANKQDLPNAMAISEMTDKLGLQSLRNRTWYVQATCATQGTGLYEGLDWLSNELSKR

SEQ ID NO: 24626 - protein, 59 aa, Homo sapiens
  REGION 1..59: note = ENSP00000420655
MGLTISSLFSRLFGKKQMRILMVGLDAAGKTTILYKLKLGEIVTTIPTIAVIFVFLCRF

SEQ ID NO: 24627 - protein, 127 aa, Homo sapiens
  REGION 1..127: note = ENSP00000420254
MGLTISSLFSRLFGKKQMRILMVGLDAAGKTTILYKLKLGEIVTTIPTIGFNVETVEYKNICFTVWDVGGQDRIRPLWKHYFQNTQGLIFVVDSNDRERIQEVADELQKMLLVDELRDAVLLLFANK

SEQ ID NO: 24628 - protein, 22 aa, Homo sapiens
  REGION 1..22: note = ENSP00000418388
MGLTISSLFSRLFGKKQMRILM

SEQ ID NO: 24629 - protein, 354 aa, Homo sapiens
  REGION 1..354: note = ENSP00000261783
MSLRGSLSRLLQTRVHSILKKSVHSVAVIGAPFSQGQKRKGVEHGPAAIREAGLMKRLSSLGCHLKDFGDLSFTPVPKDDLYNNLIVNPRSVGLANQELAEVVSRAVSDGYSCVTLGGDHSLAIGTISGHARHCPDLCVVWVDAHADINTPLTTSSGNLHGQPVSFLLRELQDKVPQLPGFSWIKPCISSASIVYIGLRDVDPPEHFILKNYDIQYFSMRDIDRLGIQKVMERTFDLLIGKRQRPIHLSFDIDAFDPTLAPATGTPVVGGLTYREGMYIAEEIHNTGLLSALDLVEVNPQLATSEEEAKTTANLAVDVIASSFGQTREGGHIVYDQLPTPSSPDESENQARVRI

SEQ ID NO: 24630 - protein, 786 aa, Homo sapiens
  REGION 1..786: note = ENSP00000336923
MGLQPLEFSDCYLDSPWFRERIRAHEAELERTNKFIKELIKDGKNLIAATKSLSVAQRKFAHSLRDFKFEFIGDAVTDDERCIDASLREFSNFLKNLEEQREIMALSVTETLIKPLEKFRKEQLGAVKEEKKKFDKETEKNYSLIDKHLNLSAKKKDSHLQEADIQVEQNRQHFYELSLEYVCKLQEIQERKKFEFVEPMLSFFQGMFTFYHQGHELAKDFNHYKMELQINIQNTRNRFEGTRSEVEELMNKIRQNPKDHKRASQFTAEGYLYVQEKRPAPFGSSWVKHYCMYRKAAKKFNMIPFEHRSGGKLGDGEVFFLKECTKRHTDSIDRRFCFDIEAADRPGVSLTMQAFSEEERKQWLEALGGKEALSHSFNTAIIPRPEGNAQLDKMGFTIIRKCISAVETRGINDQGLYRVVGVSSKVQRLLSMLMDVKTCNEVDLENSADWEVKTITSALKQYLRSLPEPLMTYELHGDFIVPAKSGSPESRVNAIHFLVHKLPEKNKEMLDILVKHLTNVSNHSKQNLMTVANLGVVFGPTLMRPQEETVAALMDLKFQNIVVEILIENHEKIFRTPPDTTFPEPTCLSASPPNAPPRQSKRQGQRTKRPVAVYNLCLELEDGDNPYPSKEDTPTSSLDSLSSPSPVTTAVPGPPGPDKNHLLADGGSFGDWASTIPGQTRSSMVQWLNPQSPTTTSSNSAVTPLSPGSSPFPFSPPATVADKPPESIRSRKARAVYPCEAEHSSELSFEIGAIFEDVQTSREPGWLEGTLNGKRGLIPQNYVKLL

SEQ ID NO: 24631 - protein, 413 aa, Homo sapiens
  REGION 1..413: note = ENSP00000422358
  VARIANT 1: note = Any amino acid
XCTKRHTDSIDRRFCFDIEAADRPGVSLTMQAFSEEERKQWLEALGGKEALSHSFNTAIIPRPEGNAQLDKMGFTIIRKCISAVETRGINDQGLYRVVGVSSKVQRLLSMLMDVKTCNEVDLENSADWEVKTITSALKQYLRSLPEPLMTYELHGDFIVPAKSGSPESRVNAIHFLVHKLPEKNKEMLDILVKHLTNVSNHSKQNLMTVANLGVVFGPTLMRPQEETVAALMDLKFQNIVVEILIENHEKIFRTPPDTTFPEPTCLSASPPNAPPRQSKRQGQRTKRPVAVYNLCLELEDGDNPYPSKEDTPTSSLDSLSSPSPVTTAVPGPPGPDKNHLLADGGSFGDWASTIIRSRKARAVYPCEAEHSSELSFEIGAIFEDVQTSREPGWLEGTLNGKRGLIPQNYVKLL

SEQ ID NO: 24632 - protein, 138 aa, Homo sapiens
  REGION 1..138: note = ENSP00000386560
MQKSTNSDTSVETLNSTRQGTGAVQMRIKNANSHHDRLSQSKSMILTDVGKVTEPISRHRRNHSQHILKDVIPPLEQLMVEKEGYLQKAKIADGGKKLRKNWSTSWIVLSSRRIEFYKESKQQALSNMSFCLMCSGGT

SEQ ID NO: 24633 - protein, 475 aa, Homo sapiens
  REGION 1..475: note = ENSP00000295095
MQKSTNSDTSVETLNSTRQGTGAVQMRIKNANSHHDRLSQSKSMILTDVGKVTEPISRHRRNHSQHILKDVIPPLEQLMVEKEGYLQKAKIADGGKKLRKNWSTSWIVLSSRRIEFYKESKQQALSNMKTGHKPESVDLCGAHIEWAKEKSSRKNVFQITTVSGNEFLLQSDIDFIILDWFHAIKNAIDRLPKDSSCPSRNLELFKIQRSSSTELLSHYDSDIKEQKPEHRKSLMFRLHHSASDTSDKNRVKSRLKKFITRRPSLKTLQEKGLIKDQIFGSHLHKVCERENSTVPWFVKQCIEAVEKRGLDVDGIYRVSGNLATIQKLRFIVNQEEKLNLDDSQWEDIHVVTGALKMFFRELPEPLFPYSFFEQFVEAIKKQDNNTRIEAVKSLVQKLPPPNRDTMKVLFGHLTKIVAKASKNLMSTQSLGIVFGPTLLRAENETGNMAIHMVYQNQIAELMLSEYSKIFGSEED

SEQ ID NO: 24634 - protein, 56 aa, Homo sapiens
  REGION 1..56: note = ENSP00000390310
  VARIANT 1: note = Any amino acid
XLDVDGIYRVSGNLATIQKLRFIVNQVVSGIPALLSELDGDLWTPLVSCRFFTVVI

SEQ ID NO: 24635 - protein, 1191 aa, Homo sapiens
  REGION 1..1191: note = ENSP00000260283
MEAMSPQQETLGGQPGRSSSLTGVSRLAGGSCTKKKMKTLAERRRSAPSLILDKALQKRPTTRDSPSASVDTCTFLSSLVCSNRTLLIDGRAELKRGLQRQERHLFLFNDLFVVAKIKYNNNFKIKNKIKLTDMWTASCVDEVGEGNTNAMKSFVLGWPTVNFVATFSSPEQKDKWLSLLQRYINLEKEKDYPKSIPLKIFAKDIGNCAYSKTITVMNSDTANEVINMSLPMLGITGSERDYQLWVNSGKEEAPYPLIGHEYPYGIKMSHLRDSALLTPGSKDSTTPFNLQEPFLMEQLPREMQCQFILKPSRLAAAQQLSDSGHKTFKRRRSIINWAFWRGSSTHLDNLPSSPTSPMPGQLFGISLPNICENDNLPKPVLDMLFFLNQKGPLTKGIFRQSANVKSCRELKEKLNSGVEVHLDCESIFVIASVLKDFLRNIPGSIFSSDLYDHWVSVMDQGNDEEKINTVQRLLDQLPRANVVLLRYLFGVLHNIEQHSSSNQMTAFNLAVCVAPSILWPPASSSPELENEFTKKVSLLIQFLIENCLRIFGEEITSLFREVSVRCDTRENASDISCFQLNDSSYDSLENELNEDVDAPCSDLVKKLGQGSRSMDSVLTLSDYDLDQPEVEGLLTLSDFDLAHSKDEDVQMKRPLESKPVNILVYTKIPLRDHARAPSAMCTPSYLSTAAANAAKSLRRHRRCSEPSIDYLDSKLSYLREFYQKKLRKSSCDAILSQKDEDYLKQNQPLQEEGKTCFKQSLVTGTDVSKKNATTQNTKKKSLSGSEGNHVKLFPKSKPVAISVASYSPMSSQDHSKNQPFDVNTSGYSPPHTADALKGPRTHRRCSEPNIEDQNRKLTYLRGIYSKKQHKTSCEAGLLHGEEDYLKRHKSLQMEGQKLINQSLVMGIEVGKSSATNQNTEKVLPPRLNLCPRTSYSSLSSPGTSPSGSSVSSQDSAFSQISEHSVFTPTETSSPIDCTFQAQRKREDLSPDFSNASHVSGMPGPSSGQACSRPAYTKKDTMEWHSQMHSVTLHPSTWLRNGVASLKNWSLKKKAKAARPEEEKIASPKGPLEPPPHASGVPEANSLQEEQKDLPLRAAEGLSPVQSAQRCSSSPFQDSERHCSSPFSLVESRLKLCMKSHEEIEPGSQSSSGSLPWERASASSWTLEDATSPDSGPTVVCDIEDRYLTKDI

SEQ ID NO: 24636 - protein, 731 aa, Homo sapiens
  REGION 1..731: note = ENSP00000437905
MDQGNDEEKINTVQRLLDQLPRANVVLLRYLFGVLHNIEQHSSSNQMTAFNLAVCVAPSILWPPASSSPELENEFTKKVSLLIQFLIENCLRIFGEEITSLFREVSVRCDTRENASDISCFQLNDSSYDSLENELNEDVDAPCSDLVKKLGQGSRSMDSVLTLSDYDLDQPEVEGLLTLSDFDLAHSKDEDVQMKRPLESKPVNILVYTKIPLRDHARAPSAMCTPSYLSTAAANAAKSLRRHRRCSEPSIDYLDSKLSYLREFYQKKLRKSSCDAILSQKDEDYLKQNQPLQEEGKTCFKQSLVTGTDVSKKNATTQNTKKKSLSGSEGNHVKLFPKSKPVAISVASYSPMSSQDHSKNQPFDVNTSGYSPPHTADALKGPRTHRRCSEPNIEDQNRKLTYLRGIYSKKQHKTSCEAGLLHGEEDYLKRHKSLQMEGQKLINQSLVMGIEVGKSSATNQNTEKVLPPRLNLCPRTSYSSLSSPGTSPSGSSVSSQDSAFSQISEHSVFTPTETSSPIDCTFQAQRKREDLSPDFSNASHVSGMPGPSSGQACSRPAYTKKDTMEWHSQMHSVTLHPSTWLRNGVASLKNWSLKKKAKAARPEEEKIASPKGPLEPPPHASGVPEANSLQEEQKDLPLRAAEGLSPVQSAQRCSSSPFQDSERHCSSPFSLVESRLKLCMKSHEEIEPGSQSSSGSLPWERASASSWTLEDATSPDSGPTVVCDIEDRNCC

SEQ ID NO: 24637 - protein, 1168 aa, Homo sapiens
  REGION 1..1168: note = ENSP00000432076
MSARERQPALKKKMKTLAERRRSAPSLILDKALQKRPTTRDSPSASVDTCTFLSSLVCSNRTLLIDGRAELKRGLQRQERHLFLFNDLFVVAKIKYNNNFKIKNKIKLTDMWTASCVDEVGEGNTNAMKSFVLGWPTVNFVATFSSPEQKDKWLSLLQRYINLEKEKDYPKSIPLKIFAKDIGNCAYSKTITVMNSDTANEVINMSLPMLGITGSERDYQLWVNSGKEEAPYPLIGHEYPYGIKMSHLRDSALLTPGSKDSTTPFNLQEPFLMEQLPREMQCQFILKPSRLAAAQQLSDSGHKTFKRRRSIINWAFWRGSSTHLDNLPSSPTSPMPGQLFGISLPNICENDNLPKPVLDMLFFLNQKGPLTKGIFRQSANVKSCRELKEKLNSGVEVHLDCESIFVIASVLKDFLRNIPGSIFSSDLYDHWVSVMDQGNDEEKINTVQRLLDQLPRANVVLLRYLFGVLHNIEQHSSSNQMTAFNLAVCVAPSILWPPASSSPELENEFTKKVSLLIQFLIENCLRIFGEEITSLFREVSVRCDTRENASDISCFQLNDSSYDSLENELNEDVDAPCSDLVKKLGQGSRSMDSVLTLSDYDLDQPEVEGLLTLSDFDLAHSKDEDVQMKRPLESKPVNILVYTKIPLRDHARAPSAMCTPSYLSTAAANAAKSLRRHRRCSEPSIDYLDSKLSYLREFYQKKLRKSSCDAILSQKDEDYLKQNQPLQEEGKTCFKQSLVTGTDVSKKNATTQNTKKKSLSGSEGNHVKLFPKSKPVAISVASYSPMSSQDHSKNQPFDVNTSGYSPPHTADALKGPRTHRRCSEPNIEDQNRKLTYLRGIYSKKQHKTSCEAGLLHGEEDYLKRHKSLQMEGQKLINQSLVMGIEVGKSSATNQNTEKVLPPRLNLCPRTSYSSLSSPGTSPSGSSVSSQDSAFSQISEHSVFTPTETSSPIDCTFQAQRKREDLSPDFSNASHVSGMPGPSSGQACSRPAYTKKDTMEWHSQMHSVTLHPSTWLRNGVASLKNWSLKKKAKAARPEEEKIASPKGPLEPPPHASGVPEANSLQEEQKDLPLRAAEGLSPVQSAQRCSSSPFQDSERHCSSPFSLVESRLKLCMKSHEEIEPGSQSSSGSLPWERASASSWTLEDATSPDSGPTVVCDIEDRYLTKDI

SEQ ID NO: 24638 - protein, 1155 aa, Homo sapiens
  REGION 1..1155: note = ENSP00000436319
MKTLAERRRSAPSLILDKALQKRPTTRDSPSASVDTCTFLSSLVCSNRTLLIDGRAELKRGLQRQERHLFLFNDLFVVAKIKYNNNFKIKNKIKLTDMWTASCVDEVGEGNTNAMKSFVLGWPTVNFVATFSSPEQKDKWLSLLQRYINLEKEKDYPKSIPLKIFAKDIGNCAYSKTITVMNSDTANEVINMSLPMLGITGSERDYQLWVNSGKEEAPYPLIGHEYPYGIKMSHLRDSALLTPGSKDSTTPFNLQEPFLMEQLPREMQCQFILKPSRLAAAQQLSDSGHKTFKRRRSIINWAFWRGSSTHLDNLPSSPTSPMPGQLFGISLPNICENDNLPKPVLDMLFFLNQKGPLTKGIFRQSANVKSCRELKEKLNSGVEVHLDCESIFVIASVLKDFLRNIPGSIFSSDLYDHWVSVMDQGNDEEKINTVQRLLDQLPRANVVLLRYLFGVLHNIEQHSSSNQMTAFNLAVCVAPSILWPPASSSPELENEFTKKVSLLIQFLIENCLRIFGEEITSLFREVSVRCDTRENASDISCFQLNDSSYDSLENELNEDVDAPCSDLVKKLGQGSRSMDSVLTLSDYDLDQPEVEGLLTLSDFDLAHSKDEDVQMKRPLESKPVNILVYTKIPLRDHARAPSAMCTPSYLSTAAANAAKSLRRHRRCSEPSIDYLDSKLSYLREFYQKKLRKSSCDAILSQKDEDYLKQNQPLQEEGKTCFKQSLVTGTDVSKKNATTQNTKKKSLSGSEGNHVKLFPKSKPVAISVASYSPMSSQDHSKNQPFDVNTSGYSPPHTADALKGPRTHRRCSEPNIEDQNRKLTYLRGIYSKKQHKTSCEAGLLHGEEDYLKRHKSLQMEGQKLINQSLVMGIEVGKSSATNQNTEKVLPPRLNLCPRTSYSSLSSPGTSPSGSSVSSQDSAFSQISEHSVFTPTETSSPIDCTFQAQRKREDLSPDFSNASHVSGMPGPSSGQACSRPAYTKKDTMEWHSQMHSVTLHPSTWLRNGVASLKNWSLKKKAKAARPEEEKIASPKGPLEPPPHASGVPEANSLQEEQKDLPLRAAEGLSPVQSAQRCSSSPFQDSERHCSSPFSLVESRLKLCMKSHEEIEPGSQSSSGSLPWERASASSWTLEDATSPDSGPTVVCDIEDRYLTKDI

SEQ ID NO: 24639 - protein, 1165 aa, Homo sapiens
  REGION 1..1165: note = ENSP00000436522
MTFWIIINKKMKTLAERRRSAPSLILDKALQKRPTTRDSPSASVDTCTFLSSLVCSNRTLLIDGRAELKRGLQRQERHLFLFNDLFVVAKIKYNNNFKIKNKIKLTDMWTASCVDEVGEGNTNAMKSFVLGWPTVNFVATFSSPEQKDKWLSLLQRYINLEKEKDYPKSIPLKIFAKDIGNCAYSKTITVMNSDTANEVINMSLPMLGITGSERDYQLWVNSGKEEAPYPLIGHEYPYGIKMSHLRDSALLTPGSKDSTTPFNLQEPFLMEQLPREMQCQFILKPSRLAAAQQLSDSGHKTFKRRRSIINWAFWRGSSTHLDNLPSSPTSPMPGQLFGISLPNICENDNLPKPVLDMLFFLNQKGPLTKGIFRQSANVKSCRELKEKLNSGVEVHLDCESIFVIASVLKDFLRNIPGSIFSSDLYDHWVSVMDQGNDEEKINTVQRLLDQLPRANVVLLRYLFGVLHNIEQHSSSNQMTAFNLAVCVAPSILWPPASSSPELENEFTKKVSLLIQFLIENCLRIFGEEITSLFREVSVRCDTRENASDISCFQLNDSSYDSLENELNEDVDAPCSDLVKKLGQGSRSMDSVLTLSDYDLDQPEVEGLLTLSDFDLAHSKDEDVQMKRPLESKPVNILVYTKIPLRDHARAPSAMCTPSYLSTAAANAAKSLRRHRRCSEPSIDYLDSKLSYLREFYQKKLRKSSCDAILSQKDEDYLKQNQPLQEEGKTCFKQSLVTGTDVSKKNATTQNTKKKSLSGSEGNHVKLFPKSKPVAISVASYSPMSSQDHSKNQPFDVNTSGYSPPHTADALKGPRTHRRCSEPNIEDQNRKLTYLRGIYSKKQHKTSCEAGLLHGEEDYLKRHKSLQMEGQKLINQSLVMGIEVGKSSATNQNTEKVLPPRLNLCPRTSYSSLSSPGTSPSGSSVSSQDSAFSQISEHSVFTPTETSSPIDCTFQAQRKREDLSPDFSNASHVSGMPGPSSGQACSRPAYTKKDTMEWHSQMHSVTLHPSTWLRNGVASLKNWSLKKKAKAARPEEEKIASPKGPLEPPPHASGVPEANSLQEEQKDLPLRAAEGLSPVQSAQRCSSSPFQDSERHCSSPFSLVESRLKLCMKSHEEIEPGSQSSSGSLPWERASASSWTLEDATSPDSGPTVVCDIEDRYLTKDI

SEQ ID NO: 24640 - protein, 1155 aa, Homo sapiens; identical to SEQ ID NO: 24638
  REGION 1..1155: note = ENSP00000431399

SEQ ID NO: 24641 - protein, 698 aa, Homo sapiens
  REGION 1..698: note = ENSP00000249601
MLSPKIRQARRARSKSLVMGEQSRSPGRMPCPHRLGPVLKAGWLKKQRSIMKNWQQRWFVLRGDQLFYYKDKDEIKPQGFISLQGTQVTELPPGPEDPGKHLFEISPGGAGEREKVPANPEALLLMASSQRDMEDWVQAIRRVIWAPLGGGIFGQRLEETVHHERKYGPRLAPLLVEQCVDFIRERGLTEEGLFRMPGQANLVRDLQDSFDCGEKPLFDSTTDVHTVASLLKLYLRELPEPVVPFARYEDFLSCAQLLTKDEGEGTLELAKQVSNLPQANYNLLRYICKFLDEVQAYSNVNKMSVQNLATVFGPNILRPQVEDPVTIMEGTSLVQHLMTVLIRKHSQLFTAPVPEGPTSPRGGLQCAVGWGSEEVTRDSQGEPGGPGLPAHRTSSLDGAAVAVLSRTAPTGPGSRCSPGKKVQTLPSWKSSFRQPRSLSGSPKGGGSSLEVPIISSGGNWLMNGLSSLRGHRRASSGDRLKDSGSVQRLSTYDNVPAPGLVPGIPSVASMAWSGASSSESSVGGSLSSCTACRASDSSARSSLHTDWALEPSPLPSSSEDPKSLDLDHSMDEAGAGASNSEPSEPDSPTREHARRSEALQGLVTELRAELCRQRTEYERSVKRIEEGSADLRKRMSRLEEELDQEKKKYIMLEIKLRNSERAREDAERRNQLLQREMEEFFSTLGSLTVGAKGARAPK

SEQ ID NO: 24642 - protein, 531 aa, Homo sapiens
  REGION 1..531: note = ENSP00000422868
MCVPPHRKDGSIPCPRALCSQSVDIQAWQLSAAQRGDVGQPREFWHLRSQVPVPTCHLLTVQPWCLLPHPTPAGGRERRHSASSLLAALCLRKAVLRPHPAVLPGVGGCVVLSSGRMKAPLRGGLALGTGPAPTKLQLLHDWQSEPGPSGWQQGPSPPLFPAGTSLVQHLMTVLIRKHSQLFTAPVPEGPTSPRGGLQCAVGWGSEEVTRDSQGEPGGPGLPAHRTSSLDGAAVAVLSRTAPTGPGSRCSPGKKVQTLPSWKSSFRQPRSLSGSPKGGGSSLEVPIISSGGNWLMNGLSSLRGHRRASSGDRLKDSGSVQRLSTYDNVPAPGLVPGIPSVASMAWSGASSSESSVGGSLSSCTACRASDSSARSSLHTDWALEPSPLPSSSEDPKSLDLDHSMDEAGAGASNSEPSEPDSPTREHARRSEALQGLVTELRAELCRQRTEYERSVKRIEEGSADLRKRMSRLEEELDQEKKKYIMLEIKLRNSERAREDAERRNQLLQREMEEFFSTLGSLTVGAKGARAPK

SEQ ID NO: 24643 - protein, 539 aa, Homo sapiens
  REGION 1..539: note = ENSP00000363285
MGLCCCKDWRGHLRAPKGGAGEREKVPANPEALLLMASSQRDMEDWVQAIRRVIWAPLGGGIFGQRLEETVHHERKYGPRLAPLLVEQCVDFIRERGLTEEGLFRMPGQANLVRDLQDSFDCGEKPLFDRFLDEVQAYSNVNKMSVQNLATVFGPNILRPQVEDPVTIMEGTSLVQHLMTVLIRKHSQLFTAPVPEGPTSPRGGLQCAVGWGSEEVTRDSQGEPGGPGLPAHRTSSLDGAAVAVLSRTAPTGPGSRCSPGKKVQTLPSWKSSFRQPRSLSGSPKGGGSSLEVPIISSGGNWLMNGLSSLRGHRRASSGDRLKDSGSVQRLSTYDNVPAPGLVPGIPSVASMAWSGASSSESSVGGSLSSCTACRASDSSARSSLHTDWALEPSPLPSSSEDPKSLDLDHSMDEAGAGASNSEPSEPDSPTREHARRSEALQGLVTELRAELCRQRTEYERSVKRIEEGSADLRKRMSRLEEELDQEKKKYIMLEIKLRNSERAREDAERRNQLLQREMEEFFSTLGSLTVGAKGARAPK

SEQ ID NO: 24644 - protein, 589 aa, Homo sapiens
  REGION 1..589: note = ENSP00000363287
MASSQRDMEDWVQAIRRVIWAPLGGGTARRSHAHPLEPLPPGIFGQRLEETVHHERKYGPRLAPLLVEQCVDFIRERGLTEEGLFRMPGQANLVRDLQDSFDCGEKPLFDSTTDVHTVASLLKLYLRELPEPVVPFARYEDFLSCAQLLTKDEGEGTLELAKQVSNLPQANYNLLRYICKFLDEVQAYSNVNKMSVQNLATVFGPNILRPQVEDPVTIMEGTSLVQHLMTVLIRKHSQLFTAPVPEGPTSPRGGLQCAVGWGSEEVTRDSQGEPGGPGLPAHRTSSLDGAAVAVLSRTAPTGPGSRCSPGKKVQTLPSWKSSFRQPRSLSGSPKGGGSSLEVPIISSGGNWLMNGLSSLRGHRRASSGDRLKDSGSVQRLSTYDNVPAPGLVPGIPSVASMAWSGASSSESSVGGSLSSCTACRASDSSARSSLHTDWALEPSPLPSSSEDPKSLDLDHSMDEAGAGASNSEPSEPDSPTREHARRSEALQGLVTELRAELCRQRTEYERSVKRIEEGSADLRKRMSRLEEELDQEKKKYIMLEIKLRNSERAREDAERRNQLLQREMEEFFSTLGSLTVGAKGARAPK

SEQ ID NO: 24645 - protein, 608 aa, Homo sapiens
  REGION 1..608: note = ENSP00000410054
MPFWPIRCLKRSRRMPRGGAGEREKVPANPEALLLMASSQRDMEDWVQAIRRVIWAPLGGGIFGQRLEETVHHERKYGPRLAPLLVEQCVDFIRERGLTEEGLFRMPGQANLVRDLQDSFDCGEKPLFDSTTDVHTVASLLKLYLRELPEPVVPFARYEDFLSCAQLLTKDEGEGTLELAKQVSNLPQANYNLLRYICKFLDEVQAYSNVNKMSVQNLATVFGPNILRPQVEDPVTIMEGTSLVQHLMTVLIRKHSQLFTAPVPEGPTSPRGGLQCAVGWGSEEVTRDSQGEPGGPGLPAHRTSSLDGAAVAVLSRTAPTGPGSRCSPGKKVQTLPSWKSSFRQPRSLSGSPKGGGSSLEVPIISSGGNWLMNGLSSLRGHRRASSGDRLKDSGSVQRLSTYDNVPAPGLVPGIPSVASMAWSGASSSESSVGGSLSSCTACRASDSSARSSLHTDWALEPSPLPSSSEDPKSLDLDHSMDEAGAGASNSEPSEPDSPTREHARRSEALQGLVTELRAELCRQRTEYERSVKRIEEGSADLRKRMSRLEEELDQEKKKYIMLEIKLRNSERAREDAERRNQLLQREMEEFFSTLGSLTVGAKGARAPK

SEQ ID NO: 24646 - protein, 704 aa, Homo sapiens
  REGION 1..704: note = ENSP00000416701
MLPTASSKRRTFAARYFTRSKSLVMGEQSRSPGRMPCPHRLGPVLKAGWLKKQRSIMKNWQQRWFVLRGDQLFYYKDKDEIKPQGFISLQGTQVTELPPGPEDPGKHLFEISPGGAGEREKVPANPEALLLMASSQRDMEDWVQAIRRVIWAPLGGGIFGQRLEETVHHERKYGPRLAPLLVEQCVDFIRERGLTEEGLFRMPGQANLVRDLQDSFDCGEKPLFDSTTDVHTVASLLKLYLRELPEPVVPFARYEDFLSCAQLLTKDEGEGTLELAKQVSNLPQANYNLLRYICKFLDEVQAYSNVNKMSVQNLATVFGPNILRPQVEDPVTIMEGTSLVQHLMTVLIRKHSQLFTAPVPEGPTSPRGGLQCAVGWGSEEVTRDSQGEPGGPGLPAHRTSSLDGAAVAVLSRTAPTGPGSRCSPGKKVQTLPSWKSSFRQPRSLSGSPKGGGSSLEVPIISSGGNWLMNGLSSLRGHRRASSGDRLKDSGSVQRLSTYDNVPAPGLVPGIPSVASMAWSGASSSESSVGGSLSSCTACRASDSSARSSLHTDWALEPSPLPSSSEDPKSLDLDHSMDEAGAGASNSEPSEPDSPTREHARRSEALQGLVTELRAELCRQRTEYERSVKRIEEGSADLRKRMSRLEEELDQEKKKYIMLEIKLRNSERAREDAERRNQLLQREMEEFFSTLGSLTVGAKGARAPK

SEQ ID NO: 24647 - protein, 714 aa, Homo sapiens
  REGION 1..714: note = ENSP00000412461
MLSPKIRQARRARSKSLVMGEQSRSPGRMPCPHRLGPVLKAGWLKKQRSIMKNWQQRWFVLRGDQLFYYKDKDEIKPQGFISLQGTQVTELPPGPEDPGKHLFEISPGGAGEREKVPANPEALLLMASSQRDMEDWVQAIRRVIWAPLGGGTARRSHAHPLEPLPPGIFGQRLEETVHHERKYGPRLAPLLVEQCVDFIRERGLTEEGLFRMPGQANLVRDLQDSFDCGEKPLFDSTTDVHTVASLLKLYLRELPEPVVPFARYEDFLSCAQLLTKDEGEGTLELAKQVSNLPQANYNLLRYICKFLDEVQAYSNVNKMSVQNLATVFGPNILRPQVEDPVTIMEGTSLVQHLMTVLIRKHSQLFTAPVPEGPTSPRGGLQCAVGWGSEEVTRDSQGEPGGPGLPAHRTSSLDGAAVAVLSRTAPTGPGSRCSPGKKVQTLPSWKSSFRQPRSLSGSPKGGGSSLEVPIISSGGNWLMNGLSSLRGHRRASSGDRLKDSGSVQRLSTYDNVPAPGLVPGIPSVASMAWSGASSSESSVGGSLSSCTACRASDSSARSSLHTDWALEPSPLPSSSEDPKSLDLDHSMDEAGAGASNSEPSEPDSPTREHARRSEALQGLVTELRAELCRQRTEYERSVKRIEEGSADLRKRMSRLEEELDQEKKKYIMLEIKLRNSERAREDAERRNQLLQREMEEFFSTLGSLTVGAKGARAPK

SEQ ID NO: 24648 - protein, 261 aa, Homo sapiens
  REGION 1..261: note = ENSP00000422663
MLPTASSKRRTFAARYFTRSKSLVMGEQSRSPGRMPCPHRLGPVLKAGWLKKQRSIMKNWQQRWFVLRGDQLFYYKDKDEIKPQGFISLQGTQVTELPPGPEDPGKHLFEISPGGAGEREKVPANPEALLLMASSQRDMEDWVQAIRRVIWAPLGGGIFGQRLEETVHHERKYGPRLAPLLVEQCVDFIRERGLTEEGLFRMPGQANLVRDLQDSFDCGEKPLFDSTTDVHTVASLLKLYLRELPEPVVPFARALWSWLNK

SEQ ID NO: 24649 - protein, 1491 aa, Homo sapiens
  REGION 1..1491: note = ENSP00000481862
MNGVAFCLVGIPPRPEPRPPQLPLGPRDGCSPRRPFPWQGPRTLLLYKSPQDGFGFTLRHFIVYPPESAVHCSLKEEENGGRGGGPSPRYRLEPMDTIFVKNVKEDGPAHRAGLRTGDRLVKVNGESVIGKTYSQVIALIQNSDDTLELSIMPKDEDILQLAYSQDAYLKGNEPYSGEARSIPEPPPICYPRKTYAPPARASTRATMVPEPTSALPSDPRSPAAWSDPGLRVPPAARAHLDNSSLGMSQPRPSPGAFPHLSSEPRTPRAFPEPGSRVPPSRLECQQALSHWLSNQVPRRAGERRCPAMAPRARSASQDRLEEVAAPRPWPCSTSQDALSQLGQEGWHRARSDDYLSRATRSAEALGPGALVSPRFERCGWASQRSSARTPACPTRDLPGPQAPPPSGLQGLDDLGYIGYRSYSPSFQRRTGLLHALSFRDSPFGGLPTFNLAQSPASFPPEASEPPRVVRPEPSTRALEPPAEDRGDEVVLRQKPPTGRKVQLTPARQMNLGFGDESPEPEASGRGERLGRKVAPLATTEDSLASIPFIDEPTSPSIDLQAKHVPASAVVSSAMNSAPVLGTSPSSPTFTFTLGRHYSQDCSSIKAGRRSSYLLAITTERSKSCDDGLNTFRDEGRVLRRLPNRIPSLRMLRSFFTDGSLDSWGTSEDADAPSKRHSTSDLSDATFSDIRREGWLYYKQILTKKGKKAGSGLRQWKRVYAALRARSLSLSKERREPGPAAAGAAAAGAGEDEAAPVCIGSCLVDISYSETKRRHVFRLTTADFCEYLFQAEDRDDMLGWIRAIRENSRAEGEDPGCANQALISKKLNDYRKVSHSSGPKADSSPKGSRGLGGLKSEFLKQSAARGLRTQDLPAGSKDDSAAAPKTPWGINIIKKNKKAAPRAFGVRLEECQPATENQRVPLIVAACCRIVEARGLESTGIYRVPGNNAVVSSLQEQLNRGPGDINLQDERWQDLNVISSLLKSFFRKLPEPLFTDDKYNDFIEANRIEDARERMRTLRKLIRDLPGHYYETLKFLVGHLKTIADHSEKNKMEPRNLALVFGPTLVRTSEDNMTDMVTHMPDRYKIVETLIQHSDWFFSDEEDKGERTPVGDKEPQAVPNIEYLLPNIGRTVPPGDPGSDSTTCSSAKSKGSWAPKKEPYAREMLAISFISAVNRKRKKRREARGLGSSTDDDSEQEAHKPGAGATAPGTQERPQGPLPGAVAPEAPGRLSPPAAPEERPAADTRSIVSGYSTLSTMDRSVCSGASGRRAGAGDEADDERSELSHVETDTEGAAGAGPGGRLTRRPSFSSHHLMPCDTLARRRLARGRPDGEGAGRGGPRAPEPPGSASSSSQESLRPPAAALASRPSRMEALRLRLRGTADDMLAVRLRRPLSPETRRRRSSWRRHTVVVQSPLTDLNFNEWKELGGGGPPEPAGARAHSDNKDSGLSSLESTKARAPSSAASQPPAPGDTGSLQSQPPRRSAASRLHQCL

SEQ ID NO: 24650 - protein, 1144 aa, Homo sapiens
  REGION 1..1144: note = ENSP00000482992
MNGVAFCLVGIPPRPEPRPPQLPLGPRDGCSPRRPFPWQGPRTLLLYKSPQDGFGFTLRHFIVYPPESAVHCSLKEEENGGRGGGPSPRYRLEPMDTIFVKNVKEDGPAHRAGLRTGDRLVKVNGESVIGKTYSQVIALIQNSDDTLELSIMPKDEDILQLAYSQDAYLKGNEPYSGEARSIPEPPPICYPRKTYAPPARASTRATMVPEPTSALPSDPRSPAAWSDPGLRVPPAARAHLDNSSLGMSQPRPSPGAFPHLSSEPRTPRAFPEPGSRVPPSRLECQQALSHWLSNQVPRRAGERRCPAMAPRARSASQDRLEEVAAPRPWPCSTSQDALSQLGQEGWHRARSDDYLSRATRSAEALGPGALVSPRFERCGWASQRSSARTPACPTRDLPGPQAPPPSGLQGLDDLGYIGYRSYSPSFQRRTGLLHALSFRDSPFGGLPTFNLAQSPASFPPEASEPPRVVRPEPSTRALEPPAEDRGDEVVLRQKPPTGRKVQLTPARQMNLGFGDESPEPEASGRGERLGRKVAPLATTEDSLASIPFIDEPTSPSIDLQAKHVPASAVVSSAMNSAPVLGTSPSSPTFTFTLGRHYSQDCSSIKAGRRSSYLLAITTERSKSCDDGLNTFRDEGRVLRRLPNRIPSLRMLRSFFTDGSLDSWGTSEDADAPSKRHSTSDLSDATFSDIRREGWLYYKQILTKKGKKAGSGLRQWKRVYAALRARSLSLSKERREPGPAAAGAAAAGAGEDEAAPVCIGSCLVDISYSETKRRHVFRLTTADFCEYLFQAEDRDDMLGWIRAIRENSRAEGEDPGCANQALISKKLNDYRKVSHSSGPKADSSPKGSRGLGGLKSEFLKQSAARGLRTQDLPAGSKDDSAAAPKTPWGINIIKKNKKAAPRAFGVRLEECQPATENQRVPLIVAACCRIVEARGLESTGIYRVPGNNAVVSSLQEQLNRGPGDINLQDERWQDLNVISSLLKSFFRKLPEPLFTDDKYNDFIEANRIEDARERMRTLRKLIRDLPGHYYETLKFLVGHLKTIADHSEKNKMEPRNLALVFGPTLVRTSEDNMTDMVTHMPDRYKIVETLIQHSDWFFSDEEDKGERTPVGDKEPQAVPNIEYLLPNIGRTVPPGDPGSADLLEI

SEQ ID NO: 24651 - protein, 102 aa, Homo sapiens
  REGION 1..102: note = ENSP00000482982
MDTIFVKNVKEDGPAHRAGLRTGDRLVKVNGESVIGKTYSQVIALIQNSDDTLELSIMPKDEDILQLAYSQDAYLKGNEPYSGEARSIPEPPPICYPRKTYA

SEQ ID NO: 24652 - protein, 129 aa, Homo sapiens
  REGION 1..129: note = ENSP00000483748
SKSCDDGLNTFRDEGRVLRRLPNRIPSLRMLRSFFTDGSLDSWGTSEDADAPSKRHSTSDLSDATFSDIRREGWLYYKQILTKKGKKAGSGLRQWKRVYAALRARSLSLSKERREPGPAAAGAAAAGAG

SEQ ID NO: 24653 - protein, 163 aa, Homo sapiens
  REGION 1..163: note = ENSP00000481292
  VARIANT 1: note = Any amino acid
XTFSDIRREGWLYYKQILTKKGKAEDRDDMLGWIRAIRENSRAEGEDPGCANQALISKKLNDYRKVSHSSGPKADSSPKGSRGLGGLKSEFLKQSAARGLRTQDLPAGSKDDSAAAPKTPWGINIIKKNKKAAPRAFGVRLEECQPATENQRVPLIVAACCRI

SEQ ID NO: 24654 - protein, 83 aa, Homo sapiens
  REGION 1..83: note = ENSP00000482425
RVPLIVAACCRIVEARGLESTGIYRVPGNNAVVSSLQEQLNRGPGDINLQDERWQDLNVISSLLKSFFRKLPEPLFTDGALLF

SEQ ID NO: 24655 - protein, 135 aa, Homo sapiens
  REGION 1..135: note = ENSP00000478142
IRDLPGHYYETLKFLVGHLKTIADHSEKNKMEPRNLALVFGPTLVRTSEDNMTDMVTHMPDRYKIVETLIQHSDWFFSDEEDKGERILPPVVQPSPRVRGPPRRSRTPGRCWRSPSSRPSTASARSGGRRGGWAA

SEQ ID NO: 24656 - protein, 64 aa, Homo sapiens
  REGION 1..64: note = ENSP00000484509
  VARIANT 1: note = Any amino acid
XFFSDEEDKGERTPVGDKEPQAVPNIEYLLPNIGRTVPPGDPGSDSTTCSSAKSKVRMKAILKA

SEQ ID NO: 24657 - protein, 1491 aa, Homo sapiens; identical to SEQ ID NO: 24649
  REGION 1..1491: note = ENSP00000479208

SEQ ID NO: 24658 - protein, 1144 aa, Homo sapiens; identical to SEQ ID NO: 24650
  REGION 1..1144: note = ENSP00000488428

SEQ ID NO: 24659 - protein, 102 aa, Homo sapiens; identical to SEQ ID NO: 24651
  REGION 1..102: note = ENSP00000488885

SEQ ID NO: 24660 - protein, 129 aa, Homo sapiens; identical to SEQ ID NO: 24652
  REGION 1..129: note = ENSP00000487883

SEQ ID NO: 24661 - protein, 163 aa, Homo sapiens; identical to SEQ ID NO: 24653
  REGION 1..163: note = ENSP00000488827
  VARIANT 1: note = Any amino acid

SEQ ID NO: 24662 - protein, 83 aa, Homo sapiens; identical to SEQ ID NO: 24654
  REGION 1..83: note = ENSP00000488699

SEQ ID NO: 24663 - protein, 135 aa, Homo sapiens; identical to SEQ ID NO: 24655
  REGION 1..135: note = ENSP00000488310

SEQ ID NO: 24664 - protein, 64 aa, Homo sapiens; identical to SEQ ID NO: 24656
  REGION 1..64: note = ENSP00000487994
  VARIANT 1: note = Any amino acid

SEQ ID NO: 24665 - protein, 748 aa, Homo sapiens
  REGION 1..748: note = ENSP00000378611
MEENNDSTENPQQGQGRQNAIKCGWLRKQGGFVKTWHTRWFVLKGDQLYYFKDEDETKPLGTIFLPGNKVSEHPCNEENPGKFLFEVVPGGDRDRMTANHESYLLMASTQNDMEDWVKSIRRVIWGPFGGGIFGQKLEDTVRYEKRYGNRLAPMLVEQCVDFIRQRGLKEEGLFRLPGQANLVKELQDAFDCGEKPSFDSNTDVHTVASLLKLYLRELPEPVIPYAKYEDFLSCAKLLSKEEEAGVKELAKQVKSLPVVNYNLLKYICRFLDEVQSYSGVNKMSVQNLATVFGPNILRPKVEDPLTIMEGTVVVQQLMSVMISKHDCLFPKDAELQSKPQDGVSNNNEIQKKATMGQLQNKENNNTKDSPSRQCSWDKSESPQRSSMNNGSPTALSGSKTNSPKNSVHKLDVSRSPPLMVKKNPAFNKGSGIVTNGSFSSSNAEGLEKTQTTPNGSLQARRSSSLKVSGTKMGTHSVQNGTVRMGILNSDTLGNPTNVRNMSWLPNGYVTLRDNKQKEQAGELGQHNRLSTYDNVHQQFSMMNLDDKQSIDSATWSTSSCEISLPENSNSCRSSTTTCPEQDFFGGNFEDPVLDGPPQDDLSHPRDYESKSDHRSVGGRSSRATSSSDNSETFVGNSSSNHSALHSLVSSLKQEMTKQKIEYESRIKSLEQRNLTLETEMMSLHDELDQERKKFTMIEIKMRNAERAKEDAEKRNDMLQKEMEQFFSTFGELTVEPRRTERGNTIWIQ

SEQ ID NO: 24666 - protein, 246 aa, Homo sapiens
  REGION 1..246: note = ENSP00000423206
MEENNDSTENPQQGQGRQNAIKCGWLRKQGGFVKTWHTRWFVLKGDQLYYFKDEDETKPLGTIFLPGNKVSEHPCNEENPGKFLFEVVPGGDRDRMTANHESYLLMASTQNDMEDWVKSIRRVIWGPFGGGIFGQKLEDTVRYEKRYGNRLAPMLVEQCVDFIRQRGLKEEGLFRLPGQANLVKELQDAFDCGEKPSFDSNTDVHTVASLLKLYLRELPEPVIPYAKYEDFLSCAKLLSKEEEAVS

SEQ ID NO: 24667 - protein, 82 aa, Homo sapiens
  REGION 1..82: note = ENSP00000426105
MTANHESYLLMASTQNDMEDWVKSIRRVIWGPFGGGIFGQKLEDTVRYEKRYGNRLAPMLVEQCVDFIRQRGLKEEGLFRLP

SEQ ID NO: 24668 - protein, 653 aa, Homo sapiens
  REGION 1..653: note = ENSP00000378610
MTANHESYLLMASTQNDMEDWVKSIRRVIWGPFGGGIFGQKLEDTVRYEKRYGNRLAPMLVEQCVDFIRQRGLKEEGLFRLPGQANLVKELQDAFDCGEKPSFDSNTDVHTVASLLKLYLRELPEPVIPYAKYEDFLSCAKLLSKEEEAGVKELAKQVKSLPVVNYNLLKYICRFLDEVQSYSGVNKMSVQNLATVFGPNILRPKVEDPLTIMEGTVVVQQLMSVMISKHDCLFPKDAELQSKPQDGVSNNNEIQKKATMGQLQNKENNNTKDSPSRQCSWDKSESPQRSSMNNGSPTALSGSKTNSPKNSVHKLDVSRSPPLMVKKNPAFNKGSGIVTNGSFSSSNAEGLEKTQTTPNGSLQARRSSSLKVSGTKMGTHSVQNGTVRMGILNSDTLGNPTNVRNMSWLPNGYVTLRDNKQKEQAGELGQHNRLSTYDNVHQQFSMMNLDDKQSIDSATWSTSSCEISLPENSNSCRSSTTTCPEQDFFGGNFEDPVLDGPPQDDLSHPRDYESKSDHRSVGGRSSRATSSSDNSETFVGNSSSNHSALHSLVSSLKQEMTKQKIEYESRIKSLEQRNLTLETEMMSLHDELDQERKKFTMIEIKMRNAERAKEDAEKRNDMLQKEMEQFFSTFGELTVEPRRTERGNTIWIQ

SEQ ID NO: 24669 - protein, 118 aa, Homo sapiens
  REGION 1..118: note = ENSP00000424256
MFVQGIFGQKLEDTVRYEKRYGNRLAPMLVEQCVDFIRQRGLKEEGLFRLPGQANLVKELQDAFDCGEKPSFDSNTDVHTVASLLKLYLRELPEPVIPYAKYEDFLSCAKLLSKEEEA

SEQ ID NO: 24670 - protein, 622 aa, Homo sapiens
  REGION 1..622: note = ENSP00000425589
MFVQGGDRDRMTANHESYLLMASTQNDMEDWVKSIRRVIWGPFGGGIFGQKLEDTVRYEKRYGNRLAPMLVEQCVDFIRQRGLKEEGLFRLPGQANLVKELQDAFDCGEKPSFDSNTDVHTVASLLKLYLRELPEPVIPYAKYEDFLSCAKLLSKEEEAGVKELAKQVKSLPVVNYNLLKYICRFLDEVQSYSGVNKMSVQNLATVFGPNILRPKVEDPLTIMEGTVVVQQLMSVMISKHDCLFPKDAELQSKPQDGVSNNNEIQKKATMGQLQNKENNNTKDSPSRQCSWDKSESPQRSSMNNGSPTALSGSKTNSPKNSVHKLDVSRSPPLMVKKNPAFNKGSGIVTNGSFSSSNAEGLEKTQTTPNGSLQARRSSSLKVSGTKMGTHSVQNGTVRMGILNSDTLGNPTNVRNMSWLPNGYVTLRDNKQKEQAGELGQHNRLSTYDNVHQQFSMMNLDDKQSIDSATWSTSSCEISLPENSNSCRSSTTTCPEQDFFGGNFEDPVLDGPPQDDLSHPRDYESKSDHRSVGGRSSRATSSSDNSETFVGNSSSNHSALHSLVSSLKQEMTKQKIEYESRIKSLEQRNLTLETEMMSLHDELDQERKKFTMIEIKMRNAERA

SEQ ID NO: 24671 - protein, 655 aa, Homo sapiens
  REGION 1..655: note = ENSP00000264343
MPEDRNSGGCPAGALASTPFIPKTTYRRIKRCFSFRKGIFGQKLEDTVRYEKRYGNRLAPMLVEQCVDFIRQRGLKEEGLFRLPGQANLVKELQDAFDCGEKPSFDSNTDVHTVASLLKLYLRELPEPVIPYAKYEDFLSCAKLLSKEEEAGVKELAKQVKSLPVVNYNLLKYICRFLDEVQSYSGVNKMSVQNLATVFGPNILRPKVEDPLTIMEGTVVVQQLMSVMISKHDCLFPKDAELQSKPQDGVSNNNEIQKKATMGQLQNKENNNTKDSPSRQCSWDKSESPQRSSMNNGSPTALSGSKTNSPKNSVHKLDVSRSPPLMVKKNPAFNKGSGIVTNGSFSSSNAEGLEKTQTTPNGSLQARRSSSLKVSGTKMGTHSVQNGTVRMGILNSDTLGNPTNVRNMSWLPNGYVTLRDNKQKEQAGELGQHNRLSTYDNVHQQFSMMNLDDKQSIDSATWSTSSCEISLPENSNSCRSSTTTCPEQDFFGGNFEDPVLDGPPQDDLSHPRDYESKSDHRSVGGRSSRATSSSDNSETFVGNSSSNHSALHSLVSSLKQEMTKQKIEYESRIKSLEQRNLTLETEMMSLHDELDQERKKFTMIEIKMRNAERAKEDAEKRNDMLQKEMEQFFSTFGELTVEPRRTERGNTIWIQ

SEQ ID NO: 24672 - protein, 283 aa, Homo sapiens
  REGION 1..283: note = ENSP00000417283
MTGEQMAAFHPSSTPNPLERPIKMGWLKKQRSIVKNWQQRYFVLRAQQLYYYKDEEDTKPQGCMYLPGCTIKEIATNPEEAGKFVFEIIPASWDQNRMGQDSYVLMASSQAEMEEWVKFLRRVAGTPCGAVFGQRLDETVAYEQKFGPHLVPILVEKCAEFILEHGRNEEGIFRLPGQDNLVKQLRDAFDAGERPSFDRDTDVHTVASLLKLYLRDLPEPVVPWSQYEGFLLCGQLTNADEAKNYRNRNDCQSVVSAQIHQFCPRVSLLAHGQAHLLVNDLLV

SEQ ID NO: 24673 - protein, 646 aa, Homo sapiens
  REGION 1..646: note = ENSP00000386911
MSLKLPRNWDFNLKVEAAKIARSRSVMTGEQMAAFHPSSTPNPLERPIKMGWLKKQRSIVKNWQQRYFVLRAQQLYYYKDEEDTKPQGCMYLPGCTIKEIATNPEEAGKFVFEIIPASWDQNRMGQDSYVLMASSQAEMEEWVKFLRRVAGTPCGAVFGQRLDETVAYEQKFGPHLVPILVEKCAEFILEHGRNEEGIFRLPGQDNLVKQLRDAFDAGERPSFDRDTDVHTVASLLKLYLRDLPEPVVPWSQYEGFLLCGQLTNADEAKAQQELMKQLSILPRDNYSLLSYICRFLHEIQLNCAVNKMSVDNLATVIGVNLIRSKVEDPAVIMRGTPQIQRVMTMMIRDHEVLFPKSKDIPLSPPAQKNDPKKAPVARSSVGWDATEDLRISRTDSFSSMTSDSDTTSPTGQQPSDAFPEDSSKVPREKPGDWKMQSRKRTQTLPNRKCFLTSAFQGANSSKMEIFKNEFWSPSSEAKAGEGHRRTMSQDLRQLSDSQRTSTYDNVPSLPGSPGEEASALSSQACDSKGDTLASPNSETGPGKKNSGEEEIDSLQRMVQELRKEIETQKQMYEEQIKNLEKENYDVWAKVVRLNEELEKEKKKSAALEISLRNMERSREDVEKRNKALEEEVKEFVKSMKEPKTEA

SEQ ID NO: 24674 - protein, 606 aa, Homo sapiens
  REGION 1..606: note = ENSP00000420583
MSLKLPRNWDFNLKVEAAKIARSRSVMTGEQMAAFHPSSTPNPLERPIKMGWLKKQRSIVKNWQQRYFVLRAQQLYYYKDEEDTKPQGCMYLPGCTIKEIATNPEEAGKFVFEIIPVFGQRLDETVAYEQKFGPHLVPILVEKCAEFILEHGRNEEGIFRLPGQDNLVKQLRDAFDAGERPSFDRDTDVHTVASLLKLYLRDLPEPVVPWSQYEGFLLCGQLTNADEAKAQQELMKQLSILPRDNYSLLSYICRFLHEIQLNCAVNKMSVDNLATVIGVNLIRSKVEDPAVIMRGTPQIQRVMTMMIRDHEVLFPKSKDIPLSPPAQKNDPKKAPVARSSVGWDATEDLRISRTDSFSSMTSDSDTTSPTGQQPSDAFPEDSSKVPREKPGDWKMQSRKRTQTLPNRKCFLTSAFQGANSSKMEIFKNEFWSPSSEAKAGEGHRRTMSQDLRQLSDSQRTSTYDNVPSLPGSPGEEASALSSQACDSKGDTLASPNSETGPGKKNSGEEEIDSLQRMVQELRKEIETQKQMYEEQIKNLEKENYDVWAKVVRLNEELEKEKKKSAALEISLRNMERSREDVEKRNKALEEEVKEFVKSMKEPKTEA

SEQ ID NO: 24675 - protein, 139 aa, Homo sapiens
  REGION 1..139: note = ENSP00000420427
MSLKLPRNWDFNLKVEAAKIARSRSVMTGEQMAAFHPSSTPNPLERPIKMGWLKKQRSIVKNWQQRYFVLRAQQLYYYKDEEDTKPQQCLASAWMRLWPMNRNSAPIWCPSWWRNVQSSSWSTAGMKRASSVCLGRTTW

SEQ ID NO: 24676 - protein, 638 aa, Homo sapiens
  REGION 1..638: note = ENSP00000386863
MSLGQSACLFLSIARSRSVMTGEQMAAFHPSSTPNPLERPIKMGWLKKQRSIVKNWQQRYFVLRAQQLYYYKDEEDTKPQGCMYLPGCTIKEIATNPEEAGKFVFEIIPASWDQNRMGQDSYVLMASSQAEMEEWVKFLRRVAGTPCGVFGQRLDETVAYEQKFGPHLVPILVEKCAEFILEHGRNEEGIFRLPGQDNLVKQLRDAFDAGERPSFDRDTDVHTVASLLKLYLRDLPEPVVPWSQYEGFLLCGQLTNADEAKAQQELMKQLSILPRDNYSLLSYICRFLHEIQLNCAVNKMSVDNLATVIGVNLIRSKVEDPAVIMRGTPQIQRVMTMMIRDHEVLFPKSKDIPLSPPAQKNDPKKAPVARSSVGWDATEDLRISRTDSFSSMTSDSDTTSPTGQQPSDAFPEDSSKVPREKPGDWKMQSRKRTQTLPNRKCFLTSAFQGANSSKMEIFKNEFWSPSSEAKAGEGHRRTMSQDLRQLSDSQRTSTYDNVPSLPGSPGEEASALSSQACDSKGDTLASPNSETGPGKKNSGEEEIDSLQRMVQELRKEIETQKQMYEEQIKNLEKENYDVWAKVVRLNEELEKEKKKSAALEISLRNMERSREDVEKRNKALEEEVKEFVKSMKEPKTEA

SEQ ID NO: 24677 - protein, 639 aa, Homo sapiens
  REGION 1..639: note = ENSP00000386241
MSLGQSACLFLSIARSRSVMTGEQMAAFHPSSTPNPLERPIKMGWLKKQRSIVKNWQQRYFVLRAQQLYYYKDEEDTKPQGCMYLPGCTIKEIATNPEEAGKFVFEIIPASWDQNRMGQDSYVLMASSQAEMEEWVKFLRRVAGTPCGAVFGQRLDETVAYEQKFGPHLVPILVEKCAEFILEHGRNEEGIFRLPGQDNLVKQLRDAFDAGERPSFDRDTDVHTVASLLKLYLRDLPEPVVPWSQYEGFLLCGQLTNADEAKAQQELMKQLSILPRDNYSLLSYICRFLHEIQLNCAVNKMSVDNLATVIGVNLIRSKVEDPAVIMRGTPQIQRVMTMMIRDHEVLFPKSKDIPLSPPAQKNDPKKAPVARSSVGWDATEDLRISRTDSFSSMTSDSDTTSPTGQQPSDAFPEDSSKVPREKPGDWKMQSRKRTQTLPNRKCFLTSAFQGANSSKMEIFKNEFWSPSSEAKAGEGHRRTMSQDLRQLSDSQRTSTYDNVPSLPGSPGEEASALSSQACDSKGDTLASPNSETGPGKKNSGEEEIDSLQRMVQELRKEIETQKQMYEEQIKNLEKENYDVWAKVVRLNEELEKEKKKSAALEISLRNMERSREDVEKRNKALEEEVKEFVKSMKEPKTEA

SEQ ID NO: 24678 - protein, 85 aa, Homo sapiens
  REGION 1..85: note = ENSP00000417425
MSLGQSACLFLSIARSRSVMTGEQMAAFHPSSTPNPLERPIKMGWLKKQRSIVKNWQQSGPPGSTRTGTVEFPTHGSESRLATGR

SEQ ID NO: 24679 - protein, 458 aa, Homo sapiens
  REGION 1..458: note = ENSP00000417139
MSLGQSACLFLSIARSRSVMTGEQMAAFHPSSTPNPLERPIKMGWLKKQRSIVKNWQQRYFVLRAQQLYYYKDEEDTKPQGCMYLPGCTIKEIATNPEEAGKFVFEIIPASWDQNRMGQDSYVLMASSQAEMEEWVKFLRRVAGTPCGAVFGQRLDETVAYEQKFGPHLVPILVEKCAEFILEHGRNEEGIFRLPGQDNLVKQLRDAFDAGERPSFDRDTDVHTVASLLKLYLRDLPEPVVPWSQYEGFLLCGQLTNADEAKAQQELMKQLSILPRDNYSLLSYICRFLHEIQLNCAVNKMSVDNLATVIGVNLIRSKVEDPAVIMRGTPQIQRVMTMMIRDHEVLFPKSKDIPLSPPAQKNDPKKAPVARSSVGWDATEDLRISRTDSFSSMVRCREPSCFHWVLPLVQAIPCKACSRVAIWGVLGDAVAVGAAATDSSEHTLKAWPLSKSSFYWHL

SEQ ID NO: 24680 - protein, 505 aa, Homo sapiens
  REGION 1..505: note = ENSP00000417818
  VARIANT 1: note = Any amino acid
XAQNDGQVLFALSSAVFGQRLDETVAYEQKFGPHLVPILVEKCAEFILEHGRNEEGIFRLPGQDNLVKQLRDAFDAGERPSFDRDTDVHTVASLLKLYLRDLPEPVVPWSQYEGFLLCGQLTNADEAKAQQELMKQLSILPRDNYSLLSYICRFLHEIQLNCAVNKMSVDNLATVIGVNLIRSKVEDPAVIMRGTPQIQRVMTMMIRDHEVLFPKSKDIPLSPPAQKNDPKKAPVARSSVGWDATEDLRISRTDSFSSMTSDSDTTSPTGQQPSDAFPEDSSKVPREKPGDWKMQSRKRTQTLPNRKCFLTSAFQGANSSKMEIFKNEFWSPSSEAKAGEGHRRTMSQDLRQLSDSQRTSTYDNVPSLPGSPGEEASALSSQACDSKGDTLASPNSETGPGKKNSGEEEIDSLQRMVQELRKEIETQKQMYEEQIKNLEKENYDVWAKVVRLNEELEKEKKKSAALEISLRNMERSREDVEKRNKALEEEVKEFVKSMKEPKTEA

SEQ ID NO: 24681 - protein, 339 aa, Homo sapiens
  REGION 1..339: note = ENSP00000417467
MSVDNLATVIGVNLIRSKVEDPAVIMRGTPQIQRVMTMMIRDHEVLFPKSKDIPLSPPAQKNDPKKAPVARSSVGWDATEDLRISRTDSFSSMTSDSDTTSPTGQQPSDAFPEDSSKVPREKPGDWKMQSRKRTQTLPNRKCFLTSAFQGANSSKMEIFKNEFWSPSSEAKAGEGHRRTMSQDLRQLSDSQRTSTYDNVPSLPGSPGEEASALSSQACDSKGDTLASPNSETGPGKKNSGEEEIDSLQRMVQELRKEIETQKQMYEEQIKNLEKENYDVWAKVVRLNEELEKEKKKSAALEISLRNMERSREDVEKRNKALEEEVKEFVKSMKEPKTEA

SEQ ID NO: 24682 - protein, 814 aa, Homo sapiens
  REGION 1..814: note = ENSP00000274498
MGLPALEFSDCCLDSPHFRETLKSHEAELDKTNKFIKELIKDGKSLISALKNLSSAKRKFADSLNEFKFQCIGDAETDDEMCIARSLQEFATVLRNLEDERIRMIENASEVLITPLEKFRKEQIGAAKEAKKKYDKETEKYCGILEKHLNLSSKKKESQLQEADSQVDLVRQHFYEVSLEYVFKVQEVQERKMFEFVEPLLAFLQGLFTFYHHGYELAKDFGDFKTQLTISIQNTRNRFEGTRSEVESLMKKMKENPLEHKTISPYTMEGYLYVQEKRHFGTSWVKHYCTYQRDSKQITMVPFDQKSGGKGGEDESVILKSCTRRKTDSIEKRFCFDVEAVDRPGVITMQALSEEDRRLWMEAMDGREPVYNSNKDSQSEGTAQLDSIGFSIIRKCIHAVETRGINEQGLYRIVGVNSRVQKLLSVLMDPKTASETETDICAEWEIKTITSALKTYLRMLPGPLMMYQFQRSFIKAAKLENQESRVSEIHSLVHRLPEKNRQMLQLLMNHLANVANNHKQNLMTVANLGVVFGPTLLRPQEETVAAIMDIKFQNIVIEILIENHEKIFNTVPDMPLTNAQLHLSRKKSSDSKPPSCSERPLTLFHTVQSTEKQEQRNSIINSSLESVSSNPNSILNSSSSLQPNMNSSDPDLAVVKPTRPNSLPPNPSPTSPLSPSWPMFSAPSSPMPTSSTSSDSSPVRSVAGFVWFSVAAVVLSLARSSLHAVFSLLVNFVPCHPNLHLLFDRPEEAVHEDSSTPFRKAKALYACKAEHDSELSFTAGTVFDNVHPSQEPGWLEGTLNGKTGLIPENYVEFL

SEQ ID NO: 24683 - protein, 759 aa, Homo sapiens
  REGION 1..759: note = ENSP00000367243
MGLPALEFSDCCLDSPHFRETLKSHEAELDKTNKFIKELIKDGKSLISALKNLSSAKRKFADSLNEFKFQCIGDAETDDEMCIARSLQEFATVLRNLEDERIRMIENASEVLITPLEKFRKEQIGAAKEAKKKYDKETEKYCGILEKHLNLSSKKKESQLQEADSQVDLVRQHFYEVSLEYVFKVQEVQERKMFEFVEPLLAFLQGLFTFYHHGYELAKDFGDFKTQLTISIQNTRNRFEGTRSEVESLMKKMKENPLEHKTISPYTMEGYLYVQEKRHFGTSWVKHYCTYQRDSKQITMVPFDQKSGGKGGEDESVILKSCTRRKTDSIEKRFCFDVEAVDRPGVITMQALSEEDRRLWMEAMDGREPVYNSNKDSQSEGTAQLDSIGFSIIRKCIHAVETRGINEQGLYRIVGVNSRVQKLLSVLMDPKTASETETDICAEWEIKTITSALKTYLRMLPGPLMMYQFQRSFIKAAKLENQESRVSEIHSLVHRLPEKNRQMLQLLMNHLANVANNHKQNLMTVANLGVVFGPTLLRPQEETVAAIMDIKFQNIVIEILIENHEKIFNTVPDMPLTNAQLHLSRKKSSDSKPPSCSERPLTLFHTVQSTEKQEQRNSIINSSLESVSSNPNSILNSSSSLQPNMNSSDPDLAVVKPTRPNSLPPNPSPTSPLSPSWPMFSAPSSPMPTSSTSSDSSPVSTPFRKAKALYACKAEHDSELSFTAGTVFDNVHPSQEPGWLEGTLNGKTGLIPENYVEFL

SEQ ID NO: 24684 - protein, 166 aa, Homo sapiens
  REGION 1..166: note = ENSP00000367252
MEPLAPSPRIWTCVFYFGIESEEDLSSAKRKFADSLNEFKFQCIGDAETDDEMCIARSLQEFATVLRNLEDERIRMIENASEVLITPLEKFRKEQIGAAKEAKKKYDKETEKYCGILEKHLNLSSKKKESQLQEADSQVDLVRQHFYEVSLEYVFKVQEVQERKMF

SEQ ID NO: 24685 - protein, 91 aa, Homo sapiens
  REGION 1..91: note = ENSP00000411571
MVPFDQKSGGKGGEDESVILKSCTRRKTDSIEKRFCFDVEAVDRPGVITMQALSEEDRRLWMEAMDGREPVYNSNKDSQSEGTAQLDSIGF

SEQ ID NO: 24686 - protein, 388 aa, Homo sapiens
  REGION 1..388: note = ENSP00000393276
  VARIANT 1: note = Any amino acid
XAQLDSIGFSIIRKCIHAVETRGINEQGLYRIVGVNSRVQKLLSVLMDPKTASETETDICAEWEIKTITSALKTYLRMLPGPLMMYQFQRSFIKAAKLENQESRVSEIHSLVHRLPEKNRQMLQLLMNHLANVANNHKQNLMTVANLGVVFGPTLLRPQEETVAAIMDIKFQNIVIEILIENHEKIFNTVPDMPLTNAQLHLSRKKSSDSKPPSCSERPLTLFHTVQSTEKQEQRNSIINSSLESVSSNPNSILNSSSSLQPNMNSSDPDLAVVKPTRPNSLPPNPSPTSPLSPSWPMFSAPSSPMPTSSTSSDSSPVRPEEAVHEDSSTPFRKAKALYACKAEHDSELSFTAGTVFDNVHPSQEPGWLEGTLNGKTGLIPENYVEFL

SEQ ID NO: 24687 - protein, 294 aa, Homo sapiens
  REGION 1..294: note = ENSP00000416889
  VARIANT 1: note = Any amino acid
XPKTASETETDICAEWEIKTITSALKTYLRMLPGPLMMYQFQRSFIKAAKLENQESRVSEIHSLVHRLPEKNRQMLQLLMNHLANVANNHKQNLMTVANLGVVFGPTLLRPQEETVAAIMDIKFQNIVIEILIENHEKIFNTVPDMPLTNAQLHLSRKKSSDSKPPSCSERPLTLFHTVQSTEKQEQRNSIINSSLESVSSNPNSILNSSSSLQPNMNSSDPDLAVVKPTRPNSLTPFRKAKALYACKAEHDSELSFTAGTVFDNVHPSQEPGWLEGTLNGKTGLIPENYVEFL

SEQ ID NO: 24688 - protein, 97 aa, Homo sapiens
  REGION 1..97: note = ENSP00000392186
AKLENQESRVSEIHSLVHRLPEKNRQMLQLLMNHLAKYAGGLGKKCVKCSLQWRTAANARWPSQRMLGKCSCNQATKQSFQGDFTYGDQGQIGVCCP

SEQ ID NO: 24689 - protein, 127 aa, Homo sapiens
  REGION 1..127: note = ENSP00000413283
IVIEILIENHEKIFNTVPDMPLTNAQLHLSRKKSSDSKPPSCSERPLTLFHTVQSTEKQEQRNSIINSSLESVSSNPNSILNSSSSLQPNMNSSDPDLAVVKPTRPNSLVQPPRQLCSLPSKPALAF

SEQ ID NO: 24690 - protein, 127 aa, Homo sapiens
  REGION 1..127: note = ENSP00000400565
VIEILIENHEKIFNTVPDMPLTNAQLHLSRKKSSDSKPPSCSERPLTLFHTVQSTEKQEQRNSIINSSLESVSSNPNSILNSSSSLQPNMNSSDPDLAVVKPTRPNSLHWGFGMCLEGCTEVQSPAS

SEQ ID NO: 24691 - protein, 154 aa, Homo sapiens
  REGION 1..154: note = ENSP00000389137
  VARIANT 1: note = Any amino acid
XPPNPSPTSPLSPSWPMFSAPSSPMPTSSTSSDSSPVRSVAGFVWFSVAAVVLSLARSSLHAVFSLLVNFVPCHPNLHLLFDRPEEAVHEDSSTPFRKAKALYACKAEHDSELSFTAGTVFDNAECPSASTAIFTATPKLRAPPPLTWALPLAA

SEQ ID NO: 24692 - protein, 98 aa, Homo sapiens
  REGION 1..98: note = ENSP00000403388
  VARIANT 1: note = Any amino acid
XPNPSPTSPLSPSWPMFSAPSSPMPTSSTSSDSSPVSTPFRKAKALYACKAEHDSELSFTAGTVFDNAECPSASTAIFTATPKLRAPPPLTWALPLAA

SEQ ID NO: 24693 - protein, 1035 aa, Homo sapiens
  REGION 1..1035: note = ENSP00000449764
MIAHKQKKTKKKRAWASGQLSTDITTSEMGLKSLSSNSIFDPDYIKELVNDIRKFSHMLLYLKEAIFSDCFKEVIHIRLEELLRVLKSIMNKHQNLNSVDLQNAAEMLTAKVKAVNFTEVNEENKNDLFQEVFSSIETLAFTFGNILTNFLMGDVGNDSLLRLPVSRETKSFENVSVESVDSSSEKGNFSPLELDNVLLKNTDSIELALSYAKTWSKYTKNIVSWVEKKLNLELESTRNMVKLAEATRTNIGIQEFMPLQSLFTNALLNDIESSHLLQQTIAALQANKFVQPLLGRKNEMEKQRKEIKELWKQEQNKMLEAENALKKAKLLCMQRQDEYEKAKSSMFRAEEEHLSSSGGLAKNLNKQLEKKRRLEEEALQKVEEANELYKVCVTNVEERRNDLENTKREILAQLRTLVFQCDLTLKAVTVNLFHMQHLQAASLADSLQSLCDSAKLYDPGQEYSEFVKATNSTEEEKVDGNVNKHLNSSQPSGFGPANSLEDVVRLPDSSNKIEEDRCSNSADITGPSFIRSWTFGMFSDSESTGGSSESRSLDSESISPGDFHRKLPRTPSSGTMSSADDLDEREPPSPSETGPNSLGTFKKTLMSKAALTHKFRKLRSPTKCRDCEGIVVFQGVECEECLLVCHRKCLENLVIICGHQKLPGKIHLFGAEFTQVAKKEPDGIPFILKICASEIENRALCLQGIYRVCGNKIKTEKLCQALENGMHLVDISEFSSHDICDVLKLYLRQLPEPFILFRLYKEFIDLAKEIQHVNEEQETKKNSLEDKKWPNMCIEINRILLKSKDLLRQLPASNFNSLHFLIVHLKRVVDHAEENKMNSKNLGVIFGPSLIRPRPTTAPITISSLAEYSNQARLVEFLITYSQKIFDGSLQPQDVMCSIGVVDQGCFPKPLLSPEERDIERSMKSLFFSSKEDIHTSESESKIFERATSFEESERKQNALGKCDACLSDKAQLLLDQEAESASQKIEDGKTPKPLSLKSDRSTNNVERHTPRTKIRPETLIQNYRVLHLQYVFCC

SEQ ID NO: 24694 - protein, 1261 aa, Homo sapiens
  REGION 1..1261: note = ENSP00000260526
MIAHKQKKTKKKRAWASGQLSTDITTSEMGLKSLSSNSIFDPDYIKELVNDIRKFSHMLLYLKEAIFSDCFKEVIHIRLEELLRVLKSIMNKHQNLNSVDLQNAAEMLTAKVKAVNFTEVNEENKNDLFQEVFSSIETLAFTFGNILTNFLMGDVGNDSLLRLPVSRETKSFENVSVESVDSSSEKGNFSPLELDNVLLKNTDSIELALSYAKTWSKYTKNIVSWVEKKLNLELESTRNMVKLAEATRTNIGIQEFMPLQSLFTNALLNDIESSHLLQQTIAALQANKFVQPLLGRKNEMEKQRKEIKELWKQEQNKMLEAENALKKAKLLCMQRQDEYEKAKSSMFRAEEEHLSSSGGLAKNLNKQLEKKRRLEEEALQKVEEANELYKVCVTNVEERRNDLENTKREILAQLRTLVFQCDLTLKAVTVNLFHMQHLQAASLADSLQSLCDSAKLYDPGQEYSEFVKATNSTEEEKVDGNVNKHLNSSQPSGFGPANSLEDVVRLPDSSNKIEEDRCSNSADITGPSFIRSWTFGMFSDSESTGGSSESRSLDSESISPGDFHRKLPRTPSSGTMSSADDLDEREPPSPSETGPNSLGTFKKTLMSKAALTHKFRKLRSPTKCRDCEGIVVFQGVECEECLLVCHRKCLENLVIICGHQKLPGKIHLFGAEFTQVAKKEPDGIPFILKICASEIENRALCLQGIYRVCGNKIKTEKLCQALENGMHLVDISEFSSHDICDVLKLYLRQLPEPFILFRLYKEFIDLAKEIQHVNEEQETKKNSLEDKKWPNMCIEINRILLKSKDLLRQLPASNFNSLHFLIVHLKRVVDHAEENKMNSKNLGVIFGPSLIRPRPTTAPITISSLAEYSNQARLVEFLITYSQKIFDGSLQPQDVMCSIGVVDQGCFPKPLLSPEERDIERSMKSLFFSSKEDIHTSESESKIFERATSFEESERKQNALGKCDACLSDKAQLLLDQEAESASQKIEDGKTPKPLSLKSDRSTNNVERHTPRTKIRPVSLPVDRLLLASPPNERNGRNMGNVNLDKFCKNPAFEGVNRKDAATTVCSKFNGFDQQTLQKIQDKQYEQNSLTAKTTMIMPSALQEKGVTTSLQISGDHSINATQPSKPYAEPVRSVREASERRSSDSYPLAPVRAPRTLQPQHWTTFYKPHAPIISIRGNEEKPASPSAAVPPGTDHDPHGLVVKSMPDPDKASACPGQATGQPKEDSEELGLPDVNPMCQRPRLKRMQQFEDLEGEIPQFV

SEQ ID NO: 24695 - protein, 393 aa, Homo sapiens
  REGION 1..393: note = ENSP00000359237
MIAHKQKKTKKKRAWASGQLSTDITTSEMGLKSLSSNSIFDPDYIKELVNDIRKFSHMLLYLKEAIFSDCFKEVIHIRLEELLRVLKSIMNKHQNLNSVDLQNAAEMLTAKVKAVNFTEVNEENKNDLFQEVFSSIETLAFTFGNILTNFLMGDVGNDSLLRLPVSRETKSFENVSVESVDSSSEKGNFSPLELDNVLLKNTDSIELALSYAKTWSKYTKNIVSWVEKKLNLELESTRNMVKLAEATRTNIGIQEFMPLQSLFTNALLNDIESSHLLQQTIAALQANKFVQPLLGRKNEMEKQRKEIKELWKQEQNKMLEAENALKKAKLLCMQRQDEYEKAKSSMFRAEEEHLSSSGGLAKNLNKQLEKKRRLEEEALQKVTIFFFFICKLN

SEQ ID NO: 24696 - protein, 2087 aa, Homo sapiens
  REGION 1..2087: note = ENSP00000310561
METESESSTLGDDSVFWLESEVIIQVTDCEEEEREEKFRKMKSSVHSEEDDFVPELHRNVHPRERPDWEETLSAMARGADVPEIPGDLTLKTCGSTASMKVKHVKKLPFTKGHFPKMAECAHFHYENVEFGSIQLSLSEEQNEVMKNGCESKELVYLVQIACQGKSWIVKRSYEDFRVLDKHLHLCIYDRRFSQLSELPRSDTLKDSPESVTQMLMAYLSRLSAIAGNKINCGPALTWMEIDNKGNHLLVHEESSINTPAVGAAHVIKRYTARAPDELTLEVGDIVSVIDMPPKVLSTWWRGKHGFQVGLFPGHCVELINQKVPQSVTNSVPKPVSKKHGKLITFLRTFMKSRPTKQKLKQRGILKERVFGCDLGEHLLNSGFEVPQVLQSCTAFIERYGIVDGIYRLSGVASNIQRLRHEFDSEHVPDLTKEPYVQDIHSVGSLCKLYFRELPNPLLTYQLYEKFSDAVSAATDEERLIKIHDVIQQLPPPHYRTLEFLMRHLSLLADYCSITNMHAKNLAIVWAPNLLRSKQIESACFSGTAAFMEVRIQSVVVEFILNHVDVLFSGRISMAMQEGAASLSRPKSLLVSSPSTKLLTLEEAQARTQAQVNSPIVTENKYIEVGEGPAALQGKFHTIIEFPLERKRPQNKMKKSPVGSWRSFFNLGKSSSVSKRKLQRNESEPSEMKAMALKGGRAEGTLRSAKSEESLTSLHAVDGDSKLFRPRRPRSSSDALSASFNGEMLGNRCNSYDNLPHDNESEEEGGLLHIPALMSPHSAEDVDLSPPDIGVASLDFDPMSFQCSPPKAESECLESGASFLDSPGYSKDKPSANKKDAETGSSQCQTPGSTASSEPVSPLQEKLSPFFTLDLSPTEDKSSKPSSFTEKVVYAFSPKIGRKLSKSPSMSISEPISVTLPPRVSEVIGTVSNTTAQNASSSTWDKCVEERDATNRSPTQIVKMKTNETVAQEAYESEVQPLDQVAAEEVELPGKEDQSVSSSQSKAVASGQTQTGAVTHDPPQDSVPVSSVSLIPPPPPPKNVARMLALALAESAQQASTQSLKRPGTSQAGYTNYGDIAVATTEDNLSSSYSAVALDKAYFQTDRPAEQFHLQNNAPGNCDHPLPETTATGDPTHSNTTESGEQHHQVDLTGNQPHQAYLSGDPEKARITSVPLDSEKSDDHVSFPEDQSGKNSMPTVSFLDQDQSPPRFYSGDQPPSYLGASVDKLHHPLEFADKSPTPPNLPSDKIYPPSGSPEENTSTATMTYMTTTPATAQMSTKEASWDVAEQPTTADFAAATLQRTHRTNRPLPPPPSQRSAEQPPVVGQVQAATNIGLNNSHKVQGVVPVPERPPEPRAMDDPASAFISDSGAAAAQCPMATAVQPGLPEKVRDGARVPLLHLRAESVPAHPCGFPAPLPPTRMMESKMIAAIHSSSADATSSSNYHSFVTASSTSVDDALPLPLPVPQPKHASQKTVYSSFARPDVTTEPFGPDNCLHFNMTPNCQYRPQSVPPHHNKLEQHQVYGARSEPPASMGLRYNTYVAPGRNASGHHSKPCSRVEYVSSLSSSVRNTCYPEDIPPYPTIRRVQSLHAPPSSMIRSVPISRTEVPPDDEPAYCPRPLYQYKPYQSSQARSDYHVTQLQPYFENGRVHYRYSPYSSSSSSYYSPDGALCDVDAYGTVQLRPLHRLPNRDFAFYNPRLQGKSLYSYAGLAPRPRANVTGYFSPNDHNVVSMPPAADVKHTYTSWDLEDMEKYRMQSIRRESRARQKVKGPVMSQYDNMTPAVQDDLGGIYVIHLRSKSDPGKTGLLSVAEGKESRHAAKAISPEGEDRFYRRHPEAEMDRAHHHGGHGSTQPEKPSLPQKQSSLRSRKLPDMGCSLPEHRAHQEASHRQFCESKNGPPYPQGAGQLDYGSKGIPDTSEPVSYHNSGVKYAASGQESLRLNHKEVRLSKEMERPWVRQPSAPEKHSRDCYKEEEHLTQSIVPPPKPERSHSLKLHHTQNVERDPSVLYQYQPHGKRQSSVTVVSQYDNLEDYHSLPQHQRGVFGGGGMGTYVPPGFPHPQSRTYATALGQGAFLPAELSLQHPETQIHAE

SEQ ID NO: 24697 - protein, 1738 aa, Homo sapiens
  REGION 1..1738: note = ENSP00000376425
MKSRPTKQKLKQRGILKERVFGCDLGEHLLNSGFEVPQVLQSCTAFIERYGIVDGIYRLSGVASNIQRLRHEFDSEHVPDLTKEPYVQDIHSVGSLCKLYFRELPNPLLTYQLYEKFSDAVSAATDEERLIKIHDVIQQLPPPHYRTLEFLMRHLSLLADYCSITNMHAKNLAIVWAPNLLRSKQIESACFSGTAAFMEVRIQSVVVEFILNHVDVLFSGRISMAMQEGAASLSRPKSLLVSSPSTKLLTLEEAQARTQAQVNSPIVTENKYIEVGEGPAALQGKFHTIIEFPLERKRPQNKMKKSPVGSWRSFFNLGKSSSVSKRKLQRNESEPSEMKAMALKGGRAEGTLRSAKSEESLTSLHAVDGDSKLFRPRRPRSSSDALSASFNGEMLGNRCNSYDNLPHDNESEEEGGLLHIPALMSPHSAEDVDLSPPDIGVASLDFDPMSFQCSPPKAESECLESGASFLDSPGYSKDKPSANKKDAETGSSQCQTPGSTASSEPVSPLQEKLSPFFTLDLSPTEDKSSKPSSFTEKVVYAFSPKIGRKLSKSPSMSISEPISVTLPPRVSEVIGTVSNTTAQNASSSTWDKCVEERDATNRSPTQIVKMKTNETVAQEAYESEVQPLDQVAAEEVELPGKEDQSVSSSQSKAVASGQTQTGAVTHDPPQDSVPVSSVSLIPPPPPPKNVARMLALALAESAQQASTQSLKRPGTSQAGYTNYGDIAVATTEDNLSSSYSAVALDKAYFQTDRPAEQFHLQNNAPGNCDHPLPETTATGDPTHSNTTESGEQHHQVDLTGNQPHQAYLSGDPEKARITSVPLDSEKSDDHVSFPEDQSGKNSMPTVSFLDQDQSPPRFYSGDQPPSYLGASVDKLHHPLEFADKSPTPPNLPSDKIYPPSGSPEENTSTATMTYMTTTPATAQMSTKEASWDVAEQPTTADFAAATLQRTHRTNRPLPPPPSQRSAEQPPVVGQVQAATNIGLNNSHKVQGVVPVPERPPEPRAMDDPASAFISDSGAAAAQCPMATAVQPGLPEKVRDGARVPLLHLRAESVPAHPCGFPAPLPPTRMMESKMIAAIHSSSADATSSSNYHSFVTASSTSVDDALPLPLPVPQPKHASQKTVYSSFARPDVTTEPFGPDNCLHFNMTPNCQYRPQSVPPHHNKLEQHQVYGARSEPPASMGLRYNTYVAPGRNASGHHSKPCSRVEYVSSLSSSVRNTCYPEDIPPYPTIRRVQSLHAPPSSMIRSVPISRTEVPPDDEPAYCPRPLYQYKPYQSSQARSDYHVTQLQPYFENGRVHYRYSPYSSSSSSYYSPDGALCDVDAYGTVQLRPLHRLPNRDFAFYNPRLQGKSLYSYAGLAPRPRANVTGYFSPNDHNVVSMPPAADVKHTYTSWDLEDMEKYRMQSIRRESRARQKVKGPVMSQYDNMTPAVQDDLGGIYVIHLRSKSDPGKTGLLSVAEGKESRHAAKAISPEGEDRFYRRHPEAEMDRAHHHGGHGSTQPEKPSLPQKQSSLRSRKLPDMGCSLPEHRAHQEASHRQFCESKNGPPYPQGAGQLDYGSKGIPDTSEPVSYHNSGVKYAASGQESLRLNHKEVRLSKEMERPWVRQPSAPEKHSRDCYKEEEHLTQSIVPPPKPERSHSLKLHHTQNVERDPSVLYQYQPHGKRQSSVTVVSQYDNLEDYHSLPQHQRGVFGGGGMGTYVPPGFPHPQSRTYATALGQGAFLPAELSLQHPETQIHAE

SEQ ID NO: 24698 - protein, 946 aa, Homo sapiens
  REGION 1..946: note = ENSP00000432468
MARGADVPEIPGDLTLKTCGSTASMKVKHVKKLPFTKGHFPKMAECAHFHYENVEFGSIQLSLSEEQNEVMKNGCESKELVYLVQIACQGKSWIVKRSYEDFRVLDKHLHLCIYDRRFSQLSELPRSDTLKDSPESVTQMLMAYLSRLSAIAGNKINCGPALTWMEIDNKGNHLLVHEESSINTPAVGAAHVIKRYTARAPDELTLEVGDIVSVIDMPPKVLSTWWRGKHGFQVGLFPGHCVELINQKVPQSVTNSVPKPVSKKHGKLITFLRTFMKSRPTKQKLKQRGILKERVFGCDLGEHLLNSGFEVPQVLQSCTAFIERYGIVDGIYRLSGVASNIQRLRHEFDSEHVPDLTKEPYVQDIHSVGSLCKLYFRELPNPLLTYQLYEKFSDAVSAATDEERLIKIHDVIQQLPPPHYRTLEFLMRHLSLLADYCSITNMHAKNLAIVWAPNLLRSKQIESACFSGTAAFMEVRIQSVVVEFILNHVDVLFSGRISMAMQEGAASLSRPKSLLVSSPSTKLLTLEEAQARTQAQVNSPIVTENKYIEVGEGPAALQGKFHTIIEFPLERKRPQNKMKKSPVGSWRSFFNLGKSSSVSKRKLQRNESEPSEMKAMALKGGRAEGTLRSAKSEESLTSLHAVDGDSKLFRPRRPRSSSDALSASFNGEMLGNRCNSYDNLPHDNESEEEGGLLHIPALMSPHSAEDVDLSPPDIGVASLDFDPMSFQCSPPKAESECLESGASFLDSPGYSKDKPSANKKDAETGSSQCQTPGSTASSEPVSPLQEKLSPFFTLDLSPTEDKSSKPSSFTEKVVYAFSPKIGRKLSKSPSMSISEPISVTLPPRVSEVIGTVSNTTAQNASSSTWDKCVEERDATNRSPTQIVKMKTNETVAQEAYESEVQPLDQVAAEEVELPGKEDQSVSSSQSKAVASGQTQTGTVCFPPFFL

SEQ ID NO: 24699 - protein, 1738 aa, Homo sapiens; identical to SEQ ID NO: 24697
  REGION 1..1738: note = ENSP00000432862

SEQ ID NO: 24700 - protein, 178 aa, Homo sapiens
  REGION 1..178: note = ENSP00000432303
MKSSVHSEEDDFVPELHRNVHPRERPDWEETLSAMARGADVPEIPGDLTLKTCGSTASMKVKHVKKSTTPGLMGCDNIHRLPFTKGHFPKMAECAHFHYENVEFGSIQLSLSEEQNEVMKNGCESKELVYLVQIACQGKSWIVKRSYEDFRVLDKHLHLCIYDRRFSQLSELPRSDTL

SEQ ID NO: 24701 - protein, 1279 aa, Homo sapiens
  REGION 1..1279: note = ENSP00000355060
MASSNPPPQPAIGDQLVPGVPGPSSEAEDDPGEAFEFDDSDDEEDTSAALGVPSLAPERDTDPPLIHLDSIPVTDPDPAAAPPGTGVPAWVSNGDAADAAFSGARHSSWKRKSSRRIDRFTFPALEEDVIYDDVPCESPDAHQPGAERNLLYEDAHRAGAPRQAEDLGWSSSEFESYSEDSGEEAKPEVEVEPAKHRVSFQPKLSPDLTRLKERYARTKRDILALRVGGRDMQELKHKYDCKMTQLMKAAKSGTKDGLEKTRMAVMRKVSFLHRKDVLGDSEEEDMGLLEVSVSDIKPPAPELGPMPEGLSPQQVVRRHILGSIVQSEGSYVESLKRILQDYRNPLMEMEPKALSARKCQVVFFRVKEILHCHSMFQIALSSRVAEWDSTEKIGDLFVASFSKSMVLDVYSDYVNNFTSAMSIIKKACLTKPAFLEFLKRRQVCSPDRVTLYGLMVKPIQRFPQFILLLQDMLKNTPRGHPDRLSLQLALTELETLAEKLNEQKRLADQVAEIQQLTKSVSDRSSLNKLLTSGQRQLLLCETLTETVYGDRGQLIKSKERRVFLLNDMLVCANINFKPANHRGQLEISSLVPLGPKYVVKWNTALPQVQVVEVGQDGGTYDKDNVLIQHSGAKKASASGQAQNKVYLGPPRLFQELQDLQKDLAVVEQITLLISTLHGTYQNLNMTVAQDWCLALQRLMRVKEEEIHSANKCRLRLLLPGKPDKSGRPISFMVVFITPNPLSKISWVNRLHLAKIGLREENQPGWLCPDEDKKSKAPFWCPILACCIPAFSSRALSLQLGALVHSPVNCPLLGFSAVSTSLPQGYLWVGGGQEGAGGQVEIFSLNRPSPRTVKSFPLAAPVLCMEYIPELEEEAESRDESPTVADPSATVHPTICLGLQDGSILLYSSVDTGTQCLVSCRSPGLQPVLCLRHSPFHLLAGLQDGTLAAYPRTSGGVLWDLESPPVCLTVGPGPVRTLLSLEDAVWASCGPRVTVLEATTLQPQQSFEAHQDEAVSVTHMVKAGSGVWMAFSSGTSIRLFHTETLEHLQEINIATRTTFLLPGQKHLCVTSLLICQGLLWVGTDQGVIVLLPVPRLEGIPKITGKGMVSLNGHCGPVAFLAVATSILAPDILRSDQEEAEGPRAEEDKPDGQAHEPMPDSHVGRELTRKKGILLQYRLRSTAHLPGPLLSMREPAPADGAALEHSEEDGSIYEMADDPDIWVRSRPCARDAHRKEICSVAIISGGQGYRNFGSALGSSGRQAPCGETDSTLLIWQVPLML

SEQ ID NO: 24702 - protein, 1240 aa, Homo sapiens
  REGION 1..1240: note = ENSP00000364564
MASSNPPPQPAIGDQLVPGVPGPSSEAEDDPGEAFEFDDSDDEEDTSAALGVPSLAPERDTDPPLIHLDSIPVTDPDPAAAPPGTGVPAWVSNGDAADAAFSGARHSSWKRKSSRRIDRFTFPALEEDVIYDDVPCESPDAHQPGAERNLLYEDAHRAGAPRQAEDLGWSSSEFESYSEDSGEEAKPEVEVEPAKHRVSFQPKMTQLMKAAKSGTKDGLEKTRMAVMRKVSFLHRKDVLGDSEEEDMGLLEVSVSDIKPPAPELGPMPEGLSPQQVVRRHILGSIVQSEGSYVESLKRILQDYRNPLMEMEPKALSARKCQVVFFRVKEILHCHSMFQIALSSRVAEWDSTEKIGDLFVASFSKSMVLDVYSDYVNNFTSAMSIIKKACLTKPAFLEFLKRRQVCSPDRVTLYGLMVKPIQRFPQFILLLQDMLKNTPRGHPDRLSLQLALTELETLAEKLNEQKRLADQVAEIQQLTKSVSDRSSLNKLLTSGQRQLLLCETLTETVYGDRGQLIKSKERRVFLLNDMLVCANINFKPANHRGQLEISSLVPLGPKYVVKWNTALPQVQVVEVGQDGGTYDKDNVLIQHSGAKKASASGQAQNKVYLGPPRLFQELQDLQKDLAVVEQITLLISTLHGTYQNLNMTVAQDWCLALQRLMRVKEEEIHSANKCRLRLLLPGKPDKSGRPISFMVVFITPNPLSKISWVNRLHLAKIGLREENQPGWLCPDEDKKSKAPFWCPILACCIPAFSSRALSLQLGALVHSPVNCPLLGFSAVSTSLPQGYLWVGGGQEGAGGQVEIFSLNRPSPRTVKSFPLAAPVLCMEYIPELEEEAESRDESPTVADPSATVHPTICLGLQDGSILLYSSVDTGTQCLVSCRSPGLQPVLCLRHSPFHLLAGLQDGTLAAYPRTSGGVLWDLESPPVCLTVGPGPVRTLLSLEDAVWASCGPRVTVLEATTLQPQQSFEAHQDEAVSVTHMVKAGSGVWMAFSSGTSIRLFHTETLEHLQEINIATRTTFLLPGQKHLCVTSLLICQGLLWVGTDQGVIVLLPVPRLEGIPKITGKGMVSLNGHCGPVAFLAVATSILAPDILRSDQEEAEGPRAEEDKPDGQAHEPMPDSHVGRELTRKKGILLQYRLRSTAHLPGPLLSMREPAPADGAALEHSEEDGSIYEMADDPDIWVRSRPCARDAHRKEICSVAIISGGQGYRNFGSALGSSGRQAPCGETDSTLLIWQVPLML

SEQ ID NO: 24703 - protein, 1052 aa, Homo sapiens
  REGION 1..1052: note = ENSP00000364557
MLPSSSWGKRKLRGRLGWVRSDARGVMWARQEGLHHPHPHAVIRCPSSSSSSVSCSGDSEEEDMGLLEVSVSDIKPPAPELGPMPEGLSPQQVVRRHILGSIVQSEGSYVESLKRILQDYRNPLMEMEPKALSARKCQVVFFRVKEILHCHSMFQIALSSRVAEWDSTEKIGDLFVASFSKSMVLDVYSDYVNNFTSAMSIIKKACLTKPAFLEFLKRRQVCSPDRVTLYGLMVKPIQRFPQFILLLQDMLKNTPRGHPDRLSLQLALTELETLAEKLNEQKRLADQVAEIQQLTKSVSDRSSLNKLLTSGQRQLLLCETLTETVYGDRGQLIKSKERRVFLLNDMLVCANINFKGQLEISSLVPLGPKYVVKWNTALPQVQVVEVGQDGGTYDKDNVLIQHSGAKKASASGQAQNKVYLGPPRLFQELQDLQKDLAVVEQITLLISTLHGTYQNLNMTVAQDWCLALQRLMRVKEEEIHSANKCRLRLLLPGKPDKSGRPISFMVVFITPNPLSKISWVNRLHLAKIGLREENQPGWLCPDEDKKSKAPFWCPILACCIPAFSSRALSLQLGALVHSPVNCPLLGFSAVSTSLPQGYLWVGGGQEGAGGQVEIFSLNRPSPRTVKSFPLAAPVLCMEYIPELEEEAESRDESPTVADPSATVHPTICLGLQDGSILLYSSVDTGTQCLVSCRSPGLQPVLCLRHSPFHLLAGLQDGTLAAYPRTSGGVLWDLESPPVCLTVGPGPVRTLLSLEDAVWASCGPRVTVLEATTLQPQQSFEAHQDEAVSVTHMVKAGSGVWMAFSSGTSIRLFHTETLEHLQEINIATRTTFLLPGQKHLCVTSLLICQGLLWVGTDQGVIVLLPVPRLEGIPKITGKGMVSLNGHCGPVAFLAVATSILAPDILRSDQEEAEGPRAEEDKPDGQAHEPMPDSHVGRELTRKKGILLQYRLRSTAHLPGPLLSMREPAPADGAALEHSEEDGSIYEMADDPDIWVRSRPCARDAHRKEICSVAIISGGQGYRNFGSALGSSGRQAPCGETDSTLLIWQVPLML

SEQ ID NO: 24704 - protein, 611 aa, Homo sapiens
  REGION 1..611: note = ENSP00000167825
KPIQRFPQFILLLQDMLKNTPRGHPDRLSLQLALTELETLAEKLNEQKRLADQVAEIQQLTKSVSDRSSLNKLLTSGQRQLLLCETLTETVYGDRGQLIKSKERRVFLLNDMLVCANINFKGQLEISSLVPLGPKYVVKWNTALPQVQVVEVGQDGGTYDKDNVLIQHSGAKKASASGQAQNKVYLGPPRLFQELQDLQKDLAVVEQITLLISTLHGTYQNLNMTVAQDWCLALQRLMRVKEEEIHSANKCRLRLLLPGKPDKSGRPISFMVVFITPNPLSKISWVNRLHLAKIGLREENQPGWLCPDEDKKSKAPFWCPILACCIPAFSSRALSLQLGALVHSPVNCPLLGFSAVSTSLPQGYLWVGGGQEGAGGQVEIFSLNRPSPRTVKSFPLAAPVLCMEYIPELEEEAESRDESPTVADPSATVHPTICLGLQDGSILLYSSVDTGTQCLVSCRSPGLQPVLCLRHSPFHLLAGLQDGTLAAYPRTSGGVLWDLESPPVCLTVGPGPVRTLLSLEDAVWASCGPRVTVLEATTLQPQQSFEAHQDEAVSVTHMVKAGSGVWMAFSSGTSIRLFHTETLEHLQEINIATRTTFLLPDRSLIKCSPRA

SEQ ID NO: 24705 - protein, 958 aa, Homo sapiens
  REGION 1..958: note = ENSP00000315325
MKEAKDARYTNGHLFTTISVSGMTMCYACNKSITAKEALICPTCNVTIHNRCKDTLANCTKVKQKQQKAALLKNNTALQSVSLRSKTTIRERPSSAIYPSDSFRQSLLGSRRGRSSLSLAKSVSTTNIAGHFNDESPLGLRRILSQSTDSLNMRNRTLSVESLIDEEVIYSELMSDFEMDEKDFAADSWSLAVDSSFLQQHKKEVMKQQDVIYELIQTELHHVRTLKIMTRLFRTGMLEELHLEPGVVQGLFPCVDELSDIHTRFLSQLLERRRQALCPGSTRNFVIHRLGDLLISQFSGPSAEQMCKTYSEFCSRHSKALKLYKELYARDKRFQQFIRKVTRPAVLKRHGVQECILLVTQRITKYPLLISRILQHSHGIEEERQDLTTALGLVKELLSNVDEGIYQLEKGARLQEIYNRMDPRAQTPVPGKGPFGREELLRRKLIHDGCLLWKTATGRFKDVLVLLMTDVLVFLQEKDQKYIFPTLDKPSVVSLQNLIVRDIANQEKGMFLISAAPPEMYEVHTASRDDRSTWIRVIQQSVRTCPSREDFPLIETEDEAYLRRIKMELQQKDRALVELLREKVGLFAEMTHFQAEEDGGSGMALPTLPRGLFRSESLESPRGERLLQDAIREVEGLKDLLVGPGVELLLTPREPALPLEPDSGGNTSPGVTANGEARTFNGSIELCRADSDSSQRDRNGNQLRSPQEEALQRLVNLYGLLHGLQAAVAQQDTLMEARFPEGPERREKLCRANSRDGEAGRAGAAPVAPEKQATELALLQRQHALLQEELRRCRRLGEERATEAGSLEARLRESEQARALLEREAEEARRQLAALGQTEPLPAEAPWARRPVDPRRRSLPAGDALYLSFNPPQPSRGTDRLDLPVTTRSVHRNFEDRERQELGSPEERLQDSSDPDTGSEEEGSSRLSPPHSPRDFTRMQDIPEETESRDGEAVASES

SEQ ID NO: 24706 - protein, 986 aa, Homo sapiens
  REGION 1..986: note = ENSP00000354837
MSRIESLTRARIDRSRELASKTREKEKMKEAKDARYTNGHLFTTISVSGMTMCYACNKSITAKEALICPTCNVTIHNRCKDTLANCTKVKQKQQKAALLKNNTALQSVSLRSKTTIRERPSSAIYPSDSFRQSLLGSRRGRSSLSLAKSVSTTNIAGHFNDESPLGLRRILSQSTDSLNMRNRTLSVESLIDEAEVIYSELMSDFEMDEKDFAADSWSLAVDSSFLQQHKKEVMKQQDVIYELIQTELHHVRTLKIMTRLFRTGMLEELHLEPGVVQGLFPCVDELSDIHTRFLSQLLERRRQALCPGSTRNFVIHRLGDLLISQFSGPSAEQMCKTYSEFCSRHSKALKLYKELYARDKRFQQFIRKVTRPAVLKRHGVQECILLVTQRITKYPLLISRILQHSHGIEEERQDLTTALGLVKELLSNVDEGIYQLEKGARLQEIYNRMDPRAQTPVPGKGPFGREELLRRKLIHDGCLLWKTATGRFKDVLVLLMTDVLVFLQEKDQKYIFPTLDKPSVVSLQNLIVRDIANQEKGMFLISAAPPEMYEVHTASRDDRSTWIRVIQQSVRTCPSREDFPLIETEDEAYLRRIKMELQQKDRALVELLREKVGLFAEMTHFQAEEDGGSGMALPTLPRGLFRSESLESPRGERLLQDAIREVEGLKDLLVGPGVELLLTPREPALPLEPDSGGNTSPGVTANGEARTFNGSIELCRADSDSSQRDRNGNQLRSPQEEALQRLVNLYGLLHGLQAAVAQQDTLMEARFPEGPERREKLCRANSRDGEAGRAGAAPVAPEKQATELALLQRQHALLQEELRRCRRLGEERATEAGSLEARLRESEQARALLEREAEEARRQLAALGQTEPLPAEAPWARRPVDPRRRSLPAGDALYLSFNPPQPSRGTDRLDLPVTTRSVHRNFEDRERQELGSPEERLQDSSDPDTGSEEEGSSRLSPPHSPRDFTRMQDIPEETESRDGEAVASES

SEQ ID NO: 24707 - protein, 1031 aa, Homo sapiens
  REGION 1..1031: note = ENSP00000476916
MLSKSVPVSGINCLLDRSDTDGNVSQSSAIDLRKRCSQLEGHSGTRVGSSLRQTFSFLSGMTGKAKTREKEKMKEAKDARYTNGHLFTTISVSGMTMCYACNKSITAKEALICPTCNVTIHNRCKDTLANCTKVKQKQQKAALLKNNTALQSVSLRSKTTIRERPSSAIYPSDSFRQSLLGSRRGRSSLSLAKSVSTTNIAGHFNDESPLGLRRILSQSTDSLNMRNRTLSVESLIDEAEVIYSELMSDFEMDEKDFAADSWSLAVDSSFLQQHKKEVMKQQDVIYELIQTELHHVRTLKIMTRLFRTGMLEELHLEPGVVQGLFPCVDELSDIHTRFLSQLLERRRQALCPGSTRNFVIHRLGDLLISQFSGPSAEQMCKTYSEFCSRHSKALKLYKELYARDKRFQQFIRKVTRPAVLKRHGVQECILLVTQRITKYPLLISRILQHSHGIEEERQDLTTALGLVKELLSNVDEGIYQLEKGARLQEIYNRMDPRAQTPVPGKGPFGREELLRRKLIHDGCLLWKTATGRFKDVLVLLMTDVLVFLQEKDQKYIFPTLDKPSVVSLQNLIVRDIANQEKGMFLISAAPPEMYEVHTASRDDRSTWIRVIQQSVRTCPSREDFPLIETEDEAYLRRIKMELQQKDRALVELLREKVGLFAEMTHFQAEEDGGSGMALPTLPRGLFRSESLESPRGERLLQDAIREVEGLKDLLVGPGVELLLTPREPALPLEPDSGGNTSPGVTANGEARTFNGSIELCRADSDSSQRDRNGNQLRSPQEEALQRLVNLYGLLHGLQAAVAQQDTLMEARFPEGPERREKLCRANSRDGEAGRAGAAPVAPEKQATELALLQRQHALLQEELRRCRRLGEERATEAGSLEARLRESEQARALLEREAEEARRQLAALGQTEPLPAEAPWARRPVDPRRRSLPAGDALYLSFNPPQPSRGTDRLDLPVTTRSVHRNFEDRERQELGSPEERLQDSSDPDTGSEEEGSSRLSPPHSPRDFTRMQDIPEETESRDGEAVASES

SEQ ID NO: 24708 - protein, 263 aa, Homo sapiens
  REGION 1..263: note = ENSP00000476689
  VARIANT 1: note = Any amino acid
XQEEALQRLVNLYGLLHGLQAAVAQQDTLMEARFPEGPERREKLCRANSRDGEAGRAGAAPVAPEKQATELALLQRQHALLQEELRRCRRLGEERATEAGSLEARLRESEQARALLEREAEEARRQLAALGQTEPLPAEAPWARRPVDPRRRSLPAGDALYLSFNPPQPSRGTDRLDLPVTTRSVHRNFEDRERQELGSPEERLQDSSDPDTGSEEEGSSRLSPPHSPRGETLAETWTRDFTRMQDIPEETESRDGEAVASES

SEQ ID NO: 24709 - protein, 985 aa, Homo sapiens
  REGION 1..985: note = ENSP00000314787
MSRIESLTRARIDRSRELASKTREKEKMKEAKDARYTNGHLFTTISVSGMTMCYACNKSITAKEALICPTCNVTIHNRCKDTLANCTKVKQKQQKAALLKNNTALQSVSLRSKTTIRERPSSAIYPSDSFRQSLLGSRRGRSSLSLAKSVSTTNIAGHFNDESPLGLRRILSQSTDSLNMRNRTLSVESLIDEEVIYSELMSDFEMDEKDFAADSWSLAVDSSFLQQHKKEVMKQQDVIYELIQTELHHVRTLKIMTRLFRTGMLEELHLEPGVVQGLFPCVDELSDIHTRFLSQLLERRRQALCPGSTRNFVIHRLGDLLISQFSGPSAEQMCKTYSEFCSRHSKALKLYKELYARDKRFQQFIRKVTRPAVLKRHGVQECILLVTQRITKYPLLISRILQHSHGIEEERQDLTTALGLVKELLSNVDEGIYQLEKGARLQEIYNRMDPRAQTPVPGKGPFGREELLRRKLIHDGCLLWKTATGRFKDVLVLLMTDVLVFLQEKDQKYIFPTLDKPSVVSLQNLIVRDIANQEKGMFLISAAPPEMYEVHTASRDDRSTWIRVIQQSVRTCPSREDFPLIETEDEAYLRRIKMELQQKDRALVELLREKVGLFAEMTHFQAEEDGGSGMALPTLPRGLFRSESLESPRGERLLQDAIREVEGLKDLLVGPGVELLLTPREPALPLEPDSGGNTSPGVTANGEARTFNGSIELCRADSDSSQRDRNGNQLRSPQEEALQRLVNLYGLLHGLQAAVAQQDTLMEARFPEGPERREKLCRANSRDGEAGRAGAAPVAPEKQATELALLQRQHALLQEELRRCRRLGEERATEAGSLEARLRESEQARALLEREAEEARRQLAALGQTEPLPAEAPWARRPVDPRRRSLPAGDALYLSFNPPQPSRGTDRLDLPVTTRSVHRNFEDRERQELGSPEERLQDSSDPDTGSEEEGSSRLSPPHSPRDFTRMQDIPEETESRDGEAVASES

SEQ ID NO: 24710 - protein, 59 aa, Homo sapiens
  REGION 1..59: note = ENSP00000477448
QQKAALLKNNTALQSVSLRSKNISMMSLPWGCAGSSHSPQTPSTCGTEPYPWNPSLTKR

SEQ ID NO: 24711 - protein, 229 aa, Homo sapiens
  REGION 1..229: note = ENSP00000477299
MKEAKDARYTNGHLFTTISVSGMTMCYACNKSITAKEALICPTCNVTIHNRCKDTLANCTKVKQKQQKAALLKNNTALQSVSLRSKTTIRERPSSAIYPSDSFRQSLLGSRRGRSSLSLAKSVSTTNIAGHFNDESPLGLRRILSQSTDSLNMRNRTLSVESLIDEAEVIYSELMSDFEMDEKDFAADSWSLAVDSSFLQQHKKEVMKQQDVIYELIQTELHHVRTLKI

SEQ ID NO: 24712 - protein, 214 aa, Homo sapiens
  REGION 1..214: note = ENSP00000476724
MKEAKDARYTNGHLFTTISVSGMTMCYACNKSITAKEALICPTCNVTIHNRCKDTLANCTKVKQKQQKAALLKNNTALQSVSLRSKTTIRERPSSAIYPSDSFRQSLLGSRRGRSSLSLAKSVSTTNIAGHFNDESPLGLRRILSQSTDSLNMRNRTLSVESLIDEAEVIYSELMSDFEMDEKDFAADSWSLAVDSSFLQQHKKEVMKQQDVIY

SEQ ID NO: 24713 - protein, 178 aa, Homo sapiens
  REGION 1..178: note = ENSP00000476699
MSGNRRQPSRRGQTREKEKMKEAKDARYTNGHLFTTISVSGMTMCYACNKSITAKEALICPTCNVTIHNRCKDTLANCTKVKQKQQKAALLKNNTALQSVSLRSKTTIRERPSSAIYPSDSFRQSLLGSRRGRSSLSLAKSVSTTNIAGHFNDESPLGLRRILSQSTDSLNMRNRTLS

SEQ ID NO: 24714 - protein, 83 aa, Homo sapiens
  REGION 1..83: note = ENSP00000476532
MLSKSVPVSGINCLLDRSDTDGNVSQSSAIDLRKRCSQLEGHSGTRVGSSLRQTFSFLSGMTGKAKTREKEKMKEAKDARYTN

SEQ ID NO: 24715 - protein, 7 aa, Homo sapiens
  REGION 1..7: note = ENSP00000476518
MLSKSVP

SEQ ID NO: 24716 - protein, 264 aa, Homo sapiens [sequence omitted]

SEQ ID NO: 24717 - protein, 871 aa, Homo sapiens
  REGION 1..871: note = ENSP00000348828
MDGESEVDFSSNSITPLWRRRSIPQPHQVLGRSKPRPQSYQSPNGLLITDFPVEDGGTLLAAQIPAQVPTASDSRTVHRSPLLLGAQRRAVANGGTASPEYRAASPRLRRPKSPKLPKAVPGGSPKSPANGAVTLPAPPPPPVLRPPRTPNAPAPCTPEEDLTGLTASPVPSPTANGLAANNDSPGSGSQSGRKAKDPERGLFPGPQKSSSEQKLPLQRLPSQENELLENPSVVLSTNSPAALKVGKQQIIPKSLASEIKISKSNNQNVEPHKRLLKVRSMVEGLGGPLGHAGEESEVDNDVDSPGSLRRGLRSTSYRRAVVSGFDFDSPTSSKKKNRMSQPVLKVVMEDKEKFSSLGRIKKKMLKGQGTFDGEENAVLYQNYKEKALDIDSDEESEPKEQKSDEKIVIHHKPLRSTWSQLSAVKRKGLSQTVSQEERKRQEAIFEVISSEHSYLLSLEILIRMFKNSKELSDTMTKTERHHLFSNITDVCEASKKFFIELEARHQNNIFIDDISDIVEKHTASTFDPYVKYCTNEVYQQRTLQKLLATNPSFKEVLSRIESHEDCRNLPMISFLILPMQRVTRLPLLMDTICQKTPKDSPKYEVCKRALKEVSKLVRLCNEGARKMERTEMMYTINSQLEFKIKPFPLVSSSRWLVKRGELTAYVEDTVLFSRRTSKQQVYFFLFNDVLIITKKKSEESYNVNDYSLRDQLLVESCDNEELNSSPGKNSSTMLYSRQSSASHLFTLTVLSNHANEKVEMLLGAETQSERARWITALGHSSGKPPADRTSLTQVEIVRSFTAKQPDELSLQVADVVLIYQRVSDGWYEGERLRDGERGWFPMECAKEITCQATIDKNVERMGRLLGLETNV

SEQ ID NO: 24718 - protein, 871 aa, Homo sapiens; identical to SEQ ID NO: 24717
  REGION 1..871: note = ENSP00000423418

SEQ ID NO: 24719 - protein, 791 aa, Homo sapiens
  REGION 1..791: note = ENSP00000424446
MDGESEVDFSSNSITPLWRRRSIPQPHQVLGRSKPRPQSYQSPNGLLITDFPVEDGGTLLAAQIPAQVPTASDSRTVHRSPLLLGAQRRAVANGGTASPEYRAASPRLRRPKSPKLPKAVPGGSPKSPANGAVTLPAPPPPPVLRPPRTPNAPAPCTPEEDLTGLTASPVPSPTANGLAANNDSPGSGSQSGRKAKDPERGLFPGPQKSSSEQKLPLQRLPSQENELLENPSVVLSTNSPAALKVGKQQIIPKSLASEIKISKSNNQNVEPHKRLLKVRSMVEGLGGPLGHAGEESEVDNDVDSPGSLRRGLRSTSYRRAVVSGFDFDSPTSSKKKNRMSQPVLKVVMEDKEKFSSLGRIKKKMLKGQGTFDGEENAVLYQNYKEKALDIDSDEESEPKEQKSDEKIVIHHKPLRSTWSQLSAVKRKGLSQTVSQEERKRQEAIFEVISSEHSYLLSLEILIRMFKNSKELSDTMTKTERHHLFSNITDVCEASKKFFIELEARHQNNIFIDDISDIVEKHTASTFDPYVKYCTNEVYQQRTLQKLLATNPSFKEVLSRIESHEDCRNLPMISFLILPMQRVTRLPLLMDTICQKTPKDSPKYEVCKRALKEVSKLVRLCNEGARKMERTEMMYTINSQLEFKIKPFPLVSSSRWLVKRGELTAYVEDTVLFSRRTSKQQVYFFLFNDVLIITKKKSEESYNVNDYSLRDQLLVESCDNEELNSSPGKNSSTMLYSRQSSASHLFTLTVLSNHANEKVEMLLGAETQSERARWITALGHSSGKPPADRTCG

SEQ ID NO: 24720 - protein, 446 aa, Homo sapiens
  REGION 1..446: note = ENSP00000423295
MDGESEVDFSSNSITPLWRRRSIPQPHQVLGRSKPRPQSYQSPNGLLITDFPVEDGGTLLAAQIPAQVPTASDSRTVHRSPLLLGAQRRAVANGGTASPEYRAASPRLRRPKSPKLPKAVPGGSPKSPANGAVTLPAPPPPPVLRPPRTPNAPAPCTPEEDLTGLTASPVPSPTANGLAANNDSPGSGSQSGRKAKDPERGLFPGPQKSSSEQKLPLQRLPSQENELLENPSVVLSTNSPAALKVGKQQIIPKSLASEIKISKSNNQNVEPHKRLLKVRSMVEGLGGPLGHAGEESEVDNDVDSPGSLRRGLRSTSYRRAVVSGFDFDSPTSSKKKNRMSQPVLKVVMEDKEKFSSLGRIKKKMLKGQGTFDGEENAVLYQNYKEKALDIDSDEESEPKEQKSDEKIVIHHKPLRSTWSQLSAVKRKVILIVGFMEMKDGRLRGGK

SEQ ID NO: 24721 - protein, 446 aa, Homo sapiens; identical to SEQ ID NO: 24720
  REGION 1..446: note = ENSP00000486665

SEQ ID NO: 24722 - protein, 791 aa, Homo sapiens; identical to SEQ ID NO: 24719
  REGION 1..791: note = ENSP00000487265

SEQ ID NO: 24723 - protein, 871 aa, Homo sapiens; identical to SEQ ID NO: 24717
  REGION 1..871: note = ENSP00000481927

SEQ ID NO: 24724 - protein, 871 aa, Homo sapiens; identical to SEQ ID NO: 24717
  REGION 1..871: note = ENSP00000484367

SEQ ID NO: 24725 - protein, 1651 aa, Homo sapiens
  REGION 1..1651: note = ENSP00000296794
MELSCSEAPLYGQMMIYAKFDKNVYLPEDAEFYFTYDGSHQRHVMIAERIEDNVLQSSVPGHGLQETVTVSVCLCSEGYSPVTMGSGSVTYVDNMACRLARLLVTQANRLTACSHQTLLTPFALTAGALPALDEELVLALTHLELPLEWTVLGSSSLEVSSHRESLLHLAMRWGLAKLSQFFLCLPGGVQALALPNEEGATPLDLALREGHSKLVEDVTNFQGRWSPSFSRVQLSEEASLHYIHSSETLTLTLNHTAEHLLEADIKLFRKYFWDRAFLVKAFEPEARPEERTAMPSSGAETEEEIKNSVSSRSAAEKEDIKRVKSLVVQHNEHEDQHSLDLDRSFDILKKSKPPSTLLAAGRLSDMLNGGDEVYANCMVIDQVGDLDISYINIEGITATTSPESRGCTLWPQSSKHTLPTETSPSVYPLSENVEGTAHTEAQQSFMSPSSSCASNLNLSFGWHGFEKEQSHLKKRSSSLDALDADSEGEGHSEPSHICYTPGSQSSSRTGIPSGDELDSFETNTEPDFNISRAESLPLSSNLQSKESLLSGVRSRSYSCSSPKISLGKTRLVRELTVCSSSEEQRAYSLSEPPRENRIQEEEWDKYIIPAKSESEKYKVSRTFSFLMNRMTSPRNKSKTKSKDAKDKEKLNRHQFAPGTFSGVLQCLVCDKTLLGKESLQCSNCNANVHKGCKDAAPACTKKFQEKYNKNKPQTILGNSSFRDIPQPGLSLHPSSSVPVGLPTGRRETVGQVHPLSRSVPGTTLESFRRSATSLESESDHNSCRSRSHSDELLQSMGSSPSTESFIMEDVVDSSLWSDLSSDAQEFEAESWSLVVDPSFCNRQEKDVIKRQDVIFELMQTEMHHIQTLFIMSEIFRKGMKEELQLDHSTVDKIFPCLDELLEIHRHFFYSMKERRQESCAGSDRNFVIDRIGDILVQQFSEENASKMKKIYGEFCCHHKEAVNLFKELQQNKKFQNFIKLRNSNLLARRRGIPECILLVTQRITKYPVLVERILQYTKERTEEHKDLRKALCLIKDMIATVDLKVNEYEKNQKWLEILNKIENKTYTKLKNGHVFRKQALMSEERTLLYDGLVYWKTATGRFKDILALLLTDVLLFLQEKDQKYIFAAVDQKPSVISLQKLIAREVANEERGMFLISASSAGPEMYEIHTNSKEERNNWMRRIQQAVESCPEEKGGRTSESDEDKRKAEARVAKIQQCQEILTNQDQQICAYLEEKLHIYAELGELSGFEDVHLEPHLLIKPDPGEPPQAASLLAAALKEAESLQVAVKASQMGAVSQSCEDSCGDSVLADTLSSHDVPGSPTASLVTGGREGRGCSDVDPGIQGVVTDLAVSDAGEKVECRNFPGSSQSEIIQAIQNLTRLLYSLQAALTIQDSHIEIHRLVLQQQEGLSLGHSILRGGPLQDQKSRDADRQHEELANVHQLQHQLQQEQRRWLRRCEQQQRAQATRESWLQERERECQSQEELLLRSRGELDLQLQEYQHSLERLREGQRLVEREQARMRAQQSLLGHWKHGRQRSLPAVLLPGGPEVMELNRSESLCHENSFFINEALVQMSFNTFNKLNPSVIHQDATYPTTQSHSDLVRTSEHQVDLKVDPSQPSNVSHKLWTAAGSGHQILPFHESSKDSCKNGN

SEQ ID NO: 24726 - protein, 83 aa, Homo sapiens
  REGION 1..83: note = ENSP00000421859
MELSCSEAPLYGQMMIYAKFDKNVYLPEDAEFYFTYDGSHQRHVMIAERIEDNVLQSSVPGHGLQETVTVSVCLCSEGYSPVT

SEQ ID NO: 24727 - protein, 1731 aa, Homo sapiens
  REGION 1..1731: note = ENSP00000411459
MELSCSEAPLYGQMMIYAKFDKNVYLPEDAEFYFTYDGSHQRHVMIAERIEDNVLQSSVPGHGLQETVTVSVCLCSEGYSPVTMGSGSVTYVDNMACRLARLLVTQANRLTACSHQTLLTPFALTAGALPALDEELVLALTHLELPLEWTVLGSSSLEVSSHRESLLHLAMRWGLAKLSQFFLCLPGGVQALALPNEEGATPLDLALREGHSKLVEDVTNFQGRWSPSFSRVQLSEEASLHYIHSSETLTLTLNHTAEHLLEADIKLFRKYFWDRAFLVKAFEPEARPEERTAMPSSGAETEEEIKNSVSSRSAAEKEDIKRVKSLVVQHNEHEDQHSLDLDRSFDILKKSKPPSTLLAAGRLSDMLNGGDEVYANCMVIDQVGDLDISYINIEGITATTSPESRGCTLWPQSSKHTLPTETSPSVYPLSENVEGTAHTEAQQSFMSPSSSCASNLNLSFGWHGFEKEQSHLKKRSSSLDALDADSEGEGHSEPSHICYTPGSQSSSRTGIPSGDELDSFETNTEPDFNISRAESLPLSSNLQSKESLLSGVRSRSYSCSSPKISLGKTRLVRELTVCSSSEEQRAYSLSEPPRENRIQEEEWDKYIIPAKSESEKYKVSRTFSFLMNRMTSPRNKSKTKSKDAKDKEKLNRHQFAPGTFSGVLQCLVCDKTLLGKESLQCSNCNANVHKGCKDAAPACTKKFQEKYNKNKPQTILGNSSFRDIPQPGLSLHPSSSVPVGLPTGRRETVGQVHPLSRSVPGTTLESFRRSATSLESESDHNSCRSRSHSDELLQSMGSSPSTESFIMEDVVDSSLWSDLSSDAQEFEAESWSLVVDPSFCNRQEKDVIKRQDVIFELMQTEMHHIQTLFIMSEIFRKGMKEELQLDHSTVDKIFPCLDELLEIHRHFFYSMKERRQESCAGSDRNFVIDRIGDILVQQFSEENASKMKKIYGEFCCHHKEAVNLFKELQQNKKFQNFIKLRNSNLLARRRGIPECILLVTQRITKYPVLVERILQYTKERTEEHKDLRKALCLIKDMIATVDLKVNEYEKNQKWLEILNKIENKTYTKLKNGHVFRKQALMSEERTLLYDGLVYWKTATGRFKDILALLLTDVLLFLQEKDQKYIFAAVDQKPSVISLQKLIAREVANEERGMFLISASSAGPEMYEIHTNSKEERNNWMRRIQQAVESCPEEKGGRTSESDEDKRKAEARVAKIQQCQEILTNQDQQICAYLEEKLHIYAELGELSGFEDVHLEPHLLIKPDPGEPPQAASLLAAALKEAESLQVAVKASQMGAVSQSCEDSCGDSVLADTLSSHDVPGSPTASLVTGGREGRGCSDVDPGIQGVVTDLAVSDAGEKVECRNFPGSSQSEIIQAIQNLTRLLYSLQAALTIQDSHIEIHRLVLQQQEGLSLGHSILRGGPLQDQKSRDADRQHEELANVHQLQHQLQQEQRRWLRRCEQQQRAQATRESWLQERERECQSQEELLLRSRGELDLQLQEYQHSLERLREGQRLVEREQARMRAQQSLLGHWKHGRQRSLPAVLLPGGPEVMELNRSESLCHENSFFINEALVQMSFNTFNKLNPSVIHQDATYPTTQSHSDLVRTSEHQVDLKVDPSQPSNVSHKLWTAAGSGHQILPFHESSKDSCKNGSSMTKCSCTLTSPPGLWTGTTSTLKDLDTSHTESPTPHDSNSHRPQLQAFITEAKLNLPTRTMTRQDGETGDGAKENIVYL

SEQ ID NO: 24728 - protein, 1705 aa, Homo sapiens
  REGION 1..1705: note = ENSP00000412175
MELSCSEAPLYGQMMIYAKFDKNVYLPEDAEFYFTYDGSHQRHVMIAERIEDNVLQSSVPGHGLQETVTVSVCLCSEGYSPVTMGSGSVTYVDNMACRLARLLVTQANRLTACSHQTLLTPFALTAGALPALDEELVLALTHLELPLEWTVLGSSSLEVSSHRESLLHLAMRWGLAKLSQFFLCLPGGVQALALPNEEGATPLDLALREGHSKLVEDVTNFQGRWSPSFSRVQLSEEASLHYIHSSETLTLTLNHTAEHLLEADIKLFRKYFWDRAFLVKAFEPEARPEERTAMPSSGAETEEEIKNSVSSRSAAEKEDIKRVKSLVVQHNEHEDQHSLDLDRSFDILKKSKPPSTLLAAGRLSDMLNGGDEVYANCMVIDQVGDLDISYINIEGITATTSPESRGCTLWPQSSKHTLPTETSPSVYPLSENVEGTAHTEAQQSFMSPSSSCASNLNLSFGWHGFEKEQSHLKKRSSSLDALDADSEGEGHSEPSHICYTPGSQSSSRTGIPSGDELDSFETNTEPDFNISRAESLPLSSNLQSKESLLSGVRSRSYSCSSPKISLGKTRLVRELTVCSSSEEQRAYSLSEPPRENRIQEEEWDKYIIPAKSESEKYKVSRTFSFLMNRMTSPRNKSKTKSKDAKDKEKLNRHQFAPGTFSGVLQCLVCDKTLLGKESLQCSNCNANVHKGCKDAAPACTKKFQEKYNKNKPQTILGNSSFRDIPQPGLSLHPSSSVPVGLPTGRRETVGQVHPLSRSVPGTTLESFRRSATSLESESDHNSCRSRSHSDELLQSMGSSPSTESFIMEDVVDSSLWSDLSSDAQEFEAESWSLVVDPSFCNRQEKDVIKRQDVIFELMQTEMHHIQTLFIMSEIFRKGMKEELQLDHSTVDKIFPCLDELLEIHRHFFYSMKERRQESCAGSDRNFVIDRIGDILVQQFSEENASKMKKIYGEFCCHHKEAVNLFKELQQNKKFQNFIKLRNSNLLARRRGIPECILLVTQRITKYPVLVERILQYTKERTEEHKDLRKALCLIKDMIATVDLKVNEYEKNQKWLEILNKIENKTYTKLKNGHVFRKQALMSEERTLLYDGLVYWKTATGRFKDILALLLTDVLLFLQEKDQKYIFAAVDQKPSVISLQKLIAREVANEERGMFLISASSAGPEMYEIHTNSKEERNNWMRRIQQAVESCPEEKGGRTSESDEDKRKAEARVAKIQQCQEILTNQDQQICAYLEEKLHIYAELGELSGFEDVHLEPHLLIKPDPGEPPQAASLLAAALKEAESLQVAVKASQMGAVSQSCEDSCGDSVLADTLSSHDVPGSPTASLVTGGREGRGCSDVDPGIQGVVTDLAVSDAGEKVECRNFPGSSQSEIIQAIQNLTRLLYSLQAALTIQDSHIEIHRLVLQQQEGLSLGHSILRGGPLQDQKSRDADRQHEELANVHQLQHQLQQEQRRWLRRCEQQQRAQATRESWLQERERECQSQEELLLRSRGELDLQLQEYQHSLERLREGQRLVEREQARMRAQQSLLGHWKHGRQRSLPAVLLPGGPEVMELNRSESLCHENSFFINEALVQMSFNTFNKLNPSVIHQDATYPTTQSHSDLVRTSEHQVDLKVDPSQPSNVSHKLWTAAGSGHQILPFHESSKDSCKNDLDTSHTESPTPHDSNSHRPQLQAFITEAKLNLPTRTMTRQDGETGDGAKENIVYL

SEQ ID NO: 24729 - protein, 1392 aa, Homo sapiens
  REGION 1..1392: note = ENSP00000296799
MDSDSDSPFNYSWPSFPKMKIRRRTSKQDRSFDILKKSKPPSTLLAAGRLSDMLNGGDEVYANCMVIDQVGDLDISYINIEGITATTSPESRGCTLWPQSSKHTLPTETSPSVYPLSENVEGTAHTEAQQSFMSPSSSCASNLNLSFGWHGFEKEQSHLKKRSSSLDALDADSEGEGHSEPSHICYTPGSQSSSRTGIPSGDELDSFETNTEPDFNISRAESLPLSSNLQSKESLLSGVRSRSYSCSSPKISLGKTRLVRELTVCSSSEEQRAYSLSEPPRENRIQEEEWDKYIIPAKSESEKYKVSRTFSFLMNRMTSPRNKSKTKSKDAKDKEKLNRHQFAPGTFSGVLQCLVCDKTLLGKESLQCSNCNANVHKGCKDAAPACTKKFQEKYNKNKPQTILGNSSFRDIPQPGLSLHPSSSVPVGLPTGRRETVGQVHPLSRSVPGTTLESFRRSATSLESESDHNSCRSRSHSDELLQSMGSSPSTESFIMEDVVDSSLWSDLSSDAQEFEAESWSLVVDPSFCNRQEKDVIKRQDVIFELMQTEMHHIQTLFIMSEIFRKGMKEELQLDHSTVDKIFPCLDELLEIHRHFFYSMKERRQESCAGSDRNFVIDRIGDILVQQFSEENASKMKKIYGEFCCHHKEAVNLFKELQQNKKFQNFIKLRNSNLLARRRGIPECILLVTQRITKYPVLVERILQYTKERTEEHKDLRKALCLIKDMIATVDLKVNEYEKNQKWLEILNKIENKTYTKLKNGHVFRKQALMSEERTLLYDGLVYWKTATGRFKDILALLLTDVLLFLQEKDQKYIFAAVDQKPSVISLQKLIAREVANEERGMFLISASSAGPEMYEIHTNSKEERNNWMRRIQQAVESCPEEKGGRTSESDEDKRKAEARVAKIQQCQEILTNQDQQICAYLEEKLHIYAELGELSGFEDVHLEPHLLIKPDPGEPPQAASLLAAALKEAESLQVAVKASQMGAVSQSCEDSCGDSVLADTLSSHDVPGSPTASLVTGGREGRGCSDVDPGIQGVVTDLAVSDAGEKVECRNFPGSSQSEIIQAIQNLTRLLYSLQAALTIQDSHIEIHRLVLQQQEGLSLGHSILRGGPLQDQKSRDADRQHEELANVHQLQHQLQQEQRRWLRRCEQQQRAQATRESWLQERERECQSQEELLLRSRGELDLQLQEYQHSLERLREGQRLVEREQARMRAQQSLLGHWKHGRQRSLPAVLLPGGPEVMELNRSESLCHENSFFINEALVQMSFNTFNKLNPSVIHQDATYPTTQSHSDLVRTSEHQVDLKVDPSQPSNVSHKLWTAAGSGHQILPFHESSKDSCKNDLDTSHTESPTPHDSNSHRPQLQAFITEAKLNLPTRTMTRQDGETGDGAKENIVYL

SEQ ID NO: 24730 - protein, 651 aa, Homo sapiens
  REGION 1..651: note = ENSP00000421081
MIATVDLKVNEYEKNQKWLEILNKIENKTYTKLKNGHVFRKQALMSEERTLLYDGLVYWKTATGRFKDILALLLTDVLLFLQEKDQKYIFAAVDQKPSVISLQKLIAREVANEERGMFLISASSAGPEMYEIHTNSKEERNNWMRRIQQAVESCPEEKGGRTSESDEDKRKAEARVAKIQQCQEILTNQDQQICAYLEEKLHIYAELGELSGFEDVHLEPHLLIKPDPGEPPQAASLLAAALKEALVTGGREGRGCSDVDPGIQGVVTDLAVSDAGEKVECRNFPGSSQSEIIQAIQNLTRLLYSLQAALTIQDSHIEIHRLVLQQQEGLSLGHSILRGGPLQDQKSRDADRQHEELANVHQLQHQLQQEQRRWLRRCEQQQRAQATRESWLQERERECQSQEELLLRSRGELDLQLQEYQHSLERLREGQRLVEREQARMRAQQSLLGHWKHGRQRSLPAVLLPGGPEVMELNRSESLCHENSFFINEALVQMSFNTFNKLNPSVIHQDATYPTTQSHSDLVRTSEHQVDLKVDPSQPSNVSHKLWTAAGSGHQILPFHESSKDSCKNGSSMTKCSCTLTSPPGLWTGTTSTLKDLDTSHTESPTPHDSNSHRPQLQAFITEAKLNLPTRTMTRQDGETGDGAKENIVYL

SEQ ID NO: 24731 - protein, 1731 aa, Homo sapiens; identical to SEQ ID NO: 24727
  REGION 1..1731: note = ENSP00000441913

SEQ ID NO: 24732 - protein, 1705 aa, Homo sapiens; identical to SEQ ID NO: 24728
  REGION 1..1705: note = ENSP00000441436

SEQ ID NO: 24733 - protein, 526 aa, Homo sapiens
  REGION 1..526: note = ENSP00000296315
MVAKDYPFYLTVKRANCSLELPPASGPAKDAEEPSNKRVKPLSRVTSLANLIPPVKATPLKRFSQTLQRSISFRSESRPDILAPRPWSRNAAPSSTKRRDSKLWSETFDVCVNQMLTSKEIKRQEAIFELSQGEEDLIEDLKLAKKAYHDPMLKLSIMTEQELNQIFGTLDSLIPLHEELLSQLRDVRKPDGSTEHVGPILVGWLPCLSSYDSYCSNQVAAKALLDHKKQDHRVQDFLQRCLESPFSRKLDLWNFLDIPRSRLVKYPLLLREILRHTPNDNPDQQHLEEAINIIQGIVAEINTKTGESECRYYKERLLYLEEGQKDSLIDSSRVLCCHGELKNNRGVKLHVFLFQEVLVITRAVTHNEQLCYQLYRQPIPVKDLLLEDLQDGEVRLGGSLRGAFSNNERIKNFFRVSFKNGSQSQTHSLQANDTFNKQQWLNCIRQAKETVLCAAGQAGVLDSEGSFLNPTTGSRELQGETKLEQMDQSDSESDCSMDTSEVSLDCERMEQTDSSCGNSRHGESNV

SEQ ID NO: 24734 - protein, 558 aa, Homo sapiens
  REGION 1..558: note = ENSP00000341071
MDSSTAMNQCSCRGMEENKERPKRQRQNNFPMFPSPKAWNFRGRKRKQSTQDEDAVSLCSLDISEPSNKRVKPLSRVTSLANLIPPVKATPLKRFSQTLQRSISFRSESRPDILAPRPWSRNAAPSSTKRRDSKLWSETFDVCVNQMLTSKEIKRQEAIFELSQGEEDLIEDLKLAKKAYHDPMLKLSIMTEQELNQIFGTLDSLIPLHEELLSQLRDVRKPDGSTEHVGPILVGWLPCLSSYDSYCSNQVAAKALLDHKKQDHRVQDFLQRCLESPFSRKLDLWNFLDIPRSRLVKYPLLLREILRHTPNDNPDQQHLEEAINIIQGIVAEINTKTGESECRYYKERLLYLEEGQKDSLIDSSRVLCCHGELKNNRGVKLHVFLFQEVLVITRAVTHNEQLCYQLYRQPIPVKDLLLEDLQDGEVRLGGSLRGAFSNNERIKNFFRVSFKNGSQSQTHSLQANDTFNKQQWLNCIRQAKETVLCAAGQAGVLDSEGSFLNPTTGSRELQGETKLEQMDQSDSESDCSMDTSEVSLDCERMEQTDSSCGNSRHGESNV

SEQ ID NO: 24735 - protein, 532 aa, Homo sapiens
  REGION 1..532: note = ENSP00000410922
MIEVCHHNWLLWLCPSKFGIFMCCLASTTGQMELRRTREPSNKRVKPLSRVTSLANLIPPVKATPLKRFSQTLQRSISFRSESRPDILAPRPWSRNAAPSSTKRRDSKLWSETFDVCVNQMLTSKEIKRQEAIFELSQGEEDLIEDLKLAKKAYHDPMLKLSIMTEQELNQIFGTLDSLIPLHEELLSQLRDVRKPDGSTEHVGPILVGWLPCLSSYDSYCSNQVAAKALLDHKKQDHRVQDFLQRCLESPFSRKLDLWNFLDIPRSRLVKYPLLLREILRHTPNDNPDQQHLEEAINIIQGIVAEINTKTGESECRYYKERLLYLEEGQKDSLIDSSRVLCCHGELKNNRGVKLHVFLFQEVLVITRAVTHNEQLCYQLYRQPIPVKDLLLEDLQDGEVRLGGSLRGAFSNNERIKNFFRVSFKNGSQSQTHSLQANDTFNKQQWLNCIRQAKETVLCAAGQAGVLDSEGSFLNPTTGSRELQGETKLEQMDQSDSESDCSMDTSEVSLDCERMEQTDSSCGNSRHGESNV

SEQ ID NO: 24736 - protein, 236 aa, Homo sapiens
  REGION 1..236: note = ENSP00000417810
  VARIANT 1: note = Any amino acid
XVESCPARSRLSVSVSPPPPGIVELGPPFAWEFCSRLGSAVTSQRAGPAAAMVAKDYPFYLTVKRANCSLELPPASGPAKDAEEPSNKRVKPLSRVTSLANLIPPVKATPLKRFSQTLQRSISFRSESRPDILAPRPWSRNAAPSSTKRRDSKLWSETFDVCVNQMLTSKEIKRQEAIFELSQGEEDLIEDLKLAKKAYHDPMLKLSIMTEQELNQIFGTLDSLIPLHEAPLPQLL

SEQ ID NO: 24737 - protein, 532 aa, Homo sapiens
  REGION 1..532: note = ENSP00000420420
MRSERPMVWCCLFVRSQRKRKQSTQDEDAVSLCSLDISEPSNKRVKPLSRVTSLANLIPPVKATPLKRFSQTLQRSISFRSESRPDILAPRPWSRNAAPSSTKRRDSKLWSETFDVCVNQMLTSKEIKRQEAIFELSQGEEDLIEDLKLAKKAYHDPMLKLSIMTEQELNQIFGTLDSLIPLHEELLSQLRDVRKPDGSTEHVGPILVGWLPCLSSYDSYCSNQVAAKALLDHKKQDHRVQDFLQRCLESPFSRKLDLWNFLDIPRSRLVKYPLLLREILRHTPNDNPDQQHLEEAINIIQGIVAEINTKTGESECRYYKERLLYLEEGQKDSLIDSSRVLCCHGELKNNRGVKLHVFLFQEVLVITRAVTHNEQLCYQLYRQPIPVKDLLLEDLQDGEVRLGGSLRGAFSNNERIKNFFRVSFKNGSQSQTHSLQANDTFNKQQWLNCIRQAKETVLCAAGQAGVLDSEGSFLNPTTGSRELQGETKLEQMDQSDSESDCSMDTSEVSLDCERMEQTDSSCGNSRHGESNV

SEQ ID NO: 24738 - protein, 497 aa, Homo sapiens
  REGION 1..497: note = ENSP00000418826
MIEEPSNKRVKPLSRVTSLANLIPPVKATPLKRFSQTLQRSISFRSESRPDILAPRPWSRNAAPSSTKRRDSKLWSETFDVCVNQMLTSKEIKRQEAIFELSQGEEDLIEDLKLAKKAYHDPMLKLSIMTEQELNQIFGTLDSLIPLHEELLSQLRDVRKPDGSTEHVGPILVGWLPCLSSYDSYCSNQVAAKALLDHKKQDHRVQDFLQRCLESPFSRKLDLWNFLDIPRSRLVKYPLLLREILRHTPNDNPDQQHLEEAINIIQGIVAEINTKTGESECRYYKERLLYLEEGQKDSLIDSSRVLCCHGELKNNRGVKLHVFLFQEVLVITRAVTHNEQLCYQLYRQPIPVKDLLLEDLQDGEVRLGGSLRGAFSNNERIKNFFRVSFKNGSQSQTHSLQANDTFNKQQWLNCIRQAKETVLCAAGQAGVLDSEGSFLNPTTGSRELQGETKLEQMDQSDSESDCSMDTSEVSLDCERMEQTDSSCGNSRHGESNV

SEQ ID NO: 24739 - protein, 416 aa, Homo sapiens
  REGION 1..416: note = ENSP00000417986
MVAKDYPFYLTVKRANCSLELPPASGPAKDAEEPSNKRVKPLSRVTSLANLIPPVKATPLKRFSQTLQRSISFRSESRPDILAPRPWSRNAAPSSTKRRDSKLWSETFDVCVNQMLTSKEIKRQEAIFELSQGEEDLIEDLKLAKKAYHDPMLKLSIMTEQELNQIFGTLDSLIPLHEELLSQLRDVRKPDGSTEHVGPILVGWLPCLSSYDSYCSNQVAAKALLDHKKQDHRVQDFLQRCLESPFSRKLDLWNFLDIPRSRLVKYPLLLREILRHTPNDNPDQQHLEEAINIIQGIVAEINTKTGESECRYYKERLLYLEEGQKDSLIDSSRVLCCHGELKNNRGVKLHVFLFQEVLVITRAVTHNEQLCYQLYRQPIPVKDLLLEDLQDGEVRLGGSLRGAFSNNERSMDSSRG

SEQ ID NO: 24740 - protein, 184 aa, Homo sapiens
  REGION 1..184: note = ENSP00000417087
MFPSPKAWNFRGRKRKQSTQDEDAVSLCSLDISEPSNKRVKPLSRVTSLANLIPPVKATPLKRFSQTLQRSISFRSESRPDILAPRPWSRNAAPSSTKRRDSKLWSETFDVCVNQMLTSKEIKRQEAIFELSQGEEDLIEDLKLAKKAYHDPMLKLSIMTEQELNQIFGTLDSLIPLHEELLSQ

SEQ ID NO: 24741 - protein, 196 aa, Homo sapiens
  REGION 1..196: note = ENSP00000420402
MFDRNIWPKRQRQNNFPMFPSPKAWNFRGRKRKQSTQDEDAVSLCSLDISEPSNKRVKPLSRVTSLANLIPPVKATPLKRFSQTLQRSISFRSESRPDILAPRPWSRNAAPSSTKRRDSKLWSETFDVCVNQMLTSKEIKRQEAIFELSQGEEDLIEDLKLAKKAYHDPMLKLSIMTEQELNQIFGTLDSLIPLHE

SEQ ID NO: 24742 - protein, 50 aa, Homo sapiens
  REGION 1..50: note = ENSP00000418984
MDSSTAMNQCSCRGMEENKERAVGGVSGTSAINGRNNWFFRLLRKSDLCG

SEQ ID NO: 24743 - protein, 100 aa, Homo sapiens
  REGION 1..100: note = ENSP00000418469
MDSSTAMNQCSCRGMEENKERPKRQRQNNFPMFPSPKAWNFRGRKRKQSTQDEDAVSLCSLDISEPSNKRVKPLSRVTSLANLIPPVKATPLKRFSQTLQ

SEQ ID NO: 24744 - protein, 70 aa, Homo sapiens
  REGION 1..70: note = ENSP00000420633
MFDRNICPVILHVKRTNSVLALRLVHSLNGSGKTTFPCFPLLKPGISEGSSRDHPRRKQLILTSLLQDLL

SEQ ID NO: 24745 - protein, 870 aa, Homo sapiens
  REGION 1..870: note = ENSP00000387020
MEKTKTKQGENEHMPVNNPSTQIYQLQALASELKTGFTEAMQELSRIQHGEYALEEKVKSCRCSMEEKVTEMKNSLNYFKEELSNAMSMIQAITSKQEEMQQKIEQLQQEKRRESRKVKAKKTQKEEHSSQAGPAQAQGSPFRSINIPEPVLPSEDFTNLLPSQAYEKAQESRSVHVGDSNVKGMMGPGVNPTTPEAEENLKSCLSADIQSKGHLPSGMWRQPKDGKEWGEEYVTKDHPDKLKEAGQGRHSSLENVLCETSLAAKRQTVALELLESERKYVINISLILKIKATFQGSDGKRNSKERSLFPGSLRYLVQQHLDLLHALQERVLKWPRQGVLGDLFLKLTNDENNFLDYYVAYLRDLPECISLVHVVVLKEGDEEIKSDIYTLFFHIVQRIPEYLIHLQNVLKFTEQEHPDYYLLLVCVQRLRVFISHYTLLFQCNEDLLIQKRKKLKKSSMAKLYKGLASQCANAGQDASPTAGPEAVRDTGIHSEELLQPYPSAPSSGPAITHLMPPVKKSQQQQSLMESMQPGKPSDWELEGRKHERPESLLAPTQFCAAEQDVKALAGPLQAIPEMDFESSPAEPLGNVERSLRAPAELLPDARGFVPAAYEEFEYGGEIFALPAPYDEEPFQAPALFENCSPASSESSLDICFLRPVSFAMEAERPEHPLQPLPKSATSPAGSSSAYKLEAAAQAHGKAKPLSRSLKEFPRAPPADGVAPRLYSTRSSSGGRAPIKAERAAQAHGPAAAAVAARGASRTFFPQQRSQSEKQTYLEVRREMHLEDTTRFCPKEERESEQTSFSDQNPRQDQKGGFRSSFRKLFKKKSSGSEYREKTNENPSMDPSPTKQDFFRNRLALANDLDQGTAV

SEQ ID NO: 24746 - protein, 109 aa, Homo sapiens
  REGION 1..109: note = ENSP00000399688
  VARIANT 1: note = Any amino acid
XGRAPIKAERAAQAHGPAAAAVAARGASRTFFPQQRSQSEKQTYLEEMHLEDTTRFCPKEERESEQTSFSDQNPRQDQKGGFRSSFRKLFKKKNGNATGEDFCGPWGWW

SEQ ID NO: 24747 - protein, 108 aa, Homo sapiens
  REGION 1..108: note = ENSP00000413620
GRAPIKAERAAQAHGPAAAAVAARGASRTFFPQQRSQSEKQTYLEEMHLEDTTRFCPKEERESEQTSFSDQNPRQDQKGGFRSSFRKLFKKKNGNATGEDFCGPWGWW

SEQ ID NO: 24748 - protein, 870 aa, Homo sapiens; identical to SEQ ID NO: 24745
  REGION 1..870: note = ENSP00000381780

SEQ ID NO: 24749 - protein, 103 aa, Homo sapiens
  REGION 1..103: note = ENSP00000425621
MAKHGADEPSSRSGSPDREGRASEDRSLLHQRLAVRELIDTEVSYLHMLQLCASDIRSRLQQLPQGDLDVLFSNIDDIIKVNSRFLHDLQETASKEEEQVQLV

SEQ ID NO: 24750 - protein, 675 aa, Homo sapiens
  REGION 1..675: note = ENSP00000328083
MAKHGADEPSSRSGSPDREGRASEDRSLLHQRLAVRELIDTEVSYLHMLQLCASDIRSRLQQLPQGDLDVLFSNIDDIIKVNSRFLHDLQETASKEEEQVQLVGNIFLEFQEELEQVYKVYCASYDQALLLVDTYRKEPELQRHIQGIVEAVVPQAGSSGLSFLLVIPLQRITRYPLLLQKILENTVPDASAYPVLQRAVSALQDVNTNINEYKMRKEVASKYTKVEQLTLRERLARINTHTLSKKTTRLSQLLKQEAGLIPRTEDKEFDDLEERFQWVSLCVTELKNNVAAYLDNLQAFLYFRPHEYNLDIPEGPAVQYCNLARDLHLEAFLKFKQRLEGLVWQPLCSLAKALLGPQNLIKKRLDKLLDFERVEEKLLEVGSVTYQEEAARHTYQALNSLLVAELPQFNQLVMQWLGQIMCTFVTLQRDLAKQVLQRAEGSMAQLPHHHVPEPAFRKLVEDALGRTSNQLRSFQETFEKVQPPPTTQPLLPGSERQVQALLSRYGPGKLYQVTSNISGTGTLDLTLPRGQIVAILQNKDTKGNSGRWLVDTGGHRGYVPAGKLQLYHVVPSAEELRRQAGLNKDPRCLTPEPSPALVPSIPTMNQVIAAYPFVARSSHEVSLQAGQPVTILEAQDKKGNPEWSLVEVNGQRGYVPSGFLARARSPVLWGWSLPS

SEQ ID NO: 24751 - protein, 1816 aa, Homo sapiens
  REGION 1..1816: note = ENSP00000386794
MLSVVHFLRSFFKTPEPGAHLPGEGEIEDNQLPTSPAEQVEQGWNQQTDRDDSETLSQQSESGSDTKTDPFESASDTESLSGYLPRGVFHPLRGTPVDIEAPWEYPDVSATGPPQEQHLTSVPGLHAKEELDLSPSLEDDSCKNGWRAFATVAGEQEAGHLWDCATSLERESLLAGVPRHTGCCLQRATDSSGPEPVQGVAVQDLRGLSSVSLQKSRSESYLGIPVVWPFLLWCCELGRSWPHIHNRARALVLPSRGPLDNTAPLGTRTKKESTLGPAGDTELLWSQPHSDVPCQPPLRTSCLLRTNRHHSAPETTGDKNRASPRLNCGHMRALVRAHSIAGFSPECPEDPVGQNVVKSGTHVKEGAKNERDPRIQNIPSPAPTQLSGPIPAFQSGAPHLQGPCKPGGFRLQRASQDTPSAGLLGENQLRQDSRSCLVASCLTSELVKLSAEEVPEPAECKSEQSPESRTQEPQGTQLAPRAADERETQKHLWGISVQAGNQTSNYTSKYVLSEESKSPTRAKFPRQPSSEGTQVWSGDLMGCLEVSDSSDAPETTQKSSAIDTSKAAEEAMVLDPNYREQALQGLSEFKAATVSHCGPGAEEGEQGPGGAGGRQLEPKAGGEASRGRGALIIVAVEQKGLQASRSNAGPVPETLPRDFPKERPESPLSTGETPCESPTRGKTPAGNECELPAAPIQGAGDGALQRVAQAAELGRVLVPQAASEETPSTEEPPGERLRGESRSSGSGERGPEEAPEGGAAAARGQRPRVPALEPPQPPRGLRKGAQEPGKRPTFSKVTSFRKGRPLATESPGGVPAPTTEGRRWGSSGPEGLPRENPPAAAGRDAPPLHHGDASAWPEFVPQAAGDRTAGPAGAGHTGTSGDLGSRGPSSESCNAKRLKTTEKKLRARLALAHKTFSNFIESIVLEKENTHERSPSSPKGEKEKSRLRQGSWRAFLKSKDAGSPKKPTLVSLPLGPEVLSPAETDSHCEERAEDKEGYVFSDHWAPPLASTPLSSSLVSPEHRRKSEPTIKCTATQEGGRYLPSGIFPEKSWLASPGSPRAQQAGIAHTLPSSSACCLAYENPGTPCRPTSPKPLSPRPSAQRMGLHYPGRGSAISMVSLGSYSYVDSSSGDPERPKIPKGQTSFLLSLQTLNQDEQKEESREGGQGPRGLGTVPWLRDLPGSENHMPWEEPAGEKPSCSHSQKAFHMEPAQKPCFTTDMVTWALLCISAETVRGEAPSQPRGIPHRSPVSVDDLWLEKTQRKKLQKQAHVERRLHIGAVHKDGVKCWRKTIITSPESLNLPRRSHPLSQSAPTGLNHMGWPEHTPGTAMPDGALDTAVCADEVGSEEDLYDDLHSSSHHYSHPGGGGEQLAINELISDGSVVCAEALWDHVTMDDQELGFKAGDVIEVMDATNREWWWGRVADGEGWFPASFVRLRVNQDEPADDDAPLAGNSGAEDGGAEAQSSKDQMRTNVINEILSTERDYIKHLRDICEQADFQIYSEYCNNHPNACVELSRLTKLSKYVYFFEACRLLQKMIDISLDGFLLTPVQKICKYPLQLAELLKYTHPQHRDFKDVEAALHAMKNVAQLINERKRRLENIDKIAQWQSSIEDWEGEDLLVRSSELIYSGELTRVTQPQAKSQQRMFFLFDHQLIYCKKDLLRRDVLYYKGRLDMDGLEVVDLEDGKDRDLHVSIKNAFRLHRGATGDSHLLCTRKPEQKQRWLKAFAREREQVQLDQETGFSITELQRKQAMLNASKQQVTGKPKAVGRPCYLTRQKHPALPSNRPQQQVLVLAEPRRKPSTFWHSISRLAPFRK

SEQ ID NO: 24752 - protein, 142 aa, Homo sapiens
  REGION 1..142: note = ENSP00000490717
  VARIANT 1: note = Any amino acid
XKKLRARLALAHKTFSNFIESIVLEKENTHERSPSSPKGEKEKSRLRQGSWRAFLKSKDAGSPKKPTLVSLPLGPEVLSPAETDSHCEERAEDKEGYVFSDHWAPPLASTPLSSSLVSPEHRRKSEPTIKCTATQEGDAKPR

SEQ ID NO: 24753 - protein, 372 aa, Homo sapiens
  REGION 1..372: note = ENSP00000389661
PLASTPLSSSLVSPEHRRKSEPTIKCTATQEGGRYLPSGIFPEKSWLASPGSPRAQQAGIAHTLPSSSACCLAYENPGTPCRPTSPKPLSPRPSAQRMGLHYPGRGSAISMVSLGSYSYVDSSSGDPERPKIPKGQTSFLLSLQTLNQDEQKEESREGGQGPRGLGTVPWLRDLPGSENHMPWEEPAGEKPSCSHSQKAFHMEPAQKPCFTTDMVTWALLCISAETVRGEAPSQPRGIPHRSPVSVDDLWLEKTQRKKLQKQAHVERRLHIGAVHKDGVKCWRKTIITSPESLNLPRRSHPLSQSAPTGLNHMGWPEHTPGTAVGRPCYLTRQKHPALPSNRPQQQVLVLAEPRRKPSTFWHSISRLAPFRK

SEQ ID NO: 24754 - protein, 695 aa, Homo sapiens
  REGION 1..695: note = ENSP00000376680
  VARIANT 1: note = Any amino acid
XEGGQGPRGLGTVPWLRDLPGSENHMPWEEPAGEKPSCSHSQKAFHMEPAQKPCFTTDMVTWALLCISAETVRGEAPSQPRGIPHRSPVSVDDLWLEKTQRKKLQKQAHVERRLHIGAVHKDGVKCWRKTIITSPESLNLPRRSHPLSQSAPTGLNHMGWPEHTPGTAMPDGALDTAVCADEVGSEEDLYDDLHSSSHHYSHPGGGGEQLAINELISDGSVVCAEALWDHVTMDDQELGFKAGDVIEVMDATNREWWWGRVADGEGWFPASFVRLRVNQDEPADDDAPLAGNSGAEDGGAEAQSSKDQMRTNVINEILSTERDYIKHLRDICEGYVRQCRKRADMFSEEQLRTIFGNIEDIYRCQKAFVKALEQRFNRERPHLSELGACFLEHQADFQIYSEYCNNHPNACVELSRLTKLSKYVYFFEACRLLQKMIDISLDGFLLTPVQKICKYPLQLAELLKYTHPQHRDFKDVEAALHAMKNVAQLINERKRRLENIDKIAQWQSSIEDWEGEDLLVRSSELIYSGELTRVTQPQAKSQQRMFFLFDHQLIYCKKDLLRRDVLYYKGRLDMDGLEVVDLEDGKDRDLHVSIKNAFRLHRGATGDSHLLCTRKPEQKQRWLKAFAREREQVQLDQETGFSITELQRKQAMLNASKQQVTGKPKGRRTAAPPPRLPGPYPADIIPFSEPQSQAS

SEQ ID NO: 24755 - protein, 517 aa, Homo sapiens
  REGION 1..517: note = ENSP00000387285
MRGAVSRSWSLESLRSATAAMPDGALDTAVCADEVGSEEDLYDDLHSSSHHYSHPGGGGEQLAINELISDGSVVCAEALWDHVTMDDQELGFKAGDVIEVMDATNREWWWGRVADGEGWFPASFVRLRVNQDEPADDDAPLAGNSGAEDGGAEAQSSKDQMRTNVINEILSTERDYIKHLRDICEGYVRQCRKRADMFSEEQLRTIFGNIEDIYRCQKAFVKALEQRFNRERPHLSELGACFLEHQADFQIYSEYCNNHPNACVELSRLTKLSKYVYFFEACRLLQKMIDISLDGFLLTPVQKICKYPLQLAELLKYTHPQHRDFKDVEAALHAMKNVAQLINERKRRLENIDKIAQWQSSIEDWEGEDLLVRSSELIYSGELTRVTQPQAKSQQRMFFLFDHQLIYCKKDLLRRDVLYYKGRLDMDGLEVVDLEDGKDRDLHVSIKNAFRLHRGATGDSHLLCTRKPEQKQRWLKAFAREREQVQLDQETGFSITELQRKQAMLNASKQQVTGKPK

SEQ ID NO: 24756 - protein, 619 aa, Homo sapiens
  REGION 1..619: note = ENSP00000348017
MRPDGQQALDAVVRSFDCHSEAALRQRNDVIYCSLPRTAQGIVQREDQLEVLVSLREVWGRRRGRDGTCTGAMPDGALDTAVCADEVGSEEDLYDDLHSSSHHYSHPGGGGEQLAINELISDGSVVCAEALWDHVTMDDQELGFKAGDVIEVMDATNREWWWGRVADGEGWFPASFVRLRVNQDEPADDDAPLAGNSGAEDGGAEAQSSKDQMRTNVINEILSTERDYIKHLRDICEGYVRQCRKRADMFSEEQLRTIFGNIEDIYRCQKAFVKALEQRFNRERPHLSELGACFLEHQADFQIYSEYCNNHPNACVELSRLTKLSKYVYFFEACRLLQKMIDISLDGFLLTPVQKICKYPLQLAELLKYTHPQHRDFKDVEAALHAMKNVAQLINERKRRLENIDKIAQWQSSIEDWEGEDLLVRSSELIYSGELTRVTQPQAKSQQRMFFLFDHQLIYCKKDLLRRDVLYYKGRLDMDGLEVVDLEDGKDRDLHVSIKNAFRLHRGATGDSHLLCTRKPEQKQRWLKAFAREREQVQLDQETGFSITELQRKQAMLNASKQQVTGKPKAVGRPCYLTRQKHPALPSNRPQQQVLVLAEPRRKPSTFWHSISRLAPFRK

SEQ ID NO: 24757 - protein, 287 aa, Homo sapiens
  REGION 1..287: note = ENSP00000432301
  VARIANT 1: note = Any amino acid
XACVELSRLTKLSKYVYFFEACRLLQKMIDISLDGFLLTPVQKICKYPLQLAELLKYTHPQHRDFKDVEAALHAMKNVAQLINERKRRLENIDKIAQWQSSIEDWEGEDLLVRSSELIYSGELTRVTQPQAKSQQRMFFLFDHQLIYCKKDLLRRDVLYYKGRLDMDGLEVVDLEDGKDRDLHVSIKNAFRLHRGATGDSHLLCTRKPEQKQRWLKAFAREREQVQLDQETGFSITELQRKQAMLNASKQQVTGKPKGRRTAAPPPRLPGPYPADIIPFSEPQSQAS

SEQ ID NO: 24758 - protein, 690 aa, Homo sapiens
  REGION 1..690: note = ENSP00000316845
MPWEEPAGEKPSCSHSQKAFHMEPAQKPCFTTDMVTWALLCISAETVRGEAPSQPRGIPHRSPVSVDDLWLEKTQRKKLQKQAHVERRLHIGAVHKDGVKCWRKTIITSPESLNLPRRSHPLSQSAPTGLNHMGWPEHTPGTAMPDGALDTAVCADEVGSEEDLYDDLHSSSHHYSHPGGGGEQLAINELISDGSVVCAEALWDHVTMDDQELGFKAGDVIEVMDATNREWWWGRVADGEGWFPASFVRLRVNQDEPADDDAPLAGNSGAEDGGAEAQSSKDQMRTNVINEILSTERDYIKHLRDICEGYVRQCRKRADMFSEEQLRTIFGNIEDIYRCQKAFVKALEQRFNRERPHLSELGACFLEHQADFQIYSEYCNNHPNACVELSRLTKLSKYVYFFEACRLLQKMIDISLDGFLLTPVQKICKYPLQLAELLKYTHPQHRDFKDVEAALHAMKNVAQLINERKRRLENIDKIAQWQSSIEDWEGEDLLVRSSELIYSGELTRVTQPQAKSQQRMFFLFDHQLIYCKKDLLRRDVLYYKGRLDMDGLEVVDLEDGKDRDLHVSIKNAFRLHRGATGDSHLLCTRKPEQKQRWLKAFAREREQVQLDQETGFSITELQRKQAMLNASKQQVTGKPKAVGRPCYLTRQKHPALPSNRPQQQVLVLAEPRRKPSTFWHSISRLAPFRK

SEQ ID NO: 24759 - protein, 670 aa, Homo sapiens
  REGION 1..670: note = ENSP00000432267
MPWEEPAGEKPSCSHSQKAFHMEPAQKPCFTTDMVTWALLCISAETVRGEAPSQPRGIPHRSPVSVDDLWLEKTQRKKLQKQAHVERRLHIGAVHKDGVKCWRKTIITSPESLNLPRRSHPLSQSAPTGLNHMGWPEHTPGTAMPDGALDTAVCADEVGSEEDLYDDLHSSSHHYSHPGGGGEQLAINELISDGSVVCAEALWDHVTMDDQELGFKAGDVIEVMDATNREWWWGRVADGEGWFPASFVRLRVNQDEPADDDAPLAGNSGAEDGGAEAQSSKDQMRTNVINEILSTERDYIKHLRDICEGYVRQCRKRADMFSEEQLRTIFGNIEDIYRCQKAFVKALEQRFNRERPHLSELGACFLEHQADFQIYSEYCNNHPNACVELSRLTKLSKYVYFFEACRLLQKMIDISLDGFLLTPVQKICKYPLQLAELLKYTHPQHRDFKDVEAALHAMKNVAQLINERKRRLENIDKIAQWQSSIEDWEGEDLLVRSSELIYSGELTRVTQPQAKSQQRMFFLFDHQLIYCKKDLLRRDVLYYKGRLDMDGLEVVDLEDGKDRDLHVSIKNAFRLHRGATGDSHLLCTRKPEQKQRWLKAFAREREQVQLDQETGFSITELQRKQAMLNASKQQVTGKPKGRRTAAPPPRLPGPYPADIIPFSEPQSQAS

SEQ ID NO: 24760 - protein, 630 aa, Homo sapiens
  REGION 1..630: note = ENSP00000483548
MPWEEPAGEKPSCSHSQKAFHMEPAQKPCFTTDMVTWALLCISAETVRGEAPSQPRGIPHRSPVSVDDLWLEKTQRKKLQKQAHVERRLHIGAVHKDGVKCWRKTIITSPESLNLPRRSHPLSQSAPTGLNHMGWPEHTPGTAMPDGALDTAVCADEVGSEEDLYDDLHSSSHHYSHPGGGGEQLAINELISDGSVVCAEALWDHVTMDDQELGFKAGDVIEVMDATNREWWWGRVADGEGWFPASFVRLRVNQDEPADDDAPLAGNSGAEDGGAEAQSSKDQMRTNVINEILSTERDYIKHLRDICEQADFQIYSEYCNNHPNACVELSRLTKLSKYVYFFEACRLLQKMIDISLDGFLLTPVQKICKYPLQLAELLKYTHPQHRDFKDVEAALHAMKNVAQLINERKRRLENIDKIAQWQSSIEDWEGEDLLVRSSELIYSGELTRVTQPQAKSQQRMFFLFDHQLIYCKKDLLRRDVLYYKGRLDMDGLEVVDLEDGKDRDLHVSIKNAFRLHRGATGDSHLLCTRKPEQKQRWLKAFAREREQVQLDQETGFSITELQRKQAMLNASKQQVTGKPKAVGRPCYLTRQKHPALPSNRPQQQVLVLAEPRRKPSTFWHSISRLAPFRK

SEQ ID NO: 24761 - protein, 192 aa, Homo sapiens
  REGION 1..192: note = ENSP00000398455
MPWEEPAGEKPSCSHSQKAFHMEPAQKPCFTTDMVTWALLCISAETVRGEAPSQPRGIPHRSPVSVDDLWLEKTQRKKLQKQAHVERRLHIGAVHKDGVKCWRKTIITSPESLNLPRRSHPLSQSAPTGLNHMGWPEHTPGTAVGRPCYLTRQKHPALPSNRPQQQVLVLAEPRRKPSTFWHSISRLAPFRK

SEQ ID NO: 24762 - protein, 622 aa, Homo sapiens
  REGION 1..622: note = ENSP00000359654
MTENGSHQLIVKARFNFKQTNEDELSVCKGDIIYVTRVEEGGWWEGTLNGRTGWFPSNYVREIKSSERPLSPKAVKGFETAPLTKNYYTVVLQNILDTEKEYAKELQSLLVTYLRPLQSNNNLSTVEVTSLLGNFEEVCTFQQTLCQALEECSKFPENQHKVGGCLLSLMPHFKSMYLAYCANHPSAVNVLTQHSDELEQFMENQGASSPGILILTTNLSKPFMRLEKYVTLLQELERHMEDTHPDHQDILKAIVAFKTLMGQCQDLRKRKQLELQILSEPIQAWEGEDIKNLGNVIFMSQVMVQYGACEEKEERYLMLFSNVLIMLSASPRMSGFIYQGKIPIAGTVVTRLDEIEGNDCTFEITGNTVERIVVHCNNNQDFQEWLEQLNRLIRGPASCSSLSKTSSSSCSAHSSFSSTGQPRGPLEPPQIIKPWSLSCLRPAPPLRPSAALGYKERMSYILKESSKSPKTMKKFLHKRKTERKPSEEEYVIRKSTAALEEDAQILKVIEAYCTSANFQQGHGSSTRKDSIPQVLLPEEEKLIIEETRSNGQTIMEEKSLVDTVYALKDEVRELKQENKRMKQCLEEELKSRRDLEKLVRRLLKQTDECIRGESSSKTSILP

SEQ ID NO: 24763 - protein, 622 aa, Homo sapiens; identical to SEQ ID NO: 24762
  REGION 1..622: note = ENSP00000359656

SEQ ID NO: 24764 - protein, 776 aa, Homo sapiens
  REGION 1..776: note = ENSP00000250617
MNPEEQIVTWLISLGVLESPKKTICDPEEFLKSSLKNGVVLCKLINRLMPGSVEKFCLDPQTEADCINNINDFLKGCATLQVEIFDPDDLYSGVNFSKVLSTLLAVNKATEDQLSERPCGRSSSLSAANTSQTNPQGAVSSTVSGLQRQSKTVEMTENGSHQLIVKARFNFKQTNEDELSVCKGDIIYVTRVEEGGWWEGTLNGRTGWFPSNYVREIKSSERPLSPKAVKGFETAPLTKNYYTVVLQNILDTEKEYAKELQSLLVTYLRPLQSNNNLSTVEVTSLLGNFEEVCTFQQTLCQALEECSKFPENQHKVGGCLLSLMPHFKSMYLAYCANHPSAVNVLTQHSDELEQFMENQGASSPGILILTTNLSKPFMRLEKYVTLLQELERHMEDTHPDHQDILKAIVAFKTLMGQCQDLRKRKQLELQILSEPIQAWEGEDIKNLGNVIFMSQVMVQYGACEEKEERYLMLFSNVLIMLSASPRMSGFIYQGKIPIAGTVVTRLDEIEGNDCTFEITGNTVERIVVHCNNNQDFQEWLEQLNRLIRGPASCSSLSKTSSSSCSAHSSFSSTGQPRGPLEPPQIIKPWSLSCLRPAPPLRPSAALGYKERMSYILKESSKSPKTMKKFLHKRKTERKPSEEEYVIRKSTAALEEDAQILKVIEAYCTSANFQQGHGSSTRKDSIPQVLLPEEEKLIIEETRSNGQTIMEEKSLVDTVYALKDEVRELKQENKRMKQCLEEELKSRRDLEKLVRRLLKQTDECIRGESSSKTSILP

SEQ ID NO: 24765 - protein, 557 aa, Homo sapiens
  REGION 1..557: note = ENSP00000369217
MDSDEGYNYEFDEDEECSEEDSGAEEEEDEDDDEPDDDTLDLGEVELVEPGLGVGGERDGLLCGETGGGGGSALGPGGGGGGGGGGGGGGPGHEQEEDYRYEVLTAEQILQHMVECIREVNEVIQNPATITRILLSHFNWDKEKLMERYFDGNLEKLFAECHVINPSKKSRTRQMNTRSSAQDMPCQICYLNYPNSYFTGLECGHKFCMQCWSEYLTTKIMEEGMGQTISCPAHGCDILVDDNTVMRLITDSKVKLKYQHLITNSFVECNRLLKWCPAPDCHHVVKVQYPDAKPVRCKCGRQFCFNCGENWHDPVKCKWLKKWIKKCDDDSETSNWIAANTKECPKCHVTIEKDGGCNHMVCRNQNCKAEFCWVCLGPWEPHGSAWYNCNRYNEDDAKAARDAQERSRAALQRYLFYCNRYMNHMQSLRFEHKLYAQVKQKMEEMQQHNMSWIEVQFLKKAVDVLCQCRATLMYTYVFAFYLKKNNQSIIFENNQADLENATEVLSGYLERDISQDSLQDIKQKVQDKYRYCESRRRVLLQHVHEGYEKDLWEYIED

SEQ ID NO: 24766 - protein, 167 aa, Homo sapiens
  REGION 1..167: note = ENSP00000456746
MDSDEGYNYEFDEDEECSEEDSGAEEEEDEDDDEPDDDTLDLGEVELVEPGLGVGGERDGLLCGETGGGGGSALGPGGGGGGGGGGGGGGPGHEQEEDYRYEVLTAEQILQHMVECIREVNEVIQNPATITRILLSHFNWDKEKLMESISLALNVDISFVCSAGVNI

SEQ ID NO: 24767 - protein, 204 aa, Homo sapiens
  REGION 1..204: note = ENSP00000454774
  VARIANT 1: note = Any amino acid
XSDEGYNYEFDEDEECSEEDSGAEEEEDEDDDEPDDDTLDLGEVELVEPGLGVGGERDGLLCGETGGGGGSALGPGGGGGGGGGGGGGGPGHEQEEDYRYEVLTAEQILQHMVECIREVNEVIQNPATITRILLSHFNWDKEKLMERRLITDSKVKLKYQHLITNSFVECNRLLKWCPAPDCHHVVKVQYPDAKPVRCKCGRQF

SEQ ID NO: 24768 - protein, 47 aa, Homo sapiens
  REGION 1..47: note = ENSP00000457767
  VARIANT 1: note = Any amino acid
XNEDDAKAARDAQECLALSPRLEYSGMISAHCNLHLLGSSDSPASAS

SEQ ID NO: 24769 - protein, 114 aa, Homo sapiens
  REGION 1..114: note = ENSP00000477687
RSRAALQRYLFYCNRYMNHMQSLRFEHKLYAQVKQKMEEMQQHNMSWIENNQADLENATEVLSGYLERDISQDSLQDIKQKVQDKYRYCESRRRVLLQHVHEGYEKDLWEYIED

SEQ ID NO: 24770 - protein, 200 aa, Homo sapiens
  REGION 1..200: note = ENSP00000379897
MGNGLSDQTSILSNLPSFQSFHIVILGLDCAGKTTVLYRLQFNEFVNTVPTKGFNTEKIKVTLGNSKTVTFHFWDVGGQEKLRPLWKSYTRCTDGIVFVVDSVDVERMEEAKTELHKITRISENQGVPVLIVANKQDLRNSLSLSEIEKLLAMGELSSSTPWHLQPTCAIIGDGLKEGLEKLHDMIIKRRKMLRQQKKKR

SEQ ID NO: 24771 - protein, 200 aa, Homo sapiens; identical to SEQ ID NO: 24770
  REGION 1..200: note = ENSP00000349250

SEQ ID NO: 24772 - protein, 200 aa, Homo sapiens; identical to SEQ ID NO: 24770
  REGION 1..200: note = ENSP00000379899

SEQ ID NO: 24773 - protein, 50 aa, Homo sapiens
  REGION 1..50: note = ENSP00000397651
MGNGLSDQTSILSNLPSFQSFHIVILGLDCAGKTTVLYRLQFNEFVNTVP

SEQ ID NO: 24774 - protein, 200 aa, Homo sapiens; identical to SEQ ID NO: 24770
  REGION 1..200: note = ENSP00000385236

SEQ ID NO: 24775 - protein, 200 aa, Homo sapiens; identical to SEQ ID NO: 24770
  REGION 1..200: note = ENSP00000379898

SEQ ID NO: 24776 - protein, 179 aa, Homo sapiens
  REGION 1..179: note = ENSP00000366487
MGLIFAKLWSLFCNQEHKVIIVGLDNAGKTTILYQFLMNEVVHTSPTIGSNVEEIVVKNTHFLMWDIGGQESLRSSWNTYYSNTEFIILVVDSIDRERLAITKEELYRMLAHEDLRKAAVLIFANKQDMKGCMTAAEISKYLTLSSIKDHPWHIQSCCALTGEGLCQGLEWMTSRIGVR

SEQ ID NO: 24777 - protein, 453 aa, Homo sapiens
  REGION 1..453: note = ENSP00000361917
MGRTREAGCVAAGVVIGAGACYCVYRLAWGRDENEKIWDEDEESTDTSEIGVETVKGAKTNAGAGSGAKLQGDSEVKPEVSLGLEDCPGVKEKAHSGSHSGGGLEAKAKALFNTLKEQASAKAGKGARVGTISGNRTLAPSLPCPGGRGGGCHPTRSGSRAGGRASGKSKGKARSKSTRAPATTWPVRRGKFNFPYKIDDILSAPDLQKVLNILERTNDPFIQEVALVTLGNNAAYSFNQNAIRELGGVPIIAKLIKTKDPIIREKTYNALNNLSVNAENQGKIKTYISQVCDDTMVCRLDSAVQMAGLRLLTNMTVTNHYQHLLSYSFPDFFALLFLGNHFTKIQIMKLIINFTENPAMTRELVSCKVPSELISLFNKEWDREILLNILTLFENINDNIKNEGLASSRKEFSRSSLFFLFKESGVCVKKIKALANHNDLVVKVKVLKVLTKL

SEQ ID NO: 24778 - protein, 717 aa, Homo sapiens
  REGION 1..717: note = ENSP00000307479
MATPAAVNPPEMASDIPGSVTLPVAPMAATGQVRMAGAMPARGGKRRSGMDFDDEDGEGPSKFSRENHSEIERRRRNKMTQYITELSDMVPTCSALARKPDKLTILRMAVSHMKSMRGTGNKSTDGAYKPSFLTEQELKHLILEAADGFLFVVAAETGRVIYVSDSVTPVLNQPQSEWFGSTLYEQVHPDDVEKLREQLCTSENSMTGRILDLKTGTVKKEGQQSSMRMCMGSRRSFICRMRCGNAPLDHLPLNRITTMRKRFRNGLGPVKEGEAQYAVVHCTGYIKAWPPAGMTIPEEDADVGQGSKYCLVAIGRLQVTSSPVCMDMNGMSVPTEFLSRHNSDGIITFVDPRCISVIGYQPQDLLGKDILEFCHPEDQSHLRESFQQVVKLKGQVLSVMYRFRTKNREWMLIRTSSFTFQNPYSDEIEYIICTNTNVKQLQQQQAELEVHQRDGLSSYDLSQVPVPNLPAGVHEAGKSVEKADAIFSQERDPRFAEMFAGISASEKKMMSSASAAGTQQIYSQGSPFPSGHSGKAFSSSVVHVPGVNDIQSSSSTGQNMSQISRQLNQSQVAWTGSRPPFPGQQIPSQSSKTQSSPFGIGTSHTYPADPSSYSPLSSPATSSPSGNAYSSLANRTPGFAESGQSSGQFQGRPSEVWSQWQSQHHGQQSGEQHSHQQPGQTEVFQDMLPMPGDPTQGTGNYNIEDFADLGMFPPFSE

SEQ ID NO: 24779 - protein, 706 aa, Homo sapiens
  REGION 1..706: note = ENSP00000453651
MASDIPGSVTLPVAPMAATGQVRMAGAMPARGGKRRSGMDFDDEDGEGPSKFSRENHSEIERRRRNKMTQYITELSDMVPTCSALARKPDKLTILRMAVSHMKSMRGTGNKSTDGAYKPSFLTEQELKHLILEAADGFLFVVAAETGRVIYVSDSVTPVLNQPQSEWFGSTLYEQVHPDDVEKLREQLCTSENSMTGRILDLKTGTVKKEGQQSSMRMCMGSRRSFICRMRCGNAPLDHLPLNRITTMRKRFRNGLGPVKEGEAQYAVVHCTGYIKAWPPAGMTIPEEDADVGQGSKYCLVAIGRLQVTSSPVCMDMNGMSVPTEFLSRHNSDGIITFVDPRCISVIGYQPQDLLGKDILEFCHPEDQSHLRESFQQVVKLKGQVLSVMYRFRTKNREWMLIRTSSFTFQNPYSDEIEYIICTNTNVKQLQQQQAELEVHQRDGLSSYDLSQVPVPNLPAGVHEAGKSVEKADAIFSQERDPRFAEMFAGISASEKKMMSSASAAGTQQIYSQGSPFPSGHSGKAFSSSVVHVPGVNDIQSSSSTGQNMSQISRQLNQSQVAWTGSRPPFPGQQIPSQSSKTQSSPFGIGTSHTYPADPSSYSPLSSPATSSPSGNAYSSLANRTPGFAESGQSSGQFQGRPSEVWSQWQSQHHGQQSGEQHSHQQPGQTEVFQDMLPMPGDPTQGTGNYNIEDFADLGMFPPFSE

SEQ ID NO: 24780 - protein, 706 aa, Homo sapiens; identical to SEQ ID NO: 24779
  REGION 1..706: note = ENSP00000453792

SEQ ID NO: 24781 - protein, 130 aa, Homo sapiens
  REGION 1..130: note = ENSP00000452961
MRMCMGSRRSFICRMRCGNAPLDHLPLNRITTMRKRFRNGLGPVKEGEAQYAVVHCTGYIKAWPPAGMTIPEEDADVGQGSKYCLVAIGRLQVTSSPVCMDMNGMSVPTEFLSRHNSDGIITFVDPRCIS

SEQ ID NO: 24782 - protein, 716 aa, Homo sapiens [sequence omitted]

SEQ ID NO: 24783 - protein, 104 aa, Homo sapiens
  REGION 1..104: note = ENSP00000411644
MSEQGDLNQAIAEEGGTEQETATPENGIVKSESLDEEEKLELQRRLEAQNQERRKSKSGAGKGKLTRSLAVCEESSARPGGESLQDQESIHLQLSSFSSLQEED

SEQ ID NO: 24784 - protein, 89 aa, Homo sapiens
  REGION 1..89: note = ENSP00000412411
MSEQGDLNQAIAEEGGTEQETATPENGIVKSESLDEEEKLELQRRLEAQNQERRKSKSGAGKGKLTRSLAVCEESSARPGGESLQDQTL

SEQ ID NO: 24785 - protein, 32 aa, Homo sapiens
  REGION 1..32: note = ENSP00000398598
MSEQGDLNQAIAEEGGTEQETATPENGIVKSE

SEQ ID NO: 24786 - protein, 793 aa, Homo sapiens
  REGION 1..793: note = ENSP00000405276
MSEQGDLNQAIAEEGGTEQETATPENGIVKSESLDEEEKLELQRRLEAQNQERRKSKSGAGKGKLTRSLAVCEESSARPGGESLQDQESIHLQLSSFSSLQEEDKSRKDDSEREKEKDKNKDKTSEKPKIRMLSKDCSQEYTDSTGIDLHEFLINTLKNNSRDRMILLKMEQEIIDFIADNNNHYKKFPQMSSYQRMLVHRVAAYFGLDHNVDQTGKSVIINKTSSTRIPEQRFCEHLKDEKGEESQKRFILKRDNSSIDKEDNQSVCSQESLFVENRGNRDGSGRTSGSRQSSSENELKWSDHQRAWSSTDSDSSNRNLKPAMTKTASFGGITVLTRGDSTSSTRSTGKLSKAGSESSSSAGSSGSLSRTHPPLQSTPLVSGVAAGSPGCVPYPENGIGGQVAPSSTSYILLPLEAATGIPPGSILLNPHTGQPFVNPDGTPAIYNPPTSQQPLRSAMVGQSQQQPPQQQPSPQPQQQVQPPQPQMAGPLVTQSVQGLQASSQSVQYPAVSFPPQHLLPVSPTQHFPMRDDVATQFGQMTLSRQSSGETPEPPSGPVYPSSLMPQPAQQPSYVIASTGQQLPTGGFSGSGPPISQQVLQPPPSPQGFVQQPPPAQMPVYYYPSGQYPTSTTQQYRPMAPVQYNAQRSQQMPQAAQQAGYQPVLSGQQGFQGLIGVQQPPQSQNVINNQQGTPVQSVMVSYPTMSSYQVPMTQGSQGLPQQSYQQPIMLPNQAGQGSLPATGMPVYCNVTPPTPQNNLRLIGPHCPSSTVPVMSASCRTNCASMSNAGWQVKF

SEQ ID NO: 24787 - protein, 54 aa, Homo sapiens
  REGION 1..54: note = ENSP00000409808
MSEQGDLNQAIAEEGGTEQETATPENGIVKSESLDEEEKLELQRRLEAQNQERR

SEQ ID NO: 24788 - protein, 812 aa, Homo sapiens
  REGION 1..812: note = ENSP00000187397
MSEQGDLNQAIAEEGGTEQETATPENGIVKSESLDEEEKLELQRRLEAQNQERRKSKSGAGKGKLTRSLAVCEESSARPGGESLQDQESIHLQLSSFSSLQEEDKSRKDDSEREKEKDKNKDKTSEKPKIRMLSKDCSQEYTDSTGIDLHEFLINTLKNNSRDRMILLKMEQEIIDFIADNNNHYKKFPQMSSYQRMLVHRVAAYFGLDHNVDQTGKSVIINKTSSTRIPEQRFCEHLKDEKGEESQKRFILKRDNSSIDKEDNQQNRMHPFRDDRRSKSIEEREEEYQRVRERIFAHDSVCSQESLFVENSRLLEDSNICNETYKKRQLFRGNRDGSGRTSGSRQSSSENELKWSDHQRAWSSTDSDSSNRNLKPAMTKTASFGGITVLTRGDSTSSTRSTGKLSKAGSESSSSAGSSGSLSRTHPPLQSTPLVSGVAAGSPGCVPYPENGIGGQVAPSSTSYILLPLEAATGIPPGSILLNPHTGQPFVNPDGTPAIYNPPTSQQPLRSAMVGQSQQQPPQQQPSPQPQQQVQPPQPQMAGPLVTQRDDVATQFGQMTLSRQSSGETPEPPSGPVYPSSLMPQPAQQPSYVIASTGQQLPTGGFSGSGPPISQQVLQPPPSPQGFVQQPPPAQMPVYYYPSGQYPTSTTQQYRPMAPVQYNAQRSQQMPQAAQQAGYQPVLSGQQGFQGLIGVQQPPQSQNVINNQQGTPVQSVMVSYPTMSSYQVPMTQGSQGLPQQSYQQPIMLPNQAGQGSLPATGMPVYCNVTPPTPQNNLRLIGPHCPSSTVPVMSASCRTNCASMSNAGWQVKF

SEQ ID NO: 24789 - protein, 96 aa, Homo sapiens
  REGION 1..96: note = ENSP00000396324
MSEQGDLNQAIAEEGGTEQETATPENGIVKSESLDEEEKLELQRRLEAQNQERRKSKSGAGKGKLTRSLAVCEESSARPGGESLQDQVYPLAIIIN

SEQ ID NO: 24790 - protein, 94 aa, Homo sapiens
  REGION 1..94: note = ENSP00000409331
MSEQGDLNQAIAEEGGTEQETATPENGIVKSESLDEEEKLELQRRLEAQNQERRKSKSGAGKGKLTRSLAVCEESSARPGGESLQDQESIHLQL

SEQ ID NO: 24791 - protein, 98 aa, Homo sapiens
  REGION 1..98: note = ENSP00000415134
MSEQGDLNQAIAEEGGTEQETATPENGIVKSESLDEEEKLELQRRLEAQNQERRKSKSGAGKGKLTRSLAVCEESSARPGGESLQDQIAAKNTRILQA

SEQ ID NO: 24792 - protein, 43 aa, Homo sapiens
  REGION 1..43: note = ENSP00000413005
MSEQGDLNQAIAEEGGTEQETATPENGIVKSESLDEEEKLELQ

SEQ ID NO: 24793 - protein, 89 aa, Homo sapiens; identical to SEQ ID NO: 24784
  REGION 1..89: note = ENSP00000401602

SEQ ID NO: 24794 - protein, 89 aa, Homo sapiens; identical to SEQ ID NO: 24784
  REGION 1..89: note = ENSP00000417838

SEQ ID NO: 24795 - protein, 89 aa, Homo sapiens; identical to SEQ ID NO: 24784
  REGION 1..89: note = ENSP00000390151

SEQ ID NO: 24796 - protein, 89 aa, Homo sapiens; identical to SEQ ID NO: 24784
  REGION 1..89: note = ENSP00000379742

SEQ ID NO: 24797 - protein, 89 aa, Homo sapiens; identical to SEQ ID NO: 24784
  REGION 1..89: note = ENSP00000389754

SEQ ID NO: 24798 - protein, 101 aa, Homo sapiens
  REGION 1..101: note = ENSP00000412341
MSEQGDLNQAIAEEGGTEQETATPENGIVKSESLDEEEKLELQRRLEAQNQERRKSKSGAGKGKLTRSLAVCEESSARPGGESLQDQVYPLAIIINCMNGI

SEQ ID NO: 24799 - protein, 98 aa, Homo sapiens
  REGION 1..98: note = ENSP00000390169
MSEQGDLNQAIAEEGGTEQETATPENGIVKSESLDEEEKLELQRRLEAQNQERRKSKSGAGKGKLTRSLAVCEESSARPGGESLQDQESIHLQLSSFS

SEQ ID NO: 24800 - protein, 813 aa, Homo sapiens
  REGION 1..813: note = ENSP00000412326
MSEQGDLNQAIAEEGGTEQETATPENGIVKSESLDEEEKLELQRRLEAQNQERRKSKSGAGKGKLTRSLAVCEESSARPGGESLQDQESIHLQLSSFSSLQEEDKSRKDDSEREKEKDKNKDKTSEKPKIRMLSKDCSQEYTDSTGIDLHEFLINTLKNNSRDRMILLKMEQEIIDFIADNNNHYKKFPQMSSYQRMLVHRVAAYFGLDHNVDQTGKSVIINKTSSTRIPEQRFCEHLKDEKGEESQKRFILKRDNSSIDKEDNQSVCSQESLFVENSRLLEDSNICNETYKKRQLFRGNRDGSGRTSGSRQSSSENELKWSDHQRAWSSTDSDSSNRNLKPAMTKTASFGGITVLTRGDSTSSTRSTGKLSKAGSESSSSAGSSGSLSRTHPPLQSTPLVSGVAAGSPGCVPYPENGIGGQVAPSSTSYILLPLEAATGIPPGSILLNPHTGQPFVNPDGTPAIYNPPTSQQPLRSAMVGQSQQQPPQQQPSPQPQQQVQPPQPQMAGPLVTQSVQGLQASSQSVQYPAVSFPPQHLLPVSPTQHFPMRDDVATQFGQMTLSRQSSGETPEPPSGPVYPSSLMPQPAQQPSYVIASTGQQLPTGGFSGSGPPISQQVLQPPPSPQGFVQQPPPAQMPVYYYPSGQYPTSTTQQYRPMAPVQYNAQRSQQMPQAAQQAGYQPVLSGQQGFQGLIGVQQPPQSQNVINNQQGTPVQSVMVSYPTMSSYQVPMTQGSQGLPQQSYQQPIMLPNQAGQGSLPATGMPVYCNVTPPTPQNNLRLIGPHCPSSTVPVMSASCRTNCASMSNAGWQVKF

SEQ ID NO: 24801 - protein, 89 aa, Homo sapiens; identical to SEQ ID NO: 24784
  REGION 1..89: note = ENSP00000379741

SEQ ID NO: 24802 - protein, 89 aa, Homo sapiens; identical to SEQ ID NO: 24784
  REGION 1..89: note = ENSP00000406964

SEQ ID NO: 24803 - protein, 89 aa, Homo sapiens; identical to SEQ ID NO: 24784
  REGION 1..89: note = ENSP00000397720

SEQ ID NO: 24804 - protein, 89 aa, Homo sapiens; identical to SEQ ID NO: 24784
  REGION 1..89: note = ENSP00000410171

SEQ ID NO: 24805 - protein, 145 aa, Homo sapiens
  REGION 1..145: note = ENSP00000399482
  VARIANT 1: note = Any amino acid
XQEYTDSTGIDLHEFLINTLKNNSRDRMILLKMEQEIIDFIADNNNHYKKFPQMSSYQRMLVHRVAAYFGLDHNVDQTGKSVIINKTSSTRIPEQRFCEHLKDEKGEESQKRFILKRDNSSIDKEDNQLCPSVVHKLSWIINTDR

SEQ ID NO: 24806 - protein, 261 aa, Homo sapiens
  REGION 1..261: note = ENSP00000408271
  VARIANT 1: note = Any amino acid
XFCRDRMILLKMEQEIIDFIADNNNHYKKFPQMSSYQRMLVHRVAAYFGLDHNVDQTGKSVIINKTSSTRIQFAPRKAFLWKTVGSWKTVTYAMRPIRKDSSFGWGNRDGSGRTSGSRQSSSENELKWSDHQRAWSSTDSDSSNRNLKPAMTKTASFGGITVLTRGDSTSSTRSTGKLSKAGSESSSSAGSSGSLSRTHPPLQSTPLVSGVAAGSPGCVPYPENGIGGQVAPSSTSYILLPLEAATGIPPGSILLNPHTGE

SEQ ID NO: 24807 - protein, 124 aa, Homo sapiens
  REGION 1..124: note = ENSP00000396116
  VARIANT 1: note = Any amino acid
XCRDRMILLKMEQEIIDFIADNNNHYKKFPQMSSYQRMLVHRVAAYFGLDHNVDQTGKSVIINKTSSTRIQFAPRKAFLWKTGATEMAQGEHLGVDRAAQKMNSSGLTTKGPGAAQTPTVPTAI

SEQ ID NO: 24808 - protein, 241 aa, Homo sapiens
  REGION 1..241: note = ENSP00000412233
GSRQSSSENELKWSDHQRAWSSTDSDSSNRNLKPAMTKTASFGGITVLTRGDSTSSTRSTGKLSKAGSESSSSAGSSGSLSRTHPPLQSTPLVSGVAAGSPGCVPYPENGIGGQVAPSSTSYILLPLEAATGIPPGSILLNPHTALCESRWNSCNIQPTHQSAAPAKRHGGAVPTAATTAAALPAAPTAGPATAATDGRPSGHSVCPGAAGFLPVSAISSSLFSSPAPPTCVSNAALSHER

SEQ ID NO: 24809 - protein, 418 aa, Homo sapiens
  REGION 1..418: note = ENSP00000409581
MGDKGTRVFKKASPNGKLTVYLGKRDFVDHIDLVDPVDGVVLVDPEYLKERRVYVTLTCAFRYGREDLDVLGLTFRKDLFVANVQSFPPAPEDKKPLTRLQERLIKKLGEHAYPFTFEIPPNLPCSVTLQPGPEDTGKACGVDYEVKAFCAENLEEKIHKRNSVRLVIRKVQYAPERPGPQPTAETTRQFLMSDKPLHLEASLDKEIYYHGEPISVNVHVTNNTNKTVKKIKISVRQYADICLFNTAQYKCPVAMEEADDTVAPSSTFCKVYTLTPFLANNREKRGLALDGKLKHEDTNLASSTLLREGANREILGIIVSYKVKVKLVVSRGGLLGDLASSDVAVELPFTLMHPKPKEEPPHREVPENETPVDTNLIELDTNDDDIVFEDFARQRLKGMKDDKEEEEDGTGSPQLNNR

SEQ ID NO: 24810 - protein, 410 aa, Homo sapiens
  REGION 1..410: note = ENSP00000353124
MGDKGTRVFKKASPNGKLTVYLGKRDFVDHIDLVDPVDGVVLVDPEYLKERRVYVTLTCAFRYGREDLDVLGLTFRKDLFVANVQSFPPAPEDKKPLTRLQERLIKKLGEHAYPFTFEIPPNLPCSVTLQPGPEDTGKACGVDYEVKAFCAENLEEKIHKRNSVRLVIRKVQYAPERPGPQPTAETTRQFLMSDKPLHLEASLDKEIYYHGEPISVNVHVTNNTNKTVKKIKISVRQYADICLFNTAQYKCPVAMEEADDTVAPSSTFCKVYTLTPFLANNREKRGLALDGKLKHEDTNLASSTLLREGANREILGIIVSYKVKVKLVVSRGGDVAVELPFTLMHPKPKEEPPHREVPENETPVDTNLIELDTNDDDIVFEDFARQRLKGMKDDKEEEEDGTGSPQLNNR

SEQ ID NO: 24811 - protein, 195 aa, Homo sapiens
  REGION 1..195: note = ENSP00000436530
  VARIANT 1: note = Any amino acid
XRPGPQPTAETTRQFLMSDKPLHLEASLDKEIYYHGEPISVNVHVTNNTNKTVKKIKISVRQYADICLFNTAQYKCPVAMEEADDTVAPSSTFCKVYTLTPFLANNREKRGLALDGKLKHEDTNLASSTLLREGANREILGIIVSYKVKVKLVVSRGGDVAVELPFTLMHPKPKEEPPHREVMTTLYLRTLLARD

SEQ ID NO: 24812 - protein, 257 aa, Homo sapiens
  REGION 1..257: note = ENSP00000433171
MGVFKKASPNGKLTVYLGKRDFVDHIDLVDPVDGVVLVDPEYLKERRVYVTLTCAFRYGREDLDVLGLTFRKDLFVANVQSFPPAPEDKKPLTRLQERLIKKLGEHAYPFTFEIPPNLPCSVTLQPGPEDTGKACGVDYEVKAFCAENLEEKIHKRNSVRLVIRKVQYAPERPGPQPTAETTRQFLMSDKPLHLEASLDKEIYYHGEPISVNVHVTNNTNKTVKKIKISVRQYADICLFNTAQYKCPVAMEEADDTV

SEQ ID NO: 24813 - protein, 69 aa, Homo sapiens
  REGION 1..69: note = ENSP00000434196
  VARIANT 1: note = Any amino acid
XGGRRRERPAAATARDGRGEAMEGDLQRERLSSPSTWESGTLWTTSTSWTLWMVWSWWILSISKSGESM

SEQ ID NO: 24814 - protein, 59 aa, Homo sapiens
  REGION 1..59: note = ENSP00000436352
SHCKRWERRGHGRRLAAGEAESVQEGQSKWKAHRLPGKAGLCGPHRPRGPCGWCGPGGS

SEQ ID NO: 24815 - protein, 72 aa, Homo sapiens
  REGION 1..72: note = ENSP00000433137
  VARIANT 1: note = Any amino acid
XVCLPLPCRCSGETTPTPGPVPSAECSRRPVQMESSPSTWESGTLWTTSTSWTLWMVWSWWILSISKSGESM

SEQ ID NO: 24816 - protein, 414 aa, Homo sapiens
  REGION 1..414: note = ENSP00000265138
MVLGKVKSLTISFDCLNDSNVPVYSSGDTVSGRVNLEVTGEIRVKSLKIHARGHAKVRWTESRNAGSNTAYTQNYTEEVEYFNHKDILIGHERDDDNSEEGFHTIHSGRHEYAFSFELPQTPLATSFEGRHGSVRYWVKAELHRPWLLPVKLKKEFTVFEHIDINTPSLLSPQAGTKEKTLCCWFCTSGPISLSAKIERKGYTPGESIQIFAEIENCSSRMVVPKAAIYQTQAFYAKGKMKEVKQLVANLRGESLSSGKTETWNGKLLKIPPVSPSILDCSIIRVEYSLMVYVDIPGAMDLFLNLPLVIGTIPLHPFGSRTSSVSSQCSMNMNWLSLSLPERPEAPPSYAEVVTEEQRRNNLAPVSACDDFERALQGPLFAYIQEFRFLPPPLYSEIDPNPDQSADDRPSCPSR

SEQ ID NO: 24817 - protein, 525 aa, Homo sapiens
  REGION 1..525: note = ENSP00000407193
MGWLFLKVLLAGVSFSGFLYPLVDFCISGKTRGQKPNFVIILADDMGWGDLGANWAETKDTANLDKMASEGMRFVDFHAAASTCSPSRASLLTGRLGLRNGVTRNFAVTSVGGLPLNETTLAEVLQQAGYVTGIIGKWHLGHHGSYHPNFRGFDYYFGIPYSHDMGCTDTPGYNHPPCPACPQGDGPSRNLQRDCYTDVALPLYENLNIVEQPVNLSSLAQKYAEKATQFIQRASTSGRPFLLYVALAHMHVPLPVTQLPAAPRGRSLYGAGLWEMDSLVGQIKDKVDHTVKENTFLWFTGDNGPWAQKCELAGSVGPFTGFWQTRQGGSPAKQTTWEGGHRVPALAYWPGRVPVNVTSTALLSVLDIFPTVVALAQASLPQGRRFDGVDVSEVLFGRSQPGHRVLFHPNSGAAGEFGALQTVRLERYKAFYITGGARACDGSTGPELQHKFPLIFNLEDDTAEAVPLERGGAEYQAVLPEVRKVLADVLQDIANDNISSADYTQDPSVTPCCNPYQIACRCQAA

SEQ ID NO: 24818 - protein, 28 aa, Homo sapiens
  REGION 1..28: note = ENSP00000462306
MGWLFLKVLLAGVSFSGFLYPLVDFCIS

SEQ ID NO: 24819 - protein, 361 aa, Homo sapiens
  REGION 1..361: note = ENSP00000413953
MGCTDTPGYNHPPCPACPQGDGPSRNLQRDCYTDVALPLYENLNIVEQPVNLSSLAQKYAEKATQFIQRASTSGRPFLLYVALAHMHVPLPVTQLPAAPRGRSLYGAGLWEMDSLVGQIKDKVDHTVKENTFLWFTGDNGPWAQKCELAGSVGPFTGFWQTRQGGSPAKQTTWEGGHRVPALAYWPGRVPVNVTSTALLSVLDIFPTVVALAQASLPQGRRFDGVDVSEVLFGRSQPGHRVLFHPNSGAAGEFGALQTVRLERYKAFYITGGARACDGSTGPELQHKFPLIFNLEDDTAEAVPLERGGAEYQAVLPEVRKVLADVLQDIANDNISSADYTQDPSVTPCCNPYQIACRCQAA

SEQ ID NO: 24820 - protein, 525 aa, Homo sapiens; identical to SEQ ID NO: 24817
  REGION 1..525: note = ENSP00000480910

SEQ ID NO: 24821 - protein, 562 aa, Homo sapiens
  REGION 1..562: note = ENSP00000368332
MSNQYQEEGCSERPECKSKSPTLLSSYCIDSILGRRSPCKMRLLGAAQSLPAPLTSRADPEKAVQGSPKSSSAPFEAELHLPPKLRRLYGPGGGRLLQGAAAAAAAAAAAAAAAATATAGPRGEAPPPPPPTARPGERPDGAGAAAAAAAAAAAAWDTLKISQAPQVSISRSKSYRENGAPFVPPPPALDELGGPGGVTHPEERLGVAGGPGSAPAAGGGTGTEDDEEELLEDEEDEDEEEELLEDDEEELLEDDARALLKEPRRCPVAATGAVAAAAAAAVATEGGELSPKEELLLHPEDAEGKDGEDSVCLSAGSDSEEGLLKRKQRRYRTTFTSYQLEELERAFQKTHYPDVFTREELAMRLDLTEARVQVWFQNRRAKWRKREKAGAQTHPPGLPFPGPLSATHPLSPYLDASPFPPHHPALDSAWTAAAAAAAAAFPSLPPPPGSASLPPSGAPLGLSTFLGAAVFRHPAFISPAFGRLFSTMAPLTSASTAAALLRQPTPAVEGAVASGALADPATAAADRRASSIAALRLKAKEHAAQLTQLNILPGTSTGKEVC

SEQ ID NO: 24822 - protein, 48 aa, Homo sapiens
  REGION 1..48: note = ENSP00000490122
  VARIANT 1: note = Any amino acid
XTFLGAAVFRHPAFISPAFGRLHLPCHSSDPLPTTPPYVQAPIYTAVQ

SEQ ID NO: 24823 - protein, 407 aa, Homo sapiens
  REGION 1..407: note = ENSP00000436150
MGNTSFNEVMEAQLPSHGGPKPSAESDMGTRRDYIMAKYVEHRFARRCTPEPQRLWTAICNRDLLSVLEAFANGQDFGQPLPGPDAQAPEELVLHLAVKVANQASLPLVDFIIQNGGHLDAKAADGNTALHYAALYNQPDCLKLLLKGRALVGTVNEAGETALDIARKKHHKECEELLEQAQAGTFAFPLHVDYSWVISTEPGSDSEEDEEEKRCLLKLPAQAHWASGRLDISNKTYETVASLGAATPQGESEDCPPPLPVKNSSRTLVQGCARHASGDRSEVSSLSSEAPETPESLGSPASSSSLMSPLEPGDPSQAPPNSEEGLREPPGTSRPSLTSGTTPSEMYLPVRFSSESTRSYRRGARSPEDGPSARQPLPRRNVPVGITEGDGSRTGSLPASSVQLLQD

SEQ ID NO: 24824 - protein, 903 aa, Homo sapiens
  REGION 1..903: note = ENSP00000338769
MPEQFSVAEFLAVTAEDLSSPAGAAAFAAKMPRYRGAALAREEILEGDQAILQRIKKAVRAIHSSGLGHVENEEQYREAVESLGNSHLSQNSHELSTGFLNLAVFTREVAALFKNLIQNLNNIVSFPLDSLMKGQLRDGRQDSKKQLEKAWKDYEAKMAKLEKERDRARVTGGIPGEVAQDMQRERRIFQLHMCEYLLKAGESQMKQGPDFLQSLIKFFHAQHNFFQDGWKAAQSLFPFIEKLAASVHALHQAQEDELQKLTQLRDSLRGTLQLESREEHLSRKNSGCGYSIHQHQGNKQFGTEKVGFLYKKSDGIRRVWQKRKCGVKYGCLTISHSTINRPPVKLTLLTCQVRPNPEEKKCFDLVTHNRTYHFQAEDEHECEAWVSVLQNSKDEALSSAFLGEPSAGPGSWGSAGHDGEPHDLTKLLIAEVKSRPGNSQCCDCGAADPTWLSTNLGVLTCIQCSGVHRELGVRFSRMQSLTLDLLGPSELLLALNMGNTSFNEVMEAQLPSHGGPKPSAESDMGTRRDYIMAKYVEHRFARRCTPEPQRLWTAICNRDLLSVLEAFANGQDFGQPLPGPDAQAPEELVLHLAVKVANQASLPLVDFIIQNGGHLDAKAADGNTALHYAALYNQPDCLKLLLKGRALVGTVNEAGETALDIARKKHHKECEELLEQAQAGTFAFPLHVDYSWVISTEPGSDSEEDEEEKRCLLKLPAQAHWASGRLDISNKTYETVASLGAATPQGESEDCPPPLPVKNSSRTLVQGCARHASGDRSEVSSLSSEAPETPESLGSPASSSSLMSPLEPGDPSQAPPNSEEGLREPPGTSRPSLTSGTTPSEMYLPVRFSSESTRSYRRGARSPEDGPSARQPLPRRNVPVGITEGDGSRTGSLPASSVQLLQD

SEQ ID NO: 24825 - protein, 203 aa, Homo sapiens
  REGION 1..203: note = ENSP00000435394
LEQAQAGTFAFPLHVDYSWVISTEPGSDSEEDEEEKRCLLKLPAQAHWASGRLDISNKTYETVASLGAATPQGENRSEVSSLSSEAPETPESLGSPASSSSLMSPLEPGDPSQAPPNSEEGLREPPGTSRPSLTSGTTPSEMYLPVRFSSESTRSYRRGARSPEDGPSARQPLPRRNVPVGITEGDGSRTGSLPASSVQLLQD

SEQ ID NO: 24826 - protein, 44 aa, Homo sapiens
  REGION 1..44: note = ENSP00000435858
MPEQFSVAEFLAVTAEDLSSPAGAAAFAAKMPRSWKETKPSCRE

SEQ ID NO: 24827 - protein, 894 aa, Homo sapiens
  REGION 1..894: note = ENSP00000408826
MPEQFSVAEFLAVTAEDLSSPAGAAAFAAKMPRYRGAALAREEILEGDQAILQRIKKAVRAIHSSGLGHVENEEQYREAVESLGNSHLSQNSHELSTGFLNLAVFTREVAALFKNLIQNLNNIVSFPLDSLMKGQLRDGRQASLSLGSRAKLEKERDRARVTGGIPGEVAQDMQRERRIFQLHMCEYLLKAGESQMKQGPDFLQSLIKFFHAQHNFFQDGWKAAQSLFPFIEKLAASVHALHQAQEDELQKLTQLRDSLRGTLQLESREEHLSRKNSGCGYSIHQHQGNKQFGTEKVGFLYKKSDGIRRVWQKRKCGVKYGCLTISHSTINRPPVKLTLLTCQVRPNPEEKKCFDLVTHNRTYHFQAEDEHECEAWVSVLQNSKDEALSSAFLGEPSAGPGSWGSAGHDGEPHDLTKLLIAEVKSRPGNSQCCDCGAADPTWLSTNLGVLTCIQCSGVHRELGVRFSRMQSLTLDLLGPSELLLALNMGNTSFNEVMEAQLPSHGGPKPSAESDMGTRRDYIMAKYVEHRFARRCTPEPQRLWTAICNRDLLSVLEAFANGQDFGQPLPGPDAQAPEELVLHLAVKVANQASLPLVDFIIQNGGHLDAKAADGNTALHYAALYNQPDCLKLLLKGRALVGTVNEAGETALDIARKKHHKECEELLEQAQAGTFAFPLHVDYSWVISTEPGSDSEEDEEEKRCLLKLPAQAHWASGRLDISNKTYETVASLGAATPQGESEDCPPPLPVKNSSRTLVQGCARHASGDRSEVSSLSSEAPETPESLGSPASSSSLMSPLEPGDPSQAPPNSEEGLREPPGTSRPSLTSGTTPSEMYLPVRFSSESTRSYRRGARSPEDGPSARQPLPRRNVPVGITEGDGSRTGSLPASSVQLLQD

SEQ ID NO: 24828 - protein, 124 aa, Homo sapiens
  REGION 1..124: note = ENSP00000434897
  VARIANT 1: note = Any amino acid
XRFSRMQSLTLDLLGPSELLLALNMGNTSFNEVMEAQLPSHGGPKPSAESDMGTRRDYIMAKYVEHRFARRCTPEPQRLWTAICNRDLLSVLEAFANGQDFGQPLPGPDAQVRTPPRATYNPPV

SEQ ID NO: 24829 - protein, 120 aa, Homo sapiens
  REGION 1..120: note = ENSP00000436439
YLLKAGESQMKQGPDFLQSLIKFFHAQHNFFQDGWKAAQSLFPFIEKLAASVHALHQAQEDELQKLTQLRDSLRGTLQLESREEHLSRKNSGCGYSIHQHQGNKQFGTEKVGFLYKKSDG

SEQ ID NO: 24830 - protein, 157 aa, Homo sapiens
  REGION 1..157: note = ENSP00000476400
MPEQFSVAEFLAVTAEDLSSPAGAAAFAAKMPRYRGAALAREEILEGDQAILQRIKKAVRAIHSSGLGHVENEEQYREAVESLGNSHLSQNSHELSTGFLNLAVFTREVAALFKNLIQNLNNIVSFPLDSLMKGQLRDGRQDSKKQLEKAWKDYEAK

SEQ ID NO: 24831 - protein, 202 aa, Homo sapiens
  REGION 1..202: note = ENSP00000483740
MPEQFSVAEFLAVTAEDLSSPAGAAAFAAKMPRYRGAALAREEILEGDQAILQRIKKAVRAIHSSGLGHVENEEQYREAVESLGNSHLSQNSHELSTGFLNLAVFTREVAALFKNLIQNLNNIVSFPLDSLMKGQLRDGRQDSKKQLEKAWKDYEAKMAKLEKERDRARVTGGIPGNLGIPAKPHPTLKRASESPQAPPDPA

SEQ ID NO: 24832 - protein, 407 aa, Homo sapiens; identical to SEQ ID NO: 24823
  REGION 1..407: note = ENSP00000488934

SEQ ID NO: 24833 - protein, 903 aa, Homo sapiens; identical to SEQ ID NO: 24824
  REGION 1..903: note = ENSP00000488946

SEQ ID NO: 24834 - protein, 202 aa, Homo sapiens; identical to SEQ ID NO: 24831
  REGION 1..202: note = ENSP00000489432

SEQ ID NO: 24835 - protein, 203 aa, Homo sapiens; identical to SEQ ID NO: 24825
  REGION 1..203: note = ENSP00000489483

SEQ ID NO: 24836 - protein, 44 aa, Homo sapiens; identical to SEQ ID NO: 24826
  REGION 1..44: note = ENSP00000489485

SEQ ID NO: 24837 - protein, 894 aa, Homo sapiens; identical to SEQ ID NO: 24827
  REGION 1..894: note = ENSP00000488953

SEQ ID NO: 24838 - protein, 124 aa, Homo sapiens; identical to SEQ ID NO: 24828
  REGION 1..124: note = ENSP00000489344
  VARIANT 1: note = Any amino acid

SEQ ID NO: 24839 - protein, 120 aa, Homo sapiens; identical to SEQ ID NO: 24829
  REGION 1..120: note = ENSP00000489094

SEQ ID NO: 24840 - protein, 157 aa, Homo sapiens; identical to SEQ ID NO: 24830
  REGION 1..157: note = ENSP00000489187

SEQ ID NO: 24841 - protein, 236 aa, Homo sapiens
  REGION 1..236: note = ENSP00000266744
MESSAKMESGGAGQQPQPQPQQPFLPPAACFFATAAAAAAAAAAAAAQSAQQQQQQQQQQQQAPQLRPAADGQPSGGGHKSAPKQVKRQRSSSPELMRCKRRLNFSGFGYSLPQQQPAAVARRNERERNRVKLVNLGFATLREHVPNGAANKKMSKVETLRSAVEYIRALQQLLDEHDAVSAAFQAGVLSPTISPNYSNDLNSMAGSPVSSYSSDEGSYDPLSPEEQELLDFTNWF

SEQ ID NO: 24842 - protein, 291 aa, Homo sapiens
  REGION 1..291: note = ENSP00000269299
MTKEYQDLQHLDNEESDHHQLRKGPPPPQPLLQRLCSGPRLLLLSLGLSLLLLVVVCVIGSQNSQLQEELRGLRETFSNFTASTEAQVKGLSTQGGNVGRKMKSLESQLEKQQKDLSEDHSSLLLHVKQFVSDLRSLSCQMAALQGNGSERTCCPVNWVEHERSCYWFSRSGKAWADADNYCRLEDAHLVVVTSWEEQKFVQHHIGPVNTWMGLHDQNGPWKWVDGTDYETGFKNWRPEQPDDWYGHGLGGGEDCAHFTDDGRWNDDVCQRPYRWVCETELDKASQEPPLL

SEQ ID NO: 24843 - protein, 190 aa, Homo sapiens
  REGION 1..190: note = ENSP00000370307
MKSLESQLEKQQKDLSEDHSSLLLHVKQFVSDLRSLSCQMAALQGNGSERTCCPVNWVEHERSCYWFSRSGKAWADADNYCRLEDAHLVVVTSWEEQKFVQHHIGPVNTWMGLHDQNGPWKWVDGTDYETGFKNWRPEQPDDWYGHGLGGGEDCAHFTDDGRWNDDVCQRPYRWVCETELDKASQEPPLL

SEQ ID NO: 24844 - protein, 162 aa, Homo sapiens
  REGION 1..162: note = ENSP00000467511
  VARIANT 1: note = Any amino acid
XRETFSNFTASTEAQVKGLSTQGGNVGRKMKSLESQLEKQQKDLSEDHSSLLLHVKQFVSDLRSLSCQMAALQGNGSERTCCPVNWVEHERSCYWFSRSGKAWADADNYCRLEDAHLVVVTSWEEQKFVQHHIGPVNTWMGLHDQNGPWKWVDGTDYETGFK

SEQ ID NO: 24845 - protein, 252 aa, Homo sapiens
  REGION 1..252: note = ENSP00000459169
MTKEYQDLQHLDNEESDHHQLRKDSQLQEELRGLRETFSNFTASTEAQVKGLSTQGGNVGRKMKSLESQLEKQQKDLSEDHSSLLLHVKQFVSDLRSLSCQMAALQGNGSERTCCPVNWVEHERSCYWFSRSGKAWADADNYCRLEDAHLVVVTSWEEQKFVQHHIGPVNTWMGLHDQNGPWKWVDGTDYETGFKNWRPEQPDDWYGHGLGGGEDCAHFTDDGRWNDDVCQRPYRWVCETELDKASQEPPLL

SEQ ID NO: 24846 - protein, 94 aa, Homo sapiens
  REGION 1..94: note = ENSP00000458530
MAALQGNGSERTCCPVNWVEHERSCYWFSRSGKAWADADNYCRLEDAHLVVVTSWEEQKFVQHHIGPVNTWMGLHDQNGPWKWVDGTDYETGFK

SEQ ID NO: 24847 - protein, 29 aa, Homo sapiens
  REGION 1..29: note = ENSP00000458803
MKSLESQLEKQQKDLSEDHSSLLLHVKQF

SEQ ID NO: 24848 - protein, 117 aa, Homo sapiens
  REGION 1..117: note = ENSP00000459896
MTKEYQDLQHLDNEESDHHQLRKGPPPPQPLLQRLCSGPRLLLLSLGLSLLLLVVVCVIGSQNSQLQEELRGLRETFSNFTASTEAQVKGLSTQGGNVGRKMKSLESQLEKQQKDLS

SEQ ID NO: 24849 - protein, 252 aa, Homo sapiens; identical to SEQ ID NO: 24845
  REGION 1..252: note = ENSP00000481182

SEQ ID NO: 24850 - protein, 574 aa, Homo sapiens
  REGION 1..574: note = ENSP00000228468
MELKAEEEEVGGVQPVSIQAFASSSTLHGLAHIFSYERLSLKRALWALCFLGSLAVLLCVCTERVQYYFHYHHVTKLDEVAASQLTFPAVTLCNLNEFRFSQVSKNDLYHAGELLALLNNRYEIPDTQMADEKQLEILQDKANFRSFKPKPFNMREFYDRAGHDIRDMLLSCHFRGEVCSAEDFKVVFTRYGKCYTFNSGRDGRPRLKTMKGGTGNGLEIMLDIQQDEYLPVWGETDETSFEAGIKVQIHSQDEPPFIDQLGFGVAPGFQTFVACQEQRLIYLPPPWGTCKAVTMDSDLDFFDSYSITACRIDCETRYLVENCNCRMVHMPGDAPYCTPEQYKECADPALDFLVEKDQEYCVCEMPCNLTRYGKELSMVKIPSKASAKYLAKKFNKSEQYIGENILVLDIFFEVLNYETIEQKKAYEIAGLLGELLMTPVPFSCHGHGVAPYHPKAGCSLLSHEGPPPQRPFPKPCCLGDIGGQMGLFIGASILTVLELFDYAYEVIKHKLCRRGKCQKEAKRSSADKGVALSLDDVKRHNPCESLRGHPAGMTYAANILPHHPARGTFEDFTC

SEQ ID NO: 24851 - protein, 528 aa, Homo sapiens
  REGION 1..528: note = ENSP00000400228
MELKAEEEEVGGVQPVSIQAFASSSTLHGLAHIFSYERLSLKRALWALCFLGSLAVLLCVCTERVQYYFHYHHVTKLDEVAASQLTFPAVTLCNLNEFRFSQVSKNDLYHAGELLALLNNRYEIPDTQMADEKQLEILQDKANFRSFKPKPFNMREFYDRAGHDIRDMLLSCHFRGEVCSAEDFKVVFTRYGKCYTFNSGRDGRPRLKTMKGGTGNGLEIMLDIQQDEYLPVWGETDETSFEAGIKVQIHSQDEPPFIDQLGFGVAPGFQTFVACQEQRLIYLPPPWGTCKAVTMDSDLDFFDSYSITACRIDCETRYLVENCNCRMVHMPGDAPYCTPEQYKECADPALDFLVEKDQEYCVCEMPCNLTRYGKELSMVKIPSKASAKYLAKKFNKSEQYIGENILVLDIFFEVLNYETIEQKKAYEIAGLLGDIGGQMGLFIGASILTVLELFDYAYEVIKHKLCRRGKCQKEAKRSSADKGVALSLDDVKRHNPCESLRGHPAGMTYAANILPHHPARGTFEDFTC

SEQ ID NO: 24852 - protein, 263 aa, Homo sapiens
  REGION 1..263: note = ENSP00000448263
MELKAEEEEVGGVQPVSIQAFASSSTLHGLAHIFSYERLSLKRALWALCFLGSLAVLLCVCTERVQYYFHYHHVTKLDEVAASQLTFPAVTLCNLNEFRFSQVSKNDLYHAGELLALLNNRYEIPDTQMADEKQLEILQDKANFRSFKPKPFNMREFYDRAGHDIRDMLLSCHFRGEVCSAEDFKVKPMQVAKELRRCTLPGTVFQGTQRARKGLHTLWKVLHVQLGPRWAAAAEDHEGWDGQWAGNHAGHPAGRVPACVGGD

SEQ ID NO: 24853 - protein, 396 aa, Homo sapiens
  REGION 1..396: note = ENSP00000402896
  VARIANT 1: note = Any amino acid
XIRDMLLSCHFRGEVCSAEDFKVKPMQVAKELRRCTLPGTVFQGTQRARKGEKQVFTRYGKCYTFNSGRDGRPRLKTMKGGTGNGLEIMLDIQQDEYLPVWGETDETSFEAGIKVQIHSQDEPPFIDQLGFGVAPGFQTFVACQEQRLIYLPPPWGTCKAVTMDSDLDFFDSYSITACRIDCETRYLVENCNCRMVHMPGDAPYCTPEQYKECADPALDFLVEKDQEYCVCEMPCNLTRYGKELSMVKIPSKASAKYLAKKFNKSEQYIGENILVLDIFFEVLNYETIEQKKAYEIAGLLGDIGGQMGLFIGASILTVLELFDYAYEVIKHKLCRRGKCQKEAKRSSADKGVALSLDDVKRHNPCESLRGHPAGMTYAANILPHHPARGTFEDFTC

SEQ ID NO: 24854 - protein, 562 aa, Homo sapiens
  REGION 1..562: note = ENSP00000450247
MPIQIFCSMSFSSGEEAPGPLGDIWGPHHHQQQQDISESEEEEEEKEKEAVRKEASEGHSPMDLVAFANSCTLHGTNHIFVEGGPGPRQVLWAVAFVLALGAFLCQVGDRVAYYLSYPHVTLLNEVATTELAFPAVTLCNTNAVRLSQLSYPDLLYLAPMLGLDESDDPGVPLAPPGPEAFSGEPFNLHRFYNRSCHRLEDMLLYCSYQGGPCGPHNFSVVFTRYGKCYTFNSGRDGRPRLKTMKGGTGNGLEIMLDIQQDEYLPVWGETDETSFEAGIKVQIHSQDEPPFIDQLGFGVAPGFQTFVACQEQRLIYLPPPWGTCKAVTMDSDLDFFDSYSITACRIDCETRYLVENCNCRMVHMPGDAPYCTPEQYKECADPALDFLVEKDQEYCVCEMPCNLTRYGKELSMVKIPSKASAKYLAKKFNKSEQYIGENILVLDIFFEVLNYETIEQKKAYEIAGLLGDIGGQMGLFIGASILTVLELFDYAYEVIKHKLCRRGKCQKEAKRSSADKGVALSLDDVKRHNPCESLRGHPAGMTYAANILPHHPARGTFEDFTC

SEQ ID NO: 24855 - protein, 127 aa, Homo sapiens
  REGION 1..127: note = ENSP00000446863
  VARIANT 1: note = Any amino acid
XENILVLDIFFEVLNYETIEQKKAYEIAGLLGDIGGQMGLFIGASILTVLELFDYAYEVIKHKLCRRGKCQKEAKRSSADKGVALSLDDVKRHNPCESLRGHPAGMTYAANILPHHPARGTFEDFTC

SEQ ID NO: 24856 - protein, 563 aa, Homo sapiens
  REGION 1..563: note = ENSP00000225823
MSRIGGAGLPAAALTGPGRFRMAREEPAPAALAAAGQPGGGRGGERALQGPGVARRGRPSLSRAKLHGLRHMCAGRTAAGGSFQRRALWVLAFCTSFGLLLSWSSNRLLYWLSFPSHTRVHREWSRQLPFPAVTVCNNNPLRFPRLSKGDLYYAGHWLGLLLPNRTARPLVSELLRGDEPRRQWFRKLADFRLFLPPRHFEGISAAFMDRLGHQLEDMLLSCKYRGELCGPHNFSSVFTKYGKCYMFNSGEDGKPLLTTVKGGTGNGLEIMLDIQQDEYLPIWGETEETTFEAGVKVQIHSQSEPPFIQELGFGVAPGFQTFVATQEQRLTYLPPPWGECRSSEMGLDFFPVYSITACRIDCETRYIVENCNCRMVHMPGDAPFCTPEQHKECAEPALGLLAEKDSNYCLCRTPCNLTRYNKELSMVKIPSKTSAKYLEKKFNKSEKYISENILVLDIFFEALNYETIEQKKAYEVAALLGDIGGQMGLFIGASILTILELFDYIYELIKEKLLDLLGKEEDEGSHDENVSTCDTMPNHSETISHTVNVPLQTTLGTLEEIAC

SEQ ID NO: 24857 - protein, 512 aa, Homo sapiens
  REGION 1..512: note = ENSP00000352934
MDLKESPSEGSLQPSSIQIFANTSTLHGIRHIFVYGPLTIRRVLWAVAFVGSLGLLLVESSERVSYYFSYQHVTKVDEVVAQSLVFPAVTLCNLNGFRFSRLTTNDLYHAGELLALLDVNLQIPDPHLADPSVLEALRQKANFKHYKPKQFSMLEFLHRVGHDLKDMMLYCKFKGQECGHQDFTTVFTKYGKCYMFNSGEDGKPLLTTVKGGTGNGLEIMLDIQQDEYLPIWGETEETTFEAGVKVQIHSQSEPPFIQELGFGVAPGFQTFVATQEQRLTYLPPPWGECRSSEMGLDFFPVYSITACRIDCETRYIVENCNCRMVHMPGDAPFCTPEQHKECAEPALGLLAEKDSNYCLCRTPCNLTRYNKELSMVKIPSKTSAKYLEKKFNKSEKYISENILVLDIFFEALNYETIEQKKAYEVAALLGDIGGQMGLFIGASILTILELFDYIYELIKEKLLDLLGKEEDEGSHDENVSTCDTMPNHSETISHTVNVPLQTTLGTLEEIAC

SEQ ID NO: 24858 - protein, 647 aa, Homo sapiens
  REGION 1..647: note = ENSP00000326627
MLSGAAGAARRGGAALAPSLTRSLAGTHAGADSCAGADKGSHKETIEERDKRQQRQQRQRQHQGCGAAGSGSDSPTSGPHPVPVLFPLALSLEEQPLPPLPLGRAPGLLAREGQGREALASPSSRGQMPIEIVCKIKFAEEDAKPKEKEAGDEQSLLGAVAPGAAPRDLATFASTSTLHGLGRACGPGPHGLRRTLWALALLTSLAAFLYQAAGLARGYLTRPHLVAMDPAAPAPVAGFPAVTLCNINRFRHSALSDADIFHLANLTGLPPKDRDGHRAAGLRYPEPDMVDILNRTGHQLADMLKSCNFSGHHCSASNFSVVYTRYGKCYTFNADPRSSLPSRAGGMGSGLEIMLDIQQEEYLPIWRETNETSFEAGIRVQIHSQEEPPYIHQLGFGVSPGFQTFVSCQEQRLTYLPQPWGNCRAESELREPELQGYSAYSVSACRLRCEKEAVLQRCHCRMVHMPDSLGGGPEGPCFCPTPCNLTRYGKEISMVRIPNRGSARYLARKYNRNETYIRENFLVLDVFFEALTSEAMEQRAAYGLSALLGDLGGQMGLFIGASILTLLEILDYIYEVSWDRLKRVWRRPKTPLRTSTGGISTLGLQELKEQSPCPSRGRVEGGGVSSLLPNHHHPHGPPGGLFEDFAC

SEQ ID NO: 24859 - protein, 666 aa, Homo sapiens
  REGION 1..666: note = ENSP00000350786
MLSGAAGAARRGGAALAPSLTRSLAGTHAGADSCAGADKGSHKETIEERDKRQQRQQRQRQHQGCGAAGSGSDSPTSGPHPVPVLFPLALSLEEQPLPPLPLGRAPGLLAREGQGREALASPSSRGQMPIEIVCKIKFAEEDAKPKEKEAGDEQSLLGAVAPGAAPRDLATFASTSTLHGLGRACGPGPHGLRRTLWALALLTSLAAFLYQAAGLARGYLTRPHLVAMDPAAPAPVAGFPAVTLCNINRFRHSALSDADIFHLANLTGLPPKDRDGHRAAGLRYPEPDMVDILNRTGHQLADMLKSCNFSGHHCSASNFSVVYTRYGKCYTFNADPRSSLPSRAGGMGSGLEIMLDIQQEEYLPIWRETNETSFEAGIRVQIHSQEEPPYIHQLGFGVSPGFQTFVSCQEQRLTYLPQPWGNCRAESELREPELQGYSAYSVSACRLRCEKEAVLQRCHCRMVHMPGNETICPPNIYIECADHTLDSLGGGPEGPCFCPTPCNLTRYGKEISMVRIPNRGSARYLARKYNRNETYIRENFLVLDVFFEALTSEAMEQRAAYGLSALLGDLGGQMGLFIGASILTLLEILDYIYEVSWDRLKRVWRRPKTPLRTSTGGISTLGLQELKEQSPCPSRGRVEGGGVSSLLPNHHHPHGPPGGLFEDFAC

SEQ ID NO: 24860 - protein, 561 aa, Homo sapiens
  REGION 1..561: note = ENSP00000377846
MCGIWALFGSDDCLSVQCLSAMKIAHRGPDAFRFENVNGYTNCCFGFHRLAVVDPLFGMQPIRVKKYPYLWLCYNGEIYNHKKMQQHFEFEYQTKVDGEIILHLYDKGGIEQTICMLDGVFAFVLLDTANKKVFLGRDTYGVRPLFKAMTEDGFLAVCSEAKGLVTLKHSATPFLKVEPFLPGHYEVLDLKPNGKVASVEMVKYHHCRDVPLHALYDNVEKLFPGFEIETVKNNLRILFNNAVKKRLMTDRRIGCLLSGGLDSSLVAATLLKQLKEAQVQYPLQTFAIGMEDSPDLLAARKVADHIGSEHYEVLFNSEEGIQALDEVIFSLETYDITTVRASVGMYLISKYIRKNTDSVVIFSGEGSDELTQGYIYFHKAPSPEKAEEESERLLRELYLFDVLRADRTTAAHGLELRVPFLDHRFSSYYLSLPPEMRIPKNGIEKHLLRETFEDSNLIPKEILWRPKEAFSDGITSVKNSWFKILQEYVEHQVDDAMMANAAQKFPFNTPKTKEGYYYRQVFERHYPGRADWLSHYWMPKWINATDPSARTLTHYKSAVKA

SEQ ID NO: 24861 - protein, 401 aa, Homo sapiens
  REGION 1..401: note = ENSP00000401651
MCGIWALFGSDDCLSVQCLSAMKIAHRGPDAFRFENVNGYTNCCFGFHRLAVVDPLFGMQPIRVKKYPYLWLCYNGEIYNHKKMQQHFEFEYQTKVDGEIILHLYDKGGIEQTICMLDGVFAFVLLDTANKKVFLGRDTYGVRPLFKAMTEDGFLAVCSEAKGLVTLKHSATPFLKVEPFLPGHYEVLDLKPNGKVASVEMVKYHHCRDVPLHALYDNVEKLFPGFEIETVKNNLRILFNNAVKKRLMTDRRIGCLLSGGLDSSLVAATLLKQLKEAQVQYPLQTFAIGMEDSPDLLAARKVADHIGSEHYEVLFNSEEGIQALDEVIFSLETYDITTVRASVGMYLISKYIRKNTDSVVIFSGEGSDELTQGYIYFHKDWRGRKKNCFVCQKQNSWCFCL

SEQ ID NO: 24862 - protein, 478 aa, Homo sapiens
  REGION 1..478: note = ENSP00000414379
MQQHFEFEYQTKVDGEIILHLYDKGGIEQTICMLDGVFAFVLLDTANKKVFLGRDTYGVRPLFKAMTEDGFLAVCSEAKGLVTLKHSATPFLKVEPFLPGHYEVLDLKPNGKVASVEMVKYHHCRDVPLHALYDNVEKLFPGFEIETVKNNLRILFNNAVKKRLMTDRRIGCLLSGGLDSSLVAATLLKQLKEAQVQYPLQTFAIGMEDSPDLLAARKVADHIGSEHYEVLFNSEEGIQALDEVIFSLETYDITTVRASVGMYLISKYIRKNTDSVVIFSGEGSDELTQGYIYFHKAPSPEKAEEESERLLRELYLFDVLRADRTTAAHGLELRVPFLDHRFSSYYLSLPPEMRIPKNGIEKHLLRETFEDSNLIPKEILWRPKEAFSDGITSVKNSWFKILQEYVEHQVDDAMMANAAQKFPFNTPKTKEGYYYRQVFERHYPGRADWLSHYWMPKWINATDPSARTLTHYKSAVKA

SEQ ID NO: 24863 - protein, 561 aa, Homo sapiens; identical to SEQ ID NO: 24860
  REGION 1..561: note = ENSP00000377845

SEQ ID NO: 24864 - protein, 540 aa, Homo sapiens
  REGION 1..540: note = ENSP00000414901
MKIAHRGPDAFRFENVNGYTNCCFGFHRLAVVDPLFGMQPIRVKKYPYLWLCYNGEIYNHKKMQQHFEFEYQTKVDGEIILHLYDKGGIEQTICMLDGVFAFVLLDTANKKVFLGRDTYGVRPLFKAMTEDGFLAVCSEAKGLVTLKHSATPFLKVEPFLPGHYEVLDLKPNGKVASVEMVKYHHCRDVPLHALYDNVEKLFPGFEIETVKNNLRILFNNAVKKRLMTDRRIGCLLSGGLDSSLVAATLLKQLKEAQVQYPLQTFAIGMEDSPDLLAARKVADHIGSEHYEVLFNSEEGIQALDEVIFSLETYDITTVRASVGMYLISKYIRKNTDSVVIFSGEGSDELTQGYIYFHKAPSPEKAEEESERLLRELYLFDVLRADRTTAAHGLELRVPFLDHRFSSYYLSLPPEMRIPKNGIEKHLLRETFEDSNLIPKEILWRPKEAFSDGITSVKNSWFKILQEYVEHQVDDAMMANAAQKFPFNTPKTKEGYYYRQVFERHYPGRADWLSHYWMPKWINATDPSARTLTHYKSAVKA

SEQ ID NO: 24865 - protein, 478 aa, Homo sapiens; identical to SEQ ID NO: 24862
  REGION 1..478: note = ENSP00000408472

SEQ ID NO: 24866 - protein, 540 aa, Homo sapiens; identical to SEQ ID NO: 24864
  REGION 1..540: note = ENSP00000406994

SEQ ID NO: 24867 - protein, 214 aa, Homo sapiens
  REGION 1..214: note = ENSP00000400422
MCGIWALFGSDDCLSVQCLSAMKIAHRGPDAFRFENVNGYTNCCFGFHRLAVVDPLFGMQPIRVKKYPYLWLCYNGEIYNHKKMQQHFEFEYQTKVDGEIILHLYDKGGIEQTICMLDGVFAFVLLDTANKKVFLGRDTYGVRPLFKAMTEDGFLAVCSEAKGLVTLKHSATPFLKVEPFLPGHYEVLDLKPNGKVASVEMVKYHHCRDVPLHA

SEQ ID NO: 24868 - protein, 162 aa, Homo sapiens
  REGION 1..162: note = ENSP00000394242
MCGIWALFGSDDCLSVQCLSAMKIAHRGPDAFRFENVNGYTNCCFGFHRLAVVDPLFGMQPIRVKKYPYLWLCYNGEIYNHKKMQQHFEFEYQTKVDGEIILHLYDKGGIEQTICMLDGVFAFVLLDTANKKVFLGRDTYGVRPLFKAMTEDGFLAVCSEAK

SEQ ID NO: 24869 - protein, 118 aa, Homo sapiens
  REGION 1..118: note = ENSP00000402350
MCGIWALFGSDDCLSVQCLSAMKIAHRGPDAFRFENVNGYTNCCFGFHRLAVVDPLFGMQPIRVKKYPYLWLCYNGEIYNHKKMQQHFEFEYQTKVDGEIILHLYDKGGIEQTICMLD

SEQ ID NO: 24870 - protein, 63 aa, Homo sapiens
  REGION 1..63: note = ENSP00000408797
MKIAHRGPDAFRFENVNGYTNCCFGFHRLAVVDPLFGMQPIRVKKYPYLWLCYNGEIYNHKKV

SEQ ID NO: 24871 - protein, 32 aa, Homo sapiens
  REGION 1..32: note = ENSP00000397802
MCGIWALFGSDDCLSVQCLSAMKIAHRGPDAF

SEQ ID NO: 24872 - protein, 28 aa, Homo sapiens
  REGION 1..28: note = ENSP00000413797
MCGIWALFGSDDCLSVQCLSAMKIAHRG

SEQ ID NO: 24873 - protein, 561 aa, Homo sapiens; identical to SEQ ID NO: 24860
  REGION 1..561: note = ENSP00000175506

SEQ ID NO: 24874 - protein, 78 aa, Homo sapiens
  REGION 1..78: note = ENSP00000458324
MTSCHIAEEHIQKVAIFGGTHGNELTGVFLVKHWLENGAEIQRTGLEVKPFITNPRAVKKCTRYIDCDLNRIFDLENL

SEQ ID NO: 24875 - protein, 313 aa, Homo sapiens
  REGION 1..313: note = ENSP00000409976
MTSCHIAEEHIQKVAIFGGTHGNELTGVFLVKHWLENGAEIQRTGLEVKPFITNPRAVKKCTRYIDCDLNRIFDLENLGKKMSEDLPYEVRRAQEINHLFGPKDSEDSYDIIFDLHNTTSNMGCTLILEDSRNNFLIQMFHYIKTSLAPLPCYVYLIEHPSLKYATTRSIAKYPVGIEVGPQPQGVLRADILDQMRKMIKHALDFIHHFNEGKEFPPCAIEVYKIIEKVDYPRDENGEIAAIIHPNLQDQDWKPLHPGDPMFLTLDGKTIPLGGDCTVYPVFVNEAAYYEKKEAFAKTTKLTLNAKSIRCCLH

SEQ ID NO: 24876 - protein, 313 aa, Homo sapiens; identical to SEQ ID NO: 24875
  REGION 1..313: note = ENSP00000263080

SEQ ID NO: 24877 - protein, 56 aa, Homo sapiens
  REGION 1..56: note = ENSP00000461358
MTSCHIAEEHIQKVAIFGGTHGNELTGVFLVKHWLENGAEIQRTGLEQKNVRRFAI

SEQ ID NO: 24878 - protein, 573 aa, Homo sapiens
  REGION 1..573: note = ENSP00000450040
MARAVGPERRLLAVYTGGTIGMRSELGVLVPGTGLAAILRTLPMFHDEEHARARGLSEDTLVLPPASRNQRILYTVLECQPLFDSSDMTIAEWVCLAQTIKRHYEQYHGFVVIHGTDTMAFAASMLSFMLENLQKTVILTGAQVPIHALWSDGRENLLGALLMAGQYVIPEVCLFFQNQLFRGNRATKVDARRFAAFCSPNLLPLATVGADITINRELVRKVDGKAGLVVHSSMEQDVGLLRLYPGIPAALVRAFLQPPLKGVVMETFGSGNGPTKPDLLQELRVATERGLVIVNCTHCLQGAVTTDYAAGMAMAGAGVISGFDMTSEAALAKLSYVLGQPGLSLDVRKELLTKDLRGEMTPPSVEERRPSLQGNTLGGGVSWLLSLSGSQEADALRNALVPSLACAAAHAGDVEALQALVELGSDLGLVDFNGQTPLHAAARGGHTEAVTMLLQRGVDVNTRDTDGFSPLLLAVRGRHPGVIGLLREAGASLSTQELEEAGTELCRLAYRADLEGLQVWWQAGADLGQPGYDGHSALHVAEAAGNLAVVAFLQSLEGAVGAQAPCPEVLPGV

SEQ ID NO: 24879 - protein, 555 aa, Homo sapiens
  REGION 1..555: note = ENSP00000448911
MARAVGPERRLLAVYTGGTIGMRSELGVLVPGTGLAAILRTLPMFHDEEHARARGLSEDTLVLPPASRNQRILYTVLECQPLFDSSDMTIAEWVCLAQTIKRHYEQYHGFVVIHGTDTMAFAASMLSFMLENLQKTVILTGAQVPIHALWSDGRENLLGALLMAGQYVIPEVCLFFQNQLFRGNRATKVDARRFAAFCSPNLLPLATVGADITINRELVRKVDGKAGLVVHSSMEQDVGLLRLYPGIPAALVRAFLQPPLKGVVMETFGSGNGPTKPDLLQELRVATERGLVIVNCTHCLQGAVTTDYAAGMAMAGAGVISGFDMTSEAALAKLSYVLGQPGLSLDVRKELLTKDLRGEMTPPSVEERRPSLQGNTLGGGVSWLLSLSGSQEADALRNALVPSLACAAAHAGDVEALQALVELGSDLGLVDFNGQTPLHAAARGGHTEAVTMLLQRGVDVNTRDTDGFSPLLLAVRGRHPGVIGLLREAGASLSTQELEEAGTELCRQRQPGTWQWWPFYRAWRVRLVPRPHAQKCCLVSNLKASCCSISHSFLP

SEQ ID NO: 24880 - protein, 126 aa, Homo sapiens
  REGION 1..126: note = ENSP00000447032
  VARIANT 1: note = Any amino acid
XPASRNQRILYTVLECQPLFDSSDMTIAEWVCLAQTIKRHYEQYHGFVVIHGTDTMAFAASMLSFMLENLQKTVILTGAQVPIHALWSDGRENLLGALLMAGQYVIPELLTKDLRGEMTPPSVEER

SEQ ID NO: 24881 - protein, 140 aa, Homo sapiens
  REGION 1..140: note = ENSP00000446856
AAARGGHTEAVTMLLQRGVDVNTRDTDGFSPLLLAVRGRHPGVIGLLREAGASLSTQELEEAGTELCRLAYRADLEGLQVWWQAGADLGQPGYDGHSALHVAEAAGNLAVVAFLQSLEGAVGAQAPCPEPSCFQEVLPGV

SEQ ID NO: 24882 - protein, 440 aa, Homo sapiens
  REGION 1..440: note = ENSP00000288520
MNTLLCKGMFCLLSWEADSRGRLGEYTLQPLSLQTEETTELGSKKELKSMPFITYLSGLLTAQMLSDDQLISGVEIRCEEKGRCPSTCHLCRRPGKEQLSPTPVLLEINRVVPLYTLIQDNGTKEAFKSALMSSYWCSGKGDVIDDWCRCDLSAFDANGLPNCSPLLQPVLRLSPTVEPSSTVVSLEWVDVQPAIGTKVSDYILQHKKVDEYTDTDLYTGEFLSFADDLLSGLGTSCVAAGRSHGEVPEVSIYSVIFKCLEPDGLYKFTLYAVDTRGRHSELSTVTLRTACPLVDDNKAEEIADKIYNLYNGYTSGKEQQMAYNTLMEVSASMLFRVQHHYNSHYEKFGDFVWRSEDELGPRKAHLILRRLERVSSHCSSLLRSAYIQSRVETVPYLFCRSEEVRPAGMVWYSILKDTKITCEEKMVSMARNTYGESKGR

SEQ ID NO: 24883 - protein, 395 aa, Homo sapiens
  REGION 1..395: note = ENSP00000339925
MPFITYLSGLLTAQMLSDDQLISGVEIRCEEKGRCPSTCHLCRRPGKEQLSPTPVLLEINRVVPLYTLIQDNGTKEAFKSALMSSYWCSGKGDVIDDWCRCDLSAFDANGLPNCSPLLQPVLRLSPTVEPSSTVVSLEWVDVQPAIGTKVSDYILQHKKVDEYTDTDLYTGEFLSFADDLLSGLGTSCVAAGRSHGEVPEVSIYSVIFKCLEPDGLYKFTLYAVDTRGRHSELSTVTLRTACPLVDDNKAEEIADKIYNLYNGYTSGKEQQMAYNTLMEVSASMLFRVQHHYNSHYEKFGDFVWRSEDELGPRKAHLILRRLERVSSHCSSLLRSAYIQSRVETVPYLFCRSEEVRPAGMVWYSILKDTKITCEEKMVSMARNTYYLTLSKVSPF

SEQ ID NO: 24884 - protein, 1062 aa, Homo sapiens
  REGION 1..1062: note = ENSP00000363098
QTHNSVIGVPIRETPILDDYDCEEDEEPPRRANHVSREDEFGSQVTHTLDSLGHPGEEKVDFEKKAAAEATQETVESLMQKFKESFRANTPIEIGQLQPPLRSTSAGKRKRRSKSRGGISFGRAKGTSGSEADDETQLTFYTEQYRSRRRSKGLLKSPVNKTALTLIAVSSCILAMVCGSQMSCPLTVKVTLHVPEHFIADGSSFVVSEGSYLDISDWLNPAKLSLYYQINATSPWVRDLCGQRTTDACEQLCDPETGECSCHEGYAPDPVHRHLCVRSDWGQSEGPWPYTTLERGYDLVTGEQAPEKILSLGQGLWLPVSKSFVVPPVELSINPLASCKTDVLVTEDPADVREEAMLSTYFETINDLLSSFGPVRDCSRNNGGCTRNFKCVSDRQVDSSGCVCPEELKPMKDGSGCYDHSKGIDCSDGFNGGCEQLCLQQTLPLPYDATSSTIFMFCGCVEEYKLAPDGKSCLMLSDVCEGPKCLKPDSKFNDTLFGEMLHGYNNRTQHVNQGQVFQMTFRENNFIKDFPQLADGLLVIPLPVEEQCRGVLSEPLPDLQLLTGDIRYDEAMGYPMVQQWRVRSNLYRVKLSTITLAAGFTNVLKILTKESSREELLSFIQHYGSHYIAEALYGSELTCIIHFPSKKVQQQLWLQYQKETTELGSKKELKSMPFITYLSGLLTAQMLSDDQLISGVEIRCEEKGRCPSTCHLCRRPGKEQLSPTPVLLEINRVVPLYTLIQDNGTKEAFKSALMSSYWCSGKGDVIDDWCRCDLSAFDANGLPNCSPLLQPVLRLSPTVEPSSTVVSLEWVDVQPAIGTKVSDYILQHKKVDEYTDTDLYTGEFLSFADDLLSGLGTSCVAAGRSHGEVPEVSIYSVIFKCLEPDGLYKFTLYAVDTRGRHSELSTVTLRTACPLVDDNKAEEIADKIYNLYNGYTSGKEQQMAYNTLMEVSASMLFRVQHHYNSHYEKFGDFVWRSEDELGPRKAHLILRRLERVSSHCSSLLRSAYIQSRVETVPYLFCRSEEVRPAGMVWYSILKDTKITCEEKMVSMARNTYGESKGR

SEQ ID NO: 24885 - protein, 1288 aa, Homo sapiens
  REGION 1..1288: note = ENSP00000354504
MAAAGARLSPGPGSGLRGRPRLCFHPGPPPLLPLLLLFLLLLPPPPLLAGATAAASREPDSPCRLKTVTVSTLPALRESDIGWSGARAGAGAGTGAGAAAAAASPGSPGSAGTAAESRLLLFVRNELPGRIAVQDDLDNTELPFFTLEMSGTAADISLVHWRQQWLENGTLYFHVSMSSSGQLAQATAPTLQEPSEIVEEQMHILHISVMGGLIALLLLLLVFTVALYAQRRWQKRRRIPQKSASTEATHEIHYIPSVLLGPQARESFRSSRLQTHNSVIGVPIRETPILDDYDCEEDEEPPRRANHVSREDEFGSQVTHTLDSLGHPGEEKVDFEKKGGISFGRAKGTSGSEADDETQLTFYTEQYRSRRRSKGLLKSPVNKTALTLIAVSSCILAMVCGSQMSCPLTVKVTLHVPEHFIADGSSFVVSEGSYLDISDWLNPAKLSLYYQINATSPWVRDLCGQRTTDACEQLCDPETGECSCHEGYAPDPVHRHLCVRSDWGQSEGPWPYTTLERGYDLVTGEQAPEKILRSTFSLGQGLWLPVSKSFVVPPVELSINPLASCKTDVLVTEDPADVREEAMLSTYFETINDLLSSFGPVRDCSRNNGGCTRNFKCVSDRQVDSSGCVCPEELKPMKDGSGCYDHSKGIDCSDGFNGGCEQLCLQQTLPLPYDATSSTIFMFCGCVEEYKLAPDGKSCLMLSDVCEGPKCLKPDSKFNDTLFGEMLHGYNNRTQHVNQGQVFQMTFRENNFIKDFPQLADGLLVIPLPVEEQCRGVLSEPLPDLQLLTGDIRYDEAMGYPMVQQWRVRSNLYRVKLSTITLAAGFTNVLKILTKESSREELLSFIQHYGSHYIAEALYGSELTCIIHFPSKKVQQQLWLQYQKETTELGSKKELKSMPFITYLSGLLTAQMLSDDQLISGVEIRCEEKGRCPSTCHLCRRPGKEQLSPTPVLLEINRVVPLYTLIQDNGTKEAFKSALMSSYWCSGKGDVIDDWCRCDLSAFDANGLPNCSPLLQPVLRLSPTVEPSSTVVSLEWVDVQPAIGTKVSDYILQHKKVDEYTDTDLYTGEFLSFADDLLSGLGTSCVAAGRSHGEVPEVSIYSVIFKCLEPDGLYKFTLYAVDTRGRHSELSTVTLRTACPLVDDNKAEEIADKIYNLYNGYTSGKEQQMAYNTLMEVSASMLFRVQHHYNSHYEKFGDFVWRSEDELGPRKAHLILRRLERVSSHCSSLLRSAYIQSRVETVPYLFCRSEEVRPAGMVWYSILKDTKITCEEKMVSMARNTYGESKGR

SEQ ID NO: 24886 - protein, 98 aa, Homo sapiens
  REGION 1..98: note = ENSP00000412099
  VARIANT 1: note = Any amino acid
XMAYNTLMEVSASMLFRVQHHYNSHYEKFGDFVWRSEDELGPSLLESFMSLQDINLLERRPGRPQRPGNPLSNVSWRISEIAPTSHTDMSAGIKETAS

SEQ ID NO: 24887 - protein, 194 aa, Homo sapiens
  REGION 1..194: note = ENSP00000351460
MPFITYLSGLLTAQMLSDDQLISGVEIRCEEKGRCPSTCHLCRRPGKEQLSPTPVLLEINRVVPLYTLIQDNGTKEAFKSALMSSYWCSGKGDVIDDWCRCDLSAFDANGLPNCSPLLQPVLRLSPTVEPSSTVVSLEWVDVQPAIGTKVSDYILQHKKVDEYTDTDLYTVYCWITFIDLRILNQPCIPGMKPT

SEQ ID NO: 24888 - protein, 402 aa, Homo sapiens
  REGION 1..402: note = ENSP00000355116
MPFITYLSGLLTAQMLSDDQLISGVEIRCEEKGRCPSTCHLCRRPGKEQLSPTPVLLEINRVVPLYTLIQDNGTKEAFKSALMSSYWCSGKGDVIDDWCRCDLSAFDANGLPNCSPLLQPVLRLSPTVEPSSTVVSLEWVDVQPAIGTKVSDYILQHKKVDEYTDTDLYTGEFLSFADDLLSGLGTSCVAAGRSHGEVPEVSIYSVIFKCLEPDGLYKFTLYAVDTRGRHSELSTVTLRTACPLVDDNKAEEIADKIYNLYNGYTSGKEQQMAYNTLMEVSASMLFRVQHHYNSHYEKFGDFVWRSEDELGPRKAHLILRRLERVSSHCSSLLRSAYIQSRVETVPYLFCRSEEVRPAGMVWYSILKDTKITCEEKMVSMARNTYGESKGRYYLTLSKVSPF

SEQ ID NO: 24889 - protein, 1339 aa, Homo sapiens
  REGION 1..1339: note = ENSP00000314038
MAAAGARLSPGPGSGLRGRPRLCFHPGPPPLLPLLLLFLLLLPPPPLLAGATAAASREPDSPCRLKTVTVSTLPALRESDIGWSGARAGAGAGTGAGAAAAAASPGSPGSAGTAAESRLLLFVRNELPGRIAVQDDLDNTELPFFTLEMSGTAADISLVHWRQQWLENGTLYFHVSMSSSGQLAQATAPTLQEPSEIVEEQMHILHISVMGGLIALLLLLLVFTVALYAQRRWQKRRRIPQKSASTEATHEIHYIPSVLLGPQARESFRSSRLQTHNSVIGVPIRETPILDDYDCEEDEEPPRRANHVSREDEFGSQVTHTLDSLGHPGEEKVDFEKKAAAEATQETVESLMQKFKESFRANTPIEIGQLQPPLRSTSAGKRKRRSKSRGGISFGRAKGTSGSEADDETQLTFYTEQYRSRRRSKGLLKSPVNKTALTLIAVSSCILAMVCGSQMSCPLTVKVTLHVPEHFIADGSSFVVSEGSYLDISDWLNPAKLSLYYQINATSPWVRDLCGQRTTDACEQLCDPETGECSCHEGYAPDPVHRHLCVRSDWGQSEGPWPYTTLERGYDLVTGEQAPEKILRSTFSLGQGLWLPVSKSFVVPPVELSINPLASCKTDVLVTEDPADVREEAMLSTYFETINDLLSSFGPVRDCSRNNGGCTRNFKCVSDRQVDSSGCVCPEELKPMKDGSGCYDHSKGIDCSDGFNGGCEQLCLQQTLPLPYDATSSTIFMFCGCVEEYKLAPDGKSCLMLSDVCEGPKCLKPDSKFNDTLFGEMLHGYNNRTQHVNQGQVFQMTFRENNFIKDFPQLADGLLVIPLPVEEQCRGVLSEPLPDLQLLTGDIRYDEAMGYPMVQQWRVRSNLYRVKLSTITLAAGFTNVLKILTKESSREELLSFIQHYGSHYIAEALYGSELTCIIHFPSKKVQQQLWLQYQKETTELGSKKELKSMPFITYLSGLLTAQMLSDDQLISGVEIRCEEKGRCPSTCHLCRRPGKEQLSPTPVLLEINRVVPLYTLIQDNGTKEAFKSALMSSYWCSGKGDVIDDWCRCDLSAFDANGLPNCSPLLQPVLRLSPTVEPSSTVVSLEWVDVQPAIGTKVSDYILQHKKVDEYTDTDLYTGEFLSFADDLLSGLGTSCVAAGRSHGEVPEVSIYSVIFKCLEPDGLYKFTLYAVDTRGRHSELSTVTLRTACPLVDDNKAEEIADKIYNLYNGYTSGKEQQMAYNTLMEVSASMLFRVQHHYNSHYEKFGDFVWRSEDELGPRKAHLILRRLERVSSHCSSLLRSAYIQSRVETVPYLFCRSEEVRPAGMVWYSILKDTKITCEEKMVSMARNTYGESKGR

SEQ ID NO: 24890 - protein, 64 aa, Homo sapiens
  REGION 1..64: note = ENSP00000429331
MVVLRSSLELHNHSAASATGSLDLSSDFLSLEHIGRRRLRSAGAAQKKPAATTAKAGAVGQTAG

SEQ ID NO: 24891 - protein, 1390 aa, Homo sapiens
  REGION 1..1390: note = ENSP00000287394
MVVLRSSLELHNHSAASATGSLDLSSDFLSLEHIGRRRLRSAGAAQKKPAATTAKAGDGSSVKEVETYHRTRALRSLRKDAQNSSDSSFEKNVEITEQLANGRHFTRQLARQQADKKKEEHREDKVIPVTRSLRARNIVQSTEHLHEDNGDVEVRRSCRIRSRYSGVNQSMLFDKLITNTAEAVLQKMDDMKKMRRQRMRELEDLGVFNETEESNLNMYTRGKQKDIQRTDEETTDNQEGSVESSEEGEDQEHEDDGEDEDDEDDDDDDDDDDDDDDEDDEDEEDGEEENQKRYYLRQRKATVYYQAPLEKPRHQRKPNIFYSGPASPARPRYRLSSAGPRSPYCKRMNRRRHAIHSSDSTSSSSSEDEQHFERRRKRSRNRAINRCLPLNFRKDELKGIYKDRMKIGASLADVDPMQLDSSVRFDSVGGLSNHIAALKEMVVFPLLYPEVFEKFKIQPPRGCLFYGPPGTGKTLVARALANECSQGDKRVAFFMRKGADCLSKWVGESERQLRLLFDQAYQMRPSIIFFDEIDGLAPVRSSRQDQIHSSIVSTLLALMDGLDSRGEIVVIGATNRLDSIDPALRRPGRFDREFLFSLPDKEARKEILKIHTRDWNPKPLDTFLEELAENCVGYCGADIKSICAEAALCALRRRYPQIYTTSEKLQLDLSSINISAKDFEVAMQKMIPASQRAVTSPGQALSTVVKPLLQNTVDKILEALQRVFPHAEFRTNKTLDSDISCPLLESDLAYSDDDVPSVYENGLSQKSSHKAKDNFNFLHLNRNACYQPMSFRPRILIVGEPGFGQGSHLAPAVIHALEKFTVYTLDIPVLFGVSTTSPEETCAQVIREAKRTAPSIVYVPHIHVWWEIVGPTLKATFTTLLQNIPSFAPVLLLATSDKPHSALPEEVQELFIRDYGEIFNVQLPDKEERTKFFEDLILKQAAKPPISKKKAVLQALEVLPVAPPPEPRSLTAEEVKRLEEQEEDTFRELRIFLRNVTHRLAIDKRFRVFTKPVDPDEVPDYVTVIKQPMDLSSVISKIDLHKYLTVKDYLRDIDLICSNALEYNPDRDPGDRLIRHRACALRDTAYAIIKEELDEDFEQLCEEIQESRKKRGCSSSKYAPSYYHVMPKQNSTLVGDKRSDPEQNEKLKTPSTPVACSTPAQLKRKIRKKSNWYLGTIKKRRKISQAKDDSQNAIDHKIESDTEETQDTSVDHNETGNTGESSVEENEKQQNASESKLELRNNSNTCNIENELEDSRKTTACTELRDKIACNGDASSSQIIHISDENEGKEMCVLRMTRARRSQVEQQQLITVEKALAILSQPTPSLVVDHERLKNLLKTVVKKSQNYNIFQLENLYAVISQCIYRHRKDHDKTSLIQKMEQEVENFSCSR

SEQ ID NO: 24892 - protein, 708 aa, Homo sapiens
  REGION 1..708: note = ENSP00000429213
MQKMIPASQRAVTSPGQALSTVVKPLLQNTVDKILEALQRVFPHAEFRTNKTLDSDISCPLLESDLAYSDDDVPSVYENGLSQKSSHKAKDNFNFLHLNRNACYQPMSFRPRILIVGEPGFGQGSHLAPAVIHALEKFTVYTLDIPVLFGVSTTSPEETCAQVIREAKRTAPSIVYVPHIHVWWEIVGPTLKATFTTLLQNIPSFAPVLLLATSDKPHSALPEEVQELFIRDYGEIFNVQLPDKEERTKFFEDLILKQAAKPPISKKKAVLQALEVLPVAPPPEPRSLTAEEVKRLEEQEEDTFRELRIFLRNVTHRLAIDKRFRVFTKPVDPDEVPDYVTVIKQPMDLSSVISKIDLHKYLTVKDYLRDIDLICSNALEYNPDRDPGDRLIRHRACALRDTAYAIIKEELDEDFEQLCEEIQESRKKRGCSSSKYAPSYYHVMPKQNSTLVGDKRSDPEQNEKLKTPSTPVACSTPAQLKRKIRKKSNWYLGTIKKRRKISQAKDDSQNAIDHKIESDTEETQDTSVDHNETGNTGESSVEENEKQQNASESKLELRNNSNTCNIENELEDSRKTTACTELRDKIACNGDASSSQIIHISDENEGKEMCVLRMTRARRSQVEQQQLITVEKALAILSQPTPSLVVDHERLKNLLKTVVKKSQNYNIFQLENLYAVISQCIYRHRKDHDKTSLIQKMEQEVENFSCSR

SEQ ID NO: 24893 - protein, 63 aa, Homo sapiens
  REGION 1..63: note = ENSP00000429617
MVVLRSSLELHNHSAASATGSLDLSSDFLSLEHIGRRRLRSAGAAQKKPAATTAKAGVRWVIS

SEQ ID NO: 24894 - protein, 175 aa, Homo sapiens
  REGION 1..175: note = ENSP00000355948
MMLQHPGQVSASEVSASAIVPCLSPPGSLVFEDFANLTPFVKEELRFAIQNKHLCHRMSSALESVTVSDRPLGVSITKAEVAPEEDERKKRRRERNKIAAAKCRNKKKEKTECLQKESEKLESVNAELKAQIEELKNEKQHLIYMLNLHRPTCIVRAQNGRTPEDERNLFIQQIK

SEQ ID NO: 24895 - protein, 181 aa, Homo sapiens
  REGION 1..181: note = ENSP00000344352
MMLQHPGQVSASEVSASAIVPCLSPPGSLVFEDFANLTPFVKEELRFAIQNKHLCHRMSSALESVTVSDRPLGVSITKAEVAPEEDERKKRRRERNKIAAAKCRNKKKEKTECLQKESEKLESVNAELKAQIEELKNEKQHLIYMLNLHRPTCIVRAQNGRTPEDERNLFIQQIKEGTLQS

SEQ ID NO: 24896 - protein, 153 aa, Homo sapiens
  REGION 1..153: note = ENSP00000355952
  VARIANT 1: note = Any amino acid
XERSLEQNDASTPRPELRFAIQNKHLCHRMSSALESVTVSDRPLGVSITKAEVAPEEDERKKRRRERNKIAAAKCRNKKKEKTECLQKESEKLESVNAELKAQIEELKNEKQHLIYMLNLHRPTCIVRAQNGRTPEDERNLFIQQIKEGTLQS

SEQ ID NO: 24897 - protein, 106 aa, Homo sapiens
  REGION 1..106: note = ENSP00000336908
MMLQHPGQVSASEEELRFAIQNKHLCHRMSSALESVTVSDRPLGVSITKAEVAPEEDERKKRRRERNKIAAAKCRNKKKEKTECLQKLPRPFWVQKTCIWAVDSCK

SEQ ID NO: 24898 - protein, 135 aa, Homo sapiens
  REGION 1..135: note = ENSP00000432208
MMLQHPGQVSASEVSASAIVPCLSPPGSLVFEDFANLTPFVKEELRFAIQNKHLCHRMSSALESVTVSDRPLGVSITKAEVAPEEDERKKRRRERNKIAAAKCRNKKKEKTECLQKLPRPFWVQKTCIWAVDSCK

SEQ ID NO: 24899 - protein, 135 aa, Homo sapiens; identical to SEQ ID NO: 24898
  REGION 1..135: note = ENSP00000355950

SEQ ID NO: 24900 - protein, 124 aa, Homo sapiens
  REGION 1..124: note = ENSP00000480606
MSSALESVTVSDRPLGVSITKAEVAPEEDERKKRRRERNKIAAAKCRNKKKEKTECLQKESEKLESVNAELKAQIEELKNEKQHLIYMLNLHRPTCIVRAQNGRTPEDERNLFIQQIKEGTLQS

SEQ ID NO: 24901 - protein, 181 aa, Homo sapiens; identical to SEQ ID NO: 24895
  REGION 1..181: note = ENSP00000355954

SEQ ID NO: 24902 - protein, 124 aa, Homo sapiens; identical to SEQ ID NO: 24900
  REGION 1..124: note = ENSP00000483576

SEQ ID NO: 24903 - protein, 703 aa, Homo sapiens
  REGION 1..703: note = ENSP00000404725
MAELMLLSEIADPTRFFTDNLLSPEDWGLQNSTLYSGLDEVAEEQTQLFRCPEQDVPFDGSSLDVGMDVSPSEPPWELLPIFPDLQVKSEPSSPCSSSSLSSESSRLSTEPSSEALGVGEVLHVKTESLAPPLCLLGDDPTSSFETVQINVIPTSDDSSDVQTKIEPVSPCSSVNSEASLLSADSSSQAFIGEEVLEVKTESLSPSGCLLWDVPAPSLGAVQISMGPSLDGSSGKALPTRKPPLQPKPVVLTTVPMPSRAVPPSTTVLLQSLVQPPPVSPVVLIQGAIRVQPEGPAPSLPRPERKSIVPAPMPGNSCPPEVDAKLLKRQQRMIKNRESACQSRRKKKEYLQGLEARLQAVLADNQQLRRENAALRRRLEALLAENSELKLGSGNRKVVCIMVFLLFIAFNFGPVSISEPPSAPISPRMNKGEPQPRRHLLGFSEQEPVQGVEPLQGSSQGPKEPQPSPTDQPSFSNLTAFPGGAKELLLRDLDQLFLSSDCRHFNRTESLRLADELSGWVQRHQRGRRKIPQRAQERQKSQPRKKSPPVKAVPIQPPGPPERDSVGQLQLYRHPDRSQPAFLDAIDRREDTFYVVSFRRDHLLLPAISHNKTSRPKMSLVMPAMAPNETLSGRGAPGDYEEMMQIECEVMDTRVIHIKTSTVPPSLRKQPSPTPGNATGGPLPVSAASQAHQASHQPLYLNHP

SEQ ID NO: 24904 - protein, 700 aa, Homo sapiens
  REGION 1..700: note = ENSP00000391131
MAELMLLSEIADPTRFFTDNLLSPEDWDSTLYSGLDEVAEEQTQLFRCPEQDVPFDGSSLDVGMDVSPSEPPWELLPIFPDLQVKSEPSSPCSSSSLSSESSRLSTEPSSEALGVGEVLHVKTESLAPPLCLLGDDPTSSFETVQINVIPTSDDSSDVQTKIEPVSPCSSVNSEASLLSADSSSQAFIGEEVLEVKTESLSPSGCLLWDVPAPSLGAVQISMGPSLDGSSGKALPTRKPPLQPKPVVLTTVPMPSRAVPPSTTVLLQSLVQPPPVSPVVLIQGAIRVQPEGPAPSLPRPERKSIVPAPMPGNSCPPEVDAKLLKRQQRMIKNRESACQSRRKKKEYLQGLEARLQAVLADNQQLRRENAALRRRLEALLAENSELKLGSGNRKVVCIMVFLLFIAFNFGPVSISEPPSAPISPRMNKGEPQPRRHLLGFSEQEPVQGVEPLQGSSQGPKEPQPSPTDQPSFSNLTAFPGGAKELLLRDLDQLFLSSDCRHFNRTESLRLADELSGWVQRHQRGRRKIPQRAQERQKSQPRKKSPPVKAVPIQPPGPPERDSVGQLQLYRHPDRSQPAFLDAIDRREDTFYVVSFRRDHLLLPAISHNKTSRPKMSLVMPAMAPNETLSGRGAPGDYEEMMQIECEVMDTRVIHIKTSTVPPSLRKQPSPTPGNATGGPLPVSAASQAHQASHQPLYLNHP

SEQ ID NO: 24905 - protein, 142 aa, Homo sapiens
  REGION 1..142: note = ENSP00000399944
  VARIANT 1: note = Any amino acid
XQPSPTDQPSFSNLTAFPGGAKELLLRDLDQLFLSSDCRHFNRTESLRLADELSGWVQRHQRGRRKIPQRAQERQSLDTSPSRSLSHGRSHLQLRQSPSNPLDPQKGILWASCNYIATQTVRSQHSWMQLTDGKTHFMLSLS

SEQ ID NO: 24906 - protein, 703 aa, Homo sapiens; identical to SEQ ID NO: 24903
  REGION 1..703: note = ENSP00000364349

SEQ ID NO: 24907 - protein, 700 aa, Homo sapiens; identical to SEQ ID NO: 24904
  REGION 1..700: note = ENSP00000364347

SEQ ID NO: 24908 - protein, 142 aa, Homo sapiens; identical to SEQ ID NO: 24905
  REGION 1..142: note = ENSP00000393419
  VARIANT 1: note = Any amino acid

SEQ ID NO: 24909 - protein, 703 aa, Homo sapiens; identical to SEQ ID NO: 24903
  REGION 1..703: note = ENSP00000404814

SEQ ID NO: 24910 - protein, 700 aa, Homo sapiens; identical to SEQ ID NO: 24904
  REGION 1..700: note = ENSP00000399764

SEQ ID NO: 24911 - protein, 142 aa, Homo sapiens; identical to SEQ ID NO: 24905
  REGION 1..142: note = ENSP00000389467
  VARIANT 1: note = Any amino acid

SEQ ID NO: 24912 - protein, 703 aa, Homo sapiens; identical to SEQ ID NO: 24903
  REGION 1..703: note = ENSP00000293709

SEQ ID NO: 24913 - protein, 700 aa, Homo sapiens; identical to SEQ ID NO: 24904
  REGION 1..700: note = ENSP00000372642

SEQ ID NO: 24914 - protein, 142 aa, Homo sapiens; identical to SEQ ID NO: 24905
  REGION 1..142: note = ENSP00000412066
  VARIANT 1: note = Any amino acid

SEQ ID NO: 24915 - protein, 583 aa, Homo sapiens
  REGION 1..583: note = ENSP00000368237
MAEGDEAARGQQPHQGLWRRRRTSDPSAAVNHVSSTTSLGENYEDDDLVNSDEVMKKPCPVQIVLAHEDDHNFELDEEALEQILLQEHIRDLNIVVVSVAGAFRKGKSFLLDFMLRYMYNKDSQSWIGGNNEPLTGFTWRGGCERETTGIQVWNEVFVIDRPNGTKVAVLLMDTQGAFDSQSTIKDCATVFALSTMTSSVQVYNLSQNIQEDDLQHLQLFTEYGRLAMEEIYQKPFQTLMFLIRDWSYPYEHSYGLEGGKQFLEKRLQVKQNQHEELQNVRKHIHNCFSNLGCFLLPHPGLKVATNPSFDGRLKDIDEDFKRELRNLVPLLLAPENLVEKEISGSKVTCRDLVEYFKAYIKIYQGEELPHPKSMLQATAEANNLAAVAGARDTYCKSMEQVCGGDKPYIAPSDLERKHLDLKEVAIKQFRSVKKMGGDEFCRRYQDQLEAEIEETYANFIKHNDGKNIFYAARTPATLFAVMFAMYIISGLTGFIGLNSIAVLCNLVMGLALIFLCTWAYVKYSGEFREIGTVIDQIAETLWEQVLKPLGDNLMEENIRQSVTNSIKAGLTDQVSHHARLKTD

SEQ ID NO: 24916 - protein, 413 aa, Homo sapiens
  REGION 1..413: note = ENSP00000385446
MDTQGAFDSQSTIKDCATVFALSTMTSSVQVYNLSQNIQEDDLQHLQLFTEYGRLAMEEIYQKPFQTLMFLIRDWSYPYEHSYGLEGGKQFLEKRLQVKQNQHEELQNVRKHIHNCFSNLGCFLLPHPGLKVATNPSFDGRLKDIDEDFKRELRNLVPLLLAPENLVEKEISGSKVTCRDLVEYFKAYIKIYQGEELPHPKSMLQATAEANNLAAVAGARDTYCKSMEQVCGGDKPYIAPSDLERKHLDLKEVAIKQFRSVKKMGGDEFCRRYQDQLEAEIEETYANFIKHNDGKNIFYAARTPATLFAVMFAMYIISGLTGFIGLNSIAVLCNLVMGLALIFLCTWAYVKYSGEFREIGTVIDQIAETLWEQRSPRKVFSKLFEVTRRRMVHRALSSAQRQRLSSNNNKKKN

SEQ ID NO: 24917 - protein, 412 aa, Homo sapiens
  REGION 1..412: note = ENSP00000384062
MDTQGAFDSQSTIKDCATVFALSTMTSSVQVYNLSQNIQEDDLQHLQLFTEYGRLAMEEIYQKPFQTLMFLIRDWSYPYEHSYGLEGGKQFLEKRLQVKQNQHEELQNVRKHIHNCFSNLGCFLLPHPGLKVATNPSFDGRLKDIDEDFKRELRNLVPLLLAPENLVEKEISGSKVTCRDLVEYFKAYIKIYQGEELPHPKSMLQATAEANNLAAVAGARDTYCKSMEQVCGGDKPYIAPSDLERKHLDLKEVAIKQFRSVKKMGGDEFCRRYQDQLEAEIEETYANFIKHNDGKNIFYAARTPATLFAVMFAMYIISGLTGFIGLNSIAVLCNLVMGLALIFLCTWAYVKYSGEFREIGTVIDQIAETLWEQVLKPLGDNLMEENIRQSVTNSIKAGLTDQVSHHARLKTD

SEQ ID NO: 24918 - protein, 49 aa, Homo sapiens
  REGION 1..49: note = ENSP00000383944
MAEGDEAARGQQPHQGLWRRRRTSDPSAAVNHVSSTTSLGFSKLDWWKQ

SEQ ID NO: 24919 - protein, 579 aa, Homo sapiens
  REGION 1..579: note = ENSP00000415336
MAEGDEAARGQQPHQGLWRRRRTSDPSAAVNHVSSTTSLGENYEDDDLVNSDEVMKKPCPVQIVLAHEDDHNFELDEEALEQILLQEHIRDLNIVVVSVAGAFRKGKSFLLDFMLRYMYNKDSQSWIGGNNEPLTGFTWRGGCERETTGIQVWNEVFVIDRPNGTKVAVLLMDTQGAFDSQSTIKDCATVFALSTMTSSVQVYNLSQNIQEDDLQHLQLFTEYGRLAMEEIYQKPFQTLMFLIRDWSYPYEHSYGLEGGKQFLEKRLQVKQNQHEELQNVRKHIHNCFSNLGCFLLPHPGLKVATNPSFDGRLKDIDEDFKRELRNLVPLLLAPENLVEKEISGSKVTCRDLVEYFKAYIKIYQGEELPHPKSMLQATAEANNLAAVAGARDTYCKSMEQVCGGDKPYIAPSDLERKHLDLKEVAIKQFRSVKKMGGDEFCRRYQDQLEAEIEETYANFIKHNDGKNIFYAARTPATLFAVMFAMYIISGLTGFIGLNSIAVLCNLVMGLALIFLCTWAYVKYSGEFREIGTVIDQIAETLWEQVFSKLFEVTRRRMVHRALSSAQRQRLSSNNNKKKN

SEQ ID NO: 24920 - protein, 565 aa, Homo sapiens
  REGION 1..565: note = ENSP00000390743
MVLKKGIKFFQRLINSKSLRFGENYEDDDLVNSDEVMKKPCPVQIVLAHEDDHNFELDEEALEQILLQEHIRDLNIVVVSVAGAFRKGKSFLLDFMLRYMYNKDSQSWIGGNNEPLTGFTWRGGCERETTGIQVWNEVFVIDRPNGTKVAVLLMDTQGAFDSQSTIKDCATVFALSTMTSSVQVYNLSQNIQEDDLQHLQLFTEYGRLAMEEIYQKPFQTLMFLIRDWSYPYEHSYGLEGGKQFLEKRLQVKQNQHEELQNVRKHIHNCFSNLGCFLLPHPGLKVATNPSFDGRLKDIDEDFKRELRNLVPLLLAPENLVEKEISGSKVTCRDLVEYFKAYIKIYQGEELPHPKSMLQATAEANNLAAVAGARDTYCKSMEQVCGGDKPYIAPSDLERKHLDLKEVAIKQFRSVKKMGGDEFCRRYQDQLEAEIEETYANFIKHNDGKNIFYAARTPATLFAVMFAMYIISGLTGFIGLNSIAVLCNLVMGLALIFLCTWAYVKYSGEFREIGTVIDQIAETLWEQVLKPLGDNLMEENIRQSVTNSIKAGLTDQVSHHARLKTD

SEQ ID NO: 24921 - protein, 175 aa, Homo sapiens
  REGION 1..175: note = ENSP00000409811
MAEGDEAARGQQPHQGLWRRRRTSDPSAAVNHVSSTTSLEYGRLAMEEIYQKPFQTLMFLIRDWSYPYEHSYGLEGGKQFLEKRLQVKQNQHEELQNVRKHIHNCFSNLGCFLLPHPGLKVATNPSFDGRLKDIDEDFKRELRNLVPLLLAPENLVEKEISGSKVTCRDLVEYFK

SEQ ID NO: 24922 - protein, 258 aa, Homo sapiens
  REGION 1..258: note = ENSP00000410592
  VARIANT 1: note = Any amino acid
XEGDEAARGQQPHQGLWRRRRTSDPSAAVNHVSSTTSLGENYEDDDLVNSDEVMKKPCPVQIVLAHEDDHNFELDEEALEQILLQEHIRDLNIVVVSVAGAFRKGKSFLLDFMLRYMYNKVYNLSQNIQEDDLQHLQLFTEYGRLAMEEIYQKPFQTLMFLIRDWSYPYEHSYGLEGGKQFLEKRLQVKQNQHEELQNVRKHIHNCFSNLGCFLLPHPGLKVATNPSFDGRLKDIDEDFKRELRNLVPLLLAPENLVE

SEQ ID NO: 24923 - protein, 86 aa, Homo sapiens
  REGION 1..86: note = ENSP00000413216
MAEGDEAARGQQPHQGLWRRRRTSDPSAAVNHVSSTTSLESCSVARLECSGTIFAYCNLPGSSDSSASASQVAGITGFSKLDWWKQ

SEQ ID NO: 24924 - protein, 185 aa, Homo sapiens
  REGION 1..185: note = ENSP00000404921
MAEGDEAARGQQPHQGLWRRRRTSDPSAAVNHVSSTTSLESCSVARLECSGTIFAYCNLPGSSDSSASASQVAGITGENYEDDDLVNSDEVMKKPCPVQIVLAHEDDHNFELDEEALEQILLQEHIRDLNIVVVSVAGAFRKGKSFLLDFMLRYMYNKDSQSWIGGNNEPLTGFTWRGGCERETT

SEQ ID NO: 24925 - protein, 93 aa, Homo sapiens
  REGION 1..93: note = ENSP00000406004
MAEGDEAARGQQPHQGLWRRRRTSDPSAAVNHVSSTTSLDGVSLCRPGWGAVARSRLTASSASWVHAILRPQPPEYLGLQAPATVSGLLFLYF

SEQ ID NO: 24926 - protein, 413 aa, Homo sapiens; identical to SEQ ID NO: 24916
  REGION 1..413: note = ENSP00000486809

SEQ ID NO: 24927 - protein, 541 aa, Homo sapiens
  REGION 1..541: note = ENSP00000381844
MLSPQRVAAAASRGADDAMESSKPGPVQVVLVQKDQHSFELDEKALASILLQDHIRDLDVVVVSVAGAFRKGKSFILDFMLRYLYSQKESGHSNWLGDPEEPLTGFSWRGGSDPETTGIQIWSEVFTVEKPGGKKVAVVLMDTQGAFDSQSTVKDCATIFALSTMTSSVQIYNLSQNIQEDDLQQLQLFTEYGRLAMDEIFQKPFQTLMFLVRDWSFPYEYSYGLQGGMAFLDKRLQVKEHQHEEIQNVRNHIHSCFSDVTCFLLPHPGLQVATSPDFDGKLKDIAGEFKEQLQALIPYVLNPSKLMEKEINGSKVTCRGLLEYFKAYIKIYQGEDLPHPKSMLQATAEANNLAAAASAKDIYYNNMEEVCGGEKPYLSPDILEEKHCEFKQLALDHFKKTKKMGGKDFSFRYQQELEEEIKELYENFCKHNGSKNVFSTFRTPAVLFTGIVALYIASGLTGFIGLEVVAQLFNCMVGLLLIALLTWGYIRYSGQYRELGGAIDFGAAYVLEQASSHIGNSTQATVRDAVVGRPSMDKKAQ

SEQ ID NO: 24928 - protein, 523 aa, Homo sapiens
  REGION 1..523: note = ENSP00000437593
MESSKPGPVQVVLVQKDQHSFELDEKALASILLQDHIRDLDVVVVSVAGAFRKGKSFILDFMLRYLYSQKESGHSNWLGDPEEPLTGFSWRGGSDPETTGIQIWSEVFTVEKPGGKKVAVVLMDTQGAFDSQSTVKDCATIFALSTMTSSVQIYNLSQNIQEDDLQQLQLFTEYGRLAMDEIFQKPFQTLMFLVRDWSFPYEYSYGLQGGMAFLDKRLQVKEHQHEEIQNVRNHIHSCFSDVTCFLLPHPGLQVATSPDFDGKLKDIAGEFKEQLQALIPYVLNPSKLMEKEINGSKVTCRGLLEYFKAYIKIYQGEDLPHPKSMLQATAEANNLAAAASAKDIYYNNMEEVCGGEKPYLSPDILEEKHCEFKQLALDHFKKTKKMGGKDFSFRYQQELEEEIKELYENFCKHNGSKNVFSTFRTPAVLFTGIVALYIASGLTGFIGLEVVAQLFNCMVGLLLIALLTWGYIRYSGQYRELGGAIDFGAAYVLEQASSHIGNSTQATVRDAVVGRPSMDKKAQ

SEQ ID NO: 24929 - protein, 169 aa, Homo sapiens
  REGION 1..169: note = ENSP00000441842
MRTAGRDPVSAGLQFPKDGSTQRPANRARFVPARTRPSPLHPCCFCFEGGGSMLSPQRVAAAASRGADDAMESSKPGPVQVVLVQKDQHSFELDEKALASILLQDHIRDLDVVVVSVAGAFRKGKSFILDFMLRYLYSQKESGHSNWLGDPEEPLTGFSWRGGSDPETT

SEQ ID NO: 24930 - protein, 321 aa, Homo sapiens
  REGION 1..321: note = ENSP00000304676
MKHIPVLEDGPWKTVCVKELNGLKKLKRKGKEPARRANGYKTFRLDLEAPEPRAVATNGLRDRTHRLQPVPVPVPVPVPVAPAVPPRGGTDTAGERGGSRAPEVSDARKRCFALGAVGPGLPTPPPPPPPAPQSQAPGGPEAQPFREPGLRPRILLCAPPARPAPSAPPAPPAPPESTVRPAPPTRPGESSYSSISHVIYNNHQDSSASPRKRPGEATAASSEIKALQQTRRLLANARERTRVHTISAAFEALRKQVPCYSYGQKLSKLAILRIACNYILSLARLADLDYSADHSNLSFSECVQRCTRTLQAEGRAKKRKE

SEQ ID NO: 24931 - protein, 212 aa, Homo sapiens
  REGION 1..212: note = ENSP00000383129
MHIAGFILVQRQPWYSVEIHSACTVQNESISELTMSPTAPEKMESNSTFTSFENTTVWFLGTINCITVALVFSKGKPFRQPTYTNYIFVLVLIIQLGVCLFILFADIPELYRRLDLLCTPVLWRASIVIMLSLNFIVSLVAEEAVIENRALWMMIKRCFGYQSKSQYRIWQRDLANDPSWPPLNQTSHSDMPECGRGVSYSNPVFESNEEQL

SEQ ID NO: 24932 - protein, 576 aa, Homo sapiens
  REGION 1..576: note = ENSP00000395367
  VARIANT 1: note = Any amino acid
XGTVRAVVLQTGFNTAKGDLVRSILYPKPVNFQLYRDAIRFLLCLVGTATIGMIYTLCVYVLSGEPPEEVVRKALDVITIAVPPALPAALTTGIIYAQRRLKKRGIFCISPQRINVCGQLNLVCFDKTGTLTRDGLDLWGVVSCDRNGFQEVHSFASGQALPWGPLCAAMASCHSLILLDGTIQGDPLDLKMFEATTWEMAFSGDDFHIKGVPAHAMVVKPCRTASQVPVEGIAILHQFPFSSALQRMTVIVQEMGGDRLAFMKGAPERVASFCQPETVPTSFVSELQIYTTQGFRVIALAYKKLENDHHATTLTRETVESDLIFLGLLILENRLKEETKPVLEELISARIRTVMITGDNLQTAITVARKSGMVSESQKVILIEANETTGSSSASISWTLVEEKKHIMYGNQDNYINIRDEVSDKGREGSYHFALTGKSFHVISQHFSSLLPKILINGTIFARMSPGQKSSLVEEFQKLDYFVGMCGDGANDCGALKMAHVGISLSEQEASVASPFTSKTPNIECVPHLIKEGRAALVTSFCMFKYMALYSMIQRQTAFQITSFCSRIWPLQLLLV

SEQ ID NO: 24933 - protein, 83 aa, Homo sapiens
  REGION 1..83: note = ENSP00000402023
MGHFEKGQHALLNEGEENEMEIFGYRTQGCRKSLCLAGSIFSFGILPLVFYWRPAWHVWAHCVPCSLQEADTVLLRTTMRSIS

SEQ ID NO: 24934 - protein, 1177 aa, Homo sapiens
  REGION 1..1177: note = ENSP00000376238
MGHFEKGQHALLNEGEENEMEIFGYRTQGCRKSLCLAGSIFSFGILPLVFYWRPAWHVWAHCVPCSLQEADTVLLRTTDEFQIYSWKKVIWIYLSALNSAFGLTPDHPLMTDEEYIINRAIRKPDLKVRCIKVQKIRYVWNYLEGQFQKIGSLEDWLSSAKIHQKFGSGLTREEQEIRRLICGPNTIDVEVTPIWKLLIKEVLNPFYIFQLFSVCLWFSEDYKEYAFAIIIMSIISISLTVYDLREQSVKLHHLVESHNSITVSVCGRKAGVQELESRVLVPGDLLILTGNKVLMPCDAVLIEGSCVVDEGMLTGESIPVTKTPLPKMDSSVPWKTQSEADYKRHVLFCGTEVIQAKAACSGTVRAVVLQTGFNTAKGDLVRSILYPKPVNFQLYRDAIRFLLCLEPPEEVVRKALDVITIAVPPALPAALTTGIIYAQRRLKKRGIFCISPQRINVCGQLNLVCFDKTGTLTRDGLDLWGVVSCDRNGFQEVHSFASGQALPWGPLCAAMASCHSLILLDGTIQGDPLDLKMFEATTWEMAFSGDDFHIKGVPAHAMVVKPCRTASQVPVEGIAILHQFPFSSALQRMTVIVQEMGGDRLAFMKGAPERVASFCQPETVPTSFVSELQIYTTQGFRVIALAYKKLENDHHATTLTRETVESDLIFLGLLILENRLKEETKPVLEELISARIRTVMITGDNLQTAITVARKSGMVSESQKVILIEANETTGSSSASISWTLVEEKKHIMYGNQDNYINIRDEVSDKGREGSYHFALTGKSFHVISQHFSSLLPKILINGTIFARMSPGQKSSLVEEFQKLDYFVGMCGDGANDCGALKMAHVGISLSEQEASVASPFTSKTPNIECVPHLIKEGRAALVTSFCMFKYMALYSMIQYVGVLLLYWETNSLSNYQFLFQDLAITTLIGVTMNLNGAYPKLVPFRPAGRLISPPLLLSVIFNILLSLAMHIAGFILVQRQPWYSVEIHSACTVQNESISELTMSPTAPEKMESNSTFTSFENTTVWFLGTINCITVALVFSKGKPFRQPTYTNYIFVLVLIIQLGVCLFILFADIPELYRRLDLLCTPVLWRASIVIMLSLNFIVSLVAEEAVIENRALWMMIKRCFGYQSKSQYRIWQRDLANDPSWPPLNQTSHSDMPECGRGVSYSNPVFESNEEQL

SEQ ID NO: 24935 - protein, 1196 aa, Homo sapiens
  REGION 1..1196: note = ENSP00000339182
MGHFEKGQHALLNEGEENEMEIFGYRTQGCRKSLCLAGSIFSFGILPLVFYWRPAWHVWAHCVPCSLQEADTVLLRTTDEFQIYSWKKVIWIYLSALNSAFGLTPDHPLMTDEEYIINRAIRKPDLKVRCIKVQKIRYVWNYLEGQFQKIGSLEDWLSSAKIHQKFGSGLTREEQEIRRLICGPNTIDVEVTPIWKLLIKEVLNPFYIFQLFSVCLWFSEDYKEYAFAIIIMSIISISLTVYDLREQSVKLHHLVESHNSITVSVCGRKAGVQELESRVLVPGDLLILTGNKVLMPCDAVLIEGSCVVDEGMLTGESIPVTKTPLPKMDSSVPWKTQSEADYKRHVLFCGTEVIQAKAACSGTVRAVVLQTGFNTAKGDLVRSILYPKPVNFQLYRDAIRFLLCLVGTATIGMIYTLCVYVLSGEPPEEVVRKALDVITIAVPPALPAALTTGIIYAQRRLKKRGIFCISPQRINVCGQLNLVCFDKTGTLTRDGLDLWGVVSCDRNGFQEVHSFASGQALPWGPLCAAMASCHSLILLDGTIQGDPLDLKMFEATTWEMAFSGDDFHIKGVPAHAMVVKPCRTASQVPVEGIAILHQFPFSSALQRMTVIVQEMGGDRLAFMKGAPERVASFCQPETVPTSFVSELQIYTTQGFRVIALAYKKLENDHHATTLTRETVESDLIFLGLLILENRLKEETKPVLEELISARIRTVMITGDNLQTAITVARKSGMVSESQKVILIEANETTGSSSASISWTLVEEKKHIMYGNQDNYINIRDEVSDKGREGSYHFALTGKSFHVISQHFSSLLPKILINGTIFARMSPGQKSSLVEEFQKLDYFVGMCGDGANDCGALKMAHVGISLSEQEASVASPFTSKTPNIECVPHLIKEGRAALVTSFCMFKYMALYSMIQYVGVLLLYWETNSLSNYQFLFQDLAITTLIGVTMNLNGAYPKLVPFRPAGRLISPPLLLSVIFNILLSLAMHIAGFILVQRQPWYSVEIHSACTVQNESISELTMSPTAPEKMESNSTFTSFENTTVWFLGTINCITVALVFSKGKPFRQPTYTNYIFVLVLIIQLGVCLFILFADIPELYRRLDLLCTPVLWRASIVIMLSLNFIVSLVAEEAVIENRALWMMIKRCFGYQSKSQYRIWQRDLANDPSWPPLNQTSHSDMPECGRGVSYSNPVFESNEEQL

SEQ ID NO: 24936 - protein, 122 aa, Homo sapiens
  REGION 1..122: note = ENSP00000401481
  VARIANT 1: note = Any amino acid
XNLQTAITVARKSGMVSESQKVILIEANETTGSSSASISWTLVEEKKHIMYGNQDNYINIRDEVSDKGREGSYHFALTGKSFHVISQHFSSLLPKILINGTIFARMSPGQKSSLVEEFQKLE

SEQ ID NO: 24937 - protein, 576 aa, Homo sapiens
  REGION 1..576: note = ENSP00000295548
MGHFEKGQHALLNEGEENEMEIFGYRTQGCRKSLCLAGSIFSFGILPLVFYWRPAWHVWAHCVPCSLQEADTVLLRTTDEFQIYSWKKVIWIYLSALNSAFGLTPDHPLMTDEEYIINRAIRKPDLKVRCIKVQKIRYVWNYLEGQFQKIGSLEDWLSSAKIHQKFGSGLTREEQEIRRLICGPNTIDVEVTPIWKLLIKEVLNPFYIFQLFSVCLWFSEDYKEYAFAIIIMSIISISLTVYDLREQSVKLHHLVESHNSITVSVCGRKAGVQELESRVLVPGDLLILTGNKVLMPCDAVLIEGSCVVDEGMLTGESIPVTKTPLPKMDSSVPWKTQSEADYKRHVLFCGTEVIQAKAACSGTVRAVVLQTGFNTAKGDLVRSILYPKPVNFQLYRDAIRFLLCLVGTATIGMIYTLCVYVLSGEPPEEVVRKALDVITIAVPPALPAALTTGIIYAQRRLKKRGIFCISPQRINVCGQLNLVCFDKTGTLTRDGLDLWGVVSCDRNGFQEVHSFASGQALPWGPLCAAMASCHSLILLDGTIQGDPLDLKMFEATTWVSLCSSENLRSFFNARAT

SEQ ID NO: 24938 - protein, 106 aa, Homo sapiens
  REGION 1..106: note = ENSP00000400124
MDELKKEVSMDDHKLSLDELHRKYGTDLSRGLTSARAAEILARDGPNALTPPPTTPEWIKFCRQLFGGFSMLLWIGAILCFLAYSIQAATEEEPQNDNLYLGVVLS

SEQ ID NO: 24939 - protein, 1023 aa, Homo sapiens
  REGION 1..1023: note = ENSP00000295598
MGKGVGRDKYEPAAVSEQGDKKGKKGKKDRDMDELKKEVSMDDHKLSLDELHRKYGTDLSRGLTSARAAEILARDGPNALTPPPTTPEWIKFCRQLFGGFSMLLWIGAILCFLAYSIQAATEEEPQNDNLYLGVVLSAVVIITGCFSYYQEAKSSKIMESFKNMVPQQALVIRNGEKMSINAEEVVVGDLVEVKGGDRIPADLRIISANGCKVDNSSLTGESEPQTRSPDFTNENPLETRNIAFFSTNCVEGTARGIVVYTGDRTVMGRIATLASGLEGGQTPIAAEIEHFIHIITGVAVFLGVSFFILSLILEYTWLEAVIFLIGIIVANVPEGLLATVTVCLTLTAKRMARKNCLVKNLEAVETLGSTSTICSDKTGTLTQNRMTVAHMWFDNQIHEADTTENQSGVSFDKTSATWLALSRIAGLCNRAVFQANQENLPILKRAVAGDASESALLKCIELCCGSVKEMRERYAKIVEIPFNSTNKYQLSIHKNPNTSEPQHLLVMKGAPERILDRCSSILLHGKEQPLDEELKDAFQNAYLELGGLGERVLGFCHLFLPDEQFPEGFQFDTDDVNFPIDNLCFVGLISMIDPPRAAVPDAVGKCRSAGIKVIMVTGDHPITAKAIAKGVGIISEGNETVEDIAARLNIPVSQVNPRDAKACVVHGSDLKDMTSEQLDDILKYHTEIVFARTSPQQKLIIVEGCQRQGAIVAVTGDGVNDSPALKKADIGVAMGIAGSDVSKQAADMILLDDNFASIVTGVEEGRLIFDNLKKSIAYTLTSNIPEITPFLIFIIANIPLPLGTVTILCIDLGTDMVPAISLAYEQAESDIMKRQPRNPKTDKLVNERLISMAYGQIGMIQALGGFFTYFVILAENGFLPIHLLGLRVDWDDRWINDVEDSYGQQWTYEQRKIVEFTCHTAFFVSIVVVQWADLVICKTRRNSVFQQGMKNKILIFGLFEETALAAFLSYCPGMGVALRMYPLKPTWWFCAFPYSLLIFVYDEVRKLIIRRRPGGWVEKETYY

SEQ ID NO: 24940 - protein, 144 aa, Homo sapiens
  REGION 1..144: note = ENSP00000358506
MDELKKEVSMDDHKLSLDELHRKYGTDLSRGLTSARAAEILARDGPNALTPPPTTPEWIKFCRQLFGGFSMLLWIGAILCFLAYSIQAATEEEPQNDNLYLGVVLSAVVIITGCFSYYQEAKSSKIMESFKNMVPQQALVIRNG

SEQ ID NO: 24941 - protein, 157 aa, Homo sapiens
  REGION 1..157: note = ENSP00000396236
RQPRNPKTDKLVNERLISMAYGQIGMIQALGGFFTYFVILAENGFLPIHLLGLRVDWDDRWINDVEDSYGQQWTYEQRKIVEFTCHTAFFVSIVVVQWADLVICKTRRNSVFQQGMKNKILIFGLFEETALAAFLSYCPGMGVALRMYPLKTLTQYS

SEQ ID NO: 24942 - protein, 992 aa, Homo sapiens
  REGION 1..992: note = ENSP00000358508
MDELKKEVSMDDHKLSLDELHRKYGTDLSRGLTSARAAEILARDGPNALTPPPTTPEWIKFCRQLFGGFSMLLWIGAILCFLAYSIQAATEEEPQNDNLYLGVVLSAVVIITGCFSYYQEAKSSKIMESFKNMVPQQALVIRNGEKMSINAEEVVVGDLVEVKGGDRIPADLRIISANGCKVDNSSLTGESEPQTRSPDFTNENPLETRNIAFFSTNCVEGTARGIVVYTGDRTVMGRIATLASGLEGGQTPIAAEIEHFIHIITGVAVFLGVSFFILSLILEYTWLEAVIFLIGIIVANVPEGLLATVTVCLTLTAKRMARKNCLVKNLEAVETLGSTSTICSDKTGTLTQNRMTVAHMWFDNQIHEADTTENQSGVSFDKTSATWLALSRIAGLCNRAVFQANQENLPILKRAVAGDASESALLKCIELCCGSVKEMRERYAKIVEIPFNSTNKYQLSIHKNPNTSEPQHLLVMKGAPERILDRCSSILLHGKEQPLDEELKDAFQNAYLELGGLGERVLGFCHLFLPDEQFPEGFQFDTDDVNFPIDNLCFVGLISMIDPPRAAVPDAVGKCRSAGIKVIMVTGDHPITAKAIAKGVGIISEGNETVEDIAARLNIPVSQVNPRDAKACVVHGSDLKDMTSEQLDDILKYHTEIVFARTSPQQKLIIVEGCQRQGAIVAVTGDGVNDSPALKKADIGVAMGIAGSDVSKQAADMILLDDNFASIVTGVEEGRLIFDNLKKSIAYTLTSNIPEITPFLIFIIANIPLPLGTVTILCIDLGTDMVPAISLAYEQAESDIMKRQPRNPKTDKLVNERLISMAYGQIGMIQALGGFFTYFVILAENGFLPIHLLGLRVDWDDRWINDVEDSYGQQWTYEQRKIVEFTCHTAFFVSIVVVQWADLVICKTRRNSVFQQGMKNKILIFGLFEETALAAFLSYCPGMGVALRMYPLKPTWWFCAFPYSLLIFVYDEVRKLIIRRRPGGWVEKETYY

SEQ ID NO: 24943 - protein, 1023 aa, Homo sapiens
  REGION 1..1023: note = ENSP00000445306
MAFKVGRDKYEPAAVSEQGDKKGKKGKKDRDMDELKKEVSMDDHKLSLDELHRKYGTDLSRGLTSARAAEILARDGPNALTPPPTTPEWIKFCRQLFGGFSMLLWIGAILCFLAYSIQAATEEEPQNDNLYLGVVLSAVVIITGCFSYYQEAKSSKIMESFKNMVPQQALVIRNGEKMSINAEEVVVGDLVEVKGGDRIPADLRIISANGCKVDNSSLTGESEPQTRSPDFTNENPLETRNIAFFSTNCVEGTARGIVVYTGDRTVMGRIATLASGLEGGQTPIAAEIEHFIHIITGVAVFLGVSFFILSLILEYTWLEAVIFLIGIIVANVPEGLLATVTVCLTLTAKRMARKNCLVKNLEAVETLGSTSTICSDKTGTLTQNRMTVAHMWFDNQIHEADTTENQSGVSFDKTSATWLALSRIAGLCNRAVFQANQENLPILKRAVAGDASESALLKCIELCCGSVKEMRERYAKIVEIPFNSTNKYQLSIHKNPNTSEPQHLLVMKGAPERILDRCSSILLHGKEQPLDEELKDAFQNAYLELGGLGERVLGFCHLFLPDEQFPEGFQFDTDDVNFPIDNLCFVGLISMIDPPRAAVPDAVGKCRSAGIKVIMVTGDHPITAKAIAKGVGIISEGNETVEDIAARLNIPVSQVNPRDAKACVVHGSDLKDMTSEQLDDILKYHTEIVFARTSPQQKLIIVEGCQRQGAIVAVTGDGVNDSPALKKADIGVAMGIAGSDVSKQAADMILLDDNFASIVTGVEEGRLIFDNLKKSIAYTLTSNIPEITPFLIFIIANIPLPLGTVTILCIDLGTDMVPAISLAYEQAESDIMKRQPRNPKTDKLVNERLISMAYGQIGMIQALGGFFTYFVILAENGFLPIHLLGLRVDWDDRWINDVEDSYGQQWTYEQRKIVEFTCHTAFFVSIVVVQWADLVICKTRRNSVFQQGMKNKILIFGLFEETALAAFLSYCPGMGVALRMYPLKPTWWFCAFPYSLLIFVYDEVRKLIIRRRPGGWVEKETYY

SEQ ID NO: 24944 - protein, 1020 aa, Homo sapiens
  REGION 1..1020: note = ENSP00000354490
MGRGAGREYSPAATTAENGGGKKKQKEKELDELKKEVAMDDHKLSLDELGRKYQVDLSKGLTNQRAQDVLARDGPNALTPPPTTPEWVKFCRQLFGGFSILLWIGAILCFLAYGIQAAMEDEPSNDNLYLGVVLAAVVIVTGCFSYYQEAKSSKIMDSFKNMVPQQALVIREGEKMQINAEEVVVGDLVEVKGGDRVPADLRIISSHGCKVDNSSLTGESEPQTRSPEFTHENPLETRNICFFSTNCVEGTARGIVIATGDRTVMGRIATLASGLEVGRTPIAMEIEHFIQLITGVAVFLGVSFFVLSLILGYSWLEAVIFLIGIIVANVPEGLLATVTVCLTLTAKRMARKNCLVKNLEAVETLGSTSTICSDKTGTLTQNRMTVAHMWFDNQIHEADTTEDQSGATFDKRSPTWTALSRIAGLCNRAVFKAGQENISVSKRDTAGDASESALLKCIELSCGSVRKMRDRNPKVAEIPFNSTNKYQLSIHEREDSPQSHVLVMKGAPERILDRCSTILVQGKEIPLDKEMQDAFQNAYMELGGLGERVLGFCQLNLPSGKFPRGFKFDTDELNFPTEKLCFVGLMSMIDPPRAAVPDAVGKCRSAGIKVIMVTGDHPITAKAIAKGVGIISEGNETVEDIAARLNIPMSQVNPREAKACVVHGSDLKDMTSEQLDEILKNHTEIVFARTSPQQKLIIVEGCQRQGAIVAVTGDGVNDSPALKKADIGIAMGISGSDVSKQAADMILLDDNFASIVTGVEEGRLIFDNLKKSIAYTLTSNIPEITPFLLFIIANIPLPLGTVTILCIDLGTDMVPAISLAYEAAESDIMKRQPRNSQTDKLVNERLISMAYGQIGMIQALGGFFTYFVILAENGFLPSRLLGIRLDWDDRTMNDLEDSYGQEWTYEQRKVVEFTCHTAFFASIVVVQWADLIICKTRRNSVFQQGMKNKILIFGLLEETALAAFLSYCPGMGVALRMYPLKVTWWFCAFPYSLLIFIYDEVRKLILRRYPGGWVEKETYY

SEQ ID NO: 24945 - protein, 1009 aa, Homo sapiens
  REGION 1..1009: note = ENSP00000376066
MGRGAGREYSPAATTAENGGGKKKQKEKELDELKKEVAMDDHKLSLDELGRKYQVDLSKGLTNQRAQDVLARDGPNALTPPPTTPEWVKFCRQLFGGFSILLWIGAILCFLAYGIQAAMEDEPSNDNLYLGVVLAAVVIVTGCFSYYQEAKSSKIMDSFKNMVPQQALVIREGEKMQINAEEVVVGDLVEVKGGDRVPADLRIISSHGCKVDNSSLTGESEPQTRSPEFTHENPLETRNICFFSTNCVEGTARGIVIATGDRTVMGRIATLASGLEVGRTPIAMEIEHFIQLITGVAVFLGVSFFVLSLILGYSWLEAVIFLIGIIVANVPEGLLATVTVCLTLTAKRMARKNCLVKNLEAVETLGSTSTICSDKTGTLTQNRMTVAHMWFDNQIHEADTTEDQSGATFDKRSPTWTALSRIAGLCNRAVFKAGQENISVSKRDTAGDASESALLKCIELSCGSVRKMRDRNPKVAEIPFNSTNKYQLSIHEREDSPQSHVLVMKGAPERILDRCSTILVQGKEIPLDKEMQDAFQNAYMELGGLGERVLGFCQLNLPSGKFPRGFKFDTDELNFPTEKLCFVGLMSMIDPPRAAVPDAVGKCRSAGIKVIMVTGDHPITAKAIAKGVGIISEGNETVEDIAARLNIPMSQVNPREAKACVVHGSDLKDMTSEQLDEILKNHTEIVFARTSPQQKLIIVEGCQRQGAIVAVTGDGVNDSPALKKADIGIAMGISGSDVSKQAADMILLDDNFASIVTGVEEGRLIFDNLKKSIAYTLTSNIPEITPFLLFIIANIPLPLGTVTILCIDLGTDMVPAISLAYEAAESDIMKRQPRNSQTDKLVNERLISMAYGQIGMIQALGGFFTYFVILAENGFLPSRLLGIRLDWDDRTMNDLEDSYGQEWTYEQRKVVEFTCHTAFFASIVVVQWADLIICKTRRNSVFQQGMKNKILIFGLLEETALAAFLSYCPGMGVALRMYPLNLLIFIYDEVRKLILRRYPGGWVEKETYY

SEQ ID NO: 24946 - protein, 714 aa, Homo sapiens
  REGION 1..714: note = ENSP00000411705
  VARIANT 1: note = Any amino acid
XQLITGVAVFLGVSFFVLSLILGYSWLEAVIFLIGIIVANVPEGLLATVTVCLTLTAKRMARKNCLVKNLEAVETLGSTSTICSDKTGTLTQNRMTVAHMWFDNQIHEADTTEDQSGATFDKRSPTWTALSRIAGLCNRAVFKAGQENISVSKRDTAGDASESALLKCIELSCGSVRKMRDRNPKVAEIPFNSTNKYQLSIHEREDSPQSHVLVMKGAPERILDRCSTILVQGKEIPLDKEMQDAFQNAYMELGGLGERVLGFCQLNLPSGKFPRGFKFDTDELNFPTEKLCFVGLMSMIDPPRAAVPDAVGKCRSAGIKVIMVTGDHPITAKAIAKGVGIISEGNETVEDIAARLNIPMSQVNPREAKACVVHGSDLKDMTSEQLDEILKNHTEIVFARTSPQQKLIIVEGCQRQGAIVAVTGDGVNDSPALKKADIGIAMGISGSDVSKQAADMILLDDNFASIVTGVEEGRLIFDNLKKSIAYTLTSNIPEITPFLLFIIANIPLPLGTVTILCIDLGTDMVPAISLAYEAAESDIMKRQPRNSQTDKLVNERLISMAYGQIENGFLPSRLLGIRLDWDDRTMNDLEDSYGQEWTYEQRKVVEFTCHTAFFASIVVVQWADLIICKTRRNSVFQQGMKNKILIFGLLEETALAAFLSYCPGMGVALRMYPLKVTWWFCAFPYSLLIFIYDEVRKLILRRYPGGWVEKETYY

SEQ ID NO: 24947 - protein, 1226 aa, Homo sapiens
  REGION 1..1226: note = ENSP00000411503
MGDKKDDKDSPKKNKGKERRDLDDLKKEVAMTEHKMSVEEVCRKYNTDCVQGLTHSKAQEILARDGPNALTPPPTTPEWVKFCRQLFGGFSILLWIGAILCFLAYGIQAGTEDDPSGDNLYLGIVLAAVVIITGCFSYYQEAKSSKIMESFKNMVPQQALVIREGEKMQVNAEEVVVGDLVEIKGGDRVPADLRIISAHGCKVDNSSLTGESEPQTRSPDCTHDNPLETRNITFFSTNCVEGTARGVVVATGDRTVMGRIATLASGLEVGKTPIAIEIEHFIQLITGVAVFLGVSFFILSLILGYTWLEAVIFLIGIIVANVPEGLLATVTVCLTLTAKRMARKNCLVKNLEAVETLGSTSTICSDKTGTLTQNRMTVAHMWFDNQIHEADTTEDQSGTSFDKSSHTWVALSHIAGLCNRAVFKGGQDNIPVLKRDVAGDASESALLKCIELSSGSVKLMRERNKKVAEIPFNSTNKYQLSIHETEDPNDNRYLLVMKGAPERILDRCSTILLQGKEQPLDEEMKEAFQNAYLELGGLGERVLGFCHYYLPEEQFPKGFAFDCDDVNFTTDNLCFVGLMSMIDPPRAAVPDAVGKCRSAGIKVIMVTGDHPITAKAIAKGVGIISEGNETVEDIAARLNIPVSQVNPRDAKACVIHGTDLKDFTSEQIDEILQNHTEIVFARTSPQQKLIIVEGCQRQGAIVAVTGDGVNDSPALKKADIGVAMGIAGSDVSKQAADMILLDDNFASIVTGVEEGRLIFDNLKKSIAYTLTSNIPEITPFLLFIMANIPLPLGTITILCIDLGTDMVPAISLAYEAAESDIMKRQPRNPRTDKLVNERLISMAYGQIGMIQALGGFFSYFVILAENGFLPGNLVGIRLNWDDRTVNDLEDSYGQQWTYEQRKVVEFTCHTAFFVSIVVVQWADLIICKTRRNSVFQQGMKNKILIFGLFEETALAAFLSYCPGMDVALRMYPLKPSWWFCAFPYSFLIFVYDEIRKLILRRNPGGEGARQGSRGGRGAAGSQAAGPRLPSPCWMALPPGSHSSLSSHLSGHPLCLLTGLCLCGFLVSLPLCPSLCWAARLACLSPSLTLSLSFLLCLSRLGGEGNLLLTSAPPHRPSLPRPPGPGPPLSVPPILYSGGRSPLFLWPHLGPHPLHYLLPPPLWLASLPCPKPLSSLFSVSVSLPLLTPLSIPPAPATSLGSFLLPFSPPADAISGSGQLSNISVGRE

SEQ ID NO: 24948 - protein, 1013 aa, Homo sapiens
  REGION 1..1013: note = ENSP00000302397
MGDKKDDKDSPKKNKGKERRDLDDLKKEVAMTEHKMSVEEVCRKYNTDCVQGLTHSKAQEILARDGPNALTPPPTTPEWVKFCRQLFGGFSILLWIGAILCFLAYGIQAGTEDDPSGDNLYLGIVLAAVVIITGCFSYYQEAKSSKIMESFKNMVPQQALVIREGEKMQVNAEEVVVGDLVEIKGGDRVPADLRIISAHGCKVDNSSLTGESEPQTRSPDCTHDNPLETRNITFFSTNCVEGTARGVVVATGDRTVMGRIATLASGLEVGKTPIAIEIEHFIQLITGVAVFLGVSFFILSLILGYTWLEAVIFLIGIIVANVPEGLLATVTVCLTLTAKRMARKNCLVKNLEAVETLGSTSTICSDKTGTLTQNRMTVAHMWFDNQIHEADTTEDQSGTSFDKSSHTWVALSHIAGLCNRAVFKGGQDNIPVLKRDVAGDASESALLKCIELSSGSVKLMRERNKKVAEIPFNSTNKYQLSIHETEDPNDNRYLLVMKGAPERILDRCSTILLQGKEQPLDEEMKEAFQNAYLELGGLGERVLGFCHYYLPEEQFPKGFAFDCDDVNFTTDNLCFVGLMSMIDPPRAAVPDAVGKCRSAGIKVIMVTGDHPITAKAIAKGVGIISEGNETVEDIAARLNIPVSQVNPRDAKACVIHGTDLKDFTSEQIDEILQNHTEIVFARTSPQQKLIIVEGCQRQGAIVAVTGDGVNDSPALKKADIGVAMGIAGSDVSKQAADMILLDDNFASIVTGVEEGRLIFDNLKKSIAYTLTSNIPEITPFLLFIMANIPLPLGTITILCIDLGTDMVPAISLAYEAAESDIMKRQPRNPRTDKLVNERLISMAYGQIGMIQALGGFFSYFVILAENGFLPGNLVGIRLNWDDRTVNDLEDSYGQQWTYEQRKVVEFTCHTAFFVSIVVVQWADLIICKTRRNSVFQQGMKNKILIFGLFEETALAAFLSYCPGMDVALRMYPLKPSWWFCAFPYSFLIFVYDEIRKLILRRNPGGWVEKETYY

SEQ ID NO: 24949 - protein, 983 aa, Homo sapiens
  REGION 1..983: note = ENSP00000471581
MTEHKMSVEEVCRKYNTDCVQGLTHSKAQEILARDGPNALTPPPTTPEWVKFCRQLFGGFSILLWIGAILCFLAYGIQAGTEDDPSGDNLYLGIVLAAVVIITGCFSYYQEAKSSKIMESFKNMVPQQALVIREGEKMQVNAEEVVVGDLVEIKGGDRVPADLRIISAHGCKVDNSSLTGESEPQTRSPDCTHDNPLETRNITFFSTNCVEGTARGVVVATGDRTVMGRIATLASGLEVGKTPIAIEIEHFIQLITGVAVFLGVSFFILSLILGYTWLEAVIFLIGIIVANVPEGLLATVTVCLTLTAKRMARKNCLVKNLEAVETLGSTSTICSDKTGTLTQNRMTVAHMWFDNQIHEADTTEDQSGTSFDKSSHTWVALSHIAGLCNRAVFKGGQDNIPVLKRDVAGDASESALLKCIELSSGSVKLMRERNKKVAEIPFNSTNKYQLSIHETEDPNDNRYLLVMKGAPERILDRCSTILLQGKEQPLDEEMKEAFQNAYLELGGLGERVLGFCHYYLPEEQFPKGFAFDCDDVNFTTDNLCFVGLMSMIDPPRAAVPDAVGKCRSAGIKVIMVTGDHPITAKAIAKGVGIISEGNETVEDIAARLNIPVSQVNPRDAKACVIHGTDLKDFTSEQIDEILQNHTEIVFARTSPQQKLIIVEGCQRQGAIVAVTGDGVNDSPALKKADIGVAMGIAGSDVSKQAADMILLDDNFASIVTGVEEGRLIFDNLKKSIAYTLTSNIPEITPFLLFIMANIPLPLGTITILCIDLGTDMVPAISLAYEAAESDIMKRQPRNPRTDKLVNERLISMAYGQIGMIQALGGFFSYFVILAENGFLPGNLVGIRLNWDDRTVNDLEDSYGQQWTYEQRKVVEFTCHTAFFVSIVVVQWADLIICKTRRNSVFQQGMKNKILIFGLFEETALAAFLSYCPGMDVALRMYPLKPSWWFCAFPYSFLIFVYDEIRKLILRRNPGGWVEKETYY

SEQ ID NO: 24950 - protein, 1026 aa, Homo sapiens
  REGION 1..1026: note = ENSP00000444688
MGSGGSDSYRIATSQDKKDDKDSPKKNKGKERRDLDDLKKEVAMTEHKMSVEEVCRKYNTDCVQGLTHSKAQEILARDGPNALTPPPTTPEWVKFCRQLFGGFSILLWIGAILCFLAYGIQAGTEDDPSGDNLYLGIVLAAVVIITGCFSYYQEAKSSKIMESFKNMVPQQALVIREGEKMQVNAEEVVVGDLVEIKGGDRVPADLRIISAHGCKVDNSSLTGESEPQTRSPDCTHDNPLETRNITFFSTNCVEGTARGVVVATGDRTVMGRIATLASGLEVGKTPIAIEIEHFIQLITGVAVFLGVSFFILSLILGYTWLEAVIFLIGIIVANVPEGLLATVTVCLTLTAKRMARKNCLVKNLEAVETLGSTSTICSDKTGTLTQNRMTVAHMWFDNQIHEADTTEDQSGTSFDKSSHTWVALSHIAGLCNRAVFKGGQDNIPVLKRDVAGDASESALLKCIELSSGSVKLMRERNKKVAEIPFNSTNKYQLSIHETEDPNDNRYLLVMKGAPERILDRCSTILLQGKEQPLDEEMKEAFQNAYLELGGLGERVLGFCHYYLPEEQFPKGFAFDCDDVNFTTDNLCFVGLMSMIDPPRAAVPDAVGKCRSAGIKVIMVTGDHPITAKAIAKGVGIISEGNETVEDIAARLNIPVSQVNPRDAKACVIHGTDLKDFTSEQIDEILQNHTEIVFARTSPQQKLIIVEGCQRQGAIVAVTGDGVNDSPALKKADIGVAMGIAGSDVSKQAADMILLDDNFASIVTGVEEGRLIFDNLKKSIAYTLTSNIPEITPFLLFIMANIPLPLGTITILCIDLGTDMVPAISLAYEAAESDIMKRQPRNPRTDKLVNERLISMAYGQIGMIQALGGFFSYFVILAENGFLPGNLVGIRLNWDDRTVNDLEDSYGQQWTYEQRKVVEFTCHTAFFVSIVVVQWADLIICKTRRNSVFQQGMKNKILIFGLFEETALAAFLSYCPGMDVALRMYPLKPSWWFCAFPYSFLIFVYDEIRKLILRRNPGGWVEKETYY

SEQ ID NO: 24951 - protein, 1024 aa, Homo sapiens
  REGION 1..1024: note = ENSP00000437577
MGGWEEERNRRATDKKDDKDSPKKNKGKERRDLDDLKKEVAMTEHKMSVEEVCRKYNTDCVQGLTHSKAQEILARDGPNALTPPPTTPEWVKFCRQLFGGFSILLWIGAILCFLAYGIQAGTEDDPSGDNLYLGIVLAAVVIITGCFSYYQEAKSSKIMESFKNMVPQQALVIREGEKMQVNAEEVVVGDLVEIKGGDRVPADLRIISAHGCKVDNSSLTGESEPQTRSPDCTHDNPLETRNITFFSTNCVEGTARGVVVATGDRTVMGRIATLASGLEVGKTPIAIEIEHFIQLITGVAVFLGVSFFILSLILGYTWLEAVIFLIGIIVANVPEGLLATVTVCLTLTAKRMARKNCLVKNLEAVETLGSTSTICSDKTGTLTQNRMTVAHMWFDNQIHEADTTEDQSGTSFDKSSHTWVALSHIAGLCNRAVFKGGQDNIPVLKRDVAGDASESALLKCIELSSGSVKLMRERNKKVAEIPFNSTNKYQLSIHETEDPNDNRYLLVMKGAPERILDRCSTILLQGKEQPLDEEMKEAFQNAYLELGGLGERVLGFCHYYLPEEQFPKGFAFDCDDVNFTTDNLCFVGLMSMIDPPRAAVPDAVGKCRSAGIKVIMVTGDHPITAKAIAKGVGIISEGNETVEDIAARLNIPVSQVNPRDAKACVIHGTDLKDFTSEQIDEILQNHTEIVFARTSPQQKLIIVEGCQRQGAIVAVTGDGVNDSPALKKADIGVAMGIAGSDVSKQAADMILLDDNFASIVTGVEEGRLIFDNLKKSIAYTLTSNIPEITPFLLFIMANIPLPLGTITILCIDLGTDMVPAISLAYEAAESDIMKRQPRNPRTDKLVNERLISMAYGQIGMIQALGGFFSYFVILAENGFLPGNLVGIRLNWDDRTVNDLEDSYGQQWTYEQRKVVEFTCHTAFFVSIVVVQWADLIICKTRRNSVFQQGMKNKILIFGLFEETALAAFLSYCPGMDVALRMYPLKPSWWFCAFPYSFLIFVYDEIRKLILRRNPGGWVEKETYY

SEQ ID NO: 24952 - protein, 251 aa, Homo sapiens
  REGION 1..251: note = ENSP00000469129
MTEHKMSVEEVCRKYNTDCVQGLTHSKAQEILARDGPNALTPPPTTPEWVKFCRQLFGGFSILLWIGAILCFLAYGIQAGTEDDPSGDNLYLGIVLAAVVIITGCFSYYQEAKSSKIMESFKNMVPQQALVIREGEKMQVNAEEVVVGDLVEIKGGDRVPADLRIISAHGCKVDNSSLTGESEPQTRSPDCTHDNPLETRNITFFSTNCVEGTARGVVVATGDRTVMGRIATLASGLEVGKTPIAIEIEHF

SEQ ID NO: 24953 - skipped

SEQ ID NO: 24954 - protein, 130 aa, Homo sapiens
  REGION 1..130: note = ENSP00000477015
MLLTISEFKPTYQDRVAPPGLTQIPQIQKTEISFRPNDPKSYEAYVLNIVRFLEKYKDSAQRDDMIFEDCGDVPSEPKERGDFNHERGERKVCRFKLEWLGNCSGLNDETYGYKEGKPCIIIKLNRVLGF

SEQ ID NO: 24955 - protein, 303 aa, Homo sapiens
  REGION 1..303: note = ENSP00000356789
MARGKAKEEGSWKKFIWNSEKKEFLGRTGGSWFKILLFYVIFYGCLAGIFIGTIQVMLLTISEFKPTYQDRVAPPGLTQIPQIQKTEISFRPNDPKSYEAYVLNIVRFLEKYKDSAQRDDMIFEDCGDVPSEPKERGDFNHERGERKVCRFKLEWLGNCSGLNDETYGYKEGKPCIIIKLNRVLGFKPKPPKNESLETYPVMKYNPNVLPVQCTGKRDEDKDKVGNVEYFGLGNSPGFPLQYYPYYGKLLQPKYLQPLLAVQFTNLTMDTEIRIECKAYGENIGYSEKDRFQGRFDVKIEVKS

SEQ ID NO: 24956 - protein, 303 aa, Homo sapiens; identical to SEQ ID NO: 24955
  REGION 1..303: note = ENSP00000356790

SEQ ID NO: 24957 - protein, 166 aa, Homo sapiens
  REGION 1..166: note = ENSP00000459145
MIRPKTENLDVIVNVSDTESWDQHVQKLNKFLEPYNDSIQAQKNDVCRPGRYYEQPDNGVLNYPKRACQFNRTQLGNCSGIGDSTHYGYSTGQPCVFIKMNRVINFYAGANQSMNVTCAGKRDEDAENLGNFVMFPANGNIDLMYFPYYGKKFHVNYTQPLVAVKF

SEQ ID NO: 24958 - protein, 290 aa, Homo sapiens
  REGION 1..290: note = ENSP00000250111
MVIQKEKKSCGQVVEEWKEFVWNPRTHQFMGRTGTSWAFILLFYLVFYGFLTAMFTLTMWVMLQTVSDHTPKYQDRLATPGLMIRPKTENLDVIVNVSDTESWDQHVQKLNKFLEPYNDSIQAQKNDVCRPGRYYEQPDNGVLNYPKRACQFNRTQLGNCSGIGDSTHYGYSTGQPCVFIKMNRVINFYAGANQSMNVTCAGKRDEDAENLGNFVMFPANGNIDLMYFPYYGKKFHVNYTQPLVAVKFLNVTPNVEVNVECRINAANIATDDERDKFAGRVAFKLRINKT

SEQ ID NO: 24959 - protein, 172 aa, Homo sapiens
  REGION 1..172: note = ENSP00000460499
  VARIANT 1: note = Any amino acid
XEQPDNGVLNYPKRACQFNRTQLGNCSGIGDSTHYGYSTGQPCVFIKMNRVINFYAGANQSMNVTCAGKRPHHHRNKGKLIPEDGRDEDAENLGNFVMFPANGNIDLMYFPYYGKKFHVNYTQPLVAVKFLNVTPNVEVNVECRINAANIATDDERDKFAGRVAFKLRINKT

SEQ ID NO: 24960 - protein, 133 aa, Homo sapiens
  REGION 1..133: note = ENSP00000417522
MWVMLQTLNDEVPKYRDQIPSPGLMVFPKPVTALEYTFSRSDPTSYAGYIEDLKKFLKPYTLEEQKNLTVCPDGALFEQKGPVYVACQFPISLLQACSGMNDPDFGYSQGNPCILVKMNRIIGLKPEGVPRID

SEQ ID NO: 24961 - protein, 279 aa, Homo sapiens
  REGION 1..279: note = ENSP00000286371
MTKNEKKSLNQSLAEWKLFIYNPTTGEFLGRTAKSWGLILLFYLVFYGFLAALFSFTMWVMLQTLNDEVPKYRDQIPSPGLMVFPKPVTALEYTFSRSDPTSYAGYIEDLKKFLKPYTLEEQKNLTVCPDGALFEQKGPVYVACQFPISLLQACSGMNDPDFGYSQGNPCILVKMNRIIGLKPEGVPRIDCVSKNEDIPNVAVYPHNGMIDLKYFPYYGKKLHVGYLQPLVAVQVSFAPNNTGKEVTVECKIDGSANLKSQDDRDKFLGRVMFKITARA

SEQ ID NO: 24962 - protein, 44 aa, Homo sapiens
  REGION 1..44: note = ENSP00000418280
MTKNEKKSLNQSLAEWKLFIYNPTTGEFLGRTAKSWGSQYVVGK

SEQ ID NO: 24963 - protein, 43 aa, Homo sapiens
  REGION 1..43: note = ENSP00000418952
  VARIANT 1: note = Any amino acid
XKNEKKSLNQSLAEWKLFIYNPTTGEFLGRTAKSWGSQYVVGK

SEQ ID NO: 24964 - protein, 89 aa, Homo sapiens
  REGION 1..89: note = ENSP00000418353
MGSWLHSSHSRCGLCFRLSTMRFQNTVTRFLAQVGYLQPLVAVQVSFAPNNTGKEVTVECKIDGSANLKSQDDRDKFLGRVMFKITARA

SEQ ID NO: 24965 - protein, 119 aa, Homo sapiens
  REGION 1..119: note = ENSP00000419962
MLSEGDILFSSLLSSPSLFWPPGLILLFYLVFYGFLAALFSFTMWVMLQTLNDEVPKYRDQIPSPGLMVFPKPVTALEYTFSRSDPTSYAGYIEDLKKFLKPYTLEEQKNLTVCPDGAL

SEQ ID NO: 24966 - protein, 27 aa, Homo sapiens
  REGION 1..27: note = ENSP00000417608
IIGLKPEGVPRIDCVSKLVGVLVISAI

SEQ ID NO: 24967 - protein, 999 aa, Homo sapiens
  REGION 1..999: note = ENSP00000380234
MEAAHLLPAADVLRHFSVTAEGGLSPAQVTGARERYGPNELPSEEGKSLWELVLEQFEDLLVRILLLAALVSFVLAWFEEGEETTTAFVEPLVIMLILVANAIVGVWQERNAESAIEALKEYEPEMGKVIRSDRKGVQRIRARDIVPGDIVEVAVGDKVPADLRLIEIKSTTLRVDQSILTGESVSVTKHTEAIPDPRAVNQDKKNMLFSGTNITSGKAVGVAVATGLHTELGKIRSQMAAVEPERTPLQRKLDEFGRQLSHAISVICVAVWVINIGHFADPAHGGSWLRGAVYYFKIAVALAVAAIPEGLPAVITTCLALGTRRMARKNAIVRSLPSVETLGCTSVICSDKTGTLTTNQMSVCRMFVVAEADAGSCLLHEFTISGTTYTPEGEVRQGDQPVRCGQFDGLVELATICALCNDSALDYNEAKGVYEKVGEATETALTCLVEKMNVFDTDLQALSRVERAGACNTVIKQLMRKEFTLEFSRDRKSMSVYCTPTRPHPTGQGSKMFVKGAPESVIERCSSVRVGSRTAPLTPTSREQILAKIRDWGSGSDTLRCLALATRDAPPRKEDMELDDCSKFVQYETDLTFVGCVGMLDPPRPEVAACITRCYQAGIRVVMITGDNKGTAVAICRRLGIFGDTEDVAGKAYTGREFDDLSPEQQRQACRTARCFARVEPAHKSRIVENLQSFNEITAMTGDGVNDAPALKKAEIGIAMGSGTAVAKSAAEMVLSDDNFASIVAAVEEGRAIYSNMKQFIRYLISSNVGEVVCIFLTAILGLPEALIPVQLLWVNLVTDGLPATALGFNPPDLDIMEKLPRSPREALISGWLFFRYLAIGVYVGLATVAAATWWFVYDAEGPHINFYQLRNFLKCSEDNPLFAGIDCEVFESRFPTTMALSVLVTIEMCNALNSVSENQSLLRMPPWMNPWLLVAVAMSMALHFLILLVPPLPLIFQVTPLSGRQWVVVLQISLPVILLDEALKYLSRNHMHEEMSQK

SEQ ID NO: 24968 - protein, 1029 aa, Homo sapiens
  REGION 1..1029: note = ENSP00000380229
MEAAHLLPAADVLRHFSVTAEGGLSPAQVTGARERYGPNELPSEEGKSLWELVLEQFEDLLVRILLLAALVSFVLAWFEEGEETTTAFVEPLVIMLILVANAIVGVWQERNAESAIEALKEYEPEMGKVIRSDRKGVQRIRARDIVPGDIVEVAVGDKVPADLRLIEIKSTTLRVDQSILTGESVSVTKHTEAIPDPRAVNQDKKNMLFSGTNITSGKAVGVAVATGLHTELGKIRSQMAAVEPERTPLQRKLDEFGRQLSHAISVICVAVWVINIGHFADPAHGGSWLRGAVYYFKIAVALAVAAIPEGLPAVITTCLALGTRRMARKNAIVRSLPSVETLGCTSVICSDKTGTLTTNQMSVCRMFVVAEADAGSCLLHEFTISGTTYTPEGEVRQGDQPVRCGQFDGLVELATICALCNDSALDYNEAKGVYEKVGEATETALTCLVEKMNVFDTDLQALSRVERAGACNTVIKQLMRKEFTLEFSRDRKSMSVYCTPTRPHPTGQGSKMFVKGAPESVIERCSSVRVGSRTAPLTPTSREQILAKIRDWGSGSDTLRCLALATRDAPPRKEDMELDDCSKFVQYETDLTFVGCVGMLDPPRPEVAACITRCYQAGIRVVMITGDNKGTAVAICRRLGIFGDTEDVAGKAYTGREFDDLSPEQQRQACRTARCFARVEPAHKSRIVENLQSFNEITAMTGDGVNDAPALKKAEIGIAMGSGTAVAKSAAEMVLSDDNFASIVAAVEEGRAIYSNMKQFIRYLISSNVGEVVCIFLTAILGLPEALIPVQLLWVNLVTDGLPATALGFNPPDLDIMEKLPRSPREALISGWLFFRYLAIGVYVGLATVAAATWWFVYDAEGPHINFYQLRNFLKCSEDNPLFAGIDCEVFESRFPTTMALSVLVTIEMCNALNSVSENQSLLRMPPWMNPWLLVAVAMSMALHFLILLVPPLPLIFQVTPLSGRQWVVVLQISLPVILLDEALKYLSRNHMHACLYPGLLRTVSQAWSRQPLTTSWTPDHTGLASLKK

SEQ ID NO: 24969 - protein, 153 aa, Homo sapiens
  REGION 1..153: note = ENSP00000461480
ESRFPTTMALSVLVTIEMCNALNSVSENQSLLRMPPWMNPWLLVAVAMSMALHFLILLVPPLPLIFQVTPLSGRQWVVVLQISLPVILLDEALKYLSRNHMHACLYPGLLRTVSQAWSRQPLTTSWTPDHTGARDTASSRCQSCSEREEAGKK

SEQ ID NO: 24970 - protein, 1052 aa, Homo sapiens
  REGION 1..1052: note = ENSP00000353072
MEAAHLLPAADVLRHFSVTAEGGLSPAQVTGARERYGPNELPSEEGKSLWELVLEQFEDLLVRILLLAALVSFVLAWFEEGEETTTAFVEPLVIMLILVANAIVGVWQERNAESAIEALKEYEPEMGKVIRSDRKGVQRIRARDIVPGDIVEVAVGDKVPADLRLIEIKSTTLRVDQSILTGESVSVTKHTEAIPDPRAVNQDKKNMLFSGTNITSGKAVGVAVATGLHTELGKIRSQMAAVEPERTPLQRKLDEFGRQLSHAISVICVAVWVINIGHFADPAHGGSWLRGAVYYFKIAVALAVAAIPEGLPAVITTCLALGTRRMARKNAIVRSLPSVETLGCTSVICSDKTGTLTTNQMSVCRMFVVAEADAGSCLLHEFTISGTTYTPEGEVRQGDQPVRCGQFDGLVELATICALCNDSALDYNEAKGVYEKVGEATETALTCLVEKMNVFDTDLQALSRVERAGACNTVIKQLMRKEFTLEFSRDRKSMSVYCTPTRPHPTGQGSKMFVKGAPESVIERCSSVRVGSRTAPLTPTSREQILAKIRDWGSGSDTLRCLALATRDAPPRKEDMELDDCSKFVQYETDLTFVGCVGMLDPPRPEVAACITRCYQAGIRVVMITGDNKGTAVAICRRLGIFGDTEDVAGKAYTGREFDDLSPEQQRQACRTARCFARVEPAHKSRIVENLQSFNEITAMTGDGVNDAPALKKAEIGIAMGSGTAVAKSAAEMVLSDDNFASIVAAVEEGRAIYSNMKQFIRYLISSNVGEVVCIFLTAILGLPEALIPVQLLWVNLVTDGLPATALGFNPPDLDIMEKLPRSPREALISGWLFFRYLAIGVYVGLATVAAATWWFVYDAEGPHINFYQLRNFLKCSEDNPLFAGIDCEVFESRFPTTMALSVLVTIEMCNALNSVSENQSLLRMPPWMNPWLLVAVAMSMALHFLILLVPPLPLIFQVTPLSGRQWVVVLQISLPVILLDEALKYLSRNHMHACLYPGLLRTVSQAWSRQPLTTSWTPDHTGLASLGQGHSIVSLSELLREGGSREEMSQK

SEQ ID NO: 24971 - protein, 1043 aa, Homo sapiens
  REGION 1..1043: note = ENSP00000301387
MEAAHLLPAADVLRHFSVTAEGGLSPAQVTGARERYGPNELPSEEGKSLWELVLEQFEDLLVRILLLAALVSFVLAWFEEGEETTTAFVEPLVIMLILVANAIVGVWQERNAESAIEALKEYEPEMGKVIRSDRKGVQRIRARDIVPGDIVEVAVGDKVPADLRLIEIKSTTLRVDQSILTGESVSVTKHTEAIPDPRAVNQDKKNMLFSGTNITSGKAVGVAVATGLHTELGKIRSQMAAVEPERTPLQRKLDEFGRQLSHAISVICVAVWVINIGHFADPAHGGSWLRGAVYYFKIAVALAVAAIPEGLPAVITTCLALGTRRMARKNAIVRSLPSVETLGCTSVICSDKTGTLTTNQMSVCRMFVVAEADAGSCLLHEFTISGTTYTPEGEVRQGDQPVRCGQFDGLVELATICALCNDSALDYNEAKGVYEKVGEATETALTCLVEKMNVFDTDLQALSRVERAGACNTVIKQLMRKEFTLEFSRDRKSMSVYCTPTRPHPTGQGSKMFVKGAPESVIERCSSVRVGSRTAPLTPTSREQILAKIRDWGSGSDTLRCLALATRDAPPRKEDMELDDCSKFVQYETDLTFVGCVGMLDPPRPEVAACITRCYQAGIRVVMITGDNKGTAVAICRRLGIFGDTEDVAGKAYTGREFDDLSPEQQRQACRTARCFARVEPAHKSRIVENLQSFNEITAMTGDGVNDAPALKKAEIGIAMGSGTAVAKSAAEMVLSDDNFASIVAAVEEGRAIYSNMKQFIRYLISSNVGEVVCIFLTAILGLPEALIPVQLLWVNLVTDGLPATALGFNPPDLDIMEKLPRSPREALISGWLFFRYLAIGVYVGLATVAAATWWFVYDAEGPHINFYQLRNFLKCSEDNPLFAGIDCEVFESRFPTTMALSVLVTIEMCNALNSVSENQSLLRMPPWMNPWLLVAVAMSMALHFLILLVPPLPLIFQVTPLSGRQWVVVLQISLPVILLDEALKYLSRNHMHACLYPGLLRTVSQAWSRQPLTTSWTPDHTGRNEPEVSAGNRVESPVCTSD

SEQ ID NO: 24972 - protein, 998 aa, Homo sapiens
  REGION 1..998: note = ENSP00000380236
MEAAHLLPAADVLRHFSVTAEGGLSPAQVTGARERYGPNELPSEEGKSLWELVLEQFEDLLVRILLLAALVSFVLAWFEEGEETTTAFVEPLVIMLILVANAIVGVWQERNAESAIEALKEYEPEMGKVIRSDRKGVQRIRARDIVPGDIVEVAVGDKVPADLRLIEIKSTTLRVDQSILTGESVSVTKHTEAIPDPRAVNQDKKNMLFSGTNITSGKAVGVAVATGLHTELGKIRSQMAAVEPERTPLQRKLDEFGRQLSHAISVICVAVWVINIGHFADPAHGGSWLRGAVYYFKIAVALAVAAIPEGLPAVITTCLALGTRRMARKNAIVRSLPSVETLGCTSVICSDKTGTLTTNQMSVCRMFVVAEADAGSCLLHEFTISGTTYTPEGEVRQGDQPVRCGQFDGLVELATICALCNDSALDYNEAKGVYEKVGEATETALTCLVEKMNVFDTDLQALSRVERAGACNTVIKQLMRKEFTLEFSRDRKSMSVYCTPTRPHPTGQGSKMFVKGAPESVIERCSSVRVGSRTAPLTPTSREQILAKIRDWGSGSDTLRCLALATRDAPPRKEDMELDDCSKFVQYETDLTFVGCVGMLDPPRPEVAACITRCYQAGIRVVMITGDNKGTAVAICRRLGIFGDTEDVAGKAYTGREFDDLSPEQQRQACRTARCFARVEPAHKSRIVENLQSFNEITAMTGDGVNDAPALKKAEIGIAMGSGTAVAKSAAEMVLSDDNFASIVAAVEEGRAIYSNMKQFIRYLISSNVGEVVCIFLTAILGLPEALIPVQLLWVNLVTDGLPATALGFNPPDLDIMEKLPRSPREALISGWLFFRYLAIGVYVGLATVAAATWWFVYDAEGPHINFYQLRNFLKCSEDNPLFAGIDCEVFESRFPTTMALSVLVTIEMCNALNSVSENQSLLRMPPWMNPWLLVAVAMSMALHFLILLVPPLPLIFQVTPLSGRQWVVVLQISLPVILLDEALKYLSRNHMHEMSQK

SEQ ID NO: 24973 - protein, 142 aa, Homo sapiens
  REGION 1..142: note = ENSP00000458865
ESRFPTTMALSVLVTIEMCNALNSVSENQSLLRMPPWMNPWLLVAVAMSMALHFLILLVPPLPLIFQVTPLSGRQWVVVLQISLPVILLDEALKYLSRNHMHGPGTQHRLAVRAAQRGRKQGRNEPEVSAGNRVESPVCTSD

SEQ ID NO: 24974 - protein, 1029 aa, Homo sapiens; identical to SEQ ID NO: 24968
  REGION 1..1029: note = ENSP00000312577

SEQ ID NO: 24975 - protein, 1243 aa, Homo sapiens [sequence omitted]

SEQ ID NO: 24976 - protein, 1198 aa, Homo sapiens
  REGION 1..1198: note = ENSP00000373311
MGDMTNSDFYSKNQRNESSHGGEFGCTMEELRSLMELRGTEAVVKIKETYGDTEAICRRLKTSPVEGLPGTAPDLEKRKQIFGQNFIPPKKPKTFLQLVWEALQDVTLIILEIAAIISLGLSFYHPPGEGNEGCATAQGGAEDEGEAEAGWIEGAAILLSVICVVLVTAFNDWSKEKQFRGLQSRIEQEQKFTVVRAGQVVQIPVAEIVVGDIAQVKYGDLLPADGLFIQGNDLKIDESSLTGESDQVRKSVDKDPMLLSGTHVMEGSGRMLVTAVGVNSQTGIIFTLLGAGGEEEEKKDKKAKQQDGAAAMEMQPLKSAEGGDADDRKKASMHKKEKSVLQGKLTKLAVQIGKAGLVMSAITVIILVLYFTVDTFVVNKKPWLPECTPVYVQYFVKFFIIGVTVLVVAVPEGLPLAVTISLAYSVKKMMKDNNLVRHLDACETMGNATAICSDKTGTLTTNRMTVVQAYVGDVHYKEIPDPSSINTKTMELLINAIAINSAYTTKILPPEKEGALPRQVGNKTECGLLGFVLDLKQDYEPVRSQMPEEKLYKVYTFNSVRKSMSTVIKLPDESFRMYSKGASEIVLKKCCKILNGAGEPRVFRPRDRDEMVKKVIEPMACDGLRTICVAYRDFPSSPEPDWDNENDILNELTCICVVGIEDPVRPEVPEAIRKCQRAGITVRMVTGDNINTARAIAIKCGIIHPGEDFLCLEGKEFNRRIRNEKGEIEQERIDKIWPKLRVLARSSPTDKHTLVKGIIDSTHTEQRQVVAVTGDGTNDGPALKKADVGFAMGIAGTDVAKEASDIILTDDNFSSIVKAVMWGRNVYDSISKFLQFQLTVNVVAVIVAFTGACITQDSPLKAVQMLWVNLIMDTFASLALATEPPTETLLLRKPYGRNKPLISRTMMKNILGHAVYQLALIFTLLFVGEKMFQIDSGRNAPLHSPPSEHYTIIFNTFVMMQLFNEINARKIHGERNVFDGIFRNPIFCTIVLGTFAIQIVIVQFGGKPFSCSPLQLDQWMWCIFIGLGELVWGQVIATIPTSRLKFLKEAGRLTQKEEIPEEELNEDVEEIDHAERELRRGQILWFRGLNRIQTQIRVVKAFRSSLYEGLEKPESRTSIHNFMAHPEFRIEDSQPHIPLIDDTDLEEDAALKQNSSPPSSLNKNNSAIDSGINLTTDTSKSATSSSPGSPIHSLETSL

SEQ ID NO: 24977 - protein, 1154 aa, Homo sapiens
  REGION 1..1154: note = ENSP00000424494
MGDMTNSDFYSKNQRNESSHGGEFGCTMEELRSLMELRGTEAVVKIKETYGDTEAICRRLKTSPVEGLPGTAPDLEKRKQIFGQNFIPPKKPKTFLQLVWEALQDVTLIILEIAAIISLGLSFYHPPGEGNEGCATAQGGAEDEGEAEAGWIEGAAILLSVICVVLVTAFNDWSKEKQFRGLQSRIEQEQKFTVVRAGQVVQIPVAEIVVGDIAQVKYGDLLPADGLFIQGNDLKIDESSLTGESDQVRKSVDKDPMLLSGTHVMEGSGRMLVTAVGVNSQTGIIFTLLGAGGEEEEKKDKKAKQQDGAAAMEMQPLKSAEGGDADDRKKASMHKKEKSVLQGKLTKLAVQIGKAGLVMSAITVIILVLYFTVDTFVVNKKPWLPECTPVYVQYFVKFFIIGVTVLVVAVPEGLPLAVTISLAYSVKKMMKDNNLVRHLDACETMGNATAICSDKTGTLTTNRMTVVQAYVGDVHYKEIPDPSSINTKTMELLINAIAINSAYTTKILPPEKEGALPRQVGNKTECGLLGFVLDLKQDYEPVRSQMPEEKLYKVYTFNSVRKSMSTVIKLPDESFRMYSKGASEIVLKKCCKILNGAGEPRVFRPRDRDEMVKKVIEPMACDGLRTICVAYRDFPSSPEPDWDNENDILNELTCICVVGIEDPVRPEVPEAIRKCQRAGITVRMVTGDNINTARAIAIKCGIIHPGEDFLCLEGKEFNRRIRNEKGEIEQERIDKIWPKLRVLARSSPTDKHTLVKGIIDSTHTEQRQVVAVTGDGTNDGPALKKADVGFAMGIAGTDVAKEASDIILTDDNFSSIVKAVMWGRNVYDSISKFLQFQLTVNVVAVIVAFTGACITQDSPLKAVQMLWVNLIMDTFASLALATEPPTETLLLRKPYGRNKPLISRTMMKNILGHAVYQLALIFTLLFVGEKMFQIDSGRNAPLHSPPSEHYTIIFNTFVMMQLFNEINARKIHGERNVFDGIFRNPIFCTIVLGTFAIQIVIVQFGGKPFSCSPLQLDQWMWCIFIGLGELVWGQVIATIPTSRLKFLKEAGRLTQKEEIPEEELNEDVEEIDHAERELRRGQILWFRGLNRIQTQIEVVNTFKSGASFQGALRRQSSVTSQSQDVANLSSPSRVSLSNALSSPTSLPPAAAGQG

SEQ ID NO: 24978 - protein, 1198 aa, Homo sapiens; identical to SEQ ID NO: 24976
  REGION 1..1198: note = ENSP00000380267

SEQ ID NO: 24979 - protein, 1099 aa, Homo sapiens
  REGION 1..1099: note = ENSP00000414854
AAIISLGLSFYHPPGEGNEGCATAQGGAEDEGEAEAGWIEGAAILLSVICVVLVTAFNDWSKEKQFRGLQSRIEQEQKFTVVRAGQVVQIPVAEIVVGDIAQVKYGDLLPADGLFIQGNDLKIDESSLTGESDQVRKSVDKDPMLLSGTHVMEGSGRMLVTAVGVNSQTGIIFTLLGAGGEEEEKKDKKGKMQDGNVDASQSKAKQQDGAAAMEMQPLKSAEGGDADDRKKASMHKKEKSVLQGKLTKLAVQIGKAGLVMSAITVIILVLYFTVDTFVVNKKPWLPECTPVYVQYFVKFFIIGVTVLVVAVPEGLPLAVTISLAYSVKKMMKDNNLVRHLDACETMGNATAICSDKTGTLTTNRMTVVQAYVGDVHYKEIPDPSSINTKTMELLINAIAINSAYTTKILPPEKEGALPRQVGNKTECGLLGFVLDLKQDYEPVRSQMPEEKLYKVYTFNSVRKSMSTVIKLPDESFRMYSKGASEIVLKKCCKILNGAGEPRVFRPRDRDEMVKKVIEPMACDGLRTICVAYRDFPSSPEPDWDNENDILNELTCICVVGIEDPVRPEVPEAIRKCQRAGITVRMVTGDNINTARAIAIKCGIIHPGEDFLCLEGKEFNRRIRNEKGEIEQERIDKIWPKLRVLARSSPTDKHTLVKGIIDSTHTEQRQVVAVTGDGTNDGPALKKADVGFAMGIAGTDVAKEASDIILTDDNFSSIVKAVMWGRNVYDSISKFLQFQLTVNVVAVIVAFTGACITQDSPLKAVQMLWVNLIMDTFASLALATEPPTETLLLRKPYGRNKPLISRTMMKNILGHAVYQLALIFTLLFVGEKMFQIDSGRNAPLHSPPSEHYTIIFNTFVMMQLFNEINARKIHGERNVFDGIFRNPIFCTIVLGTFAIQIVIVQFGGKPFSCSPLQLDQWMWCIFIGLGELVWGQVIATIPTSRLKFLKEAGRLTQKEEIPEEELNEDVEEIDHAERELRRGQILWFRGLNRIQTQIRVVKAFRSSLYEGLEKPESRTSIHNFMAHPEFRIEDSQPHIPLIDDTDLEEDAALKQNSSPPSSLNKNNSAIDSGINLTTDTSKSATSSSPGSPIHSLETSL

SEQ ID NO: 24980 - protein, 1154 aa, Homo sapiens; identical to SEQ ID NO: 24977
  REGION 1..1154: note = ENSP00000492732

SEQ ID NO: 24981 - protein, 1243 aa, Homo sapiens [sequence omitted]

SEQ ID NO: 24982 - protein, 1220 aa, Homo sapiens
  REGION 1..1220: note = ENSP00000343886
MGDMANSSIEFHPKPQQQRDVPQAGGFGCTLAELRTLMELRGAEALQKIEEAYGDVSGLCRRLKTSPTEGLADNTNDLEKRRQIYGQNFIPPKQPKTFLQLVWEALQDVTLIILEVAAIVSLGLSFYAPPGEESEACGNVSGGAEDEGEAEAGWIEGAAILLSVICVVLVTAFNDWSKEKQFRGLQSRIEQEQKFTVIRNGQLLQVPVAALVVGDIAQVKYGDLLPADGVLIQANDLKIDESSLTGESDHVRKSADKDPMLLSGTHVMEGSGRMVVTAVGVNSQTGIIFTLLGAGGEEEEKKDKKGKQQDGAMESSQTKAKKQDGAVAMEMQPLKSAEGGEMEEREKKKANAPKKEKSVLQGKLTKLAVQIGKAGLVMSAITVIILVLYFVIETFVVEGRTWLAECTPVYVQYFVKFFIIGVTVLVVAVPEGLPLAVTISLAYSVKKMMKDNNLVRHLDACETMGNATAICSDKTGTLTTNRMTVVQSYLGDTHYKEIPAPSALTPKILDLLVHAISINSAYTTKILPPEKEGALPRQVGNKTECALLGFVLDLKRDFQPVREQIPEDKLYKVYTFNSVRKSMSTVIRMPDGGFRLFSKGASEILLKKCTNILNSNGELRGFRPRDRDDMVRKIIEPMACDGLRTICIAYRDFSAGQEPDWDNENEVVGDLTCIAVVGIEDPVRPEVPEAIRKCQRAGITVRMVTGDNINTARAIAAKCGIIQPGEDFLCLEGKEFNRRIRNEKGEIEQERLDKVWPKLRVLARSSPTDKHTLVKGIIDSTTGEQRQVVAVTGDGTNDGPALKKADVGFAMGIAGTDVAKEASDIILTDDNFTSIVKAVMWGRNVYDSISKFLQFQLTVNVVAVIVAFTGACITQDSPLKAVQMLWVNLIMDTFASLALATEPPTESLLLRKPYGRDKPLISRTMMKNILGHAVYQLAIIFTLLFVGELFFDIDSGRNAPLHSPPSEHYTIIFNTFVMMQLFNEINARKIHGERNVFDGIFSNPIFCTIVLGTFGIQIVIVQFGGKPFSCSPLSTEQWLWCLFVGVGELVWGQVIATIPTSQLKCLKEAGHGPGKDEMTDEELAEGEEEIDHAERELRRGQILWFRGLNRIQTQIRVVKAFRSSLYEGLEKPESKTSIHNFMATPEFLINDYTHNIPLIDDTDVDENEERLRAPPPPSPNQNNNAIDSGIYLTTHVTKSATSSVFSSSPGSPLHSVETSL

SEQ ID NO: 24983 - protein, 1159 aa, Homo sapiens
  REGION 1..1159: note = ENSP00000359205
MGDMANSSIEFHPKPQQQRDVPQAGGFGCTLAELRTLMELRGAEALQKIEEAYGDVSGLCRRLKTSPTEGLADNTNDLEKRRQIYGQNFIPPKQPKTFLQLVWEALQDVTLIILEVAAIVSLGLSFYAPPGEESEACGNVSGGAEDEGEAEAGWIEGAAILLSVICVVLVTAFNDWSKEKQFRGLQSRIEQEQKFTVIRNGQLLQVPVAALVVGDIAQVKYGDLLPADGVLIQANDLKIDESSLTGESDHVRKSADKDPMLLSGTHVMEGSGRMVVTAVGVNSQTGIIFTLLGAGGEEEEKKDKKAKKQDGAVAMEMQPLKSAEGGEMEEREKKKANAPKKEKSVLQGKLTKLAVQIGKAGLVMSAITVIILVLYFVIETFVVEGRTWLAECTPVYVQYFVKFFIIGVTVLVVAVPEGLPLAVTISLAYSVKKMMKDNNLVRHLDACETMGNATAICSDKTGTLTTNRMTVVQSYLGDTHYKEIPAPSALTPKILDLLVHAISINSAYTTKILPPEKEGALPRQVGNKTECALLGFVLDLKRDFQPVREQIPEDKLYKVYTFNSVRKSMSTVIRMPDGGFRLFSKGASEILLKKCTNILNSNGELRGFRPRDRDDMVRKIIEPMACDGLRTICIAYRDFSAGQEPDWDNENEVVGDLTCIAVVGIEDPVRPEVPEAIRKCQRAGITVRMVTGDNINTARAIAAKCGIIQPGEDFLCLEGKEFNRRIRNEKGEIEQERLDKVWPKLRVLARSSPTDKHTLVKGIIDSTTGEQRQVVAVTGDGTNDGPALKKADVGFAMGIAGTDVAKEASDIILTDDNFTSIVKAVMWGRNVYDSISKFLQFQLTVNVVAVIVAFTGACITQDSPLKAVQMLWVNLIMDTFASLALATEPPTESLLLRKPYGRDKPLISRTMMKNILGHAVYQLAIIFTLLFVGELFFDIDSGRNAPLHSPPSEHYTIIFNTFVMMQLFNEINARKIHGERNVFDGIFSNPIFCTIVLGTFGIQIVIVQFGGKPFSCSPLSTEQWLWCLFVGVGELVWGQVIATIPTSQLKCLKEAGHGPGKDEMTDEELAEGEEEIDHAERELRRGQILWFRGLNRIQTQMEVVSTFKRSGSVQGAVRRRSSVLSQLHDVTNLSTPTHAILSAANPTSAAGNPGGESVP

SEQ ID NO: 24984 - protein, 1154 aa, Homo sapiens
  REGION 1..1154: note = ENSP00000377425
MGDMANSSIEFHPKPQQQRDVPQAGGFGCTLAELRTLMELRGAEALQKIEEAYGDVSGLCRRLKTSPTEGLADNTNDLEKRRQIYGQNFIPPKQPKTFLQLVWEALQDVTLIILEVAAIVSLGLSFYAPPGEESEACGNVSGGAEDEGEAEAGWIEGAAILLSVICVVLVTAFNDWSKEKQFRGLQSRIEQEQKFTVIRNGQLLQVPVAALVVGDIAQVKYGDLLPADGVLIQANDLKIDESSLTGESDHVRKSADKDPMLLSGTHVMEGSGRMVVTAVGVNSQTGIIFTLLGAGGEEEEKKDKKAKKQDGAVAMEMQPLKSAEGGEMEEREKKKANAPKKEKSVLQGKLTKLAVQIGKAGLVMSAITVIILVLYFVIETFVVEGRTWLAECTPVYVQYFVKFFIIGVTVLVVAVPEGLPLAVTISLAYSVKKMMKDNNLVRHLDACETMGNATAICSDKTGTLTTNRMTVVQSYLGDTHYKEIPAPSALTPKILDLLVHAISINSAYTTKILPPEKEGALPRQVGNKTECALLGFVLDLKRDFQPVREQIPEDKLYKVYTFNSVRKSMSTVIRMPDGGFRLFSKGASEILLKKCTNILNSNGELRGFRPRDRDDMVRKIIEPMACDGLRTICIAYRDFSAGQEPDWDNENEVVGDLTCIAVVGIEDPVRPEVPEAIRKCQRAGITVRMVTGDNINTARAIAAKCGIIQPGEDFLCLEGKEFNRRIRNEKGEIEQERLDKVWPKLRVLARSSPTDKHTLVKGIIDSTTGEQRQVVAVTGDGTNDGPALKKADVGFAMGIAGTDVAKEASDIILTDDNFTSIVKAVMWGRNVYDSISKFLQFQLTVNVVAVIVAFTGACITQDSPLKAVQMLWVNLIMDTFASLALATEPPTESLLLRKPYGRDKPLISRTMMKNILGHAVYQLAIIFTLLFVGELFFDIDSGRNAPLHSPPSEHYTIIFNTFVMMQLFNEINARKIHGERNVFDGIFSNPIFCTIVLGTFGIQIVIVQFGGKPFSCSPLSTEQWLWCLFVGVGELVWGQVIATIPTSQLKCLKEAGHGPGKDEMTDEELAEGEEEIDHAERELRRGQILWFRGLNRIQTQMEVVSTFKRSGSVQGAVRRRSSVLSQLHDVTNLSTPTHAILSAANPTSAAGSES

SEQ ID NO: 24985 - protein, 1173 aa, Homo sapiens
  REGION 1..1173: note = ENSP00000352062
MGDMANSSIEFHPKPQQQRDVPQAGGFGCTLAELRTLMELRGAEALQKIEEAYGDVSGLCRRLKTSPTEGLADNTNDLEKRRQIYGQNFIPPKQPKTFLQLVWEALQDVTLIILEVAAIVSLGLSFYAPPGEESEACGNVSGGAEDEGEAEAGWIEGAAILLSVICVVLVTAFNDWSKEKQFRGLQSRIEQEQKFTVIRNGQLLQVPVAALVVGDIAQVKYGDLLPADGVLIQANDLKIDESSLTGESDHVRKSADKDPMLLSGTHVMEGSGRMVVTAVGVNSQTGIIFTLLGAGGEEEEKKDKKGKQQDGAMESSQTKAKKQDGAVAMEMQPLKSAEGGEMEEREKKKANAPKKEKSVLQGKLTKLAVQIGKAGLVMSAITVIILVLYFVIETFVVEGRTWLAECTPVYVQYFVKFFIIGVTVLVVAVPEGLPLAVTISLAYSVKKMMKDNNLVRHLDACETMGNATAICSDKTGTLTTNRMTVVQSYLGDTHYKEIPAPSALTPKILDLLVHAISINSAYTTKILPPEKEGALPRQVGNKTECALLGFVLDLKRDFQPVREQIPEDKLYKVYTFNSVRKSMSTVIRMPDGGFRLFSKGASEILLKKCTNILNSNGELRGFRPRDRDDMVRKIIEPMACDGLRTICIAYRDFSAGQEPDWDNENEVVGDLTCIAVVGIEDPVRPEVPEAIRKCQRAGITVRMVTGDNINTARAIAAKCGIIQPGEDFLCLEGKEFNRRIRNEKGEIEQERLDKVWPKLRVLARSSPTDKHTLVKGIIDSTTGEQRQVVAVTGDGTNDGPALKKADVGFAMGIAGTDVAKEASDIILTDDNFTSIVKAVMWGRNVYDSISKFLQFQLTVNVVAVIVAFTGACITQDSPLKAVQMLWVNLIMDTFASLALATEPPTESLLLRKPYGRDKPLISRTMMKNILGHAVYQLAIIFTLLFVGELFFDIDSGRNAPLHSPPSEHYTIIFNTFVMMQLFNEINARKIHGERNVFDGIFSNPIFCTIVLGTFGIQIVIVQFGGKPFSCSPLSTEQWLWCLFVGVGELVWGQVIATIPTSQLKCLKEAGHGPGKDEMTDEELAEGEEEIDHAERELRRGQILWFRGLNRIQTQMEVVSTFKRSGSVQGAVRRRSSVLSQLHDVTNLSTPTHAILSAANPTSAAGNPGGESVP

SEQ ID NO: 24986 - protein, 1220 aa, Homo sapiens; identical to SEQ ID NO: 24982
  REGION 1..1220: note = ENSP00000263519

SEQ ID NO: 24987 - protein, 946 aa, Homo sapiens
  REGION 1..946: note = ENSP00000262429
MVEGRVSEFLKKLGFSGGGRQYQALEKDEEEALIDEQSELKAIEKEKKVTALPPKEACKCQKEDLARAFCVDLHTGLSEFSVTQRRLAHGWNEFVADNSEPVWKKYLDQFKNPLILLLLGSALVSVLTKEYEDAVSIATAVLVVVTVAFIQEYRSEKSLEELTKLVPPECNCLREGKLQHLLARELVPGDVVSLSIGDRIPADIRLTEVTDLLVDESSFTGEAEPCSKTDSPLTGGGDLTTLSNIVFMGTLVQYGRGQGVVIGTGESSQFGEVFKMMQAEETPKTPLQKSMDRLGKQLTLFSFGIIGLIMLIGWSQGKQLLSMFTIGVSLAVAAIPEGLPIVVMVTLVLGVLRMAKKRVIVKKLPIVETLGCCSVLCSDKTGTLTANEMTVTQLVTSDGLRAEVSGVGYDGQGTVCLLPSKEVIKEFSNVSVGKLVEAGCVANNAVIRKNAVMGQPTEGALMALAMKMDLSDIKNSYIRKKEIPFSSEQKWMAVKCSLKTEDQEDIYFMKGALEEVIRYCTMYNNGGIPLPLTPQQRSFCLQEEKRMGSLGLRVLALASGPELGRLTFLGLVGIIDPPRVGVKEAVQVLSESGVSVKMITGDALETALAIGRNIGLCNGKLQAMSGEEVDSVEKGELADRVGKVSVFFRTSPKHKLKIIKALQESGAIVAMTGDGVNDAVALKSADIGIAMGQTGTDVSKEAANMILVDDDFSAIMNAVEEGKGIFYNIKNFVRFQLSTSISALSLITLSTVFNLPSPLNAMQILWINIIMDGPPAQSLGVEPVDKDAFRQPPRSVRDTILSRALILKILMSAAIIISGTLFIFWKEMPEDRASTPRTTTMTFTCFVFFDLFNALTCRSQTKLIFEIGFLRNHMFLYSVLGSILGQLAVIYIPPLQRVFQTENLGALDLLFLTGLASSVFILSELLKLCEKYCCSPKRVQMHPEDV

SEQ ID NO: 24988 - protein, 975 aa, Homo sapiens
  REGION 1..975: note = ENSP00000397925
MVEGRVSEFLKKLGFSGGGRQYQALEKDEEEALIDEQSELKAIEKEKKVTALPPKEACKCQKEDLARAFCVDLHTGLSEFSVTQRRLAHGWNEFVADNSEPVWKKYLDQFKNPLILLLLGSALVSVLTKEYEDAVSIATAVLVVVTVAFIQEYRSEKSLEELTKLVPPECNCLREGKLQHLLARELVPGDVVSLSIGDRIPADIRLTEVTDLLVDESSFTGEAEPCSKTDSPLTGGGDLTTLSNIVFMGTLVQYGRGQGVVIGTGESSQFGEVFKMMQAEETPKTPLQKSMDRLGKQLTLFSFGIIGLIMLIGWSQGKQLLSMFTIGVSLAVAAIPEGLPIVVMVTLVLGVLRMAKKRVIVKKLPIVETLGCCSVLCSDKTGTLTANEMTVTQLVTSDGLRAEVSGVGYDGQGTVCLLPSKEVIKEFSNVSVGKLVEAGCVANNAVIRKNAVMGQPTEGALMALAMKMDLSDIKNSYIRKKEIPFSSEQKWMAVKCSLKTEDQEDIYFMKGALEEVIRYCTMYNNGGIPLPLTPQQRSFCLQEEKRMGSLGLRVLALASGPELGRLTFLGLVGIIDPPRVGVKEAVQVLSESGVSVKMITGDALETALAIGRNIGLCNGKLQAMSGEEVDSVEKGELADRVGKVSVFFRTSPKHKLKIIKALQESGAIVAMTGDGVNDAVALKSADIGIAMGQTGTDVSKEAANMILVDDDFSAIMNAVEEGKGIFYNIKNFVRFQLSTSISALSLITLSTVFNLPSPLNAMQILWINIIMDGPPAQRSSQKTEVCCTAVRLGVEGRGESTWAGRAGLGVEPVDKDAFRQPPRSVRDTILSRALILKILMSAAIIISGTLFIFWKEMPEDRASTPRTTTMTFTCFVFFDLFNALTCRSQTKLIFEIGFLRNHMFLYSVLGSILGQLAVIYIPPLQRVFQTENLGALDLLFLTGLASSVFILSELLKLCEKYCCSPKRVQMHPEDV

SEQ ID NO: 24989 - protein, 53 aa, Homo sapiens
  REGION 1..53: note = ENSP00000456595
  VARIANT 1: note = Any amino acid
XVWKKYLDQFKNPLILLLLGSALVSVLTKEYEDAVSIATAVLVVVTVAFIQHI

SEQ ID NO: 24990 - protein, 86 aa, Homo sapiens
  REGION 1..86: note = ENSP00000432994
MWSNLGIGLAISLSVVGAAWGIYITGSSIIGGGVKAPRIKTKNLVSIIFCEAVAIYGIIMAIVISNMAEPFSATDPKAIGHRNYHA

SEQ ID NO: 24991 - protein, 205 aa, Homo sapiens
  REGION 1..205: note = ENSP00000431605
MTGLALLYSGVFVAFWACALAVGVCYTIFDLGFRFDVAWFLTETSPFMWSNLGIGLAISLSVVGAAWGIYITGSSIIGGGVKAPRIKTKNLVSIIFCEAVAIYGIIMAIVISNMAEPFSATDPKAIGHRNYHAGYSMFGAGLTVGLSNLFCGVCVGIVGSGAALADAQNPSLFVKILIVEIFGSAIGLFGVIVAILQTSRVKMGD

SEQ ID NO: 24992 - protein, 261 aa, Homo sapiens
  REGION 1..261: note = ENSP00000434729
MTGLALLYSGVFVAFWACALAVGVCYTIFDLGFRFDVAWFLTETSPFMWSNLGIGLAISLSVVGAAWGIYITGSSIIGGGVKAPRIKTKNLVSIIFCEAVAIYGIIMAIVISNMAEPFSATDPKAIGHRNYHAGYSMFGAGLTVGLSNLFCGVCVGIVGSGAALADAQNPSLFVKILIVEIFGSAIGLFGVIVAILQVMNPLGKPLCPCPQPSLTLLLEKLKCSPSLPITIDSPKQLPPPHFHLLVFSYRGSLFLSLIWCH

SEQ ID NO: 24993 - protein, 158 aa, Homo sapiens
  REGION 1..158: note = ENSP00000236067
MWSNLGIGLAISLSVVGAAWGIYITGSSIIGGGVKAPRIKTKNLVSIIFCEAVAIYGIIMAIVISNMAEPFSATDPKAIGHRNYHAGYSMFGAGLTVGLSNLFCGVCVGIVGSGAALADAQNPSLFVKILIVEIFGSAIGLFGVIVAILQTSRVKMGD

SEQ ID NO: 24994 - protein, 252 aa, Homo sapiens
  REGION 1..252: note = ENSP00000432754
MTGLALLYSGVFVAFWACALAVGEAGSWRAGAASRPSWPGRNSAGKWPAGNTGPPRALHPRLWGLAPARASDSDKGDPDFQLLEEGFLTETSPFMWSNLGIGLAISLSVVGAAWGIYITGSSIIGGGVKAPRIKTKNLVSIIFCEAVAIYGIIMAIVISNMAEPFSATDPKAIGHRNYHAGYSMFGAGLTVGLSNLFCGVCVGIVGSGAALADAQNPSLFVKILIVEIFGSAIGLFGVIVAILQTSRVKMGD

SEQ ID NO: 24995 - protein, 46 aa, Homo sapiens
  REGION 1..46: note = ENSP00000435396
MTGLALLYSGVFVAFWACALAVAVLSPGGSLRTPLQGGGPSARQLL

SEQ ID NO: 24996 - protein, 88 aa, Homo sapiens
  REGION 1..88: note = ENSP00000431375
  VARIANT 1: note = Any amino acid
XAVGEAGSWRAGAASRPSWPGRNSAGKWPAGNTGPPRALHPRLWGLAPARASDSDKGDPDFQLLEEGCGRESATPFLIWASALMWHGS

SEQ ID NO: 24997 - protein, 158 aa, Homo sapiens; identical to SEQ ID NO: 24993
  REGION 1..158: note = ENSP00000434094

SEQ ID NO: 24998 - protein, 75 aa, Homo sapiens
  REGION 1..75: note = ENSP00000426495
NLQLLGATAIEDKLQDQVPETIETLMKADIKIWILTGDKQETAINIGHSCKLLKKNMGMIVINEGSLDGFSSSKI

SEQ ID NO: 24999 - protein, 1164 aa, Homo sapiens
  REGION 1..1164: note = ENSP00000371084
MPTMRRTVSEIRSRAEGYEKTDDVSEKTSLADQEEVRTIFINQPQLTKFCNNHVSTAKYNIITFLPRFLYSQFRRAANSFFLFIALLQQIPDVSPTGRYTTLVPLLFILAVAAIKEIIEDIKRHKADNAVNKKQTQVLRNGAWEIVHWEKVAVGEIVKVTNGEHLPADLISLSSSEPQAMCYIETSNLDGETNLKIRQGLPATSDIKDVDSLMRISGRIECESPNRHLYDFVGNIRLDGHGTVPLGADQILLRGAQLRNTQWVHGIVVYTGHDTKLMQNSTSPPLKLSNVERITNVQILILFCILIAMSLVCSVGSAIWNRRHSGKDWYLNLNYGGASNFGLNFLTFIILFNNLIPISLLVTLEVVKFTQAYFINWDLDMHYEPTDTAAMARTSNLNEELGQVKYIFSDKTGTLTCNVMQFKKCTIAGVAYGHVPEPEDYGCSPDEWQNSQFGDEKTFSDSSLLENLQNNHPTAPIICEFLTMMAVCHTAVPEREGDKIIYQAASPDEGALVRAAKQLNFVFTGRTPDSVIIDSLGQEERYELLNVLEFTSARKRMSVIVRTPSGKLRLYCKGADTVIYDRLAETSKYKEITLKHLEQFATEGLRTLCFAVAEISESDFQEWRAVYQRASTSVQNRLLKLEESYELIEKNLQLLGATAIEDKLQDQVPETIETLMKADIKIWILTGDKQETAINIGHSCKLLKKNMGMIVINEGSLDGTRETLSRHCTTLGDALRKENDFALIIDGKTLKYALTFGVRQYFLDLALSCKAVICCRVSPLQKSEVVEMVKKQVKVVTLAIGDGANDVSMIQTAHVGVGISGNEGLQAANSSDYSIAQFKYLKNLLMIHGAWNYNRVSKCILYCFYKNIVLYIIEIWFAFVNGFSGQILFERWCIGLYNVMFTAMPPLTLGIFERSCRKENMLKYPELYKTSQNALDFNTKVFWVHCLNGLFHSVILFWFPLKALQYGTAFGNGKTSDYLLLGNFVYTFVVITVCLKAGLETSYWTWFSHIAIWGSIALWVVFFGIYSSLWPAIPMAPDMSGEAAMLFSSGVFWMGLLFIPVASLLLDVVYKVIKRTAFKTLVDEVQELEAKSQDPGAVVLGKSLTERAQLLKNVFKKNHVNLYRSESLQQNLLHGYAFSQDENGIVSQSEVIRAYDTTKQRPDEW

SEQ ID NO: 25000 - protein, 1149 aa, Homo sapiens
  REGION 1..1149: note = ENSP00000264449
MPTMRRTVSEIRSRAEGYEKTDDVSEKTSLADQEEVRTIFINQPQLTKFCNNHVSTAKYNIITFLPRFLYSQFRRAANSFFLFIALLQQIPDVSPTGRYTTLVPLLFILAVAAIKEIIEDIKRHKADNAVNKKQTQVLRNGAWEIVHWEKVNVGDIVIIKGKEYIPADTVLLSSSEPQAMCYIETSNLDGETNLKIRQGLPATSDIKDVDSLMRISGRIECESPNRHLYDFVGNIRLDGHGTVPLGADQILLRGAQLRNTQWVHGIVVYTGHDTKLMQNSTSPPLKLSNVERITNVQILILFCILIAMSLVCSVGSAIWNRRHSGKDWYLNLNYGGASNFGLNFLTFIILFNNLIPISLLVTLEVVKFTQAYFINWDLDMHYEPTDTAAMARTSNLNEELGQVKYIFSDKTGTLTCNVMQFKKCTIAGVAYGQNSQFGDEKTFSDSSLLENLQNNHPTAPIICEFLTMMAVCHTAVPEREGDKIIYQAASPDEGALVRAAKQLNFVFTGRTPDSVIIDSLGQEERYELLNVLEFTSARKRMSVIVRTPSGKLRLYCKGADTVIYDRLAETSKYKEITLKHLEQFATEGLRTLCFAVAEISESDFQEWRAVYQRASTSVQNRLLKLEESYELIEKNLQLLGATAIEDKLQDQVPETIETLMKADIKIWILTGDKQETAINIGHSCKLLKKNMGMIVINEGSLDGTRETLSRHCTTLGDALRKENDFALIIDGKTLKYALTFGVRQYFLDLALSCKAVICCRVSPLQKSEVVEMVKKQVKVVTLAIGDGANDVSMIQTAHVGVGISGNEGLQAANSSDYSIAQFKYLKNLLMIHGAWNYNRVSKCILYCFYKNIVLYIIEIWFAFVNGFSGQILFERWCIGLYNVMFTAMPPLTLGIFERSCRKENMLKYPELYKTSQNALDFNTKVFWVHCLNGLFHSVILFWFPLKALQYGTAFGNGKTSDYLLLGNFVYTFVVITVCLKAGLETSYWTWFSHIAIWGSIALWVVFFGIYSSLWPAIPMAPDMSGEAAMLFSSGVFWMGLLFIPVASLLLDVVYKVIKRTAFKTLVDEVQELEAKSQDPGAVVLGKSLTERAQLLKNVFKKNHVNLYRSESLQQNLLHGYAFSQDENGIVSQSEVIRAYDTTKQRPDEW

SEQ ID NO: 25001 - protein, 142 aa, Homo sapiens
  REGION 1..142: note = ENSP00000421164
  VARIANT 1: note = Any amino acid
XAVICCRVSPLQKSEVVEMVKKQVKVVTLAIGDGANDVSMIQTAHVGVGISGNEGLQAANSSDYSIAQFKYLKNLLMIHGAWNYNRVSKCILYCFYKNIVLYIIEIWFAFVNGFSGQILFERWCIGLYNVFVRFRCLQQCLL

SEQ ID NO: 25002 - protein, 113 aa, Homo sapiens
  REGION 1..113: note = ENSP00000426935
VSPLQKSEVVEMVKKQVKVVTLAIGDGANDVSMIQTAHVGVGISGNEGLQAANSSDYSIAQFKYLKNLLMIHGAWNYNRVSKCILYCFYKNIVLYIIENTDIQANNNLYSLFT

SEQ ID NO: 25003 - protein, 29 aa, Homo sapiens
  REGION 1..29: note = ENSP00000427295
KRHKADNAVNKKQTQVLRNGAWEIVHWEK

SEQ ID NO: 25004 - protein, 55 aa, Homo sapiens
  REGION 1..55: note = ENSP00000426636
MPTMRRTVSEIRSRAEGYEKTDDVSEKTSLADQEEVRTIFINQPQLTKFCNNHVR

SEQ ID NO: 25005 - protein, 1251 aa, Homo sapiens
  REGION 1..1251: note = ENSP00000283684
MSTERDSETTFDEDSQPNDEVVPYSDDETEDELDDQGSAVEPEQNRVNREAEENREPFRKECTWQVKANDRKYHEQPHFMNTKFLCIKESKYANNAIKTYKYNAFTFIPMNLFEQFKRAANLYFLALLILQAVPQISTLAWYTTLVPLLVVLGVTAIKDLVDDVARHKMDKEINNRTCEVIKDGRFKVAKWKEIQVGDVIRLKKNDFVPADILLLSSSEPNSLCYVETAELDGETNLKFKMSLEITDQYLQREDTLATFDGFIECEEPNNRLDKFTGTLFWRNTSFPLDADKILLRGCVIRNTDFCHGLVIFAGADTKIMKNSGKTRFKRTKIDYLMNYMVYTIFVVLILLSAGLAIGHAYWEAQVGNSSWYLYDGEDDTPSYRGFLIFWGYIIVLNTMVPISLYVSVEVIRLGQSHFINWDLQMYYAEKDTPAKARTTTLNEQLGQIHYIFSDKTGTLTQNIMTFKKCCINGQIYGDHRDASQHNHNKIEQVDFSWNTYADGKLAFYDHYLIEQIQSGKEPEVRQFFFLLAVCHTVMVDRTDGQLNYQAASPDEGALVNAARNFGFAFLARTQNTITISELGTERTYNVLAILDFNSDRKRMSIIVRTPEGNIKLYCKGADTVIYERLHRMNPTKQETQDALDIFANETLRTLCLCYKEIEEKEFTEWNKKFMAASVASTNRDEALDKVYEEIEKDLILLGATAIEDKLQDGVPETISKLAKADIKIWVLTGDKKETAENIGFACELLTEDTTICYGEDINSLLHARMENQRNRGGVYAKFAPPVQESFFPPGGNRALIITGSWLNEILLEKKTKRNKILKLKFPRTEEERRMRTQSKRRLEAKKEQRQKNFVDLACECSAVICCRVTPKQKAMVVDLVKRYKKAITLAIGDGANDVNMIKTAHIGVGISGQEGMQAVMSSDYSFAQFRYLQRLLLVHGRWSYIRMCKFLRYFFYKNFAFTLVHFWYSFFNGYSAQTAYEDWFITLYNVLYTSLPVLLMGLLDQDVSDKLSLRFPGLYIVGQRDLLFNYKRFFVSLLHGVLTSMILFFIPLGAYLQTVGQDGEAPSDYQSFAVTIASALVITVNFQIGLDTSYWTFVNAFSIFGSIALYFGIMFDFHSAGIHVLFPSAFQFTGTASNALRQPYIWLTIILAVAVCLLPVVAIRFLSMTIWPSESDKIQKHRKRLKAEEQWQRRQQVFRRGVSTRRSAYAFSHQRGYADLISSGRSIRKKRSPLDAIVADGTAEYRRTGDS

SEQ ID NO: 25006 - protein, 92 aa, Homo sapiens
  REGION 1..92: note = ENSP00000468266
MYYAEKDTPAKARTTTLNEQLGQIHYIFSDKTGTLTQNIMTFKKCCINGQIYGDHRDASQHNHNKIEQVDFSWNTYADGKLAFYDHYLIEQI

SEQ ID NO: 25007 - protein, 61 aa, Homo sapiens
  REGION 1..61: note = ENSP00000467767
MSTERDSETTFDEDSQPNDEVVPYSDDETEDELDDQGSAVEPEQNRVNREAEENREPFRKE

SEQ ID NO: 25008 - protein, 11 aa, Homo sapiens
  REGION 1..11: note = ENSP00000468751
MSTERDSETTF

SEQ ID NO: 25009 - protein, 36 aa, Homo sapiens
  REGION 1..36: note = ENSP00000483722
MPECDWRQPSGGDGGWDLSLLTGERDSDGRRDFARE

SEQ ID NO: 25010 - protein, 467 aa, Homo sapiens
  REGION 1..467: note = ENSP00000476902
METGGRARTGTPQPAAPGVWRARPAGGGGGGASSWLLDGNSWLLCYGFLYLALYAQVSQSKPCERTGSCFSGRCVNSTCLCDPGWVGDQCQHCQGRFKLTEPSGYLTDGPINYKYKTKCTWLIEGYPNAVLRLRFNHFATECSWDHMYVYDGDSIYAPLIAVLSGLIVPEIRGNETVPEVVTTSGYALLHFFSDAAYNLTGFNIFYSINSCPNNCSGHGKCTTSVSVPSQVYCECDKYWKGEACDIPYCKANCGSPDHGYCDLTGEKLCVCNDSWQGPDCSLNVPSTESYWILPNVKPFSPSVGRASHKAVLHGKFMWVIGGYTFNYSSFQMVLNYNLESSIWNVGTPSRGPLQRYGHSLALYQENIFMYGGRIETNDGNVTDELWVFNIHSQSWSTKTPTVLGHGQQYAVEGHSAHIMELDSRDVVMIIIFGYSAIYGYTSSIQEYHICELLKNCNFFIDWECFSL

SEQ ID NO: 25011 - protein, 252 aa, Homo sapiens
  REGION 1..252: note = ENSP00000431423
MPECDWRQPSGGDGGWDLSLLTGERDSDGRRLTEPSGYLTDGPINYKYKTKCTWLIEGYPNAVLRLRFNHFATECSWDHMYVYDGDSIYAPLIAVLSGLIVPEIRGNETVPEVVTTSGYALLHFFSDAAYNLTGFNIFYSINSCPNNCSGHGKCTTSVSVPSQVYCECDKYWKGEACDIPYCKANCGSPDHGYCDLTGEKLCVCNDSWQGPDCSLNVPSTESYWILPNVKPFSPSVGRASHKAVLHGKFMWV

SEQ ID NO: 25012 - protein, 398 aa, Homo sapiens
  REGION 1..398: note = ENSP00000473412
METGGRARTGTPQPAAPGVWRARPAGGGGGGASSWLLDGNSWLLCYGFLYLALYAQVSQSKPCERTGSCFSGRCVNSTCLCDPGWVGDQCQHCQGRFKLTEPSGYLTDGPINYKYKTKCTWLIEGYPNAVLRLRFNHFATECSWDHMYVYDGDSIYAPLIAVLSGLIVPEIRGNETVPEVVTTSGYALLHFFSDAAYNLTGFNIFYSINSCPNNCSGHGKCTTSVSVPSQVYCECDKYWKGEACDIPYCKANCGSPDHGYCDLTGEKLCVCNDSWQGPDCSLNVPSTESYWILPNVKPFSPSVGRASHKAVLHGKFMWVIGGYTFNYSSFQMVLKKTSLCMEAELKQMMAMSQMNYGFLTYIVSHGVQKLLLFLDMVSSMLWRDIQHILWSWIVEMLS

SEQ ID NO: 25013 - protein, 1379 aa, Homo sapiens
  REGION 1..1379: note = ENSP00000347152
METGGRARTGTPQPAAPGVWRARPAGGGGGGASSWLLDGNSWLLCYGFLYLALYAQVSQSKPCERTGSCFSGRCVNSTCLCDPGWVGDQCQHCQGRFKLTEPSGYLTDGPINYKYKTKCTWLIEGYPNAVLRLRFNHFATECSWDHMYVYDGDSIYAPLIAVLSGLIVPEIRGNETVPEVVTTSGYALLHFFSDAAYNLTGFNIFYSINSCPNNCSGHGKCTTSVSVPSQVYCECDKYWKGEACDIPYCKANCGSPDHGYCDLTGEKLCVCNDSWQGPDCSLNVPSTESYWILPNVKPFSPSVGRASHKAVLHGKFMWVIGGYTFNYSSFQMVLNYNLESSIWNVGTPSRGPLQRYGHSLALYQENIFMYGGRIETNDGNVTDELWVFNIHSQSWSTKTPTVLGHGQQYAVEGHSAHIMELDSRDVVMIIIFGYSAIYGYTSSIQEYHISSNTWLVPETKGAIVQGGYGHTSVYDEITKSIYVHGGYKALPGNKYGLVDDLYKYEVNTKTWTILKESGFARYLHSAVLINGAMLIFGGNTHNDTSLSNGAKCFSADFLAYDIACDEWKILPKPNLHRDVNRFGHSAVVINGSMYIFGGFSSVLLNDILVYKPPNCKAFRDEELCKNAGPGIKCVWNKNHCESWESGNTNNILRAKCPPKTAASDDRCYRYADCASCTANTNGCQWCDDKKCISANSNCSMSVKNYTKCHVRNEQICNKLTSCKSCSLNLNCQWDQRQQECQALPAHLCGEGWSHIGDACLRVNSSRENYDNAKLYCYNLSGNLASLTTSKEVEFVLDEIQKYTQQKVSPWVGLRKINISYWGWEDMSPFTNTTLQWLPGEPNDSGFCAYLERAAVAGLKANPCTSMANGLVCEKPVVSPNQNARPCKKPCSLRTSCSNCTSNGMECMWCSSTKRCVDSNAYIISFPYGQCLEWQTATCSPQNCSGLRTCGQCLEQPGCGWCNDPSNTGRGHCIEGSSRGPMKLIGMHHSEMVLDTNLCPKEKNYEWSFIQCPACQCNGHSTCINNNVCEQCKNLTTGKQCQDCMPGYYGDPTNGGQCTACTCSGHANICHLHTGKCFCTTKGIKGDQCQLCDSENRYVGNPLRGTCYYSLLIDYQFTFSLLQEDDRHHTAINFIANPEQSNKNLDISINASNNFNLNITWSVGSTAGTISGEETSIVSKNNIKEYRDSFSYEKFNFRSNPNITFYVYVSNFSWPIKIQIAFSQHNTIMDLVQFFVTFFSCFLSLLLVAAVVWKIKQTCWASRRREQLLRERQQMASRPFASVDVALEVGAEQTEFLRGPLEGAPKPIAIEPCAGNRAAVLTVFLCLPRGSSGAPPPGQSGLAIASALIDISQQKASDSKDKTSGVRNRKHLSTRQGTCV

SEQ ID NO: 25014 - protein, 216 aa, Homo sapiens
  REGION 1..216: note = ENSP00000434118
  VARIANT 1: note = Any amino acid
XCEKPVVSPNQNARPCKKPCSLRTSCSNCTSNGMECMWCSSTKRCVDSNAYIISFPYGQCLEWQTATCSPQNCSGLRTCGQCLEQPGCGWCNDPSNTGRGHCIEGSSRGPMKLIGMHHSEMVLDTNLCPKEKNYEWSFIQCPACTCSGHANICHLHTGKCFCTTKGIKGDQCQLCDSENRYVGNPLRGTCYYSLLIDYQFTFSLLQEDDRHHTAIN

SEQ ID NO: 25015 - protein, 815 aa, Homo sapiens
  REGION 1..815: note = ENSP00000244769
MKSNQERSNECLPPKKREIPATSRSSEEKAPTLPSDNHRVEGTAWLPGNPGGRGHGGGRHGPAGTSVELGLQQGIGLHKALSTGLDYSPPSAPRSVPVATTLPAAYATPQPGTPVSPVQYAHLPHTFQFIGSSQYSGTYASFIPSQLIPPTANPVTSAVASAAGATTPSQRSQLEAYSTLLANMGSLSQTPGHKAEQQQQQQQQQQQQHQHQQQQQQQQQQQQQQHLSRAPGLITPGSPPPAQQNQYVHISSSPQNTGRTASPPAIPVHLHPHQTMIPHTLTLGPPSQVVMQYADSGSHFVPREATKKAESSRLQQAIQAKEVLNGEMEKSRRYGAPSSADLGLGKAGGKSVPHPYESRHVVVHPSPSDYSSRDPSGVRASVMVLPNSNTPAADLEVQQATHREASPSTLNDKSGLHLGKPGHRSYALSPHTVIQTTHSASEPLPVGLPATAFYAGTQPPVIGYLSGQQQAITYAGSLPQHLVIPGTQPLLIPVGSTDMEASGAAPAIVTSSPQFAAVPHTFVTTALPKSENFNPEALVTQAAYPAMVQAQIHLPVVQSVASPAAAPPTLPPYFMKGSIIQLANGELKKVEDLKTEDFIQSAEISNDLKIDSSTVERIEDSHSPGVAVIQFAVGEHRAQVSVEVLVEYPFFVFGQGWSSCCPERTSQLFDLPCSKLSVGDVCISLTLKNLKNGSVKKGQPVDPASVLLKHSKADGLAGSRHRYAEQENGINQGSAQMLSENGELKFPEKMGLPAAPFLTKIEPSKPAATRKRRWSAPESRKLEKSEDEPPLTLPKPSLIPQEVKICIEGRSNVGK

SEQ ID NO: 25016 - protein, 815 aa, Homo sapiens; identical to SEQ ID NO: 25015
  REGION 1..815: note = ENSP00000416360

SEQ ID NO: 25017 - protein, 103 aa, Homo sapiens
  REGION 1..103: note = ENSP00000474312
MAVRERAAAAMAALERRVPSLDDFAGQSWSSWVERADLPAADETEVQGQPLPKGPLRRGGTCIADQGDFEDAQGPKTAVSLLCDHPISAGPEKLGVTLTMLWG

SEQ ID NO: 25018 - protein, 722 aa, Homo sapiens
  REGION 1..722: note = ENSP00000358886
MAVRERAAAAMAALERRVPSLDDFAGQSWSSWVERADLPAADGAELEESSKNTKKLDAMTLIKEDMSIFGHCPAHDDFYLVVCNHCSQVVKPQAFQKHCERRHGPLSKLYGRAPPPPPAPASSQKCHVVNGQGPACRAPGSTKTSSREKGQGSRSRGHQPPEKTQKDNLCQPGGLTKDSPGKPPMAPPSKEPPGRENIEIIPSEGSSHWAEGSPPEKEPSGTRLPPKTHRKMARKECDLNRQCGVINPETKKICTRLLTCKIHSVHQRREVQGRAKDFDVLVAELKANSRKGESPKEKSPGRKEQVLERPSQELPSSVQVVAAVAAPSSTFSVRAKQTYPYCALPRSRASSESELDDEGPCGGDGDPGLFPFPMPRGGTQASSEESEEEGTSDDLHPPPDCHYATRPPRPQAFCTFGSRLVSPGCYVFSRRLDRFCSALSSMLERHLSTHMWKKIPPAAEPPAHLVNSPLSAPLSPSSTGTCPRLPGPTLRPACPASMPPTKDNLVPSYPAGSPSVAAACSQAECMGGSQAITSPLPANTPSPSFSKLPPSKASKSSKGKDGVEVEAPSRKRKLSPGPTTLKRTCILEPTGKGKPSGCRGLSAKTKTALSMGLNGTMGPRVKRAGPLDCRGSPHQLPTPVKASQLENRGAAGHPAKALPTNCLSEEEVAKKRKNLATYCRPVKAKHCQAGAPADVACSVRRKKPGPALAFEEKCSTLKSKAH

SEQ ID NO: 25019 - protein, 147 aa, Homo sapiens
  REGION 1..147: note = ENSP00000359660
MGTPASVVSEPPPWQAPIEARGRKQASANIFQDAELLQIQALFQRSGDQLAEERAQIIWECAGDHRVAEALKRLRRKRPPRQKPLGHSLHHCSRLRILEPHSALANPQSATETASSEQYLHSRKKSARIRRNWRKSGPTSYLHQIRH

SEQ ID NO: 25020 - protein, 894 aa, Homo sapiens
  REGION 1..894: note = ENSP00000301178
MAWRCPRMGRVPLAWCLALCGWACMAPRGTQAEESPFVGNPGNITGARGLTGTLRCQLQVQGEPPEVHWLRDGQILELADSTQTQVPLGEDEQDDWIVVSQLRITSLQLSDTGQYQCLVFLGHQTFVSQPGYVGLEGLPYFLEEPEDRTVAANTPFNLSCQAQGPPEPVDLLWLQDAVPLATAPGHGPQRSLHVPGLNKTSSFSCEAHNAKGVTTSRTATITVLPQQPRNLHLVSRQPTELEVAWTPGLSGIYPLTHCTLQAVLSDDGMGIQAGEPDPPEEPLTSQASVPPHQLRLGSLHPHTPYHIRVACTSSQGPSSWTHWLPVETPEGVPLGPPENISATRNGSQAFVHWQEPRAPLQGTLLGYRLAYQGQDTPEVLMDIGLRQEVTLELQGDGSVSNLTVCVAAYTAAGDGPWSLPVPLEAWRPGQAQPVHQLVKEPSTPAFSWPWWYVLLGAVVAAACVLILALFLVHRRKKETRYGEVFEPTVERGELVVRYRVRKSYSRRTTEATLNSLGISEELKEKLRDVMVDRHKVALGKTLGEGEFGAVMEGQLNQDDSILKVAVKTMKIAICTRSELEDFLSEAVCMKEFDHPNVMRLIGVCFQGSERESFPAPVVILPFMKHGDLHSFLLYSRLGDQPVYLPTQMLVKFMADIASGMEYLSTKRFIHRDLAARNCMLNENMSVCVADFGLSKKIYNGDYYRQGRIAKMPVKWIAIESLADRVYTSKSDVWSFGVTMWEIATRGQTPYPGVENSEIYDYLRQGNRLKQPADCLDGLYALMSRCWELNPQDRPSFTELREDLENTLKALPPAQEPDEILYVNMDEGGGYPEPPGAAGGADPPTQPDPKDSCSCLTAAEVHPAGRYVLCPSTTPSPAQPADRGSPAAPGQEDGA

SEQ ID NO: 25021 - protein, 885 aa, Homo sapiens
  REGION 1..885: note = ENSP00000351995
MAWRCPRMGRVPLAWCLALCGWACMAPRGTQAEESPFVGNPGNITGARGLTGTLRCQLQVQGEPPEVHWLRDGQILELADSTQTQVPLGEDEQDDWIVVSQLRITSLQLSDTGQYQCLVFLGHQTFVSQPGYVGLEGLPYFLEEPEDRTVAANTPFNLSCQAQGPPEPVDLLWLQDAVPLATAPGHGPQRSLHVPGLNKTSSFSCEAHNAKGVTTSRTATITVLPQQPRNLHLVSRQPTELEVAWTPGLSGIYPLTHCTLQAVLSDDGMGIQAGEPDPPEEPLTSQASVPPHQLRLGSLHPHTPYHIRVACTSSQGPSSWTHWLPVETPEGVPLGPPENISATRNGSQAFVHWQEPRAPLQGTLLGYRLAYQGQDTPEVLMDIGLRQEVTLELQGDGSVSNLTVCVAAYTAAGDGPWSLPVPLEAWRPVKEPSTPAFSWPWWYVLLGAVVAAACVLILALFLVHRRKKETRYGEVFEPTVERGELVVRYRVRKSYSRRTTEATLNSLGISEELKEKLRDVMVDRHKVALGKTLGEGEFGAVMEGQLNQDDSILKVAVKTMKIAICTRSELEDFLSEAVCMKEFDHPNVMRLIGVCFQGSERESFPAPVVILPFMKHGDLHSFLLYSRLGDQPVYLPTQMLVKFMADIASGMEYLSTKRFIHRDLAARNCMLNENMSVCVADFGLSKKIYNGDYYRQGRIAKMPVKWIAIESLADRVYTSKSDVWSFGVTMWEIATRGQTPYPGVENSEIYDYLRQGNRLKQPADCLDGLYALMSRCWELNPQDRPSFTELREDLENTLKALPPAQEPDEILYVNMDEGGGYPEPPGAAGGADPPTQPDPKDSCSCLTAAEVHPAGRYVLCPSTTPSPAQPADRGSPAAPGQEDGA

SEQ ID NO: 25022 - protein, 626 aa, Homo sapiens
  REGION 1..626: note = ENSP00000471497
MGIQAGEPDPPEEPLTSQASVPPHQLRLGSLHPHTPYHIRVACTSSQGPSSWTHWLPVETPEGVPLGPPENISATRNGSQAFVHWQEPRAPLQGTLLGYRLAYQGQDTPEVLMDIGLRQEVTLELQGDGSVSNLTVCVAAYTAAGDGPWSLPVPLEAWRPGQAQPVHQLVKEPSTPAFSWPWWYVLLGAVVAAACVLILALFLVHRRKKETRYGEVFEPTVERGELVVRYRVRKSYSRRTTEATLNSLGISEELKEKLRDVMVDRHKVALGKTLGEGEFGAVMEGQLNQDDSILKVAVKTMKIAICTRSELEDFLSEAVCMKEFDHPNVMRLIGVCFQGSERESFPAPVVILPFMKHGDLHSFLLYSRLGDQPVYLPTQMLVKFMADIASGMEYLSTKRFIHRDLAARNCMLNENMSVCVADFGLSKKIYNGDYYRQGRIAKMPVKWIAIESLADRVYTSKSDVWSFGVTMWEIATRGQTPYPGVENSEIYDYLRQGNRLKQPADCLDGLYALMSRCWELNPQDRPSFTELREDLENTLKALPPAQEPDEILYVNMDEGGGYPEPPGAAGGADPPTQPDPKDSCSCLTAAEVHPAGRYVLCPSTTPSPAQPADRGSPAAPGQEDGA

SEQ ID NO: 25023 - protein, 298 aa, Homo sapiens
  REGION 1..298: note = ENSP00000292401
MVRMVPVLLSLLLLLGPAVPQENQDGRYSLTYIYTGLSKHVEDVPAFQALGSLNDLQFFRYNSKDRKSQPMGLWRQVEGMEDWKQDSQLQKAREDIFMETLKDIVEYYNDSNGSHVLQGRFGCEIENNRSSGAFWKYYYDGKDYIEFNKEIPAWVPFDPAAQITKQKWEAEPVYVQRAKAYLEEECPATLRKYLKYSKNILDRQDPPSVVVTSHQAPGEKKKLKCLAYDFYPGKIDVHWTRAGEVQEPELRGDVLHNGNGTYQSWVVVAVPPQDTAPYSCHVQHSSLAQPLVVPWEAS

SEQ ID NO: 25024 - protein, 85 aa, Homo sapiens
  REGION 1..85: note = ENSP00000389942
  VARIANT 1: note = Any amino acid
XTYIYTGLSKHVEDVPAFQALGSLNDLQFFRYNSKDRKSQPMGLWRQQKYPGPARSSLCGGHQPPGPRRKEETEVPGLRLLPREN

SEQ ID NO: 25025 - protein, 227 aa, Homo sapiens
  REGION 1..227: note = ENSP00000396093
MVPVLLSLLLLLGPAVPQENQDGRYSLTYIYTGLSKHVEDVPAFQALGSLNDLQFFRYNSKDRKSQPMGLWRQVEGMEDWKQDSQLQKAREDIFMETLKDIVEYYNDSNGSHVLQGRFGCEIENNRSSGAFWKYYYDGKDYIEFNKEIPAWVPFDPAAQITKQKWEAEPVYVQRAKAYLEEECPATLRKYLKYSKNILDRQGTHCFLLPSTEPRIKDDLRLGAQATS

SEQ ID NO: 25026 - protein, 448 aa, Homo sapiens
  REGION 1..448: note = ENSP00000337180
MKGFIDDANYSVGLLDEGTNLGNVIDNYVYEHTLTGKNAFFVGDLGKIVKKHSQWQNVVAQIKPFYTVKCNSAPAVLEILAALGTGFACSSKNEMALVQELGVPPENIIYISPCKQVSQIKYAAKVGVNILTCDNEIELKKIARNHPNAKVLLHIATEDNIGGEEGNMKFGTTLKNCRHLLECAKELDVQIIGVKFHVSSACKESQVYVHALSDARCVFDMAGEIGFTMNMLDIGGGFTGTEFQLEEVNHVISPLLDIYFPEGSGVKIISEPGSYYVSSAFTLAVNIIAKKVVENDKFPSGVEKTGSDEPAFMYYMNDGVYGSFASKLSEDLNTIPEVHKKYKEDEPLFTSSLWGPSCDELDQIVESCLLPELNVGDWLIFDNMGADSFHEPSAFNDFQRPAIYYMMSFSDWYEMQDAGITSDSMMKNFFFVPSCIQLSQEDSFSAEA

SEQ ID NO: 25027 - protein, 448 aa, Homo sapiens; identical to SEQ ID NO: 25026
  REGION 1..448: note = ENSP00000321507

SEQ ID NO: 25028 - protein, 165 aa, Homo sapiens
  REGION 1..165: note = ENSP00000475919
MKGFIDDANYSVGLLDEGTNLGNVIDNYVYEHTLNEMALVQELGVPPENIIYISPCKQVSQIKYAAKVGVNILTCDNEIELKKIARNHPNAKVLLHIATEDNIGGEEGNMKFGTTLKNCRHLLECAKELDVQIIGVKFHVSSACKESQVYVHALSDARCVFDMAG

SEQ ID NO: 25029 - protein, 97 aa, Homo sapiens
  REGION 1..97: note = ENSP00000429449
MKGFIDDANYSVGLLDEGTNLGNVIDNYVYEHTLTGKNAFFVGDLGKIVKKHSQWQNVVAQIKPFYTVKCNSAPAVLEILAALGTGFACSSKNEMAL

SEQ ID NO: 25030 - protein, 33 aa, Homo sapiens
  REGION 1..33: note = ENSP00000429215
MKGFIDDANYSVGLLDEGTNLGNVIDNYVYEHT

SEQ ID NO: 25031 - protein, 378 aa, Homo sapiens
  REGION 1..378: note = ENSP00000414880
MQLRLFRRLLLAALLLVIVWTLFGPSGLGEELLSLSLASLLPAPASPGPPLALPRLLIPNQEACSGPGAPPFLLILVCTAPENLNQRNAIRASWGGLREARGLRVQTLFLLGEPNAQHPVWGSQGSDLASESAAQGDILQAAFQDSYRNLTLKTLSGLNWAEKHCPMARYVLKTDDDVYVNVPELVSELVLRGGRWGQWERSTEPQREAEQEGGQVLHSEEVPLLYLGRVHWRVNPSRTPGGRHRVSEEQWPHTWGPFPPYASGTGYVLSASAVQLILKVASRAPLLPLEDVFVGVSARRGGLAPTQCVKLAGATHYPLDRCCYGKFLLTSHRLDPWKMQEAWKLVGGSDGERTAPFCSWFQGVLGILRCRAIAWLQS

SEQ ID NO: 25032 - protein, 378 aa, Homo sapiens; identical to SEQ ID NO: 25031
  REGION 1..378: note = ENSP00000398660

SEQ ID NO: 25033 - protein, 378 aa, Homo sapiens; identical to SEQ ID NO: 25031
  REGION 1..378: note = ENSP00000372696

SEQ ID NO: 25034 - protein, 378 aa, Homo sapiens; identical to SEQ ID NO: 25031
  REGION 1..378: note = ENSP00000394876

SEQ ID NO: 25035 - protein, 378 aa, Homo sapiens; identical to SEQ ID NO: 25031
  REGION 1..378: note = ENSP00000390784

SEQ ID NO: 25036 - protein, 323 aa, Homo sapiens
  REGION 1..323: note = ENSP00000230053
MKSALFTRFFILLPWILIVIIMLDVDTRRPVPPLTPRPYFSPYAVGRGGARLPLRRGGPAHGTQKRNQSRPQPQPEPQLPTIYAITPTYSRPVQKAELTRLANTFRQVAQLHWILVEDAAARSELVSRFLARAGLPSTHLHVPTPRRYKRPGLPRATEQRNAGLAWLRQRHQHQRAQPGVLFFADDDNTYSLELFQEMRTTRKVSVWPVGLVGGRRYERPLVENGKVVGWYTGWRADRPFAIDMAGFAVSLQVILSNPKAVFKRRGSQPGMQESDFLKQITTVEELEPKANNCTKVLVWHTRTEKVNLANEPKYHLDTVKIEV

SEQ ID NO: 25037 - protein, 251 aa, Homo sapiens
  REGION 1..251: note = ENSP00000481320
MKSALFTRFFILLPWILIVIIMLDVDTRRPVPPLTPRPYFSPYAVGRGGARLPLRRGGPAHGTQKRNQSRPQPQPEPQLPTIYAITPTYSRPVQKAELTRLANTFRQVAQLHWILVEDAAARSELMRTTRKVSVWPVGLVGGRRYERPLVENGKVVGWYTGWRADRPFAIDMAGFAVSLQVILSNPKAVFKRRGSQPGMQESDFLKQITTVEELEPKANNCTKVLVWHTRTEKVNLANEPKYHLDTVKIEV

SEQ ID NO: 25038 - protein, 498 aa, Homo sapiens
  REGION 1..498: note = ENSP00000343002
MRPPACWWLLAPPALLALLTCSLAFGLASEDTKKEVKQSQDLEKSGISRKNDIDLKGIVFVIQSQSNSFHAKRAEQLKKSILKQAADLTQELPSVLLLHQLAKQEGAWTILPLLPHFSVTYSRNSSWIFFCEEETRIQIPKLLETLRRYDPSKEWFLGKALHDEEATIIHHYAFSENPTVFKYPDFAAGWALSIPLVNKLTKRLKSESLKSDFTIDLKHEIALYIWDKGGGPPLTPVPEFCTNDVDFYCATTFHSFLPLCRKPVKKKDIFVAVKTCKKFHGDRIPIVKQTWESQASLIEYYSDYTENSIPTVDLGIPNTDRGHCGKTFAILERFLNRSQDKTAWLVIVDDDTLISISRLQHLLSCYDSGEPVFLGERYGYGLGTGGYSYITGGGGMVFSREAVRRLLASKCRCYSNDAPDDMVLGMCFSGLGIPVTHSPLFHQARPVDYPKDYLSHQVPISFHKHWNIDPVKVYFTWLAPSDEDKARQETQKGFREEL

SEQ ID NO: 25039 - protein, 378 aa, Homo sapiens
  REGION 1..378: note = ENSP00000316173
MRMLVSGRRVKKWQLIIQLFATCFLASLMFFWEPIDNHIVSHMKSYSYRYLINSYDFVNDTLSLKHTSAGPRYQYLINHKEKCQAQDVLLLLFVKTAPENYDRRSGIRRTWGNENYVRSQLNANIKTLFALGTPNPLEGEELQRKLAWEDQRYNDIIQQDFVDSFYNLTLKLLMQFSWANTYCPHAKFLMTADDDIFIHMPNLIEYLQSLEQIGVQDFWIGRVHRGAPPIRDKSSKYYVSYEMYQWPAYPDYTAGAAYVISGDVAAKVYEASQTLNSSLYIDDVFMGLCANKIGIVPQDHVFFSGEGKTPYHPCIYEKMMTSHGHLEDLQDLWKNATDPKVKTISKGFFGQIYCRLMKIILLCKISYVDTYPCRAAFI

SEQ ID NO: 25040 - protein, 62 aa, Homo sapiens
  REGION 1..62: note = ENSP00000418785
MRMLVSGRRVKKWQLIIQLFATCFLASLMFFWEPIDNHIVSHMKSYSYRYLINSYDFVNDTL

SEQ ID NO: 25041 - protein, 378 aa, Homo sapiens; identical to SEQ ID NO: 25039
  REGION 1..378: note = ENSP00000420778

SEQ ID NO: 25042 - protein, 81 aa, Homo sapiens
  REGION 1..81: note = ENSP00000418477
MRMLVSGRRVKKWQLIIQLFATCFLASLMFFWEPIDNHIVSHMKSYSYRYLINSYDFVNDTLSLKHTSAGPRYQYLINHKE

SEQ ID NO: 25043 - protein, 378 aa, Homo sapiens; identical to SEQ ID NO: 25039
  REGION 1..378: note = ENSP00000417868

SEQ ID NO: 25044 - protein, 50 aa, Homo sapiens
  REGION 1..50: note = ENSP00000417301
MRMLVSGRRVKKWQLIIQLFATCFLASLMFFWEPIDNHIVSHMKSYSYRY

SEQ ID NO: 25045 - protein, 401 aa, Homo sapiens
  REGION 1..401: note = ENSP00000287590
MSLWKKTVYRSLCLALALLVAVTVFQRSLTPGQFLQEPPPPTLEPQKAQKPNGQLVNPNNFWKNPKDVAAPTPMASQGPQAWDVTTTNCSANINLTHQPWFQVLEPQFRQFLFYRHCRYFPMLLNHPEKCRGDVYLLVVVKSVITQHDRREAIRQTWGRERQSAGGGRGAVRTLFLLGTASKQEERTHYQQLLAYEDRLYGDILQWGFLDTFFNLTLKEIHFLKWLDIYCPHVPFIFKGDDDVFVNPTNLLEFLADRQPQENLFVGDVLQHARPIRRKDNKYYIPGALYGKASYPPYAGGGGFLMAGSLARRLHHACDTLELYPIDDVFLGMCLEVLGVQPTAHEGFKTFGISRNRNSRMNKEPCFFRAMLVVHKLLPPELLAMWGLVHSNLTCSRKLQVL

SEQ ID NO: 25046 - protein, 382 aa, Homo sapiens
  REGION 1..382: note = ENSP00000306459
MSVLRRMMRVSNRSLLAFIFFFSLSSSCLYFIYVAPGIANTYLFMVQARGIMLRENVKTIGHMIRLYTNKNSTLNGTDYPEGNNSSDYLVQTTTYLPENFTYSPYLPCPEKLPYMRGFLNVNVSEVSFDEIHQLFSKDLDIEPGGHWRPKDCKPRWKVAVLIPFRNRHEHLPIFFLHLIPMLQKQRLEFAFYVIEQTGTQPFNRAMLFNVGFKEAMKDSVWDCVIFHDVDHLPENDRNYYGCGEMPRHFAAKLDKYMYILPYKEFFGGVSGLTVEQFRKINGFPNAFWGWGGEDDDLWNRVHYAGYNVTRPEGDLGKYKSIPHHHRGEVQFLGRYKLLRYSKERQYIDGLNNLIYRPKILVDRLYTNISVNLMPELAPIEDY

SEQ ID NO: 25047 - protein, 343 aa, Homo sapiens
  REGION 1..343: note = ENSP00000237019
MSVLRRMMRVSNRSLLAFIFFFSLSSSCLYFIYVAPGIDYPEGNNSSDYLVQTTTYLPENFTYSPYLPCPEKLPYMRGFLNVNVSEVSFDEIHQLFSKDLDIEPGGHWRPKDCKPRWKVAVLIPFRNRHEHLPIFFLHLIPMLQKQRLEFAFYVIEQTGTQPFNRAMLFNVGFKEAMKDSVWDCVIFHDVDHLPENDRNYYGCGEMPRHFAAKLDKYMYILPYKEFFGGVSGLTVEQFRKINGFPNAFWGWGGEDDDLWNRVHYAGYNVTRPEGDLGKYKSIPHHHRGEVQFLGRYKLLRYSKERQYIDGLNNLIYRPKILVDRLYTNISVNLMPELAPIEDY

SEQ ID NO: 25048 - protein, 343 aa, Homo sapiens
  REGION 1..343: note = ENSP00000372613
MSVLRRMMRVSNRSLLAFIFFFSLSSSCLYFIYVAPGIANTYLFMVQARGIMLRENVKTIGHMIRLYTNKNSTLNGTDYPEGNNSSDYLVQTTTYLPENFTYSPYLPCPEKLPYMRGFLNVNVSEVSFDEIHQLFSKDLDIEPGGHWRPKDCKPRWKTGTQPFNRAMLFNVGFKEAMKDSVWDCVIFHDVDHLPENDRNYYGCGEMPRHFAAKLDKYMYILPYKEFFGGVSGLTVEQFRKINGFPNAFWGWGGEDDDLWNRVHYAGYNVTRPEGDLGKYKSIPHHHRGEVQFLGRYKLLRYSKERQYIDGLNNLIYRPKILVDRLYTNISVNLMPELAPIEDY

SEQ ID NO: 25049 - protein, 71 aa, Homo sapiens
  REGION 1..71: note = ENSP00000463961
MVQARGIMLRENVKTIGHMIRLYTNKNSTLNGTDYPEGNNSSDYLVQTTTYLPENFTYSPYLPCPEKLPYM

SEQ ID NO: 25050 - protein, 841 aa, Homo sapiens
  REGION 1..841: note = ENSP00000257749
MSVDEKPDSPMYVYESTVHCTNILLGLNDQRKKDILCDVTLIVERKEFRAHRAVLAACSEYFWQALVGQTKNDLVVSLPEEVTARGFGPLLQFAYTAKLLLSRENIREVIRCAEFLRMHNLEDSCFSFLQTQLLNSEDGLFVCRKDAACQRPHEDCENSAGEEEDEEEETMDSETAKMACPRDQMLPEPISFEAAAIPVAEKEEALLPEPDVPTDTKESSEKDALTQYPRYKKYQLACTKNVYNASSHSTSGFASTFREDNSSNSLKPGLARGQIKSEPPSEENEEESITLCLSGDEPDAKDRAGDVEMDRKQPSPAPTPTAPAGAACLERSRSVASPSCLRSLFSITKSVELSGLPSTSQQHFARSPACPFDKGITQGDLKTDYTPFTGNYGQPHVGQKEVSNFTMGSPLRGPGLEALCKQEGELDRRSVIFSSSACDQVSTSVHSYSGVSSLDKDLSEPVPKGLWVGAGQSLPSSQAYSHGGLMADHLPGRMRPNTSCPVPIKVCPRSPPLETRTRTSSSCSSYSYAEDGSGGSPCSLPLCEFSSSPCSQGARFLATEHQEPGLMGDGMYNQVRPQIKCEQSYGTNSSDESGSFSEADSESCPVQDRGQEVKLPFPVDQITDLPRNDFQMMIKMHKLTSEQLEFIHDVRRRSKNRIAAQRCRKRKLDCIQNLECEIRKLVCEKEKLLSERNQLKACMGELLDNFSCLSQEVCRDIQSPEQIQALHRYCPVLRPMDLPTASSINPAPLGAEQNIAASQCAVGENVPCCLEPGAAPPGPPWAPSNTSENCTSGRRLEGTDPGTFSERGPPLEPRSQTVTVDFCQEMTDKCTTDEQPRKDYT

SEQ ID NO: 25051 - protein, 841 aa, Homo sapiens; identical to SEQ ID NO: 25050
  REGION 1..841: note = ENSP00000345642

SEQ ID NO: 25052 - protein, 81 aa, Homo sapiens
  REGION 1..81: note = ENSP00000384145
MSVDEKPDSPMYVYESTVHCTNILLGLNDQRKKDILCDVTLIVERKEFRAHRAVLAACSEYFWQALVGQTKNDLVVSLPEE

SEQ ID NO: 25053 - protein, 81 aa, Homo sapiens; identical to SEQ ID NO: 25052
  REGION 1..81: note = ENSP00000397668

SEQ ID NO: 25054 - protein, 841 aa, Homo sapiens; identical to SEQ ID NO: 25050
  REGION 1..841: note = ENSP00000437473

SEQ ID NO: 25055 - protein, 168 aa, Homo sapiens
  REGION 1..168: note = ENSP00000378040
MFQIPEFEPSEQEDSSSAERGLGPSPAGDGPSGSGKHHRQAPGLLWDASHQQEQPTSSSHHGGAGAVEIRSRHSSYPAGTEDDEGMGEEPSPFRGRSRSAPPNLWAAQRYGRELRRMSDEFVDSFKKGLPRPKSAGTATQMRQSSSWTRVFQSWWDRNLGRGSSAPSQ

SEQ ID NO: 25056 - protein, 168 aa, Homo sapiens; identical to SEQ ID NO: 25055
  REGION 1..168: note = ENSP00000309103

SEQ ID NO: 25057 - protein, 157 aa, Homo sapiens
  REGION 1..157: note = ENSP00000440575
MFQIPEFEPSEQEDSSSAERGLGPSPAGDGPSGSGKHHRQAPGLLWDASHQQEQPTSSSHHGEGTSSPEERGHSNADAAKLQLDASLPVLVGSELGQGKLRPLPVTFAPHPETPPVPTALGSHLEYGRKYFPQAYAKRGSVLSPLEGGLTQIPFRCV

SEQ ID NO: 25058 - protein, 163 aa, Homo sapiens
  REGION 1..163: note = ENSP00000378039
MFQIPEFEPSEQEDSSSAERGLGPSPAGDGPSGSGKHHRQAPGLLWDASHQQEQPTSSSHHGGRTSYSPSWESEDSENPSAGMLAEASAGMSAPAADSEAQHAENVKLEALGLWRSGVATAPTPRGRRTTKGWGRSPAPFGAARARRPPTSGQHSAMAASSGG

SEQ ID NO: 25059 - protein, 64 aa, Homo sapiens
  REGION 1..64: note = ENSP00000438975
MGEEPSPFRGRSRSAPPNLWAAQRYGRELRRMSDEFVDSFKKGLPRPKSAGTATQMRQSSSWTR

SEQ ID NO: 25060 - protein, 51 aa, Homo sapiens
  REGION 1..51: note = ENSP00000439202
MGEEPSPFRGRSRSAPPNLWAAQRYGRELRRMSDEFVDSFKKGLPRPKSAG

SEQ ID NO: 25061 - protein, 575 aa, Homo sapiens
  REGION 1..575: note = ENSP00000358081
MSAATHSPMMQVASGNGDRDPLPPGWEIKIDPQTGWPFFVDHNSRTTTWNDPRVPSEGPKETPSSANGPSREGSRLPPAREGHPVYPQLRPGYIPIPVLHEGAENRQVHPFHVYPQPGMQRFRTEAAAAAPQRSQSPLRGMPETTQPDKQCGQVAAAAAAQPPASHGPERSQSPAASDCSSSSSSASLPSSGRSSLGSHQLPRGYISIPVIHEQNVTRPAAQPSFHQAQKTHYPAQQGEYQTHQPVYHKIQGDDWEPRPLRAASPFRSSVQGASSREGSPARSSTPLHSPSPIRVHTVVDRPQQPMTHRETAPVSQPENKPESKPGPVGPELPPGHIPIQVIRKEVDSKPVSQKPPPPSEKVEVKVPPAPVPCPPPSPGPSAVPSSPKSVATEERAAPSTAPAEATPPKPGEAEAPPKHPGVLKVEAILEKVQGLEQAVDNFEGKKTDKKYLMIEEYLTKELLALDSVDPEGRADVRQARRDGVRKVQTILEKLEQKAIDVPGQVQVYELQPSNLEADQPLQAIMEMGAVAADKGKKNAGNAEDPHTETQQPEATAAATSNPSSMTDTPGNPAAP

SEQ ID NO: 25062 - protein, 325 aa, Homo sapiens
  REGION 1..325: note = ENSP00000410036
MQETPSSANGPSREGSRLPPAREGHPVYPQLRPGYIPIPVLHEGAENRQVHPFHVYPQPGMQRFRTEAAAAAPQRSQSPLRGMPETTQPDKQCGQVAAAAAAQPPASHGPERSQSPAASDCSSSSSSASLPSSGRSSLGSHQLPRGYISIPVIHEQNVTRPAAQPSFHQAQKTHYPAQQGEYQTHQPVYHKIQGDDWEPRPLRAASPFRSSVQGASSREGSPARSSTPLHSPSPIRVHTVVDRPQPMTHRETAPVSQPENKPESKPGPVGPELPPGHIPIQVIRKEVDSKPVSQKPPPPSEKVEVKVPPAPVPCPPPSPGPSAVP

SEQ ID NO: 25063 - protein, 521 aa, Homo sapiens
  REGION 1..521: note = ENSP00000315685
MSLSRSEEMHRLTENVYKTIMEQFNPSLRNFIAMGKNYEKALAGVTYAAKGYFDALVKMGELASESQGSKELGDVLFQMAEVHRQIQNQLEEMLKSFHNELLTQLEQKVELDSRYLSAALKKYQTEQRSKGDALDKCQAELKKLRKKSQGSKNPQKYSDKELQYIDAISNKQGELENYVSDGYKTALTEERRRFCFLVEKQCAVAKNSAAYHSKGKELLAQKLPLWQQACADPSKIPERAVQLMQQVASNGATLPSALSASKSNLVISDPIPGAKPLPVPPELAPFVGRMSAQESTPIMNGVTGPDGEDYSPWADRKAAQPKSLSPPQSQSKLSDSYSNTLPVRKSVTPKNSYATTENKTLPRSSSMAAGLERNGRMRVKAIFSHAAGDNSTLLSFKEGDLITLLVPEARDGWHYGESEKTKMRGWFPFSYTRVLDSDGSDRLHMSLQQGKSSSTGNLLDKDDLAIPPPDYGAASRAFPAQTASGFKQRPYSVAVPAFSQGLDDYGARSMSSGSGTLVSTV

SEQ ID NO: 25064 - protein, 106 aa, Homo sapiens
  REGION 1..106: note = ENSP00000460344
MSLSRSEEMHRLTENVYKTIMEQFNPSLRNFIAMGKNYEKALAGVTYAAKGYFDALVKMGELASESQGSKELGDVLFQMAEVHRQIQNQLEEMPCPASCSGSMCWS

SEQ ID NO: 25065 - protein, 79 aa, Homo sapiens
  REGION 1..79: note = ENSP00000458494
MGELASESQGSKELGDVLFQMAEVHRQIQNQLEEMLKSFHNELLTQLEQKVELDSRYLSAALKKYQTEQRSKGDALDKC

SEQ ID NO: 25066 - protein, 149 aa, Homo sapiens
  REGION 1..149: note = ENSP00000460492
MSLSRSEEMHRLTENVYKRVEEKYQRNLFPIFSPSALKPESRNFRGESWQGTIMEQFNPSLRNFIAMGKNYEKALAGVTYAAKGYFDALVKMGELASESQGSKELGDVLFQMAEVHRQIQNQLEEMLKSFHNELLTQLEQKVELDSRLR

SEQ ID NO: 25067 - protein, 534 aa, Homo sapiens
  REGION 1..534: note = ENSP00000401022
MSLSRSEEMHRLTENVYKTIMEQFNPSLRNFIAMGKNYEKALAGVTYAAKGYFDALVKMGELASESQGSKELGDVLFQMAEVHRQIQNQLEEMLKSFHNELLTQLEQKVELDSRYLSAALKKYQTEQRSKGDALDKCQAELKKLRKKSQGSKNPQKYSDKELQYIDAISNKQGELENYVSDGYKTALTEERRRFCFLVEKQCAVAKNSAAYHSKGKELLAQKLPLWQQACADPSKIPERAVQLMQQVASNGATLPSALSASKSNLVISDPIPGAKPLPVPPELAPFVGRMSAQESTPIMNGVTGPDGEDYSPWADRKAAQPKSLSPPQSQSKLSDSYSNTLPVRKSVTPKNSYATTENKTLPRSSSMAAGLERNGRMRVKAIFSHAAGDNSTLLSFKEGDLITLLVPEARDGWHYGESEKTKMRGWFPFSYTRVLDSDGSDRLHMSLQQGKSSSTGNLLDKDDLAIPPPDYGAASRAFPAQTASGFKQRPYSVAVPAFSQGLDDYGARSMSRNPFAHVQLKPTVTNDRSAPLLS

SEQ ID NO: 25068 - protein, 512 aa, Homo sapiens
  REGION 1..512: note = ENSP00000458964
MSLSRSEEMHRLTENVYKTIMEQFNPSLRNFIAMGKNYEKALAGVTYAAKGYFDALVKMGELASESQGSKELGDVLFQMAEVHRQIQNQLEEMLKSFHNELLTQLEQKVELDSRYLSAALKKYQTEQRSKGDALDKCQAELKKLRKKSQGSKNPQKYSDKELQYIDAISNKQGELENYVSDGYKTALTEERRRFCFLVEKQCAVAKNSAAYHSKGKELLAQKLPLWQQACADPSKIPERAVQLMQQVASNGATLPSALSASKSNLVISDPIPGAKPLPVPPELAPFVGRMSAQESTPIMNGVTGPDGEDYSPWADRKAAQPKSLSPPQSQSKLSDSYSNTLPVRKSVTPKNSYATTENKTLPRSSSMAAGLERNGRMRVKAIFSHAAGDNSTLLSFKEGDLITLLVPEARDGWHYGESEKTKMRGWFPFSYTRVLDSDGSDRLHMSLQQGKSSSTGNLLDKDDLAIPPPDYGAASRAFPAQTASGFKQRPYSVAVPAFSQGLDDYGARSMSR

SEQ ID NO: 25069 - protein, 553 aa, Homo sapiens
  REGION 1..553: note = ENSP00000461144
MSLSRSEEMHRLTENVYKRVEEKYQRNLFPIFSPSALKPESRNFRGESWQGTIMEQFNPSLRNFIAMGKNYEKALAGVTYAAKGYFDALVKMGELASESQGSKELGDVLFQMAEVHRQIQNQLEEMLKSFHNELLTQLEQKVELDSRYLSAALKKYQTEQRSKGDALDKCQAELKKLRKKSQGSKNPQKYSDKELQYIDAISNKQGELENYVSDGYKTALTEERRRFCFLVEKQCAVAKNSAAYHSKGKELLAQKLPLWQQACADPSKIPERAVQLMQQVASNGATLPSALSASKSNLVISDPIPGAKPLPVPPELAPFVGRMSAQESTPIMNGVTGPDGEDYSPWADRKAAQPKSLSPPQSQSKLSDSYSNTLPVRKSVTPKNSYATTENKTLPRSSSMAAGLERNGRMRVKAIFSHAAGDNSTLLSFKEGDLITLLVPEARDGWHYGESEKTKMRGWFPFSYTRVLDSDGSDRLHMSLQQGKSSSTGNLLDKDDLAIPPPDYGAASRAFPAQTASGFKQRPYSVAVPAFSQGLDDYGARSMSSADVEVARF

SEQ ID NO: 25070 - protein, 520 aa, Homo sapiens
  REGION 1..520: note = ENSP00000413069
MSLSRSEEMHRLTENVYKTIMEQFNPSLRNFIAMGKNYEKALAGVTYAAKGYFDALVKMGELASESQGSKELGDVLFQMAEVHRQIQNQLEEMLKSFHNELLTQLEQKVELDSRYLSAALKKYQTEQRSKGDALDKCQAELKKLRKKSQGSKNPQKYSDKELQYIDAISNKQGELENYVSDGYKTALTEERRRFCFLVEKQCAVAKNSAAYHSKGKELLAQKLPLWQQACADPSKIPERAVQLMQQVASNGATLPSALSASKSNLVISDPIPGAKPLPVPPELAPFVGRMSAQESTPIMNGVTGPDGEDYSPWADRKAAQPKSLSPPQSQSKLSDSYSNTLPVRKSVTPKNSYATTENKTLPRSSSMAAGLERNGRMRVKAIFSHAAGDNSTLLSFKEGDLITLLVPEARDGWHYGESEKTKMRGWFPFSYTRVLDSDGSDRLHMSLQQGKSSSTGNLLDKDDLAIPPPDYGAASRAFPAQTASGFKQRPYSVAVPAFSQGLDDYGARSMSSADVEVARF

SEQ ID NO: 25071 - protein, 552 aa, Homo sapiens
  REGION 1..552: note = ENSP00000316338
MSLSRSEEMHRLTENVYKTIMEQFNPSLRNFIAMGKNYEKALAGVTYAAKGYFDALVKMGELASESQGSKELGDVLFQMAEVHRQIQNQLEEMLKSFHNELLTQLEQKVELDSRYLSAALKKYQTEQRSKGDALDKCQAELKKLRKKSQGSKNPQKYSDKELQYIDAISNKQGELENYVSDGYKTALTEERRRFCFLVEKQCAVAKNSAAYHSKGKELLAQKLPLWQQACADPSKIPERAVQLMQQVASNGATLPSALSASKSNLVISDPIPGAKPLPVPPELAPFVGRMSAQESTPIMNGVTGPDGEDYSPWADRKAAQPKSLSPPQSQSKLSDSYSNTLPVRKSVTPKNSYATTENKTLPRSSSMAAGLERNGRMRVKAIFSHAAGDNSTLLSFKEGDLITLLVPEARDGWHYGESEKTKMRGWFPFSYTRVLDSDGSDRLHMSLQQGKSSSTGNLLDKDDLAIPPPDYGAASRAFPAQTASGFKQRPYSVAVPAFSQGLDDYGARSMSRNPFAHVQLKPTVTNDRCDLSAQGPEGREHGDGSARTLAGR

SEQ ID NO: 25072 - protein, 140 aa, Homo sapiens
  REGION 1..140: note = ENSP00000458202
MEQFNPSLRNFIAMGKNYEKALAGVTYAAKGYFDALVKMGELASESQGSKELGDVLFQMAEVHRQIQNQLEEMLKSFHNELLTQLEQKVELDSRYLSAALKKYQTEQRSKGDALDKCQAELKKLRKKSQGSKNPQKYSDK

SEQ ID NO: 25073 - protein, 175 aa, Homo sapiens
  REGION 1..175: note = ENSP00000460131
MEQFNPSLRNFIAMGKNYEKALAGVTYAAKGYFDALVKMGELASESQGSKELGDVLFQMAEVHRQIQNQLEEMLKSFHNELLTQLEQKVELDSRYLSAALKKYQTEQRSKGDALDKCQAELKKLRKKSQGSKNPQKYSDKELQYIDAISNKQGELENYVSDGYKTALTEERRRFC

SEQ ID NO: 25074 - protein, 135 aa, Homo sapiens
  REGION 1..135: note = ENSP00000458522
MGELASESQGSKELGDVLFQMAEVHRQIQNQLEEMLKSFHNELLTQLEQKVELDSRYLSAALKKYQTEQRSKGDALDKCQAELKKLRKKSQGSKNPQKYSDKELQYIDAISNKQGELENYVSDGYKTALTEERRR

SEQ ID NO: 25075 - protein, 114 aa, Homo sapiens
  REGION 1..114: note = ENSP00000461736
MGELASESQGSKELGDVLFQMAEVHRQIQNQLEEMLKSFHNELLTQLEQKVELDSRYLSAALKKYQTEQRSKGDALDKCQAELKKLRKKSQGSKNPQKYSDKELQYIDAISNKQ

SEQ ID NO: 25076 - protein, 234 aa, Homo sapiens
  REGION 1..234: note = ENSP00000459787
MGELASESQGSKELGDVLFQMAEVHRQIQNQLEEMLKSFHNELLTQLEQKVELDSRYLSAALKKYQTEQRSKGDALDKCQAELKKLRKKSQGSKNPQKYSDKELQYIDAISNKQGELENYVSDGYKTALTEERRRFCFLVEKQCAVAKNSAAYHSKGKELLAQKLPLWQQACADPSKIPERAVQLMQQVASNGATLPSALSASKSNLVISDPIPGAKPLPVPPELAPFVGRMSA

SEQ ID NO: 25077 - protein, 180 aa, Homo sapiens
  REGION 1..180: note = ENSP00000458735
MGELASESQGSKELGDVLFQMAEVHRQIQNQLEEMLKSFHNELLTQLEQKVELDSRYLSAALKKYQTEQRSKGDALDKCQAELKKLRKKSQGSKNPQKYSDKELQYIDAISNKQGELENYVSDGYKTALTEERRRFCFLVEKQCAVAKNSAAYHSKGKELLAQKLPLWQQACADPSKIPE

SEQ ID NO: 25078 - protein, 58 aa, Homo sapiens
  REGION 1..58: note = ENSP00000459730
MGELASESQGSKELGDVLFQMAEVHRQIQNQLEEMLKSFHNELLTQLEQKVELDSRLR

SEQ ID NO: 25079 - protein, 97 aa, Homo sapiens
  REGION 1..97: note = ENSP00000461101
QTEQRSKGDALDKCQAELKKLRKKSQGSKNPQKYSDKELQYIDAISNKQGELENYVSDGYKTALTEERRRFCFLVEKQCAVAKNSAAYHSKGGPGPV

SEQ ID NO: 25080 - protein, 130 aa, Homo sapiens
  REGION 1..130: note = ENSP00000458440
MQQVASNGATLPSALSASKSNLVISDPIPGAKPLPVPPELAPFVGRMSAQESTPIMNGVTGPDGEDYSPWADRKAAQPKSLSPPQSQSKLSDSYSNTLPVRKSVTPKNSYATTENKTLPRSSSMAAGLER

SEQ ID NO: 25081 - protein, 375 aa, Homo sapiens
  REGION 1..375: note = ENSP00000391837
MLLPEGQRQRALGFGTVTSTYSPVGQYIDAISNKQGELENYVSDGYKTALTEERRRFCFLVEKQCAVAKNSAAYHSKGKELLAQKLPLWQQACADPSKIPERAVQLMQQVASNGATLPSALSASKSNLVISDPIPGAKPLPVPPELAPFVGRMSAQESTPIMNGVTGPDGEDYSPWADRKAAQPKSLSPPQSQSKLSDSYSNTLPVRKSVTPKNSYATTENKTLPRSSSMAAGLERNGRMRVKAIFSHAAGDNSTLLSFKEGDLITLLVPEARDGWHYGESEKTKMRGWFPFSYTRVLDSDGSDRLHMSLQQGKSSSTGNLLDKDDLAIPPPDYGAASRAFPAQTASGFKQRPYSVAVPAFSQGLDDYGARSMSR

SEQ ID NO: 25082 - protein, 216 aa, Homo sapiens
  REGION 1..216: note = ENSP00000460350
  VARIANT 1: note = Any amino acid
XPKSLSPPQSQSKLSDSYSNTLPVRKSVTPKNSYATTAENKTLPRSSSMAAGLERNGRMRVKAIFSHAAGDNSTLLSFKEGDLITLLVPEARDGWHYGESEKTKMRGWFPFSYTRVLDSDGSDRLHMSLQQGKSSSTGNLLDKDDLAIPPPDYGAASRAFPAQTASGFKQRPYSVAVPAFSQGLDDYGARSMSRNPFAHVQLKPTVTNDRSAPLLS

SEQ ID NO: 25083 - protein, 260 aa, Homo sapiens
  REGION 1..260: note = ENSP00000364683
MDRHSSYIFIWLQLELCAMAVLLTKGEIRCYCDAAHCVATGYMCKSELSACFSRLLDPQNSNSPLTHGCLDSLASTTDICQAKQARNHSGTTIPTLECCHEDMCNYRGLHDVLSPPRGEASGQGNRYQHDGSRNLITKVQELTSSKELWFRAAVIAVPIAGGLILVLLIMLALRMLRSENKRLQDQRQQMLSRLHYSFHGHHSKKGQVAKLDLECMVPVSGHENCCLTCDKMRQADLSNDKILSLVHWGMYSGHGKLEFV

SEQ ID NO: 25084 - protein, 327 aa, Homo sapiens
  REGION 1..327: note = ENSP00000263610
MEGSNGFGIDSILSHRAGSPALPKGDPLLGDCRSPLELSPRSESSSDCSSPASPGRDCLETGTPRPGGASGPGLDSHLQPGQLSAPAQSRTVTSSFLIRDILADCKPLAACAPYSSSGQPAAPEPGGRLAAKAAEDFRDKLDKSGSNASSDSEYKVKEEGDREISSSRDSPPVRLKKPRKARTAFTDHQLAQLERSFERQKYLSVQDRMELAASLNLTDTQVKTWYQNRRTKWKRQTAVGLELLAEAGNYSALQRMFPSPYFYPQSLVSNLDPGAALYLYRGPSAPPPALQRPLVPRILIHGLQGASEPPPPLPPLAGVLPRAAQPR

SEQ ID NO: 25085 - protein, 327 aa, Homo sapiens; identical to SEQ ID NO: 25084
  REGION 1..327: note = ENSP00000444704

SEQ ID NO: 25086 - protein, 387 aa, Homo sapiens
  REGION 1..387: note = ENSP00000359474
MTMEGASGSSFGIDTILSSASSGSPGMMNGDFRPLGEARTADFRSQATPSPCSEIDTVGTAPSSPISVTMEPPEPHLVADATQHHHHLHHSQQPPPPAAAPTQSLQPLPQQQQPLPPQQPPPPPPQQLGSAASAPRTSTSSFLIKDILGDSKPLAACAPYSTSVSSPHHTPKQESNAVHESFRPKLEQEDSKTKLDKREDSQSDIKCHGTKEEGDREITSSRESPPVRAKKPRKARTAFSDHQLNQLERSFERQKYLSVQDRMDLAAALNLTDTQVKTWYQNRRTKWKRQTAVGLELLAEAGNYSALQRMFPSPYFYHPSLLGSMDSTTAAAAAAAMYSSMYRTPPAPHPQLQRPLVPRVLIHGLGPGGQPALNPLSSPIPGTPHPR

SEQ ID NO: 25087 - protein, 45 aa, Homo sapiens
  REGION 1..45: note = ENSP00000476090
MGGKLSKKKKGYNVNDEKAKEKDKKAEGAATEEEGTPKESEPQAA

SEQ ID NO: 25088 - protein, 227 aa, Homo sapiens
  REGION 1..227: note = ENSP00000319281
MGGKLSKKKKGYNVNDEKAKEKDKKAEGAATEEEGTPKESEPQAAAEPAEAKEGKEKPDQDAEGKAEEKEGEKDAAAAKEEAPKAEPEKTEGAAEAKAEPPKAPEQEQAAPGPAAGGEAPKAAEAAAAPAESAAPAAGEEPSKEEGEPKKTEAPAAPAAQETKSDGAPASDSKPGSSEAAPSSKETPAATEAPSSTPKAQGPAASAEEPKPVEAPAANSDQTVTVKE

SEQ ID NO: 25089 - protein, 227 aa, Homo sapiens; identical to SEQ ID NO: 25088
  REGION 1..227: note = ENSP00000482066

SEQ ID NO: 25090 - protein, 85 aa, Homo sapiens
  REGION 1..85: note = ENSP00000463176
  VARIANT 1: note = Any amino acid
XKTMKSRYMELYDLNRDLLNGYKIRCNNHTELLGNLKAVNQAIQRAGRLRVGKPKNQVITACRDAIRSNNINTLFKIMRVGTASS

SEQ ID NO: 25091 - protein, 142 aa, Homo sapiens
  REGION 1..142: note = ENSP00000463731
LQVEADFPVYFEELRKVLVKVDEYHSVHQKLSADMADHSNLIRSLLVGAEDARLMRDMKTMKSRYMELYDLNRDLLNGYKIRCNNHTELLGNLKAVNQAIQRAGRLRVGKPKNQVITACRDAIRSNNINTLFKIMRVGTASS

SEQ ID NO: 25092 - protein, 675 aa, Homo sapiens
  REGION 1..675: note = ENSP00000456289
MLLPVFTLKLRHKISPRMVAIGRYDGTHPCLAAATQTGKVFIHNPHTRNQHVSASRVFQSPLESDVSLLSINQAVSCLTAGVLNPELGYDALLVGTQTNLLAYDVYNNSDLFYREVADGANAIVLGTLGDISSPLAIIGGNCALQGFNHEGSDLFWTVTGDNVNSLALCDFDGDGKKELLVGSEDFDIRVFKEDEIVAEMTETEIVTSLCPMYGSRFGYALSNGTVGVYDKTSRYWRIKSKNHAMSIHAFDLNSDGVNELITGWSNGKVDARSDRTGEVIFKDNFSSAIAGVVEGDYRMDGHIQLICCSVDGEIRGYLPGTAEMRGNLMDTSAEQDLIRELSQKKQNLLLELRNYEENAKAELASPLNEADGHRGIIPANTRLHTTLSVSLGNETQTAHTELRISTSNDTIIRAVLIFAEGIFTGESHVVHPSIHNLSSSICIPIVPPKDVPVDLHLKAFVGYRSSTQFHVFESTRQLPRFSMYALTSLDPASEPISYVNFTIAERAQRVVVWLGQNFLLPEDTHIQNAPFQVCFTSLRNGGHLHIKIKLSGEVDEYHSVHQKLSADMADHSNLIRSLLVGAEDARLMRDMKTMKSRYMELYDLNRDLLNGYKIRCNNHTELLGNLKAVNQAIQRAGRLRVGKPKNQVITACRDAIRSNNINTLFKIMRVGTASS

SEQ ID NO: 25093 - protein, 721 aa, Homo sapiens
  REGION 1..721: note = ENSP00000245157
MLLPVFTLKLRHKISPRMVAIGRYDGTHPCLAAATQTGKVFIHNPHTRNQHVSASRVFQSPLESDVSLLSINQAVSCLTAGVLNPELGYDALLVGTQTNLLAYDVYNNSDLFYREVADGANAIVLGTLGDISSPLAIIGGNCALQGFNHEGSDLFWTVTGDNVNSLALCDFDGDGKKELLVGSEDFDIRVFKEDEIVAEMTETEIVTSLCPMYGSRFGYALSNGTVGVYDKTSRYWRIKSKNHAMSIHAFDLNSDGVNELITGWSNGKVDARSDRTGEVIFKDNFSSAIAGVVEGDYRMDGHIQLICCSVDGEIRGYLPGTAEMRGNLMDTSAEQDLIRELSQKKQNLLLELRNYEENAKAELASPLNEADGHRGIIPANTRLHTTLSVSLGNETQTAHTELRISTSNDTIIRAVLIFAEGIFTGESHVVHPSIHNLSSSICIPIVPPKDVPVDLHLKAFVGYRSSTQFHVFESTRQLPRFSMYALTSLDPASEPISYVNFTIAERAQRVVVWLGQNFLLPEDTHIQNAPFQVCFTSLRNGGHLHIKIKLSGEITINTDDIDLAGDIIQSMASFFAIEDLQVEADFPVYFEELRKVLVKVDEYHSVHQKLSADMADHSNLIRSLLVGAEDARLMRDMKTMKSRYMELYDLNRDLLNGYKIRCNNHTELLGNLKAVNQAIQRAGRLRVGKPKNQVITACRDAIRSNNINTLFKIMRVGTASS

SEQ ID NO: 25094 - protein, 76 aa, Homo sapiens
  REGION 1..76: note = ENSP00000454986
  VARIANT 1: note = Any amino acid
XNLSSSICIPIVPPKDVPVDLHLKAFVGYRSSTQFHVFESTRQLPRFSMYALTSLDPASEPISYVNFTIAERAQRQ

SEQ ID NO: 25095 - protein, 119 aa, Homo sapiens
  REGION 1..119: note = ENSP00000455651
DEIVAEMTETEIVTSLCPMYGSRFGYALSNGTVGVYDKTSRYWRIKSKNHAMSIHAFDLNSDGVNELITGWSNGKVDARSDRTGEVIFKDNFSSAIAGVVEGDYRMDGHIHPGLPAWHG

SEQ ID NO: 25096 - protein, 5 aa, Homo sapiens
  REGION 1..5: note = ENSP00000456741
MTETE

SEQ ID NO: 25097 - protein, 888 aa, Homo sapiens
  REGION 1..888: note = ENSP00000377074
MHCPGEAPLAAPRPTPKDPCLRNVLAKALYDNVAESPDELSFRKGDIMTVLEQDTQGLDGWWLCSLHGRQGIVPGNRLKILVGMYDKKPAGPGPGPPATPAQPQPGLHAPAPPASQYTPMLPNTYQPQPDSVYLVPTPSKAQQGLYQVPGPSPQFQSPPAKQTSTFSKQTPHHPFPSPATDLYQVPPGPGGPAQDIYQVPPSAGMGHDIYQVPPSMDTRSWEGTKPPAKVVVPTRVGQGYVYEAAQPEQDEYDIPRHLLAPGPQDIYDVPPVRGLLPSQYGQEVYDTPPMAVKGPNGRDPLLEVYDVPPSVEKGLPPSNHHAVYDVPPSVSKDVPDGPLLREETYDVPPAFAKAKPFDPARTPLVLAAPPPDSPPAEDVYDVPPPAPDLYDVPPGLRRPGPGTLYDVPRERVLPPEVADGGVVDSGVYAVPPPAEREAPAEGKRLSASSTGSTRSSQSASSLEVAGPGREPLELEVAVEALARLQQGVSATVAHLLDLAGSAGATGSWRSPSEPQEPLVQDLQAAVAAVQSAVHELLEFARSAVGNAAHTSDRALHAKLSRQLQKMEDVHQTLVAHGQALDAGRGGSGATLEDLDRLVACSRAVPEDAKQLASFLHGNASLLFRRTKATAPGPEGGGTLHPNPTDKTSSIQSRPLPSPPKFTSQDSPDGQYENSEGGWMEDYDYVHLQGKEEFEKTQKELLEKGSITRQGKSQLELQQLKQFERLEQEVSRPIDHDLANWTPAQPLAPGRTGGLGPSDRQLLLFYLEQCEANLTTLTNAVDAFFTAVATNQPPKIFVAHSKFVILSAHKLVFIGDTLSRQAKAADVRSQVTHYSNLLCDLLRGIVATTKAAALQYPSPSAAQDMVERVKELGHSTQQFRRVLGQLAAA

SEQ ID NO: 25098 - protein, 870 aa, Homo sapiens
  REGION 1..870: note = ENSP00000162330
MNHLNVLAKALYDNVAESPDELSFRKGDIMTVLEQDTQGLDGWWLCSLHGRQGIVPGNRLKILVGMYDKKPAGPGPGPPATPAQPQPGLHAPAPPASQYTPMLPNTYQPQPDSVYLVPTPSKAQQGLYQVPGPSPQFQSPPAKQTSTFSKQTPHHPFPSPATDLYQVPPGPGGPAQDIYQVPPSAGMGHDIYQVPPSMDTRSWEGTKPPAKVVVPTRVGQGYVYEAAQPEQDEYDIPRHLLAPGPQDIYDVPPVRGLLPSQYGQEVYDTPPMAVKGPNGRDPLLEVYDVPPSVEKGLPPSNHHAVYDVPPSVSKDVPDGPLLREETYDVPPAFAKAKPFDPARTPLVLAAPPPDSPPAEDVYDVPPPAPDLYDVPPGLRRPGPGTLYDVPRERVLPPEVADGGVVDSGVYAVPPPAEREAPAEGKRLSASSTGSTRSSQSASSLEVAGPGREPLELEVAVEALARLQQGVSATVAHLLDLAGSAGATGSWRSPSEPQEPLVQDLQAAVAAVQSAVHELLEFARSAVGNAAHTSDRALHAKLSRQLQKMEDVHQTLVAHGQALDAGRGGSGATLEDLDRLVACSRAVPEDAKQLASFLHGNASLLFRRTKATAPGPEGGGTLHPNPTDKTSSIQSRPLPSPPKFTSQDSPDGQYENSEGGWMEDYDYVHLQGKEEFEKTQKELLEKGSITRQGKSQLELQQLKQFERLEQEVSRPIDHDLANWTPAQPLAPGRTGGLGPSDRQLLLFYLEQCEANLTTLTNAVDAFFTAVATNQPPKIFVAHSKFVILSAHKLVFIGDTLSRQAKAADVRSQVTHYSNLLCDLLRGIVATTKAAALQYPSPSAAQDMVERVKELGHSTQQFRRVLGQLAAA

SEQ ID NO: 25099 - protein, 57 aa, Homo sapiens
  REGION 1..57: note = ENSP00000455166
MPAKPFLSSVLLSWKVLDFSGPGPQGTGQPCSCGHWAEGQGGPPEPAGGPVSQGSSD

SEQ ID NO: 25100 - protein, 722 aa, Homo sapiens
  REGION 1..722: note = ENSP00000440370
MQGKNVLAKALYDNVAESPDELSFRKGDIMTVLEQDTQGLDGWWLCSLHGRQGIVPGNRLKILVVVPTRVGQGYVYEAAQPEQDEYDIPRHLLAPGPQDIYDVPPVRGLLPSQYGQEVYDTPPMAVKGPNGRDPLLEVYDVPPSVEKGLPPSNHHAVYDVPPSVSKDVPDGPLLREETYDVPPAFAKAKPFDPARTPLVLAAPPPDSPPAEDVYDVPPPAPDLYDVPPGLRRPGPGTLYDVPRERVLPPEVADGGVVDSGVYAVPPPAEREAPAEGKRLSASSTGSTRSSQSASSLEVAGPGREPLELEVAVEALARLQQGVSATVAHLLDLAGSAGATGSWRSPSEPQEPLVQDLQAAVAAVQSAVHELLEFARSAVGNAAHTSDRALHAKLSRQLQKMEDVHQTLVAHGQALDAGRGGSGATLEDLDRLVACSRAVPEDAKQLASFLHGNASLLFRRTKATAPGPEGGGTLHPNPTDKTSSIQSRPLPSPPKFTSQDSPDGQYENSEGGWMEDYDYVHLQGKEEFEKTQKELLEKGSITRQGKSQLELQQLKQFERLEQEVSRPIDHDLANWTPAQPLAPGRTGGLGPSDRQLLLFYLEQCEANLTTLTNAVDAFFTAVATNQPPKIFVAHSKFVILSAHKLVFIGDTLSRQAKAADVRSQVTHYSNLLCDLLRGIVATTKAAALQYPSPSAAQDMVERVKELGHSTQQFRRVLGQLAAA

SEQ ID NO: 25101 - protein, 870 aa, Homo sapiens
  REGION 1..870: note = ENSP00000443841
MSVPNVLAKALYDNVAESPDELSFRKGDIMTVLEQDTQGLDGWWLCSLHGRQGIVPGNRLKILVGMYDKKPAGPGPGPPATPAQPQPGLHAPAPPASQYTPMLPNTYQPQPDSVYLVPTPSKAQQGLYQVPGPSPQFQSPPAKQTSTFSKQTPHHPFPSPATDLYQVPPGPGGPAQDIYQVPPSAGMGHDIYQVPPSMDTRSWEGTKPPAKVVVPTRVGQGYVYEAAQPEQDEYDIPRHLLAPGPQDIYDVPPVRGLLPSQYGQEVYDTPPMAVKGPNGRDPLLEVYDVPPSVEKGLPPSNHHAVYDVPPSVSKDVPDGPLLREETYDVPPAFAKAKPFDPARTPLVLAAPPPDSPPAEDVYDVPPPAPDLYDVPPGLRRPGPGTLYDVPRERVLPPEVADGGVVDSGVYAVPPPAEREAPAEGKRLSASSTGSTRSSQSASSLEVAGPGREPLELEVAVEALARLQQGVSATVAHLLDLAGSAGATGSWRSPSEPQEPLVQDLQAAVAAVQSAVHELLEFARSAVGNAAHTSDRALHAKLSRQLQKMEDVHQTLVAHGQALDAGRGGSGATLEDLDRLVACSRAVPEDAKQLASFLHGNASLLFRRTKATAPGPEGGGTLHPNPTDKTSSIQSRPLPSPPKFTSQDSPDGQYENSEGGWMEDYDYVHLQGKEEFEKTQKELLEKGSITRQGKSQLELQQLKQFERLEQEVSRPIDHDLANWTPAQPLAPGRTGGLGPSDRQLLLFYLEQCEANLTTLTNAVDAFFTAVATNQPPKIFVAHSKFVILSAHKLVFIGDTLSRQAKAADVRSQVTHYSNLLCDLLRGIVATTKAAALQYPSPSAAQDMVERVKELGHSTQQFRRVLGQLAAA

SEQ ID NO: 25102 - protein, 916 aa, Homo sapiens
  REGION 1..916: note = ENSP00000391669
MPAKPFLSSVLLSWKVLDFSGPGPQGTGQPCSCGHWAEGQGGPPEPAGGPNVLAKALYDNVAESPDELSFRKGDIMTVLEQDTQGLDGWWLCSLHGRQGIVPGNRLKILVGMYDKKPAGPGPGPPATPAQPQPGLHAPAPPASQYTPMLPNTYQPQPDSVYLVPTPSKAQQGLYQVPGPSPQFQSPPAKQTSTFSKQTPHHPFPSPATDLYQVPPGPGGPAQDIYQVPPSAGMGHDIYQVPPSMDTRSWEGTKPPAKVVVPTRVGQGYVYEAAQPEQDEYDIPRHLLAPGPQDIYDVPPVRGLLPSQYGQEVYDTPPMAVKGPNGRDPLLEVYDVPPSVEKGLPPSNHHAVYDVPPSVSKDVPDGPLLREETYDVPPAFAKAKPFDPARTPLVLAAPPPDSPPAEDVYDVPPPAPDLYDVPPGLRRPGPGTLYDVPRERVLPPEVADGGVVDSGVYAVPPPAEREAPAEGKRLSASSTGSTRSSQSASSLEVAGPGREPLELEVAVEALARLQQGVSATVAHLLDLAGSAGATGSWRSPSEPQEPLVQDLQAAVAAVQSAVHELLEFARSAVGNAAHTSDRALHAKLSRQLQKMEDVHQTLVAHGQALDAGRGGSGATLEDLDRLVACSRAVPEDAKQLASFLHGNASLLFRRTKATAPGPEGGGTLHPNPTDKTSSIQSRPLPSPPKFTSQDSPDGQYENSEGGWMEDYDYVHLQGKEEFEKTQKELLEKGSITRQGKSQLELQQLKQFERLEQEVSRPIDHDLANWTPAQPLAPGRTGGLGPSDRQLLLFYLEQCEANLTTLTNAVDAFFTAVATNQPPKIFVAHSKFVILSAHKLVFIGDTLSRQAKAADVRSQVTHYSNLLCDLLRGIVATTKAAALQYPSPSAAQDMVERVKELGHSTQQFRRVLGQLAAA

SEQ ID NO: 25103 - protein, 868 aa, Homo sapiens
  REGION 1..868: note = ENSP00000440415
MENVLAKALYDNVAESPDELSFRKGDIMTVLEQDTQGLDGWWLCSLHGRQGIVPGNRLKILVGMYDKKPAGPGPGPPATPAQPQPGLHAPAPPASQYTPMLPNTYQPQPDSVYLVPTPSKAQQGLYQVPGPSPQFQSPPAKQTSTFSKQTPHHPFPSPATDLYQVPPGPGGPAQDIYQVPPSAGMGHDIYQVPPSMDTRSWEGTKPPAKVVVPTRVGQGYVYEAAQPEQDEYDIPRHLLAPGPQDIYDVPPVRGLLPSQYGQEVYDTPPMAVKGPNGRDPLLEVYDVPPSVEKGLPPSNHHAVYDVPPSVSKDVPDGPLLREETYDVPPAFAKAKPFDPARTPLVLAAPPPDSPPAEDVYDVPPPAPDLYDVPPGLRRPGPGTLYDVPRERVLPPEVADGGVVDSGVYAVPPPAEREAPAEGKRLSASSTGSTRSSQSASSLEVAGPGREPLELEVAVEALARLQQGVSATVAHLLDLAGSAGATGSWRSPSEPQEPLVQDLQAAVAAVQSAVHELLEFARSAVGNAAHTSDRALHAKLSRQLQKMEDVHQTLVAHGQALDAGRGGSGATLEDLDRLVACSRAVPEDAKQLASFLHGNASLLFRRTKATAPGPEGGGTLHPNPTDKTSSIQSRPLPSPPKFTSQDSPDGQYENSEGGWMEDYDYVHLQGKEEFEKTQKELLEKGSITRQGKSQLELQQLKQFERLEQEVSRPIDHDLANWTPAQPLAPGRTGGLGPSDRQLLLFYLEQCEANLTTLTNAVDAFFTAVATNQPPKIFVAHSKFVILSAHKLVFIGDTLSRQAKAADVRSQVTHYSNLLCDLLRGIVATTKAAALQYPSPSAAQDMVERVKELGHSTQQFRRVLGQLAAA

SEQ ID NO: 25104 - protein, 888 aa, Homo sapiens
  REGION 1..888: note = ENSP00000392708
MLTHRPQEAEQRGRTPGPSFEWNVLAKALYDNVAESPDELSFRKGDIMTVLEQDTQGLDGWWLCSLHGRQGIVPGNRLKILVGMYDKKPAGPGPGPPATPAQPQPGLHAPAPPASQYTPMLPNTYQPQPDSVYLVPTPSKAQQGLYQVPGPSPQFQSPPAKQTSTFSKQTPHHPFPSPATDLYQVPPGPGGPAQDIYQVPPSAGMGHDIYQVPPSMDTRSWEGTKPPAKVVVPTRVGQGYVYEAAQPEQDEYDIPRHLLAPGPQDIYDVPPVRGLLPSQYGQEVYDTPPMAVKGPNGRDPLLEVYDVPPSVEKGLPPSNHHAVYDVPPSVSKDVPDGPLLREETYDVPPAFAKAKPFDPARTPLVLAAPPPDSPPAEDVYDVPPPAPDLYDVPPGLRRPGPGTLYDVPRERVLPPEVADGGVVDSGVYAVPPPAEREAPAEGKRLSASSTGSTRSSQSASSLEVAGPGREPLELEVAVEALARLQQGVSATVAHLLDLAGSAGATGSWRSPSEPQEPLVQDLQAAVAAVQSAVHELLEFARSAVGNAAHTSDRALHAKLSRQLQKMEDVHQTLVAHGQALDAGRGGSGATLEDLDRLVACSRAVPEDAKQLASFLHGNASLLFRRTKATAPGPEGGGTLHPNPTDKTSSIQSRPLPSPPKFTSQDSPDGQYENSEGGWMEDYDYVHLQGKEEFEKTQKELLEKGSITRQGKSQLELQQLKQFERLEQEVSRPIDHDLANWTPAQPLAPGRTGGLGPSDRQLLLFYLEQCEANLTTLTNAVDAFFTAVATNQPPKIFVAHSKFVILSAHKLVFIGDTLSRQAKAADVRSQVTHYSNLLCDLLRGIVATTKAAALQYPSPSAAQDMVERVKELGHSTQQFRRVLGQLAAA

SEQ ID NO: 25105 - protein, 888 aa, Homo sapiens
  REGION 1..888: note = ENSP00000377072
MNHLNVLAKALYDNVAESPDELSFRKGDIMTVLEQDTQGLDGWWLCSLHGRQGIVPGNRLKILVGMYDKKPAGPGPGPPATPAQPQPGLHAPAPPASQYTPMLPNTYQPQPDSVYLVPTPSKAQQGLYQVPGPSPQFQSPPAKQTSTFSKQTPHHPFPSPATDLYQVPPGPGGPAQDIYQVPPSAGMGHDIYQVPPSMDTRSWEGTKPPAKVVVPTRVGQGYVYEAAQPEQDEYDIPRHLLAPGPQDIYDVPPVRGLLPSQYGQEVYDTPPMAVKGPNGRDPLLEVYDVPPSVEKGLPPSNHHAVSKCQGNARARLRLWGVWVYDVPPSVSKDVPDGPLLREETYDVPPAFAKAKPFDPARTPLVLAAPPPDSPPAEDVYDVPPPAPDLYDVPPGLRRPGPGTLYDVPRERVLPPEVADGGVVDSGVYAVPPPAEREAPAEGKRLSASSTGSTRSSQSASSLEVAGPGREPLELEVAVEALARLQQGVSATVAHLLDLAGSAGATGSWRSPSEPQEPLVQDLQAAVAAVQSAVHELLEFARSAVGNAAHTSDRALHAKLSRQLQKMEDVHQTLVAHGQALDAGRGGSGATLEDLDRLVACSRAVPEDAKQLASFLHGNASLLFRRTKATAPGPEGGGTLHPNPTDKTSSIQSRPLPSPPKFTSQDSPDGQYENSEGGWMEDYDYVHLQGKEEFEKTQKELLEKGSITRQGKSQLELQQLKQFERLEQEVSRPIDHDLANWTPAQPLAPGRTGGLGPSDRQLLLFYLEQCEANLTTLTNAVDAFFTAVATNQPPKIFVAHSKFVILSAHKLVFIGDTLSRQAKAADVRSQVTHYSNLLCDLLRGIVATTKAAALQYPSPSAAQDMVERVKELGHSTQQFRRVLGQLAAA

SEQ ID NO: 25106 - protein, 238 aa, Homo sapiens
  REGION 1..238: note = ENSP00000454702
  VARIANT 1: note = Any amino acid
XPQFQSPPAKQTSTFSKQTPHHPFPSPATDLYQVPPGPGGPAQDIYQVPPSAGMGHDIYQVPPSMDTRSWEGTKPPAKVVVPTRVGQGYVYEAAQPEQDEYDIPRHLLAPGPQDIYDVPPVRGLLPSQYGQEVYDVPPSVSKDVPDGPLLREETYDVPPAFAKAKPFDPARTPLVLAAPPPDSPPAEDVYDVPPPAPDLYDVPPGLRRPGPGTLYDVPRERVLPPEVADGGVVDSGVY

SEQ ID NO: 25107 - protein, 135 aa, Homo sapiens
  REGION 1..135: note = ENSP00000456625
MTVLEQDTQGLDGWWLCSLHGRQGIVPGNRLKILVGMYDKKPAGPGPGPPATPAQPQPGLHAPAPPASQYTPMLPNTYQPQPDSVYLVPTPSKAQQGLYQVPGPSPQFQSPPAKQTSTFSKQTPHHPFPSPATDL

SEQ ID NO: 25108 - protein, 133 aa, Homo sapiens
  REGION 1..133: note = ENSP00000455810
MTVLEQDTQGLDGWWLCSLHGRQGIVPGNRLKILVGMYDKKPAGPGPGPPATPAQPQPGLHAPAPPASQYTPMLPNTYQPQPDSVYLVPTPSKAQQGLYQVPGPSPQFQSPPAKQTSTFSKQTPHHPFPSPAT

SEQ ID NO: 25109 - protein, 128 aa, Homo sapiens
  REGION 1..128: note = ENSP00000456929
MTVLEQDTQGLDGWWLCSLHGRQGIVPGNRLKILVGMYDKKPAGPGPGPPATPAQPQPGLHAPAPPASQYTPMLPNTYQPQPDSVYLVPTPSKAQQGLYQVPGPSPQFQSPPAKQTSTFSKQTPHHPF

SEQ ID NO: 25110 - protein, 120 aa, Homo sapiens
  REGION 1..120: note = ENSP00000458088
MTVLEQDTQGLDGWWLCSLHGRQGIVPGNRLKILVGMYDKKPAGPGPGPPATPAQPQPGLHAPAPPASQYTPMLPNTYQPQPDSVYLVPTPSKAQQGLYQVPGPSPQFQSPPAKQTSTFS

SEQ ID NO: 25111 - protein, 80 aa, Homo sapiens
  REGION 1..80: note = ENSP00000457457
MTVLEQDTQGLDGWWLCSLHGRQGIVPGNRLKILVGMYDKKPAGPGPGPPATPAQPQPGLHAPAPPASQYTPMLPNTYQP

SEQ ID NO: 25112 - protein, 58 aa, Homo sapiens
  REGION 1..58: note = ENSP00000457097
MTVLEQDTQGLDGWWLCSLHGRQGIVPGNRLKILVGMYDKKPAGPGPGPPATPAQPQP

SEQ ID NO: 25113 - protein, 50 aa, Homo sapiens
  REGION 1..50: note = ENSP00000457231
MTVLEQDTQGLDGWWLCSLHGRQGIVPGNRLKILVGMYDKKPAGPGPGPP

SEQ ID NO: 25114 - protein, 57 aa, Homo sapiens; identical to SEQ ID NO: 25099
  REGION 1..57: note = ENSP00000442161

SEQ ID NO: 25115 - protein, 476 aa, Homo sapiens
  REGION 1..476: note = ENSP00000396361
TLPVAAGPGQDTDKTPGHAPAQDKVLSAARDPTLLPPETGGAGGEAPSKPKDSSFFDKFFKLDKGQEKVPGDSQQEAKRAEHQDKVDEVPGLSGQSDDVPAGKDIVDGKEKEGQELGTADCSVPGDPEGLETAKDDSQAAAIAENNNSIMSFFKTLVSPNKAETKKDPEDTASKAESVCDGQAGQKTSEIQARGTKKKHLDSPRLGLAFRKFFRHKGAEKSPTTSADLKSDKANFTSQETQGAGKNSKGCNPSGHTQSVTTPEPAKEGTKEKSGPTSLPLGKLFWKKVVCESPVEIIKSKEVESALQTVDLNEGDAAPEPTEAKLKREESKPRTSLMAFLRQMTSDSTEKTITPPEPEPTGAPQKGKEGSSKDKKSAAEMNKQKSNKQEAKEPAQCTEQATVDTNSLQNGDKLQKRPEKRQQSLGGFFKGLGPKRMLDAQVQTDPVSIGPVGKSKYTGKCVFSHVKKKWPFQEWSY

SEQ ID NO: 25116 - protein, 506 aa, Homo sapiens
  REGION 1..506: note = ENSP00000360490
MGNQMSVPQRVEDQENEPEAETYQDNASALNGVPVVVSTHTVQHLEEVDLGISVKTDNVATSSPETTEISAVADANGKNLGKEAKPEAPAAKSRFFLMLSRPVPGRTGDQAADSSLGSVKLDVSSNKAPANKDPSESWTLPVAAGPGQDTDKTPGHAPAQDKVLSAARDPTLLPPETGGAGGEAPSKPKDSSFFDKFFKLDKGQEKVPGDSQQEAKRAEHQDKVDEVPGLSGQSDDVPAGKDIVDGKEKEGQELGTADCSVPGDPEGLETAKDDSQAAAIAENNNSIMSFFKTLVSPNKAETKKDPEDTGAEKSPTTSADLKSDKANFTSQETQGAGKNSKGCNPSGHTQSVTTPEPAKEGTKEKSGPTSLPLGKLFWKKSVKEDSVPTGAEENTSDSTEKTITPPEPEPTGAPQKGKEGSSKDKKSAAEMNKQKSNKQEAKEPAQCTEQATVDTNSLQNGDKLQKRPEKRQQSLGGFFKGLGPKRMLDAQVQTDPVSIGPVGKSK

SEQ ID NO: 25117 - protein, 584 aa, Homo sapiens
  REGION 1..584: note = ENSP00000379290
MGNQMSVPQRVEDQENEPEAETYQDNASALNGVPVVVSTHTVQHLEEVDLGISVKTDNVATSSPETTEISAVADANGKNLGKEAKPEAPAAKSRFFLMLSRPVPGRTGDQAADSSLGSVKLDVSSNKAPANKDPSESWTLPVAAGPGQDTDKTPGHAPAQDKVLSAARDPTLLPPETGGAGGEAPSKPKDSSFFDKFFKLDKGQEKVPGDSQQEAKRAEHQDKVDEVPGLSGQSDDVPAGKDIVDGKEKEGQELGTADCSVPGDPEGLETAKDDSQAAAIAENNNSIMSFFKTLVSPNKAETKKDPEDTGAEKSPTTSADLKSDKANFTSQETQGAGKNSKGCNPSGHTQSVTTPEPAKEGTKEKSGPTSLPLGKLFWKKSVKEDSVPTGAEENVVCESPVEIIKSKEVESALQTVDLNEGDAAPEPTEAKLKREESKPRTSLMAFLRQMSVKGDGGITHSEEINGKDSSCQTSDSTEKTITPPEPEPTGAPQKGKEGSSKDKKSAAEMNKQKSNKQEAKEPAQCTEQATVDTNSLQNGDKLQKRPEKRQQSLGGFFKGLGPKRMLDAQVQTDPVSIGPVGKSK

SEQ ID NO: 25118 - protein, 247 aa, Homo sapiens
  REGION 1..247: note = ENSP00000399936
  VARIANT 1: note = Any amino acid
XNNNSIMSFFKTLVSPNKAETKKDPEDTGAEKSPTTSADLKSDKANFTSQETQGAGKNSKGCNPSGHTQSVTTPEPAKEGTKEKSGPTSLPLGKLFWKKSVKEDSVPTGAEENSVKGDGGITHSEEINGKDSSCQTSDSTEKTITPPEPEPTGAPQKGKEGSSKDKKSAAEMNKQKSNKQEAKEPAQCTEQATVDTNSLQNGDKLQKRPEKRQQSLGGFFKGLGPKRMLDAQVQTDPVSIGPVGKSK

SEQ ID NO: 25119 - protein, 225 aa, Homo sapiens
  REGION 1..225: note = ENSP00000358554
MAGTGLVAGEVVVDALPYFDQGYEAPGVREAAAALVEEETRRYRPTKNYLSYLTAPDYSAFETDIMRNEFERLAARQPIELLSMKRYELPAPSSGQKNDITAWQECVNNSMAQLEHQAVRIENLELMSQHGCNAWKVYNENLVHMIEHAQKELQKLRKHIQDLNWQRKNMQLTAGSKLREMESNWVSLVSKNYEIERTIVQLENEIYQIKQQHGEANKENIRQDF

SEQ ID NO: 25120 - protein, 602 aa, Homo sapiens
  REGION 1..602: note = ENSP00000264381
MHSKVTIICIRFLFWFLLLCMLIGKSHTEDDIIIATKNGKVRGMNLTVFGGTVTAFLGIPYAQPPLGRLRFKKPQSLTKWSDIWNATKYANSCCQNIDQSFPGFHGSEMWNPNTDLSEDCLYLNVWIPAPKPKNATVLIWIYGGGFQTGTSSLHVYDGKFLARVERVIVVSMNYRVGALGFLALPGNPEAPGNMGLFDQQLALQWVQKNIAAFGGNPKSVTLFGESAGAASVSLHLLSPGSHSLFTRAILQSGSFNAPWAVTSLYEARNRTLNLAKLTGCSRENETEIIKCLRNKDPQEILLNEAFVVPYGTPLSVNFGPTVDGDFLTDMPDILLELGQFKKTQILVGVNKDEGTAFLVYGAPGFSKDNNSIITRKEFQEGLKIFFPGVSEFGKESILFHYTDWVDDQRPENYREALGDVVGDYNFICPALEFTKKFSEWGNNAFFYYFEHRSSKLPWPEWMGVMHGYEIEFVFGLPLERRDNYTKAEEILSRSIVKRWANFAKYGNPNETQNNSTSWPVFKSTEQKYLTLNTESTRIMTKLRAQQCRFWTSFFPKVLEMTGNIDEAEWEWKAGFHRWNNYMMDWKNQFNDYTSKKESCVGL

SEQ ID NO: 25121 - protein, 562 aa, Homo sapiens
  REGION 1..562: note = ENSP00000419505
MHSKVTIICIRFLFWFLLLCMLIGKSHTEDDIIIATKNGKVRGMNLTVFGGTVTAFLGIPYAQPPLGRLRFKKPQSLTKWSDIWNATKYANSCCQNIDQSFPGFHGSEMWNPNTDLSEDCLYLNVWIPAPKPKNATVLIWIYGGGFQTGTSSLHVYDGKFLARVERVIVVSMNYRVGALGFLALPGNPEAPGNMGLFDQQLALQWVQKNIAAFGGNPKSVTLFGESAGAASVSLHLLSPGSHSLFTRAILQSGSFNAPWAVTSLYEARNRTLNLAKLTGCSRENETEIIKCLRNKDPQEILLNEAFVVPYGTPLSVNFGPTVDGDFLTDMPDILLELGQFKKTQILVGVNKDEGTAFLVYGAPGFSKDNNSIITRKEFQEGLKIFFPGVSEFGKESILFHYTDWVDDQRPENYREALGDVVGDYNFICPALEFTKKFSEWGNNAFFYYFEHRSSKLPWPEWMGVMHGYEIEFVFGLPLERRDNYTKAEEILSRSIVKRWANFAKYGNPNETQNNSTSWPVFKSTEQKYLTLNTESTRIMTKLRAQQCRFWTSFFPKVLEMTG

SEQ ID NO: 25122 - protein, 525 aa, Homo sapiens
  REGION 1..525: note = ENSP00000419804
MHSKVTIICIRFLFWFLLLCMLIGKSHTEDDIIIATKNGKVRGMNLTVFGGTVTAFLGIPYAQPPLGRLRFKKPQSLTKWSDIWNATKYANSCCQNIDQSFPGFHGSEMWNPNTDLSEDCLYLNVWIPAPKPKNATVLIWIYGGGFQTGTSSLHVYDGKFLARVERVIVVSMNYRVGALGFLALPGNPEAPGNMGLFDQQLALQWVQKNIAAFGGNPKSVTLFGESAGAASVSLHLLSPGSHSLFTRAILQSGSFNAPWAVTSLYEARNRTLNLAKLTGCSRENETEIIKCLRNKDPQEILLNEAFVVPYGTPLSVNFGPTVDGDFLTDMPDILLELGQFKKTQILVGVNKDEGTAFLVYGAPGFSKDNNSIITRKEFQEGLKIFFPGVSEFGKESILFHYTDWVDDQRPENYREALGDVVGDYNFICPALEFTKKFSEWGNNAFFYYFEHRSSKLPWPEWMGVMHGYEIEFVFGLPLERRDNYTKAEEILSRSIVKRWANFAKYGCSSSTILNYVLETEPVVLI

SEQ ID NO: 25123 - protein, 132 aa, Homo sapiens
  REGION 1..132: note = ENSP00000418325
AVQFTGWSSSCILHFPEVLHDFHSLQTLPSLLQRIGNPNETQNNSTSWPVFKSTEQKYLTLNTESTRIMTKLRAQQCRFWTSFFPKVLEMTGNIDEAEWEWKAGFHRWNNYMMDWKNQFNDYTSKKESCVGL

SEQ ID NO: 25124 - protein, 120 aa, Homo sapiens
  REGION 1..120: note = ENSP00000418504
AVQFTGWSSSCILHFPEVLHDFHSLQTLPSLLQRIGNPNETQNNSTSWPVFKSTEQKYLTLNTESTRIMTKLRAQQCRFWTSFFPKVLEMTEPICCYCEPGTALAARAAQMKMTGSAYSQ

SEQ ID NO: 25125 - protein, 773 aa, Homo sapiens
  REGION 1..773: note = ENSP00000349300
MSRRKQGKPQHLSKREFSPEPLEAILTDDEPDHGPLGAPEGDHDLLTCGQCQMNFPLGDILIFIEHKRKQCNGSLCLEKAVDKPPSPSPIEMKKASNPVEVGIQVTPEDDDCLSTSSRGICPKQEHIADKLLHWRGLSSPRSAHGALIPTPGMSAEYAPQGICKDEPSSYTCTTCKQPFTSAWFLLQHAQNTHGLRIYLESEHGSPLTPRVGIPSGLGAECPSQPPLHGIHIADNNPFNLLRIPGSVSREASGLAEGRFPPTPPLFSPPPRHHLDPHRIERLGAEEMALATHHPSAFDRVLRLNPMAMEPPAMDFSRRLRELAGNTSSPPLSPGRPSPMQRLLQPFQPGSKPPFLATPPLPPLQSAPPPSQPPVKSKSCEFCGKTFKFQSNLVVHRRSHTGEKPYKCNLCDHACTQASKLKRHMKTHMHKSSPMTVKSDDGLSTASSPEPGTSDLVGSASSALKSVVAKFKSENDPNLIPENGDEEEEEDDEEEEEEEEEEEEELTESERVDYGFGLSLEAARHHENSSRGAVVGVGDESRALPDVMQGMVLSSMQHFSEAFHQVLGEKHKRGHLAEAEGHRDTCDEDSVAGESDRIDDGTVNGRGCSPGESASGGLSKKLLLGSPSSLSPFSKRIKLEKEFDLPPAAMPNTENVYSQWLAGYAASRQLKDPFLSFGDSRQSPFASSSEHSSENGSLRFSTPPGELDGGISGRSGTGSGGSTPHISGPGPGRPSSKEGRRSDTCSSHTPIRRSTQRAQDVWQFSDGSSRALKF

SEQ ID NO: 25126 - protein, 243 aa, Homo sapiens
  REGION 1..243: note = ENSP00000352648
MSRRKQGKPQHLSKREFSPEPLEAILTDDEPDHGPLGAPEGDHDLLTCGQCQMNFPLGDILIFIEHKRKQCNGSLCLEKAVDKPPSPSPIEMKKASNPVEVGIQVTPEDDDCLSTSSRGICPKQEHIADKLLHWRGLSSPRSAHGALIPTPGMSAEYAPQGICKDEPSSYTCTTCKQPFTSAWFLLQHAQNTHGLRIYLESEHGSPLTPRVLHTPPFGVVPRELKMCGSFRMEAREPLSSEKI

SEQ ID NO: 25127 - protein, 191 aa, Homo sapiens
  REGION 1..191: note = ENSP00000488390
MNFPLGDILIFIEHKRKQCNGSLCLEKAVDKPPSPSPIEMKKASNPVEVGIQVTPEDDDCLSTSSRGICPKQEHIADKLLHWRGLSSPRSAHGALIPTPGMSAEYAPQGICKDEPSSYTCTTCKQPFTSAWFLLQHAQNTHGLRIYLESEHGSPLTPRVLHTPPFGVVPRELKMCGSFRMEAREPLSSEKI

SEQ ID NO: 25128 - protein, 17 aa, Homo sapiens
  REGION 1..17: note = ENSP00000488636
  VARIANT 1: note = Any amino acid
XKKWHSDRVLNNDIKTE

SEQ ID NO: 25129 - protein, 167 aa, Homo sapiens
  REGION 1..167: note = ENSP00000488886
MSRRKQGKPQHLSKREFSPEPLEAILTDDEPDHGPLGAPEGDHDLLTCGQCQMNFPLGDILIFIEHKRKQCNGSLCLEKAVDKPPSPSPIEMKKASNPVEVGIQVTPEDDDCLSTSSRGICPKQEHIAGNPRGSSEKSPGCQCKGPALSPRRPSGKCTGLQLFPRPL

SEQ ID NO: 25130 - protein, 835 aa, Homo sapiens
  REGION 1..835: note = ENSP00000338774
MSRRKQGKPQHLSKREFSPEPLEAILTDDEPDHGPLGAPEGDHDLLTCGQCQMNFPLGDILIFIEHKRKQCNGSLCLEKAVDKPPSPSPIEMKKASNPVEVGIQVTPEDDDCLSTSSRGICPKQEHIADKLLHWRGLSSPRSAHGALIPTPGMSAEYAPQGICKDEPSSYTCTTCKQPFTSAWFLLQHAQNTHGLRIYLESEHGSPLTPRVGIPSGLGAECPSQPPLHGIHIADNNPFNLLRIPGSVSREASGLAEGRFPPTPPLFSPPPRHHLDPHRIERLGAEEMALATHHPSAFDRVLRLNPMAMEPPAMDFSRRLRELAGNTSSPPLSPGRPSPMQRLLQPFQPGSKPPFLATPPLPPLQSAPPPSQPPVKSKSCEFCGKTFKFQSNLVVHRRSHTGEKPYKCNLCDHACTQASKLKRHMKTHMHKSSPMTVKSDDGLSTASSPEPGTSDLVGSASSALKSVVAKFKSENDPNLIPENGDEEEEEDDEEEEEEEEEEEEELTESERVDYGFGLSLEAARHHENSSRGAVVGVGDESRALPDVMQGMVLSSMQHFSEAFHQVLGEKHKRGHLAEAEGHRDTCDEDSVAGESDRIDDGTVNGRGCSPGESASGGLSKKLLLGSPSSLSPFSKRIKLEKEFDLPPAAMPNTENVYSQWLAGYAASRQLKDPFLSFGDSRQSPFASSSEHSSENGSLRFSTPPGELDGGISGRSGTGSGGSTPHISGPGPGRPSSKEGRRSDTCEYCGKVFKNCSNLTVHRRSHTGERPYKCELCNYACAQSSKLTRHMKTHGQVGKDVYKCEICKMPFSVYSTLEKHMKKWHSDRVLNNDIKTE

SEQ ID NO: 25131 - protein, 801 aa, Homo sapiens
  REGION 1..801: note = ENSP00000351307
MSRRKQGKPQHLSKREFSPEPLEAILTDDEPDHGPLGAPEGDHDLLTCGQCQMNFPLGDILIFIEHKRKQCNGSLCLEKAVDKPPSPSPIEMKKASNPVEVGIQVTPEDDDCLSTSSRGICPKQEHIAGKDEPSSYTCTTCKQPFTSAWFLLQHAQNTHGLRIYLESEHGSPLTPRVGIPSGLGAECPSQPPLHGIHIADNNPFNLLRIPGSVSREASGLAEGRFPPTPPLFSPPPRHHLDPHRIERLGAEEMALATHHPSAFDRVLRLNPMAMEPPAMDFSRRLRELAGNTSSPPLSPGRPSPMQRLLQPFQPGSKPPFLATPPLPPLQSAPPPSQPPVKSKSCEFCGKTFKFQSNLVVHRRSHTGEKPYKCNLCDHACTQASKLKRHMKTHMHKSSPMTVKSDDGLSTASSPEPGTSDLVGSASSALKSVVAKFKSENDPNLIPENGDEEEEEDDEEEEEEEEEEEEELTESERVDYGFGLSLEAARHHENSSRGAVVGVGDESRALPDVMQGMVLSSMQHFSEAFHQVLGEKHKRGHLAEAEGHRDTCDEDSVAGESDRIDDGTVNGRGCSPGESASGGLSKKLLLGSPSSLSPFSKRIKLEKEFDLPPAAMPNTENVYSQWLAGYAASRQLKDPFLSFGDSRQSPFASSSEHSSENGSLRFSTPPGELDGGISGRSGTGSGGSTPHISGPGPGRPSSKEGRRSDTCEYCGKVFKNCSNLTVHRRSHTGERPYKCELCNYACAQSSKLTRHMKTHGQVGKDVYKCEICKMPFSVYSTLEKHMKKWHSDRVLNNDIKTE

SEQ ID NO: 25132 - protein, 142 aa, Homo sapiens
  REGION 1..142: note = ENSP00000487844
MSRRKQGKPQHLSKREFSPEPLEAILTDDEPDHGPLGAPEGDHDLLTCGQCQMNFPLGDILIFIEHKRKQCNGSLCLEKAVDKPPSPSPIEMKKASNPVEVGIQVTPEDDDCLSTSSRGICPKQEHIAAQTELEDVFVYLMV

SEQ ID NO: 25133 - protein, 894 aa, Homo sapiens
  REGION 1..894: note = ENSP00000349723
MSRRKQGNPQHLSQRELITPEADHVEAAILEEDEGLEIEEPSGLGLMVGGPDPDLLTCGQCQMNFPLGDILVFIEHKRKQCGGSLGACYDKALDKDSPPPSSRSELRKVSEPVEIGIQVTPDEDDHLLSPTKGICPKQENIAGPCRPAQLPAVAPIAASSHPHSSVITSPLRALGALPPCLPLPCCSARPVSGDGTQGEGQTEAPFGCQCQLSGKDEPSSYICTTCKQPFNSAWFLLQHAQNTHGFRIYLEPGPASSSLTPRLTIPPPLGPEAVAQSPLMNFLGDSNPFNLLRMTGPILRDHPGFGEGRLPGTPPLFSPPPRHHLDPHRLSAEEMGLVAQHPSAFDRVMRLNPMAIDSPAMDFSRRLRELAGNSSTPPPVSPGRGNPMHRLLNPFQPSPKSPFLSTPPLPPMPPGGTPPPQPPAKSKSCEFCGKTFKFQSNLIVHRRSHTGEKPYKCQLCDHACSQASKLKRHMKTHMHKAGSLAGRSDDGLSAASSPEPGTSELAGEGLKAADGDFRHHESDPSLGHEPEEEDEEEEEEEEELLLENESRPESSFSMDSELSRNRENGGGGVPGVPGAGGGAAKALADEKALVLGKVMENVGLGALPQYGELLADKQKRGAFLKRAAGGGDAGDDDDAGGCGDAGAGGAVNGRGGGFAPGTEPFPGLFPRKPAPLPSPGLNSAAKRIKVEKDLELPPAALIPSENVYSQWLVGYAASRHFMKDPFLGFTDARQSPFATSSEHSSENGSLRFSTPPGDLLDGGLSGRSGTASGGSTPHLGGPGPGRPSSKEGRRSDTCEYCGKVFKNCSNLTVHRRSHTGERPYKCELCNYACAQSSKLTRHMKTHGQIGKEVYRCDICQMPFSVYSTLEKHMKKWHGEHLLTNDVKIEQAERS

SEQ ID NO: 25134 - protein, 823 aa, Homo sapiens
  REGION 1..823: note = ENSP00000280435
MSRRKQGNPQHLSQRELITPEADHVEAAILEEDEGLEIEEPSGLGLMVGGPDPDLLTCGQCQMNFPLGDILVFIEHKRKQCGGSLGACYDKALDKDSPPPSSRSELRKVSEPVEIGIQVTPDEDDHLLSPTKGICPKQENIAGKDEPSSYICTTCKQPFNSAWFLLQHAQNTHGFRIYLEPGPASSSLTPRLTIPPPLGPEAVAQSPLMNFLGDSNPFNLLRMTGPILRDHPGFGEGRLPGTPPLFSPPPRHHLDPHRLSAEEMGLVAQHPSAFDRVMRLNPMAIDSPAMDFSRRLRELAGNSSTPPPVSPGRGNPMHRLLNPFQPSPKSPFLSTPPLPPMPPGGTPPPQPPAKSKSCEFCGKTFKFQSNLIVHRRSHTGEKPYKCQLCDHACSQASKLKRHMKTHMHKAGSLAGRSDDGLSAASSPEPGTSELAGEGLKAADGDFRHHESDPSLGHEPEEEDEEEEEEEEELLLENESRPESSFSMDSELSRNRENGGGGVPGVPGAGGGAAKALADEKALVLGKVMENVGLGALPQYGELLADKQKRGAFLKRAAGGGDAGDDDDAGGCGDAGAGGAVNGRGGGFAPGTEPFPGLFPRKPAPLPSPGLNSAAKRIKVEKDLELPPAALIPSENVYSQWLVGYAASRHFMKDPFLGFTDARQSPFATSSEHSSENGSLRFSTPPGDLLDGGLSGRSGTASGGSTPHLGGPGPGRPSSKEGRRSDTCEYCGKVFKNCSNLTVHRRSHTGERPYKCELCNYACAQSSKLTRHMKTHGQIGKEVYRCDICQMPFSVYSTLEKHMKKWHGEHLLTNDVKIEQAERS

SEQ ID NO: 25135 - protein, 700 aa, Homo sapiens
  REGION 1..700: note = ENSP00000387419
MSRRKQGNPQHLSQRELITRKDEPSSYICTTCKQPFNSAWFLLQHAQNTHGFRIYLEPGPASSSLTPRLTIPPPLGPEAVAQSPLMNFLGDSNPFNLLRMTGPILRDHPGFGEGRLPGTPPLFSPPPRHHLDPHRLSAEEMGLVAQHPSAFDRVMRLNPMAIDSPAMDFSRRLRELAGNSSTPPPVSPGRGNPMHRLLNPFQPSPKSPFLSTPPLPPMPPGGTPPPQPPAKSKSCEFCGKTFKFQSNLIVHRRSHTGEKPYKCQLCDHACSQASKLKRHMKTHMHKAGSLAGRSDDGLSAASSPEPGTSELAGEGLKAADGDFRHHESDPSLGHEPEEEDEEEEEEEEELLLENESRPESSFSMDSELSRNRENGGGGVPGVPGAGGGAAKALADEKALVLGKVMENVGLGALPQYGELLADKQKRGAFLKRAAGGGDAGDDDDAGGCGDAGAGGAVNGRGGGFAPGTEPFPGLFPRKPAPLPSPGLNSAAKRIKVEKDLELPPAALIPSENVYSQWLVGYAASRHFMKDPFLGFTDARQSPFATSSEHSSENGSLRFSTPPGDLLDGGLSGRSGTASGGSTPHLGGPGPGRPSSKEGRRSDTCEYCGKVFKNCSNLTVHRRSHTGERPYKCELCNYACAQSSKLTRHMKTHGQIGKEVYRCDICQMPFSVYSTLEKHMKKWHGEHLLTNDVKIEQAERS

SEQ ID NO: 25136 - protein, 894 aa, Homo sapiens; identical to SEQ ID NO: 25133
  REGION 1..894: note = ENSP00000349723

SEQ ID NO: 25137 - protein, 823 aa, Homo sapiens; identical to SEQ ID NO: 25134
  REGION 1..823: note = ENSP00000280435

SEQ ID NO: 25138 - protein, 700 aa, Homo sapiens; identical to SEQ ID NO: 25135
  REGION 1..700: note = ENSP00000387419

SEQ ID NO: 25139 - protein, 247 aa, Homo sapiens
  REGION 1..247: note = ENSP00000389345
MTILFLTMVISYFGCMKAAPMKEANIRGQGGLAYPGVRTHGTLESVNGPKAGSRGLTSLADTFEHVIEELLDEDQKVRPNEENNKDADLYTSRVMLSSQVPLEPPLLFLLEEYKNYLDAANMSMRVRRHSDPARRGELSVCDSISEWVTAADKKTAVDMSGGTVTVLEKVPVSKGQLKQYFYETKCNPMGYTKEGCRGIDKRHWNSQCRTTQSYVRALTMDSKKRIGWRFIRIDTSCVCTLTIKRGR

SEQ ID NO: 25140 - protein, 247 aa, Homo sapiens; identical to SEQ ID NO: 25139
  REGION 1..247: note = ENSP00000437138

SEQ ID NO: 25141 - protein, 262 aa, Homo sapiens
  REGION 1..262: note = ENSP00000379309
MQSREEEWFHQVRRVMTILFLTMVISYFGCMKAAPMKEANIRGQGGLAYPGVRTHGTLESVNGPKAGSRGLTSLADTFEHVIEELLDEDQKVRPNEENNKDADLYTSRVMLSSQVPLEPPLLFLLEEYKNYLDAANMSMRVRRHSDPARRGELSVCDSISEWVTAADKKTAVDMSGGTVTVLEKVPVSKGQLKQYFYETKCNPMGYTKEGCRGIDKRHWNSQCRTTQSYVRALTMDSKKRIGWRFIRIDTSCVCTLTIKRGR

SEQ ID NO: 25142 - protein, 247 aa, Homo sapiens; identical to SEQ ID NO: 25139
  REGION 1..247: note = ENSP00000432727

SEQ ID NO: 25143 - protein, 247 aa, Homo sapiens; identical to SEQ ID NO: 25139
  REGION 1..247: note = ENSP00000349084

SEQ ID NO: 25144 - protein, 247 aa, Homo sapiens; identical to SEQ ID NO: 25139
  REGION 1..247: note = ENSP00000400502

SEQ ID NO: 25145 - protein, 247 aa, Homo sapiens; identical to SEQ ID NO: 25139
  REGION 1..247: note = ENSP00000432376

SEQ ID NO: 25146 - protein, 247 aa, Homo sapiens; identical to SEQ ID NO: 25139
  REGION 1..247: note = ENSP00000435564

SEQ ID NO: 25147 - protein, 77 aa, Homo sapiens
  REGION 1..77: note = ENSP00000433003
MCGATSFLHECTRLILVTTQNAEFLQKGLQVHTCFGVYPHASVWHDCASQKKGCAVYLHVSVEFNKLIPENGFIKGW

SEQ ID NO: 25148 - protein, 247 aa, Homo sapiens; identical to SEQ ID NO: 25139
  REGION 1..247: note = ENSP00000379307

SEQ ID NO: 25149 - protein, 329 aa, Homo sapiens
  REGION 1..329: note = ENSP00000414303
MCGATSFLHECTRLILVTTQNAEFLQKGLQVHTCFGVYPHASVWHDCASQKKGCAVYLHVSVEFNKLIPENGFIKFHQVRRVMTILFLTMVISYFGCMKAAPMKEANIRGQGGLAYPGVRTHGTLESVNGPKAGSRGLTSLADTFEHVIEELLDEDQKVRPNEENNKDADLYTSRVMLSSQVPLEPPLLFLLEEYKNYLDAANMSMRVRRHSDPARRGELSVCDSISEWVTAADKKTAVDMSGGTVTVLEKVPVSKGQLKQYFYETKCNPMGYTKEGCRGIDKRHWNSQCRTTQSYVRALTMDSKKRIGWRFIRIDTSCVCTLTIKRGR

SEQ ID NO: 25150 - protein, 247 aa, Homo sapiens; identical to SEQ ID NO: 25139
  REGION 1..247: note = ENSP00000435805

SEQ ID NO: 25151 - protein, 247 aa, Homo sapiens; identical to SEQ ID NO: 25139
  REGION 1..247: note = ENSP00000379305

SEQ ID NO: 25152 - protein, 247 aa, Homo sapiens; identical to SEQ ID NO: 25139
  REGION 1..247: note = ENSP00000379302

SEQ ID NO: 25153 - protein, 247 aa, Homo sapiens; identical to SEQ ID NO: 25139
  REGION 1..247: note = ENSP00000432035

SEQ ID NO: 25154 - protein, 255 aa, Homo sapiens
  REGION 1..255: note = ENSP00000320002
MFHQVRRVMTILFLTMVISYFGCMKAAPMKEANIRGQGGLAYPGVRTHGTLESVNGPKAGSRGLTSLADTFEHVIEELLDEDQKVRPNEENNKDADLYTSRVMLSSQVPLEPPLLFLLEEYKNYLDAANMSMRVRRHSDPARRGELSVCDSISEWVTAADKKTAVDMSGGTVTVLEKVPVSKGQLKQYFYETKCNPMGYTKEGCRGIDKRHWNSQCRTTQSYVRALTMDSKKRIGWRFIRIDTSCVCTLTIKRGR

SEQ ID NO: 25155 - protein, 247 aa, Homo sapiens; identical to SEQ ID NO: 25139
  REGION 1..247: note = ENSP00000379304

SEQ ID NO: 25156 - protein, 247 aa, Homo sapiens; identical to SEQ ID NO: 25139
  REGION 1..247: note = ENSP00000389564

SEQ ID NO: 25157 - protein, 259 aa, Homo sapiens
  REGION 1..259: note = ENSP00000442793
MSFKRPCPLARYNRTSYFYPTFSESSEHSHLLVSPVLVASAVIGVVIILSCITIIVGSIRRDRQARLQRHRHRHHRHHHHHHHHRRRRHREYEHGYVSDEHTYSRSSRRMRYACSSSEDWPPPLDISSDGDVDATVLRELYPDSPPGYEECVGPGATQLYVPTDAPPPYSLTDSCPTLDGTSDSGSGHSPGRHQQEQRTPAQGGLHTVSMDTLPPYEAVCGAGPPSGLLPLPGPDPGPRGSQGSPTPTRAPASGPERIV

SEQ ID NO: 25158 - protein, 150 aa, Homo sapiens
  REGION 1..150: note = ENSP00000456822
MRYACSSSEDWPPPLDISSDGDVDATVLRELYPDSPPGYEECVGPGATQLYVPTDAPPPYSLTDSCPTLDGTSDSGSGHSPGRHQQEQRTPAQGGLHTVSMDTLPPYEAVCGAGPPSGLLPLPGPDPGPRGSQGSPTPTRAPASGPERIV

SEQ ID NO: 25159 - protein, 150 aa, Homo sapiens; identical to SEQ ID NO: 25158
  REGION 1..150: note = ENSP00000299694

SEQ ID NO: 25160 - protein, 208 aa, Homo sapiens
  REGION 1..208: note = ENSP00000455212
MRYACSSSEDWPPPLDISSDGDVDATVLRELYPDSPPGVSLSRLRWSAMMYTGSFTYWVRSMLSRHKLDAILGRLGYTATLESEFSLVQAISKENVKQMVFKIFLVRVSCEAVLRTAGTRMLEPGTEKLARTHSRHSSEKRLVKPCSCLEGVQPGPGSGGPQQGPSEGVGSETALAEGTAGQRSLPMALSPSEVSTAPNSLPSGSPVL

SEQ ID NO: 25161 - protein, 113 aa, Homo sapiens
  REGION 1..113: note = ENSP00000477843
MSFKRPCPCKFPPHILPPLGARQGQSLESSCRERLEVFGQRTAGVQPEANVACWVGRGQHGRPLTSARCSLRTENRTLAHSSVSALPEVWIGVPLRDVNGMTHTHTQIKDYMA

SEQ ID NO: 25162 - protein, 72 aa, Homo sapiens
  REGION 1..72: note = ENSP00000456430
MRYACSSSEDWPPPLDISSDGDVDATVLRELYPDSPPGQGLTQSPTLECNGMNIAHCSLELLGSSDPPTSAS

SEQ ID NO: 25163 - protein, 82 aa, Homo sapiens
  REGION 1..82: note = ENSP00000462088
  VARIANT 1: note = Any amino acid
XPLDISSDGDVDATVLRELYPDSPPGCTLGALPTGCDLCFPDTNWTPSWAGWATRPPWSLSSHWSRPSAKRMSSRWCSRSSW

SEQ ID NO: 25164 - protein, 208 aa, Homo sapiens; identical to SEQ ID NO: 25160
  REGION 1..208: note = ENSP00000483700

SEQ ID NO: 25165 - protein, 593 aa, Homo sapiens
  REGION 1..593: note = ENSP00000411124
MEKLSALQEQKGELRKRLSYTTHKLEKLETEFDSTRHYLEIELRRAQEELEKVTEKLRRIQSNYMALQRINQELEDKLYRMGQHYEEEKRALSHEIVALNSHLLEAKVTIDKLSEDNELYRKDCNLAAQLLQCSQTYGRVHKVSELPSDFQERVSLHMEKHGCSLPSPLCHPAYADSVPTCVIAKVLEKPDPASLSSRLSDASARDLAFCDGVEKPGPRPPYKGDIYCSDTALYCPEERRRDRRPSVDAPVTDVGFLRAQNSTDSAAEEEEEAEAAAFPAGFQHEAFPSYAGSLPTSSSYSSFSATSEEKEHAQASTLTASQQAIYLNSRDELFDRKPPATTYEGSPRFAKATAAVAAPLEAEVAPGFGRTMSPYPAETFRFPASPGPQQALMPPNLWSLRAKPGTARLPGEDMRGQWRPLSVEDIGAYSYPVSAAGRASPCSFSERYYGGAGGSPGKKADGRASPLYASYKADSFSEGDDLSQGHLAEPCFLRAGGDLSLSPGRSADPLPGYAPSEGGDGDRLGVQLCGTASSPEPEQGSRDSLEPSSMEASPEMHPAARLSPQQAFPRTGGSGLSRKDSLTKAQLYGTLLN

SEQ ID NO: 25166 - protein, 169 aa, Homo sapiens
  REGION 1..169: note = ENSP00000451125
MWTGGRRPGRLRRAASAADMEKLSALQEQKGELRKRLSYTTHKLEKLETEFDSTRHYLEIELRRAQEELEKVTEKLRRIQSNYMALQRINQELEDKLYRMGQHYEEEKRALSHEIVALNSHLLEAKVTIDKLSEDNELYRKDCNLAAQLLQCSQTYGRVHKVSELPSDF

SEQ ID NO: 25167 - protein, 167 aa, Homo sapiens
  REGION 1..167: note = ENSP00000450722
MEKLSALQEQKGELRKRLSYTTHKLEKLETEFDSTRHYLEIELRRAQEELEKVTEKLRRIQSNYMALQRINQELEDKLYRMGQHYEEEKRALSHEIVALNSHLLEAKVTIDKLSEDNELYRKDCNLAAQLLQCSQTYGRVHKVSELPSDFQERVSLHMEKHGCSLPS

SEQ ID NO: 25168 - protein, 174 aa, Homo sapiens
  REGION 1..174: note = ENSP00000452607
MALQRINQELEDKLYRMGQHYEEEKRALSHEIVALNSHLLEAKVTIDKLSEDNELYRKDCNLAAQLLQCSQTYGRVHKVSELPSDFQERVSLHMEKHGCSLPSPLCHPAYADSVPTCVIAKVLEKPDPASLSSRLSDASARDLAFCDGVEKPGPRPPYKGDIYCSDTALYCPEE

SEQ ID NO: 25169 - protein, 287 aa, Homo sapiens
  REGION 1..287: note = ENSP00000452157
MEKLSALQEQKGELRKRLSYTTHKLEKLETEFDSTRHYLEIELRRAQEELEKVTEKLRRIQSNYMALQRINQELEDKLYRMGQHYEEEKRALSHEIVALNSHLLEAKVTIDKLSEDNELYRKDCNLAAQLLQCSQTYGRVHKVSELPSDFQERVSLHMEKHGCSLPSPLCHPAYADSVPTCVIAKVLEKPDPASLSSRLSDASARDLAFCDGVEKPGPRPPYKGDIYCSDTALYCPEERRRDRRPSVDAPVTDVGFLRAQNSTDSAAEEEEEAEAAAFPAGFQHEAF

SEQ ID NO: 25170 - protein, 299 aa, Homo sapiens
  REGION 1..299: note = ENSP00000451397
MPSPSDCASAADMEKLSALQEQKGELRKRLSYTTHKLEKLETEFDSTRHYLEIELRRAQEELEKVTEKLRRIQSNYMALQRINQELEDKLYRMGQHYEEEKRALSHEIVALNSHLLEAKVTIDKLSEDNELYRKDCNLAAQLLQCSQTYGRVHKVSELPSDFQERVSLHMEKHGCSLPSPLCHPAYADSVPTCVIAKVLEKPDPASLSSRLSDASARDLAFCDGVEKPGPRPPYKGDIYCSDTALYCPEERRRDRRPSVDAPVTDVGFLRAQNSTDSAAEEEEEAEAAAFPAGFQHEAF

SEQ ID NO: 25171 - protein, 812 aa, Homo sapiens
  REGION 1..812: note = ENSP00000490571
MLSGASSQARGSNPTCPRQDGYSSLLEPGTEAPIKEAHRQDLRSHMPSPSQGRNPKGKASCHRWAARSSQEMARVSPAQPSSPESLNTGSRAVTGSLARLGRWREARLPFSRFLDEVTVRVLDPGTLEAFRVPRGRSPEPSAVDRGQGLAQEALTRAAAPGEKDPALSSQLSSEAATEAASRVGPGQAVGTSGPCLGSGKRGGRTASPWRSPGRASAADMEKLSALQEQKGELRKRLSYTTHKLEKLETEFDSTRHYLEIELRRAQEELEKVTEKLRRIQSNYMALQRINQELEDKLYRMGQHYEEEKRALSHEIVALNSHLLEAKVTIDKLSEDNELYRKDCNLAAQLLQCSQTYGRVHKVSELPSDFQERVSLHMEKHGCSLPSPLCHPAYADSVPTCVIAKVLEKPDPASLSSRLSDASARDLAFCDGVEKPGPRPPYKGDIYCSDTALYCPEERRRDRRPSVDAPVTDVGFLRAQNSTDSAAEEEEEAEAAAFPAGFQHEAFPSYAGSLPTSSSYSSFSATSEEKEHAQASTLTASQQAIYLNSRDELFDRKPPATTYEGSPRFAKATAAVAAPLEAEVAPGFGRTMSPYPAETFRFPASPGPQQALMPPNLWSLRAKPGTARLPGEDMRGQWRPLSVEDIGAYSYPVSAAGRASPCSFSERYYGGAGGSPGKKADGRASPLYASYKADSFSEGDDLSQGHLAEPCFLRAGGDLSLSPGRSADPLPGYAPSEGGDGDRLGVQLCGTASSPEPEQGSRDSLEPSSMEASPEMHPAARLSPQQAFPRTGGSGLSRKDSLTKAQLYGTLLN

SEQ ID NO: 25172 - protein, 593 aa, Homo sapiens; identical to SEQ ID NO: 25165
  REGION 1..593: note = ENSP00000347301

SEQ ID NO: 25173 - protein, 623 aa, Homo sapiens
  REGION 1..623: note = ENSP00000489826
MEKLRLRSPWVPLCLGQPRVLQGRLARSSPSIWDSALQEQKGELRKRLSYTTHKLEKLETEFDSTRHYLEIELRRAQEELEKVTEKLRRIQSNYMALQRINQELEDKLYRMGQHYEEEKRALSHEIVALNSHLLEAKVTIDKLSEDNELYRKDCNLAAQLLQCSQTYGRVHKVSELPSDFQERVSLHMEKHGCSLPSPLCHPAYADSVPTCVIAKVLEKPDPASLSSRLSDASARDLAFCDGVEKPGPRPPYKGDIYCSDTALYCPEERRRDRRPSVDAPVTDVGFLRAQNSTDSAAEEEEEAEAAAFPAGFQHEAFPSYAGSLPTSSSYSSFSATSEEKEHAQASTLTASQQAIYLNSRDELFDRKPPATTYEGSPRFAKATAAVAAPLEAEVAPGFGRTMSPYPAETFRFPASPGPQQALMPPNLWSLRAKPGTARLPGEDMRGQWRPLSVEDIGAYSYPVSAAGRASPCSFSERYYGGAGGSPGKKADGRASPLYASYKADSFSEGDDLSQGHLAEPCFLRAGGDLSLSPGRSADPLPGYAPSEGGDGDRLGVQLCGTASSPEPEQGSRDSLEPSSMEASPEMHPAARLSPQQAFPRTGGSGLSRKDSLTKAQLYGTLLN

SEQ ID NO: 25174 - protein, 143 aa, Homo sapiens
  REGION 1..143: note = ENSP00000449868
MRYVNLTSLLIFRSVSTAVYKRFPTMDHVVEAGFMTTDERKLFNHLKSPHLKYWVPFIWFGNLATKARNEGRIRDSVDLQSLMTEMNRYRSWCSLLFGYDWVGIPLVYTQVAEQLINPFGEDDDDFETNWCIDRNLQLWTKCT

SEQ ID NO: 25175 - protein, 398 aa, Homo sapiens
  REGION 1..398: note = ENSP00000329064
MTVTYSSKVANATFFGFHRLLLKWRGSIYKLLYREFIVFAVLYTAISLVYRLLLTGVQKRYFEKLSIYCDRYAEQIPVTFVLGFYVTLVVNRWWNQFVNLPWPDRLMFLISSSVHGSDEHGRLLRRTLMRYVNLTSLLIFRSVSTAVYKRFPTMDHVVEAGFMTTDERKLFNHLKSPHLKYWVPFIWFGNLATKARNEGRIRDSVDLQSLMTEMNRYRSWCSLLFGYDWVGIPLVYTQVVTLAVYTFFFACLIGRQFLDPTKGYAGHDLDLYIPIFTLLQFFFYAGWLKVAEQLINPFGEDDDDFETNWCIDRNLQVSLLAVDEMHMSLPKMKKDIYWDDSAARPPYTLAAADYCIPSFLGSTVQMGKQMPKNEWKMEDIKIPLPQPQFQCAKSDPGG

SEQ ID NO: 25176 - protein, 455 aa, Homo sapiens
  REGION 1..455: note = ENSP00000433213
MTTDERKLFNHLKSPHLKYWVPFIWFGNLATKARNEGRIRDSVDLQSLMTEMNRYRSWCSLLFGYDWVGIPLVYTQVAEQLINPFGEDDDDFETNWCIDRNLQVSLLAVDEMHMSLPKMKKDIYWDDSAARPPYTLAAADYCIPSFLGSTVQMGLSGSDFPDEEWLWDYEKHGHRHSMIRRVKRFLSAHEHPSSPRRRSYRRQTSDSSMFLPRDDLSPARDLLDVPSRNPPRASPTWKKSCFPEGSPTLHFSMGELSTIRETSQTSTLQSLTPQSSVRTSPIKMPLVPEVLITAAEAPVPTSGGYHHDSATSILSSEFTGVQPSKTEQQQGPMGSILSPSEKETPPGGPSPQTVSASAEENIFNCEEDPGDTFLKRWSLPGFLGSSHTSLGNLSPDPMSSQPALLIDTETSSEISGINIVAGSRVSSDMLYLMENLDTKETDIIELNKETEESPK

SEQ ID NO: 25177 - protein, 668 aa, Homo sapiens
  REGION 1..668: note = ENSP00000332413
MTVTYSSKVANATFFGFHRLLLKWRGSIYKLLYREFIVFAVLYTAISLVYRLLLTGVQKRYFEKLSIYCDRYAEQIPVTFVLGFYVTLVVNRWWNQFVNLPWPDRLMFLISSSVHGSDEHGRLLRRTLMRYVNLTSLLIFRSVSTAVYKRFPTMDHVVEAGFMTTDERKLFNHLKSPHLKYWVPFIWFGNLATKARNEGRIRDSVDLQSLMTEMNRYRSWCSLLFGYDWVGIPLVYTQVVTLAVYTFFFACLIGRQFLDPTKGYAGHDLDLYIPIFTLLQFFFYAGWLKVAEQLINPFGEDDDDFETNWCIDRNLQVSLLAVDEMHMSLPKMKKDIYWDDSAARPPYTLAAADYCIPSFLGSTVQMGLSGSDFPDEEWLWDYEKHGHRHSMIRRVKRFLSAHEHPSSPRRRSYRRQTSDSSMFLPRDDLSPARDLLDVPSRNPPRASPTWKKSCFPEGSPTLHFSMGELSTIRETSQTSTLQSLTPQSSVRTSPIKMPLVPEVLITAAEAPVPTSGGYHHDSATSILSSEFTGVQPSKTEQQQGPMGSILSPSEKETPPGGPSPQTVSASAEENIFNCEEDPGDTFLKRWSLPGFLGSSHTSLGNLSPDPMSSQPALLIDTETSSEISGINIVAGSRVSSDMLYLMENLDTKETDIIELNKETEESPK

SEQ ID NO: 25178 - protein, 562 aa, Homo sapiens
  REGION 1..562: note = ENSP00000449548
MFLISSSVHGSDEHGRLLRRTLMRYVNLTSLLIFRSVSTAVYKRFPTMDHVVEAGFMTTDERKLFNHLKSPHLKYWVPFIWFGNLATKARNEGRIRDSVDLQSLMTEMNRYRSWCSLLFGYDWVGIPLVYTQVVTLAVYTFFFACLIGRQFLDPTKGYAGHDLDLYIPIFTLLQFFFYAGWLKVAEQLINPFGEDDDDFETNWCIDRNLQVSLLAVDEMHMSLPKMKKDIYWDDSAARPPYTLAAADYCIPSFLGSTVQMGLSGSDFPDEEWLWDYEKHGHRHSMIRRVKRFLSAHEHPSSPRRRSYRRQTSDSSMFLPRDDLSPARDLLDVPSRNPPRASPTWKKSCFPEGSPTLHFSMGELSTIRETSQTSTLQSLTPQSSVRTSPIKMPLVPEVLITAAEAPVPTSGGYHHDSATSILSSEFTGVQPSKTEQQQGPMGSILSPSEKETPPGGPSPQTVSASAEENIFNCEEDPGDTFLKRWSLPGFLGSSHTSLGNLSPDPMSSQPALLIDTETSSEISGINIVAGSRVSSDMLYLMENLDTKETDIIELNKETEESPK

SEQ ID NO: 25179 - protein, 197 aa, Homo sapiens
  REGION 1..197: note = ENSP00000434713
MTTDERKLFNHLKSPHLKYWVPFIWFGNLATKARNEGRIRDSVDLQSLMTEMNRYRSWCSLLFGYDWVGIPLVYTQVAEQLINPFGEDDDDFETNWCIDRNLQVSLLAVDEMHMSLPKMKKDIYWDDSAARPPYTLAAADYCIPSFLGSTVQMGRSRFNPVPFAECLLIPISDGLWHFSSKGASEAENLSRPKEKED

SEQ ID NO: 25180 - protein, 161 aa, Homo sapiens
  REGION 1..161: note = ENSP00000447689
MFLISSSVHGSDEHGRLLRRTLMRYVNLTSLLIFRSVSTAVYKRFPTMDHVVEAGFMTTDERKLFNHLKSPHLKYWVPFIWFGNLATKARNEGRIRDSVDLQSLMTEMNRYRSWCSLLFGYDWVGIPLVYTQVAEQLINPFGEDDDDFETNWCIDRNLQVS

SEQ ID NO: 25181 - protein, 142 aa, Homo sapiens
  REGION 1..142: note = ENSP00000446575
MTVTYSSKVANATFFGFHRLLLKWRGSIYKLLYREFIVFAVLYTAISLVYRLLLTGVQKRYFEKLSIYCDRYAEQIPVTFVLGFMTTDERKLFNHLKSPHLKYWVPFIWFGNLATKARNEGRIRDSVDLQSLMTEMNRYRSW

SEQ ID NO: 25182 - protein, 72 aa, Homo sapiens
  REGION 1..72: note = ENSP00000266661
MFLISSSVHGSDEHGRLLRRTLMRYVNLTSLLIFRSVSTAVYKRFPTMDHVVEAERTGMKPILPSSFEMQSF

SEQ ID NO: 25183 - protein, 72 aa, Homo sapiens; identical to SEQ ID NO: 25182
  REGION 1..72: note = ENSP00000449377

SEQ ID NO: 25184 - protein, 368 aa, Homo sapiens
  REGION 1..368: note = ENSP00000327336
MWPLWRLVSLLALSQALPFEQRGFWDFTLDDGPFMMNDEEASGADTSGVLDPDSVTPTYSAMCPFGCHCHLRVVQCSDLGLKSVPKEISPDTTLLDLQNNDISELRKDDFKGLQHLYALVLVNNKISKIHEKAFSPLRKLQKLYISKNHLVEIPPNLPSSLVELRIHDNRIRKVPKGVFSGLRNMNCIEMGGNPLENSGFEPGAFDGLKLNYLRISEAKLTGIPKDLPETLNELHLDHNKIQAIELEDLLRYSKLYRLGLGHNQIRMIENGSLSFLPTLRELHLDNNKLARVPSGLPDLKLLQVVYLHSNNITKVGVNDFCPMGFGVKRAYYNGISLFNNPVPYWEVQPATFRCVTDRLAIQFGNYKK

SEQ ID NO: 25185 - protein, 238 aa, Homo sapiens
  REGION 1..238: note = ENSP00000402525
MWPLWRLVSLLALSQALPFEQRGFWDFTLDDGPFMMNDEEASGADTSGVLDPDSVTPTYSAMCPFGCHCHLRVVQCSDLGLKSVPKEISPDTTLLDLQNNDISELRKDDFKGLQHLYVRSWEEPAGLQQRAGVRALVLVNNKISKIHEKAFSPLRKLQKLYISKNHLVEIPPNLPSSLVELRIHDNRIRKVPKGVFSGLRNMNCIEMGGNPLENSGFEPGAFDGLKLNYLRISEAKLT

SEQ ID NO: 25186 - protein, 381 aa, Homo sapiens
  REGION 1..381: note = ENSP00000318799
MERGMHLGAAAAGEDDLFLHKSLSASTSKRLEAAFRSTPPGMDLSLAPPPRERPASSSSSPLGCFEPADPEGAGLLLPPPGGGGGGSAGSGGGGGGGVGVPGLLVGSAGVGGDPSLSSLPAGAALCLKYGESASRGSVAESSGGEQSPDDDSDGRCELVLRAGVADPRASPGAGGGGAKAAEGCSNAHLHGGASVPPGGLGGGGGGGSSSGSSGGGGGSGSGSGGSSSSSSSSSKKSKEQKALRLNINARERRRMHDLNDALDELRAVIPYAHSPSVRKLSKIATLLLAKNYILMQAQALEEMRRLVAYLNQGQAISAASLPSSAAAAAAAAALHPALGAYEQAAGYPFSAGLPPAASCPEKCALFNSVSSSLCKQCTEKP

SEQ ID NO: 25187 - protein, 412 aa, Homo sapiens
  REGION 1..412: note = ENSP00000256495
MERIPSAQPPPACLPKAPGLEHGDLPGMYPAHMYQVYKSRRGIKRSEDSKETYKLPHRLIEKKRRDRINECIAQLKDLLPEHLKLTTLGHLEKAVVLELTLKHVKALTNLIDQQQQKIIALQSGLQAGELSGRNVETGQEMFCSGFQTCAREVLQYLAKHENTRDLKSSQLVTHLHRVVSELLQGGTSRKPSDPAPKVMDFKEKPSSPAKGSEGPGKNCVPVIQRTFAHSSGEQSGSDTDTDSGYGGESEKGDLRSEQPCFKSDHGRRFTMGERIGAIKQESEEPPTKKNRMQLSDDEGHFTSSDLISSPFLGPHPHQPPFCLPFYLIPPSATAYLPMLEKCWYPTSVPVLYPGLNASAAALSSFMNPDKISAPLLMPQRLPSPLPAHPSVDSSVLLQALKPIPPLNLETKD

SEQ ID NO: 25188 - protein, 93 aa, Homo sapiens
  REGION 1..93: note = ENSP00000448933
MAAEEVLQTVDHYKTEIERLTKELTETTHEKIQAAEYGLVVLEEKLTLKQQYDELEAEYDSLKQELEQLKEVSCLSPLPFLALTPPTRKAHSS

SEQ ID NO: 25189 - protein, 79 aa, Homo sapiens
  REGION 1..79: note = ENSP00000447663
MAAEEVLQTVDHYKTEIERLTKELTETTHEKIQAAEYGLVVLEEKLTLKQQYDELEAEYDSLKQELEQLKEGPLLVRED

SEQ ID NO: 25190 - protein, 835 aa, Homo sapiens
  REGION 1..835: note = ENSP00000446793
MAAEEVLQTVDHYKTEIERLTKELTETTHEKIQAAEYGLVVLEEKLTLKQQYDELEAEYDSLKQELEQLKEAFGQSFSIHRKVAEDGETREETLLQESASKEAYYLGKILEMQNELKQSRAVVTNVQAENERLTAVVQDLKENNEMVELQRIRMKDEIREYKFREARLLQDYTELEEENITLQKLVSTLKQNQVEYEGLKHEIKRFEEETVLLNSQLEDAIRLKEIAEHQLEEALETLKNEREQKNNLRKELSQYISLNDNHISISVDGLKFAEDGSEPNNDDKMNGHIHGPLVKLNGDYRTPTLRKGESLNPVSDLFSELNISEIQKLKQQLMQVEREKAILLANLQESQTQLEHTKGALTEQHERVHRLTEHVNAMRGLQSSKELKAELDGEKGRDSGEEAHDYEVDINGLEILECKYRVAVTEVIDLKAEIKALKEKYNKSVENYTDEKAKYESKIQMYDEQVTSLEKTTKESGEKMAHMEKELQKMTSIANENHSTLNTAQDELVTFSEELAQLYHHVCLCNNETPNRVMLDYYRQSRVTRSGSLKGPDDPRGLLSPRLARRGVSSPVETRTSSEPVAKESTEASKEPSPTKTPTISPVITAPPSSPVLDTSDIRKEPMNIYNLNAIIRDQIKHLQKAVDRSLQLSRQRAAARELAPMIDKDKEALMEEILKLKSLLSTKREQIATLRAVLKANKQTAEVALANLKNKYENEKAMVTETMTKLRNELKALKEDAATFSSLRAMFATRCDEYVTQLDEMQRQLAAAEDEKKTLNTLLRMAIQQKLALTQRLEDLEFDHEQSRRSKGKLGKSKIGSPKIVSSLLPPYRHSAHN

SEQ ID NO: 25191 - protein, 975 aa, Homo sapiens
  REGION 1..975: note = ENSP00000281474
MAAEEVLQTVDHYKTEIERLTKELTETTHEKIQAAEYGLVVLEEKLTLKQQYDELEAEYDSLKQELEQLKEAFGQSFSIHRKVAEDGETREETLLQESASKEAYYLGKILEMQNELKQSRAVVTNVQAENERLTAVVQDLKENNEMVELQRIRMKDEIREYKFREARLLQDYTELEEENITLQKLVSTLKQNQVEYEGLKHEIKRFEEETVLLNSQLEDAIRLKEIAEHQLEEALETLKNEREQKNNLRKELSQYISLNDNHISISVDGLKFAEDGSEPNNDDKMNGHIHGPLVKLNGDYRTPTLRKGESLNPVSDLFSELNISEIQKLKQQLMQVEREKAILLANLQESQTQLEHTKGALTEQHERVHRLTEHVNAMRGLQSSKELKAELDGEKGRDSGEEAHDYEVDINGLEILECKYRVAVTEVIDLKAEIKALKEKYNKSVENYTDEKAKYESKIQMYDEQVTSLEKTTKESGEKMAHMEKELQKMTSIANENHSTLNTAQDELVTFSEELAQLYHHVCLCNNETPNRVMLDYYRQSRVTRSGSLKGPDDPRGLLSPRLARRGVSSPVETRTSSEPVAKESTEASKEPSPTKTPTISPVITAPPSSPVLDTSDIRKEPMNIYNLNAIIRDQIKHLQKAVDRSLQLSRQRAAARELAPMIDKDKEALMEEILKLKSLLSTKREQIATLRAVLKANKQTAEVALANLKNKYENEKAMVTETMTKLRNELKALKEDAATFSSLRAMFATRCDEYVTQLDEMQRQLAAAEDEKKTLNTLLRMAIQQKLALTQRLEDLEFDHEQSRRSKGKLGKSKIGSPKVSGEASVTVPTIDTYLLHSQGPQTPNIRVSSGTQRKRQFSPSLCDQSRPRTSGASYLQNLLRVPPDPTSTESFLLKGPPSMSEFIQGHRLSKEKRLTVAPPDCQQPAASVPPQCSQLAGRQDCPTVSPDTALPEEQPHSSSQCAPLHCLSKPPHP

SEQ ID NO: 25192 - protein, 827 aa, Homo sapiens
  REGION 1..827: note = ENSP00000379107
MAAEEVLQTVDHYKTEIERLTKELTETTHEKIQAAEYGLVVLEEKLTLKQQYDELEAEYDSLKQELEQLKEAFGQSFSIHRKVAEDGETREETLLQESASKEAYYLGKILEMQNELKQSRAVVTNVQAENERLTAVVQDLKENNEMVELQRIRMKDEIREYKFREARLLQDYTELEEENITLQKLVSTLKQNQVEYEGLKHEIKRFEEETVLLNSQLEDAIRLKEIAEHQLEEALETLKNEREQKNNLRKELSQYISLNDNHISISVDGLKFAEDGSEPNNDDKMNGHIHGPLVKLNGDYRTPTLRKGESLNPVSDLFSELNISEIQKLKQQLMQVEREKAILLANLQESQTQLEHTKGALTEQHERVHRLTEHVNAMRGLQSSKELKAELDGEKGRDSGEEAHDYEVDINGLEILECKYRVAVTEVIDLKAEIKALKEKYNKSVENYTDEKAKYESKIQMYDEQVTSLEKTTKESGEKMAHMEKELQKMTSIANENHSTLNTAQDELVTFSEELAQLYHHVCLCNNETPNRVMLDYYRQSRVTRSGSLKGPDDPRGLLSPRLARRGVSSPVETRTSSEPVAKESTEASKEPSPTKTPTISPVITAPPSSPVLDTSDIRKEPMNIYNLNAIIRDQIKHLQKAVDRSLQLSRQRAAARELAPMIDKDKEALMEEILKLKSLLSTKREQIATLRAVLKANKQTAEVALANLKNKYENEKAMVTETMTKLRNELKALKEDAATFSSLRAMFATRCDEYVTQLDEMQRQLAAAEDEKKTLNTLLRMAIQQKLALTQRLEDLEFDHEQSRRSKGKLGKSKIGSPKTIFTFPL

SEQ ID NO: 25193 - protein, 93 aa, Homo sapiens
  REGION 1..93: note = ENSP00000447238
MAAEEVLQTVDHYKTEIERLTKELTETTHEKIQAAEYGLVVLEEKLTLKQQYDELEAEYDSLKQELEQLKEGPLLLKDVIYDILNQLAFQFSV

SEQ ID NO: 25194 - protein, 69 aa, Homo sapiens
  REGION 1..69: note = ENSP00000475837
  VARIANT 1: note = Any amino acid
XSRQRAAARELAPMIDKDKEALMEEILKLKSLLSTKREQIATLRAVLKANKQAQCLLMKSVNAYEAPSI

SEQ ID NO: 25195 - protein, 173 aa, Homo sapiens
  REGION 1..173: note = ENSP00000481877
  VARIANT 1: note = Any amino acid
XAEVALANLKNKYENEKAMVTETMTKLRNELKALKEDAATFSSLRAMFATRCDEYVTQLDEMQRQLAAAEDEKKTLNTLLRMAIQQKLALTQRLEDLEFDHEQSRRSKGKLGKSKIGSPKVSGEASVTVPTIDTYLLHSQGPQTPNIRVSSGTQRKRYACSDLHSTVQWPDFS

SEQ ID NO: 25196 - protein, 855 aa, Homo sapiens
  REGION 1..855: note = ENSP00000349351
MSAPSEEEEYARLVMEAQPEWLRAEVKRLSHELAETTREKIQAAEYGLAVLEEKHQLKLQFEELEVDYEAIRSEMEQLKEAFGQAHTNHKKVAADGESREESLIQESASKEQYYVRKVLELQTELKQLRNVLTNTQSENERLASVAQELKEINQNVEIQRGRLRDDIKEYKFREARLLQDYSELEEENISLQKQVSVLRQNQVEFEGLKHEIKRLEEETEYLNSQLEDAIRLKEISERQLEEALETLKTEREQKNSLRKELSHYMSINDSFYTSHLHVSLDGLKFSDDAAEPNNDAEALVNGFEHGGLAKLPLDNKTSTPKKEGLAPPSPSLVSDLLSELNISEIQKLKQQLMQMEREKAGLLATLQDTQKQLEHTRGSLSEQQEKVTRLTENLSALRRLQASKERQTALDNEKDRDSHEDGDYYEVDINGPEILACKYHVAVAEAGELREQLKALRSTHEAREAQHAEEKGRYEAEGQALTEKVSLLEKASRQDRELLARLEKELKKVSDVAGETQGSLSVAQDELVTFSEELANLYHHVCMCNNETPNRVMLDYYREGQGGAGRTSPGGRTSPEARGRRSPILLPKGLLAPEAGRADGGTGDSSPSPGSSLPSPLSDPRREPMNIYNLIAIIRDQIKHLQAAVDRTTELSRQRIASQELGPAVDKDKEALMEEILKLKSLLSTKREQITTLRTVLKANKQTAEVALANLKSKYENEKAMVTETMMKLRNELKALKEDAATFSSLRAMFATRCDEYITQLDEMQRQLAAAEDEKKTLNSLLRMAIQQKLALTQRLELLELDHEQTRRGRAKAAPKTKPATPSVSHTCACASDRAEGTGLANQVFCSEKHSIYCD

SEQ ID NO: 25197 - protein, 824 aa, Homo sapiens
  REGION 1..824: note = ENSP00000364662
MSAPSEEEEYARLVMEAQPEWLRAEVKRLSHELAETTREKIQAAEYGLAVLEEKHQLKLQFEELEVDYEAIRSEMEQLKEAFGQAHTNHKKVAADGESREESLIQESASKEQYYVRKVLELQTELKQLRNVLTNTQSENERLASVAQELKEINQNVEIQRGRLRDDIKEYKFREARLLQDYSELEEENISLQKQVSVLRQNQVEFEGLKHEIKRLEEETEYLNSQLEDAIRLKEISERQLEEALETLKTEREQKNSLRKELSHYMSINDSFYTSHLHVSLDGLKFSDDAAEPNNDAEALVNGFEHGGLAKLPLDNKTSTPKKEGLAPPSPSLVSDLLSELNISEIQKLKQQLMQMEREKAGLLATLQDTQKQLEHTRGSLSEQQEKVTRLTENLSALRRLQASKERQTALDNEKDRDSHEDGDYYEVDINGPEILACKYHVAVAEAGELREQLKALRSTHEAREAQHAEEKGRYEAEGQALTEKVSLLEKASRQDRELLARLEKELKKVSDVAGETQGSLSVAQDELVTFSEELANLYHHVCMCNNETPNRVMLDYYREGQGGAGRTSPGGRTSPEARGRRSPILLPKGLLAPEAGRADGGTGDSSPSPGSSLPSPLSDPRREPMNIYNLIAIIRDQIKHLQAAVDRTTELSRQRIASQELGPAVDKDKEALMEEILKLKSLLSTKREQITTLRTVLKANKQTAEVALANLKSKYENEKAMVTETMMKLRNELKALKEDAATFSSLRAMFATRCDEYITQLDEMQRQLAAAEDEKKTLNSLLRMAIQQKLALTQRLELLELDHEQTRRGRAKAAPKTKPATPSL

SEQ ID NO: 25198 - protein, 1417 aa, Homo sapiens
  REGION 1..1417: note = ENSP00000347232
MAAVPQNNLQEQLERHSARTLNNKLSLSKPKFSGFTFKKKTSSDNNVSVTNVSVAKTPVLRNKDVNVTEDFSFSEPLPNTTNQQRVKDFFKNAPAGQETQRGGSKSLLPDFLQTPKEVVCTTQNTPTVKKSRDTALKKLEFSSSPDSLSTINDWDDMDDFDTSETSKSFVTPPQSHFVRVSTAQKSKKGKRNFFKAQLYTTNTVKTDLPPPSSESEQIDLTEEQKDDSEWLSSDVICIDDGPIAEVHINEDAQESDSLKTHLEDERDNSEKKKNLEEAELHSTEKVPCIEFDDDDYDTDFVPPSPEEIISASSSSSKCLSTLKDLDTSDRKEDVLSTSKDLLSKPEKMSMQELNPETSTDCDARQISLQQQLIHVMEHICKLIDTIPDDKLKLLDCGNELLQQRNIRRKLLTEVDFNKSDASLLGSLWRYRPDSLDGPMEGDSCPTGNSMKELNFSHLPSNSVSPGDCLLTTTLGKTGFSATRKNLFERPLFNTHLQKSFVSSNWAETPRLGKKNESSYFPGNVLTSTAVKDQNKHTASINDLERETQPSYDIDNFDIDDFDDDDDWEDIMHNLAASKSSTAAYQPIKEGRPIKSVSERLSSAKTDCLPVSSTAQNINFSESIQNYTDKSAQNLASRNLKHERFQSLSFPHTKEMMKIFHKKFGLHNFRTNQLEAINAALLGEDCFILMPTGGGKSLCYQLPACVSPGVTVVISPLRSLIVDQVQKLTSLDIPATYLTGDKTDSEATNIYLQLSKKDPIIKLLYVTPEKICASNRLISTLENLYERKLLARFVIDEAHCVSQWGHDFRQDYKRMNMLRQKFPSVPVMALTATANPRVQKDILTQLKILRPQVFSMSFNRHNLKYYVLPKKPKKVAFDCLEWIRKHHPYDSGIIYCLSRRECDTMADTLQRDGLAALAYHAGLSDSARDEVQQKWINQDGCQVICATIAFGMGIDKPDVRFVIHASLPKSVEGYYQESGRAGRDGEISHCLLFYTYHDVTRLKRLIMMEKDGNHHTRETHFNNLYSMVHYCENITECRRIQLLAYFGENGFNPDFCKKHPDVSCDNCCKTKDYKTRDVTDDVKSIVRFVQEHSSSQGMRNIKHVGPSGRFTMNMLVDIFLGSKSAKIQSGIFGKGSAYSRHNAERLFKKLILDKILDEDLYINANDQAIAYVMLGNKAQTVLNGNLKVDFMETENSSSVKKQKALVAKVSQREEMVKKCLGELTEVCKSLGKVFGVHYFNIFNTVTLKKLAESLSSDPEVLLQIDGVTEDKLEKYGAEVISVLQKYSEWTSPAEDSSPGISLSSSRGPGRSAAEELDEEIPVSSHYFASKTRNERKRKKMPASQRSKRRKTASSGSKAKGGSATCRKISSKTKSSSIIGSSSASHTSQATSGANSKLGIMAPPKPINRPFLKPSYAFS

SEQ ID NO: 25199 - protein, 1286 aa, Homo sapiens
  REGION 1..1286: note = ENSP00000454158
MAAVPQNNLQEQLERHSARTLNNKLSLSKPKFSGFTFKKKTSSDNNVSVTNVSVAKTPVLRNKDVNVTEDFSFSEPLPNTTNQQRVKDFFKNAPAGQETQRGGSKSLLPDFLQTPKEVVCTTQNTPTVKKSRDTALKKLEFSSSPDSLSTINDWDDMDDFDTSETSKSFVTPPQSHFVRVSTAQKSKKGKRNFFKAQLYTTNTVKTDLPPPSSESEQIDLTEEQKDDSEWLSSDVICIDDGPIAEVHINEDAQESDSLKTHLEDERDNSEKKKNLEEAELHSTEKVPCIEFDDDDYDTDFVPPSPEEIISASSSSSKCLSTLKDLDTSDRKEDVLSTSKDLLSKPEKMSMQELNPETSTDCDARQISLQQQLIHVMEHICKLIDTIPDDKLKLLDCGNELLQQRNIRRKLLTEVDFNKSDASLLGSLWRYRPDSLDGPMEGDSCPTGNSMKELNFSHLPSNSVSPGDCLLTTTLGKTGFSATRKNLFERPLFNTHLQKSFVSSNWAETPRLGKKNESSYFPGNVLTSTAVKDQNKHTASINDLERETQPSYDIDNFDIDDFDDDDDWEDIMHNLAASKSSTAAYQPIKEGRPIKSVSERLSSAKTDCLPVSSTAQNINFSESIQNYTDKSAQNLASRNLKHERFQSLSFPHTKEMMKIFHKKFGLHNFRTNQLEAINAALLGEDCFILMPTGGGKSLCYQLPACVSPGVTVVISPLRSLIVDQVQKLTSLDIPATYLTGDKTDSEATNIYLQLSKKDPIIKLLYVTPEKICASNRLISTLENLYERKLLARFVIDEAHCVSQWGHDFRQDYKRMNMLRQKFPSVPVMALTATANPRVQKDILTQLKILRPQVFSMSFNRHNLKYYVLPKKPKKVAFDCLEWIRKHHPYDSGIIYCLSRRECDTMADTLQRDGLAALAYHAGLSDSARDEVQQKWINQDGCQVICATIAFGMGIDKPDVRFVIHASLPKSVEGYYQESGRAGRDGEISHCLLFYTYHDVTRLKRLIMMEKDGNHHTRETHFNNLYSMVHYCENITECRRIQLLAYFGENGFNPDFCKKHPDVSCDNCCKTKDYKTRDVTDDVKSIVRFVQEHSSSQGMRNIKHVGPSGRFTMNMLVDIFLESLSSDPEVLLQIDGVTEDKLEKYGAEVISVLQKYSEWTSPAEDSSPGISLSSSRGPGRSAAEELDEEIPVSSHYFASKTRNERKRKKMPASQRSKRRKTASSGSKAKGGSATCRKISSKTKSSSIIGSSSASHTSQATSGANSKLGIMAPPKPINRPFLKPSYAFS

SEQ ID NO: 25200 - protein, 413 aa, Homo sapiens
  REGION 1..413: note = ENSP00000453359
MAAVPQNNLQEQLERHSARTLNNKLSLSKPKFSGFTFKKKTSSDNNVSVTNVSVAKTPVLRNKDVNVTEDFSFSEPLPNTTNQQRVKDFFKNAPAGQETQRGGSKSLLPDFLQTPKEVVCTTQNTPTVKKSRDTALKKLEFSSSPDSLSTINDWDDMDDFDTSETSKSFVTPPQSHFVRVSTAQKSKKGKRNFFKAQLYTTNTVKTDLPPPSSESEQIDLTEEQKDDSEWLSSDVICIDDGPIAEVHINEDAQESDSLKTHLEDERDNSEKKKNLEEAELHSTEKVPCIEFDDDDYDTDFVPPSPEEIISASSSSSKCLSTLKDLDTSDRKEDVLSTSKDLLSKPEKMSMQELNPETSTDCDGSHCVAQAGLELLDLSNPPALASPKGWDYSHEPPCLAKTFFFFPQRKILTT
